United States Patent Application Publication US 2007/0067865 A1 - sequence listing, part 39

SEQ ID NO: 243919 - DNA, 378 bp, Gossypium hirsutum
gttgaatttgaattcaaaatgtgggaaagctgcaaaatcgaaaagaaagaattttcaccagaaagagaagctgaacaggaatcccttgaggaggaagtggaatcaaaagtggagggtagtgagagtgttgatataaatggttcgacagaaaacattgatgatggcggaaactcaccatcaaagcaacagcaacagaaaaagaagaagccattactacgtaaattcggaagcctactgaagaagaagggaagcagcaaccagaagtagataaccaaaatcagccatggcatgatttagtccctaccaacagacaggtatattggatactatcttgcagctgaatgtgtttgcttaatttgctgatttgcttctaatgtt

SEQ ID NO: 243920 - DNA, 260 bp, Gossypium hirsutum
  unsure (1)..(260): unsure at all n locations
aaaaaataaatcggtgttgaagaacaacgtaaagagccatcgatcatcatctcagcagcatcacggtgatgtaatcacttgtgcaaagcctcagtcgaaacccaagattaagtctaagattaaatcatcaagaaaattatgacaaccgattttcattttttttttacatttttcctttactttttttttttgtattttcttttataatgtatgaaacatctcattttgttggtatatatttggctgcagattnccngnna

SEQ ID NO: 243921 - DNA, 420 bp, Gossypium hirsutum
  unsure (1)..(420): unsure at all n locations
ggaannacccgggntcggacccacgccgnntccgctcttggtcgtttttcacttatactnnctggccttcaaacctccttccgagcccttannnatctgcgttgatgaaggacatgagattgcccgatttggggttttaattcattnntcaagcgtcatcgcgagaaggtgcgagcctcaatttgaaaaatggtgcaattttatgtgatttcatgtgttcttagaacttcacacgttccctccagatggaaaccggggtttggagaaaaatcactgtattgccgttttgttattattgtcttgattgtttagtttaatcttttattctgatttctgcacgtagatttcagctcgtaatgctggtcacttggcaagcacgtattgcgccctagccatactaaagacaggtggctttaatct

SEQ ID NO: 243922 - DNA, 302 bp, Gossypium hirsutum
  unsure (1)..(302): unsure at all n locations
ggaaaacttgcgttgtgcgaggcaactggacgtgcgagcaagaacgtggagcaatgggacggttgctgcggcgtgaggacgtgtgtggcgcanggcaaactgcctaaggtttctgctgaactttttgggccactctgtaattgggctaggattaatagtttgggctttattgacttgggccttattgggccaaatgtatttgggccgttgttttatttttttatgcttatttatttgggcccgggcttaaaattgggtattacaattatattttagtaataatataaaaaatttattattna

SEQ ID NO: 243923 - DNA, 213 bp, Gossypium hirsutum
ctatctatgtatgcttttctctctgtctctctgctattgtccccccttctttacagatttgcgaaaggctttatagccttaaactactggctattttggaaaggaatcgggagaattcttggcctctttgaattcctttccttttcttgctctgccttttttgtgtatctgctgcttgtttccttttcttgcaggtgactcgcgaagatttcg

SEQ ID NO: 243924 - DNA, 282 bp, Gossypium hirsutum
gttgttccagcgccaggattgaggttgaagagctattgccacagtcacacggatataccgaacgtcagtttcttttgagaaaatctttagcaatccatattctgcggtgtaacttaggggaaatgcaacaggaccaagttcacagttgtataaaggatatcatgaagaaacgtgcgattcacattcactcgggaattctaaccctggcctctctctgcaatcagtcaggtgggcactaccctatagaaaaactatacgaaccatggtggcaataaagacatg

SEQ ID NO: 243925 - DNA, 276 bp, Gossypium hirsutum
caaatctgattatatgccacctattctcactacttaggggatctttactgggatcttgagcaataataacttgaatagttaggtgttactggctgtggtactgacaataaaacttgcttttgagcttgtgtcatagcctgcagagctgcattgttgggttgatattgcttttccgatagctgtgataccgagtggtgattctagtgctgactggtataataaaacttgtagcctaacgtgtatgtgtactgctgttattgctaatgatatggtaaa

SEQ ID NO: 243926 - DNA, 322 bp, Gossypium hirsutum
cccacgcgtccaccaaatctgacaaaatctaaaaaacgttttcaatctttcctttgcttgtgcttactttaaatccccttgtgctcattgatttttccctccatcgaattaccaaggcacaccacactcggtggccaacaacggctaaaaatgggtctttcaaccctgtttcaaagccatgttcggataagctgtctcttctactcttattttttttttttaaagaagatttatatatattttttaaagaagaaaacacaacacacaaaaatgatatttttgtttgaatcacaaggggagaaaactcccctattcttcgctt

SEQ ID NO: 243927 - DNA, 450 bp, Gossypium hirsutum
aaaagctttatactatatcccctaaaagctttgcaagtccggccactgtcgctccagcattgaacttggtgttcggtcatgcgcaaagttgagtctctaactccgctcaagccactcggagggttagttgctccacaacatcaagagaatgaagggagaaaacccaaccccctcccttgatccgaccttggaggaatcgaggctccaaacgacgaaccaaaggtcacgaagacgtggaggaggaacgggcctgggacgtgctacacgcgagctggggcgaacatgcgtaagggttgcagcatgtggtttacaacgtgggtgacctaaggtttcctaggttggttgtataaattttgagcaatgggtattgggtctgtttaatggaaattgaacctgtttcatttttttaggtttatttattttttggtgatttgggcctgggcaattttt

SEQ ID NO: 243928 - DNA, 323 bp, Gossypium hirsutum
aaacccgggtgcgacccacgccgtccgcgagacgccgtgggcctggtacttatccataacctttggcaagaacatgttctgggcatggcgcgtggttgtgatctaagtgtgctgcttctctagtggaggtaggatattgctgagaaagatggcatgtcccagcatggtcaacgttcttccaatcaccacattggggtttcctctcaaagaagcttgctggtttacactgaagttgcttgaactgtttggtccactgattttatgatgagtcgattatctgctagggagacattctaggtccatagtggttcaagtgtgatttg

SEQ ID NO: 243929 - DNA, 427 bp, Gossypium hirsutum
cgaggtcccttctttacttaacctcgaaccagttgggaaggcatatatgatggggggtgttcaggaacttcggttgggacccaaaacaaggcgagagtaatctggattttagtatgcttcatctaagaaaatgaaggaaatagggacgttctttggtaataggacaaaggcttcaatggttagaaccttgaaacaaagcatggaacaaatctatatcaattccaagtgcttttaatagaagaggcttttgagaaatgtagcttttacgaggtcccttctttacttaacctcgaaccagatggtgctttttcaaaaagaatggtcgaatctgaccatcaaattctatctgcttaggtgattatcatacttcaccgctgcttatctcttatgttaatcggattcacgtgtgagtttcagatattttatg

SEQ ID NO: 243930 - DNA, 215 bp, Gossypium hirsutum
atcctagcatggcggataagcaaagcctttgtatccatctaaatccgaaaataaagaagggggggtgcatgaatcgactcacattcagaaaaaaaaagaaaaacagaaggtcctgtcaaaactgtgagcataggccttacaaaaggcatcattgggacggtctgggcttaagaagagcggcatgaaatgatgtgtttttaaaacctgaactaaac

SEQ ID NO: 243931 - DNA, 338 bp, Gossypium hirsutum
atccatgcaaggcggcaaagctaaaacttttaagcaacctaaatactataacaacgagtgcggggggcatgattatggctaacattcagaacaagaaagaagaagataaggtccttaaagagctcatagcaaaggcattacacaagggatcatctggtggtactggtcttaagaaaattggcatgaaatgaggcatttaaaaacctcaactaaaccgaacttattgagacatgtcttgggattaaaacatatattatgctaatgtctcttcgctcaattgtgattgtattgatgattagatggactagattcattccgagtttgctataaaaaacatt

SEQ ID NO: 243932 - DNA, 393 bp, Gossypium hirsutum
cgttctcctggtccatggtcttctcttatgagaagatcacctgatggatttgggggccgttgggaattacctcatcgaagatcaccaccactttacaggatggagagaataaggtcacctgatcgtccttgttttgctggcgaaatgggtgttagaaggcatggatctccaccatatttgcctcaaccctctaatgatttgagagacctggatcccagtcgagatcatggtcatccaagatctggcatctctaataagagcccatctggtcgaattttacttagaaacagtagaaggttggatcttgtagatcctcgagaaaagaatgaatgtgacgattactttggtgggcctatgccctctggcaaggttcatgatctttgaactgatggg

SEQ ID NO: 243933 - DNA, 405 bp, Gossypium hirsutum
  unsure (1)..(405): unsure at all n locations
gcagaacaacatatacagtaggcccgagttaatgatgttcgtataaattgctggggtggggggcagatatcacttttggactgattttattggactttgaatgttctcctttactactgctgtaggtagttaaaaaattagaactcttaggcctataatgggattgtgacattgtttattagtattaattttggactgtgtgatgtaattgcatgctatgaaatgaaatgattatatggcaaaccaacaaaaaaaaacccaaaaaccgaccgtaaaatttttattcctcctatcagaagaggaattttttcttccacccctccaaaaataaattcaaaganggggggcggcccgtttaaagaatccaaactaacttccgcttccttgcgacatgatatctttttt

SEQ ID NO: 243934 - DNA, 450 bp, Gossypium hirsutum
aaatcctccgccgtcggcgccgcctcatcatcatcagcaatgaaagaaagggtaaaatgcgggggcatattcggtggtttcataatcacatcatcatcgtcttcctcctcctcatcttcatactggttatcgtcatcagcggaggagcataacgggaatgggaaagcaacaggagcagcgctgatccatgggaggagcaggagttggggatgggcatttgcaagccccatgagagcattcaccaaaccatcctctggtaagaaagatgctaccaccgtcattagagaatcaaacaacaaaaacacaactcccaatctggctgccattccttccttattagctgttagaagctaaaaatgattccagttaatacgcattacattggcttaattattattacctgtttatttccatgtttattatcatctgttcttaagagactctattcct

SEQ ID NO: 243935 - DNA, 397 bp, Gossypium hirsutum
  unsure (1)..(397): unsure at all n locations
gcagaaanagaaccgtccaacggcaccgagctagagacgccgcgcgaggggactgttggcgcgcggtgtggtggttcgtccgtatcacatggctggttacctggtgatattccacgaagccttctggcccttgcttttgagtaccgaacctgcttaggagcaccacgactatgtgctgtggcgcctgatctagcaacattgggatttgggcttagggnnttagtcttagaattgggcccacctgtgaatacgggcttagggattttaggttttgggccttttatnttgggtgttgggttttgtactancgcttactataatttggggttaatgggttttgaaatttggaatgtaagtggactgttaaagtttggactttttatttttattttnnaaa

SEQ ID NO: 243936 - DNA, 318 bp, Gossypium hirsutum
gaatacggggccgacccacgcgtacgctctattacattccatcaccagactatgattataaacaaatctgaatgccactgggggaagcattattttacaccaaattactccttctatgcaacttatctatccaaagcacatatcatcacatcttactgatatttcatataaaaatacctatcctcagatactatcaacttcaagtgcactactatgcccaacaaaaaaattaaaataaatcagcctctagatctattacatattaacgcatattagcttatctaaaaactctaaaaaatttttattgataatatttac

SEQ ID NO: 243937 - DNA, 307 bp, Gossypium hirsutum
cggacgcgttgtctgacgctcggactgttttttatcacacttatgcaactaaaaacctggaagggagtgtttcaacctgttttattgaacctagatcatgttatctcatgatttcaacttcataattgtttacctaacataatctattaggcatacaactgagatatatggatgaacgtttcatgatgtttattgtgtcattgcagttaggaaggttaaacttcattcttggtctgtgatcacattgcttcctgtggatggttatgatgcttaaacgttccatcatgttttggccttattgaatgtg

SEQ ID NO: 243938 - DNA, 391 bp, Gossypium hirsutum
tctccactcctcccaatgatactcttgtcattacaccccaacaagataccctcctgcggggctgtgacttaatacgagacccacaccacaacacttctaaacaagccgtataacgtcgatccccaacgatattttctacaacataatgacaatcgatcttccgctctttctcatgctggatacaacctgattaacaagctccttacctatgaccctgctaaaagaataacatcagatgatgctcttaatcatgatgctttcccggagctttctctgtcaaaatctaattatttcttacctacttttccaccaaaactgttaattgaacacttttcttggctcatttggcgaaacctgacacaacccaaaaatttttacccccattttacct

SEQ ID NO: 243939 - DNA, 346 bp, Gossypium hirsutum
gttctcaataattacagaccaggataaggttcaaatgtctaaagttatgatgggggggatgcttgcaaagagcttgcaagccccggatgtagtgtttgaaaaggtatggcgtgctgtttatttagcttttataggggttgtgtttggggggagtggtgtcttccgttgaaagttggcggaaaatgccctccggctagttttggctgtgacacgcagcggtttacttactgaaaaggttttgaaaacaccacaggtgtttttaaaaacacctacactttctgtccacaagcacgggccttggtatattaccccgattggcaatatgtgattgttttttttggatccc

SEQ ID NO: 243940 - DNA, 252 bp, Gossypium hirsutum
  unsure (1)..(252): unsure at all n locations
aaaaaagaancgaccgcacgcgtacgggacatggagcacttgaacctctttaaaaatattctttttatgcttttttctangcctcccgtcttaatgccgttcttgtaaatggaaaggaattaacataccgtagttacccatcgaaagcagccactgtttctcctgttcttggttgaaatgccagccaagtagatttagctgtaccgaattttctttaattttagaaaatgcgatacgctggtttcatgaaaa

SEQ ID NO: 243941 - DNA, 380 bp, Gossypium hirsutum
attgtcaaaaatgcttcaatctaaaagaagatcatcatgacaagcttaactaatgtggggagtgttatataataaacagaacatgttatcagatgttatacataatcaaaacctcaaatgatacgctttgcaatgcaagaactttagactctatataatacatatgttctgcttcgaagaatggataatgtaatgcaaccattcttacaaactaacacatttgacttacctctatgattatctatccattatgactaccgatttgcaagtgtaagttggtggaatgtttatgggtttacttcaaatttcatctttctttgtttgattattgagtgatagcaataattcattccgaacttatgtaaacttttgcctttttt

SEQ ID NO: 243942 - DNA, 395 bp, Gossypium hirsutum
  unsure (1)..(395): unsure at all n locations
gaaggaanaccgggccgacccacgcgtacgacacgcgtacgattgtcatgttaagggctttggtgttaacggcttaacggtttgttgggtatacatggatatgcgacgattgatccattcttgactttatgagggtagattttcgcgaggagggttgggagtcttagtcgttttatattaaaatgttctcattttaagatatggaattattgatttgggcgtgggactatattgtgggagatgttgcatcttgttaatttgaacattcttcgcttttgcttattgtgtattaattaagcaaaaaaaaaaagataatttgtaccattttagtcgttatcaaaaaataaaaattatatgttctttggataaaaaaaaaaaaaaaaaaaaaaggccgc

SEQ ID NO: 243943 - DNA, 451 bp, Gossypium hirsutum
  unsure (1)..(451): unsure at all n locations
gaaaaaagggcgacccacgcgtacgagngctggtacagagatagngaanattttttgtttctggatggcataaaaatgttcggtaggtgatttatttgtgaaaagtgagaaaaatattctggtaaaagtggcagtttagcctttattttttaaaaaggttgaatctattcaatgcttttctcttctcctgcccttgacagcacattcatttgaaaggataatttggaaaccctgttgcaagagaaggacattcaggctaatcttgtctattgcttgcagcatttgcagttaagatatgaaactgaagacaaagcaaggagacttctaaataatgtgtcatttttgttgaaaccaatggggtatttttttggtattactcctgacttatataccatattgtattcaaaaatgattggcttccncaaaaaattctaatattttatatattttt

SEQ ID NO: 243944 - DNA, 147 bp, Gossypium hirsutum
ttaagcaaaaccctatccactctcttctcaactccccaatgggggcttataaccacgtggcggatctattgaagaagaaccactcccccggcatgaggtttttacacacggtgaggcgctgggaataccgcctgcatcttttctatt

SEQ ID NO: 243945 - DNA, 257 bp, Gossypium hirsutum
  unsure (1)..(257): unsure at all n locations
cccacgcgtncgcccacgcgtccgcccacgcgtacggcaataatgaaatatttatgtggtgtataaaccaccctttcactagctttaacaaccctagcaaaaattacaaggtttgctcagttatcactactcatttttgtgacaaaaactacactcataaagctaatcatctatcagatgcctgcaaaaaatgcaatcattcacttaaagcatatagtgcaaatgctgctattgatttatcaatttttttgaattac

SEQ ID NO: 243946 - DNA, 340 bp, Gossypium hirsutum
  unsure (1)..(340): unsure at all n locations
ccaacattcaatagaccacagcaccttaatttcgggagataatcgagaagtggaacatggtttatctgttaaactgcaagttcaaaagctaataatccaagctacttcccatgaaaatttatgccagaactatgttgggtggtgtcccttttggtgaagaaaaacaaatgtatattttgtataaaacctgtacatatctgtatttaatgtaaatatattgttttctttttcattcttctttctctgttagtattgaagataaaataaaattattgtggtaaatctatttatcacattgaattaagttatcaatttcatttttcccatgccaaacangnna

SEQ ID NO: 243947 - DNA, 252 bp, Gossypium hirsutum
cggacgcgtggggatgtcttagctttttcttacaagattctcttttaactctttttttgttttcttttattgttcctctctctgctgctaagatccttttcagacttgctcttcttcattgctaagaaaattgtgtaggcttatatctggattatcccatcacatggcttttacttttactgttattattctaatgatcgaagtaaagaaattcttgatgtggtactggtattattacacatacaagattgg

SEQ ID NO: 243948 - DNA, 296 bp, Gossypium hirsutum
atcgattccaagtttgtggatcggttagtgaaaattggtggcattgttgctatgcaattaggtgatgaaatctcaccaggttttcaaaaccatccggttatattaatgggtatcttaagaaatatcattccaccattggtgcaatgaaaaagcttggttcaaagaaccatttattggattcttcagctaaaaggaaagcttttcagttaacaacggaagctaaaaaggcagcattgagtggtttggagatgtttgttgaaccaccagaaagctggctaatacatctactgagaaat

SEQ ID NO: 243949 - DNA, 158 bp, Gossypium hirsutum
aacaagtagaaggtaaaagttttattatacattgagatgcgctcaaggggggctactagggtatgcagtgccgcaaacatgcaaggaaaaccgtggattctacaacaggccatggatagtataaactgtgtttaggtgaagataaatgtgtcatggca

SEQ ID NO: 243950 - DNA, 419 bp, Gossypium hirsutum
cggacgcgtgggtagtattatcgtgtaagtcttaatgttcataagaatttaaaagatgttctccatggtcgtcagctcgttttttcttgctggaccgaaagggagaaatttgttagcgtccataatagttccatagcttttgtaatttgaatcctattaatgttatttatggtccttttcccttgtctgaaataaaaacttagacaagatgaaaatgaaggccaataaaattactgataccatcaagatctatataatcaaggtcccaaaacaatgaatacactgatatctatatctggggcggcccttttaaagtaccaaactttagttacccgtgattgctacgtaataaatttcctatagggcaacttaaatcaaattgacagcccgggattttacaacgtcttgactggaaaaac

SEQ ID NO: 243951 - DNA, 341 bp, Gossypium hirsutum
cgaaaagtgtgaaaatgaccttaactcaagcagaccctgcatggacagggctctctcttctaacggagaaaccgacgctaatgatcttcggtagatacactacaatatacggagtcgcttatgttatactatccattcaaattataaacagatgttggagcatgcgtatgaaacctaagactgaattgaggaaggaactaaagtaaactgctaataaacggttattccacgaacgctagaccctcgaacggcatgtctatcgttcggtagaacaaaattttgaagaccaactctatcatagcggtgatgtttcatatatactgatgtaaaaaattgtcggg

SEQ ID NO: 243952 - DNA, 426 bp, Gossypium hirsutum
ctcttttaatcctaggaaaaaaacttcgtttatggactttaatttcgtttttttttgttgttgcaggattcagttacagctgaaggagcaaaagtttctgaggaagggataatagaaacgtttgaaaatgacgatgaagctttggatgcattcgataatgtcttggtggttatggacctttcacattttggaaggttaagagtcagtggagatgataggattcagtttcttcataatcaaaccactgccaattttgaatgtcttagtgaagggcagggatgtgaaaccgttttcgttacgccgactgcaaggacgattgatattgcttatgcttggattatgaagaaggcagttttattggtgctttcaccagagacatgtggaaacataactgaaatgctcaataagtacatattttttgcggat

SEQ ID NO: 243953 - DNA, 288 bp, Gossypium hirsutum
  unsure (1)..(288): unsure at all n locations
gaangggcggggcgacccacgcgtacggttcaattctttcattccttgtttaccttctaagccaaacgaattcgggtggtgtttaaaaatggcgccaaatgctgaaaaaaggccagtcgataagacccctgcagcggaacaataaggctgggttcataaatgggtgtcagagcctaactctaatgctgcggaaccgcttcctatgggaggccgatcgcttgtcggagacacgactaagttttgagggacttatagtgagttggcaatgaagcactacataggccttgt

SEQ ID NO: 243954 - DNA, 367 bp, Gossypium hirsutum
acttcacgtgggctcgttaaatcactgatttaatacttgcaatgcacgaacattgaaggtggctaagtgacttacatggcgtgctgtctggaaagaaagatgcgccaaggtctcttcagaggcatcgtgcgttgctatcggttagcctattgcctccggtgatgccggtgattcgaggctgaggatgtctatatgtggtcactgatcgatgctgcatctcttcataatcagtcacctctatgaatatcagacaacaacaacactgtttgagacgaggtcggtaatcttgctgtgtaggtcacggatcgcatataatttctagggtcaagaattgtaaggtaaagttctatttacgactttgaatcat

SEQ ID NO: 243955 - DNA, 349 bp, Gossypium hirsutum
ctcctgcgatgcatttcgggttgcttttctgcacacaacgacctaagggtgggactcctgcaatgcgtttggggaaaaagccacgacgaagccctatcataacatatctttacatagccagccgtatctatgcgaacgatcggatatgacgaattgccggccttgcgtgaggggcacatgttatctacatgacctacgatcacaaacatacatactgacagttacttcggagagatctgtagattgacgagaacatagtagatattatttcctcccaccattaatatgtgttatgtatttcatatcaatctgcctatctatgaaatgaatgatatttctgaggattgat

SEQ ID NO: 243956 - DNA, 397 bp, Gossypium hirsutum
gtgttacagattatttgaagtttttttctaaaacttttaccaaaaatgcgcgggtttgattcataaaatcccagccttgccaaattactcaccaaacgaaaaaggcactctctctaaaattctgcattagctttgacctctgcacgtcacatcctctctgcttaaaatacttacatatcactctatgtttccgctcctaataaacctgacaaaatctctatctctattcataccgattatattgatcattaccagtcaaaataattccattatatacttatttatccactacaaaataatatctatattttgactacatatttatcacaaagtcttgccttttataacttaatatttaatttaaattttttgtattattaaatttttttcatttatt

SEQ ID NO: 243957 - DNA, 353 bp, Gossypium hirsutum
tatatatatatattgttcatatatacataaaaaagttccctcggcgacctcgtccgctcttcgtggcctcgctcgcaaggtaataatgtaccgagaccagctgccgtttttgctttgcaaaatgtgtgttgttaattgctattagtgaaaaatatgaaatgggttttccttattattattatcattattatcattattattattattattattattattattataggctccagaggggtctcaagagaaagcccatggctctaatcaagaaacttcgcaaggcggtaatttgttcttacctttcctctttcatttcttatgtttatcaattttggattatcttaatctaaaat

SEQ ID NO: 243958 - DNA, 426 bp, Gossypium hirsutum
gaaaggtttgctcctagaaatgaaacaaattttcaaacctaatatctccaatggagacctttatagagatgatcaagaggggagctcaagaactactatgtcaggaaatggtgataccatgatccaaacctccggttttcacagatttttacatgccaaatatctcaaccccgctcaggcggtaccactttacatattggcacaaattctgggttcaattatggcagcattaatgggagagtttatctatggcataaaatcggatgttttgacaacccggcctggccaaggctgccaagccgccttcttggcggagctcatcgctgatttcatcgttgtgtttgtgattgcagcggtgacacaacaagcacgttcagttggtccactgtctggactggttattggaatgtccattgcgctagcagt

SEQ ID NO: 243959 - DNA, 267 bp, Gossypium hirsutum
gcggatttgctctcattgagacaaatctaaaatcctaaccctttgcattgtgcacctccattgcgatgatcacgaggggaactctagaactactatgcctggacagggagctgcccatacccacacctaagggtgtcacagagccttacatgcccattatacttacctcgctccggcgctagcgctctccatttgcccactcacacggggtccaactcttgctgcttctatgcaagagggcctactatatcccataatgccatgact

SEQ ID NO: 243960 - DNA, 278 bp, Gossypium hirsutum
gcattccatcaatgtctagcccgcgctgaattactatgacaaggacccgtggtgcgaagccatgaagaccatggaatccatcgttagcttgattcctatagcaactgcttgaaccagccattgagatcaatgcatttaatatatagaaagattttgttaataaacaaagtatgataaatgctctgatagatccatgctgctatattatatgaactgagcagtgtgactaatctactaagagtttcactaggaacgaagagagtagtgaatatatatga

SEQ ID NO: 243961 - DNA, 370 bp, Gossypium hirsutum
  unsure (1)..(370): unsure at all n locations
gaacatccaaaaacaatatggttagattttgatggactaggacaaggggtgggacaataacaaggcggtccaagaactgaatgttgatgtggcaaacttctcattcttattggatacacctggcacggaaacgtccgaaatgtaatgcgacggaaagaaacgaatcaccatgaagccctatagggggcatgactcacaatctcgcctttttcagatcgacctcatctgttatgatataatcgacagcgcaatcaaaggctgtgctggtggtatccacctcccttctacatgcagngtcaatcaagttcacgaaccttagaaggagctattggatcctgcaagtaaatgaacgcttaatgttctgacaagc

SEQ ID NO: 243962 - DNA, 323 bp, Gossypium hirsutum
caatatccaaggaagattgttgctgggctttgaacctgacgcgggtgtagactcgaacagagtgattgaccaggataaatcgctcctagcccggaaatacttgatccatgtgatgtattttgtccatttacatggatttatgatctggacctgaaaaagacaggtgtggatgacgctcatgccgaggctaaaatgctctcatgattgaccgaaacctttttttttgtagggctcgactcttctcgtgtagattgcaactagggtttggctatgcatcttggtatggatgcctatcgctttcgagtcactgttgaacaatcata

SEQ ID NO: 243963 - DNA, 228 bp, Gossypium hirsutum
accactgcgtgcgaccgttacagggctacttttacaaacctgcagatggcgtttgggcgcggggcaaatatgggacaatgccggtctaaagataaatcgaactgacctacttgctagcaatctgagagagttgaaaatagatatgtgcacacgctcaacctctgacgacgataatgatcatacaaagtctcaaccgaagagtgacgcattcgttgttgctgaagacaa

SEQ ID NO: 243964 - DNA, 192 bp, Gossypium hirsutum
cattcccttactctgatattcactagaagtttgtcttttcggcggcggcgggctgccactgggccagggttaaagatgggtccacaaatcaactatgctagaggccgtgaaaactactggaaggacggtatctaggggccatgtgactctagttagaggcttgcttgtgatgatcacaaccgtattattatg

SEQ ID NO: 243965 - DNA, 257 bp, Gossypium hirsutum
gggagacccacgcgtccgttctggtgttttccttcgctttttttttttcacccacaaaacaggggagggtgaaataaaaatggggcggtccaccttaagcaaagtatgaaatcctttcctacttaacgagatgagaaaactcatatttaaatgcatgttattaaacaaacgatacctaatattaaaattataatcaaagatggcactaaaacaatctttttaaaaaacctgaagtccacactgtgaactacaactaa

SEQ ID NO: 243966 - DNA, 276 bp, Gossypium hirsutum
ggaggggttaattcctcattggatcaggcctcttccacctaggttccctgtggatgaggagctagtgtggctcaaccctgataacaatcatgagcttcaatgggatcaaggaatgtgtgctgatactagtagaggagcagcagtgagagatttaattgcaaaagctttgaggggaccacttgctcctaaccaacaagagcaagtcctcgtggagctggctaatgaccctaaacttgtctatcactgtggattgactccaagaaagctacctgaatt

SEQ ID NO: 243967 - DNA, 156 bp, Gossypium hirsutum
gcgggggtcctttcttccttttaggcttattctttctactgctacgttaactgatgacgacgatggtctatgtcattatctacctcacctgcatgaacgccatcaagaagacacttcgtgcgcttgtacaagaacgagagcatgcagattagatgc

SEQ ID NO: 243968 - DNA, 326 bp, Gossypium hirsutum
cccacgcgtccgctcaagctgtgctctctctcttctgtcaaatcaaccgtggggctccaggaaccaggctttgaatttttctgtaaatggcgtgataagtactgaagggtcctctgcggcacaaccaacaacgcttcatggtgcagttgtgaacccttattcaaatgcctctttggatttcaatggcagtgacactgttcgcagttctcacaagatgctgccacacctagatttgggtcaaatcccagaccctgttaactgtcaattctctagtgaccttgagttgtctcaacaaagctggatgtcatatatggaacatgagcagt

SEQ ID NO: 243969 - DNA, 390 bp, Gossypium hirsutum
cgacccacgcgtgcggtatctttcatgcattaggcctattctttctcgtccacggtgactgaggaggacgagtttctatgccctaatctcaatcaccagcttcaacggcatcaaggaatctgttctgatactcgtacaagaacgagtgcaagagacttagttgcaaatgctgtagagtgaccacttgcttctgaccaacaagaacaagatctcgtggacctggataaggaccctaaacttgactatgactgtggattgacttcaagaaaactacctgtattggtggaagagaattcgactaatgctgccgatgttcatatcatgatgaataagtctccataaacagctgatgctctaacaattcctgttaacatggacatgagtctacac

SEQ ID NO: 243970 - DNA, 257 bp, Gossypium hirsutum
acaacgcgttctaacgaatgctaatgttgccatatactaccatgggaaacaggattgttcaaaggtgatacctgctactgttgatgtgctgcatagtgtatatggggaggtattctgatgtgctctagaagcacatatgctgaactatgtagctgaaacgtatacaacgggttcttgtttatagtactgtactaatggaaaaggcaatgcagaacctggatctcatttactgctaagagaaattattgcagtctctc

SEQ ID NO: 243971 - DNA, 179 bp, Gossypium hirsutum
tcgcccacgcatccgctcacgcgtggtttggattattagattgggtcgacaaccgaatgtgatcgtgctttaccaggtgatggctgctcagacgaatatacatttcgttatatattatgcctaacgtggtgaaatgctcaacaacgctgcgtcagggaaatttgcagatgatgctgcat

SEQ ID NO: 243972 - DNA, 250 bp, Gossypium hirsutum
gaacccagaaatttctcgcacctgcatcatataatccgcgtaaagggaaaggggcacagcatcatggggatgtcatatgcactctcactcctataatacatccagggttggcttaagacatggctagcgacaacaggacaaccttccatacatcaattctgaaatgagccttgaaatgaaaaaaacaacttgttcatcctcagccgaaacataggatactgtcgcaagatctgtcttggcgatatgaaac

SEQ ID NO: 243973 - DNA, 268 bp, Gossypium hirsutum
ttcacacattttctttaccacttaattttcccaaaactaccatttgcggcgggcttattcaaaggtgggacgcacctactcataactatcttcacatgttaaatattgcggtataccaatctgccttaaaaacgcaaatactttatcatgttcctgaaactaaatcaaaaagtttttttttatttcactctactaatgtaaaatgagatgacgaacactcgatctcctatattcctaattataatgattagactctctcatactatcc

SEQ ID NO: 243974 - DNA, 216 bp, Gossypium hirsutum
cccactcgtccgctgtagcagcttctgtggctcctccagaggctactgagccgaatccggagtcggtgctgaattcaacggacagtctagcggaccgtcccgtttcgcaaccgatctcatatccggccacatatttgtgtcctcagtttgggcctgattatgatcatgctgctcatgactctcatcatagaccacaacatattcctgcggatcatg

SEQ ID NO: 243975 - DNA, 257 bp, Gossypium hirsutum
  unsure (1)..(257): unsure at all n locations
cacgcgtgcgnccacgcgtccgcccactcgtccttccactcttacttccacgcccacgcgatgacatacgcgagctggctcttactctgatgcggaggctgtacgcgctaaatctgctgttcatattcaaagccatactcaaacgcataagtctaaggctcatgcgcattgagttcatgacaatgatctccattgactaagataaaaggataagatctattttttaccaagaacctacattgactaagaaaaatgac

SEQ ID NO: 243976 - DNA, 272 bp, Gossypium hirsutum
atcacacgtttttctttccacttaaatatccccaacctaccatatggggggggcgttttcaaagaggaggccggctacaaatcaccatccgaacaaaatatatattgtgggataccaccctcctttaaaaaaccaacatctgcaaaaagattctctaagcatagtcaaactgttttcgttctcaaacacaaaaagatgtaaaaggagagtactgacacctacctcatctacatctttaatgaatgatacaagtctatccacatatccctatc

SEQ ID NO: 243977 - DNA, 545 bp, Gossypium hirsutum
  unsure (1)..(545): unsure at all n locations
cgcttacattaagccatgatgtgggtcaaagtgtgactgnnactgacgcttcaaangatagcgtattgctgatatgctaaactatagtggcgagaaacggnnttggagaacctancctacctccgnnttcttttctcgttggtggtcnnaatggaacccagttgctcnnatgaattnncattgtggaccttatagaggggatttagagagacaccnnngctggaatttagaactctgaagaaaatgttgctannaacgtnncttatggaccttatggnnattccatggtcctttacaatgnntcatggcctnngttccaggcaccactttcatgattgaactccnnactgaaagtgaagagcaagggggcggagcttcganttaggttctgtgaatgcttcnttcatctccattagngnngaagaaatctgctcagaaatttgagaatggaannnaagctgatatcncnnacaacaatnngttctgaaggggaagctcnnctcatccaaccaatcttttgctcattgggtgaaatgcatggacaa

SEQ ID NO: 243978 - DNA, 230 bp, Gossypium hirsutum
cccacgcgttcgccacactcgaagcataacgtcggtaacttttcatacttgaatgggatccaacatttatgacctgtaccagtcgaaacaaatatacccctgcgaaggggtttctgcacatttaattttattctaaggcgacagaattcacccataaaaaaaaaaaaattaaaaaaataaaaaaaatttaataaaagtttattaattattttttaatttaagttttttgg

SEQ ID NO: 243979 - DNA, 142 bp, Gossypium hirsutum
ccgacgcgtgcgtagacgcttgagttcaaatgatccttctgtgcaggaccaggtgcacatgaggaaagtcatcgagcaccacgacaagtctatgccgtatctggccaagtttgttcataagcatactgtattcaagacgaga

SEQ ID NO: 243980 - DNA, 321 bp, Gossypium hirsutum
ccggaacgatattgcttaagaagcccttgtatcgagaatcaactgatatagtcattcactctgtaggagatcaacctgaatataaagccatcgccgaaataggaactgagcttgccggagacaagaacctgcaagaatcagaaatagatggtatgaaggaaatcaaaaccactgatgctggcaaagtggttgaaaaaccagccttaagagttacagaaactactagaccagtgctctgaccataatcgttgctcagctgagccggttgacaggctcaacgttgggccatgtcgagaaacccctgctgcagaactctgcagc

SEQ ID NO: 243981 - DNA, 306 bp, Gossypium hirsutum
ggttgctaggttgatggactctatatgatggtattggacatgagaggatgtcgagcttttctctttgtttcttagttggattggaaatctgatgcagtttttattgtaaaaccaattattttttttcttttaaaagattgttgcaacttgcaagtgtgtttctgtatcttccacaaagaaaaaaaactaaaaaatgcgctcaagaatgatatttgtctttggtcatgaacaaaacagaaaaaagtatcaaagagcaaaagccatacatgttggaaatatcttagaaccaataacctgaagaagttg

SEQ ID NO: 243982 - DNA, 327 bp, Gossypium hirsutum
catccatggctcatgtttctttcgttagtcattgtagcagtgtaggaaaaataaatgatccggaaataactgtagtaaggaatagtagtaggtgggtaatgccaacttaatttcgggtttccctggaaactctgatatgtctcgatcttccattagcaagcctggtatttgaagagaggagaaagcatccattaccattggcacatccaagcttggaaaaatgatggggttgtcaacttggcactatgttggctgtagctctctacttaattgaaaagtattgtacctcaaacgtcttgttgtacttgaatcaagtttcagtttatt

SEQ ID NO: 243983 - DNA, 399 bp, Gossypium hirsutum
  unsure (1)..(399): unsure at all n locations
accggntcggaaannnccgggggagccacaccttcgctactatttaatttttaaaaacttatttaaaaagatatttcacgggtgcctggtttaataaggaggcgggccgcaaaatatcattctcttactccacagatagatgatctcttcagaagaaagaacgctagtgatccttcttaacctaccctcactgtagagattgaaacacacaagcagacacagtttttgctggaagcatctattcttcatcagcatgcatcttatactaatcgaaagctaatgacattacaaaccaacatagggaagagttactacatcgatgatattttaaggtcagggtcagccaaaccaagcacgaaacaatccatggattggattacaaacaacttacatgaagtt

SEQ ID NO: 243984 - DNA, 433 bp, Gossypium hirsutum
aattaagcaagggcagtatgtgtacgatataccaactgcggcaaatagcattgggggtgcacctggtgatctatcaaatcacttgcagaatcttaaggcaaagggagaaataacatatgagttgaaggatccagcctactgctataagattgtaaaggttcctagtgatttctgttctctcacggaacttcttaccagatggttactggatattgaaaattgcaaggtatggaaataggatgccatgtacagttctgcagtttttgtagtggatacatgtgagaagacacatgattgcaatgttgctcagcagacaacatgcttgcaagagagaattttggattattttaagggggacaataaccttgacgttcttgataagatgggtcagaacagcccttttgttccagcagatataaaggtctttctgcag

SEQ ID NO: 243985 - DNA, 400 bp, Gossypium hirsutum
  unsure (1)..(400): unsure at all n locations
gaactattgaatttggaaaaactaggcaaaagtgatttttcaagggtaccttcattaatgaggaagcaggccagaaggtatcaagctcttactgcaaagattgatgatctctgcagaagaatgcaggctagtgatccctctgaacctaccctcagtgtagagtttgaaacacagaggcagacggagtttttgctggaagcatttcggcttcagcagcatgcatctgaaactggtcaaaagctaatggcattacaaaccgagatagggaagagttactacaaggatgatattggaaggtcagggtcagccaaagcgggcacgaaacaatccatggattccattagaaacaacttaagggaagtacanagaaaactggagatatggttggccagaattatag

SEQ ID NO: 243986 - DNA, 104 bp, Gossypium hirsutum
ctaaaatctgagacggatggacggaggaaatgatgcagctcgagcgttggatgattcaggagacagcttggactacggatgctataatggaacagaggtagaaa

SEQ ID NO: 243987 - DNA, 342 bp, Gossypium hirsutum
gttctatggccatacggagcagaaatcgctcgtagtgacgtggaggaggcttgaatgctgcgatactggtttcgtgtgaggctgttgcgcacttgagcttggtggcttagggtttccagagacctcacctgtccgggccatttgggccagacaatcgggctattttagaagtggattgttaattttgttagggatttgggtttaggtttattaggttgggcttatttgggcttttattattgggttataagtgatttgtaaatggactttgatgatgaactttttttggttttttttaattttttttaatttcgaacacaagacagtacataaataaaaata

SEQ ID NO: 243988 - DNA, 414 bp, Gossypium hirsutum
atctagggtcattttcattttaaaaattctttacaatccgtttgggttcgatgcatcataagacgaaaaaggctgcagataaaaatgctaacattaacttcgcagcttcggtgaataatatcaatggctacttacaagagaggatttatcagaatggtactgttcttgcaagtgatcagcaagcagaaaggagaaacggcttagtcttacaaacaaattggcatatttcaagacaaattgtttctttaaaagatggaaaaacaggctcatctctaaatcagcatgtgcttaccaaaggtgtatggtagactgatggtgctagatgacatgatatagacctagaatctactgctcagaccatagaaacacatgattcggaaagtcatggaactggatatgtcacagatgaatggg

SEQ ID NO: 243989 - DNA, 333 bp, Gossypium hirsutum
tcggtcacgccgttcgattttaattgtcaggatgaagtatgactgcgttaggaaggtgccgggggtggatagacataatcaagtgctcagcttgtgatagatgttctgatcagaacaccatagtgtctaatgcgtctcgatcgtttccatgcttacttcttcttagatgccgcatcgcacatctaagcggacgaagatgtacactcatcgaatcccctgttggttcgcttgttgcaccttcatgaacattaataagttgtctgatgtggataatactgctatctattatgtaccttttatgatttaaagattgaatggacttacgatagaatc

SEQ ID NO: 243990 - DNA, 319 bp, Gossypium hirsutum
accggatcgaatgtttaaatgattttctctatgaggtctttttatgattggtggaaattcttaatgcccaaagcttgtattattttcgtcaaaacaaaaaaaaaaaaaatctccgcagaaagcaagcaaaacataccaaaaaatcaaccggactaaaaaagaaaaaaaaaaaaaacattcaaaaaaaaaaaaaaattgaactaaactaattataaaaaaaaaagcgctggcccttttagagattcaaactttattttgccttgctggtggactcaaacctctattttagtgtagcttaaataaaaatggggggcggtca

SEQ ID NO: 243991 - DNA, 426 bp, Gossypium hirsutum
cccacgcgtccgcattcgcgtgcggttaagatggtgacatcactggattctggatgcttgataaagaaggaggacttcaaccggtccatctgaatgccaaattcgagaacgagtagccggcccgtcttgaaacaatgttcgtattgcaaacacctcgaaagtgggattatgttcatgagattcatggagctgttttataatgaaaacggctagaagttcatcaaaaaatgactgcatatctattattacttgtcactactctatcattatatctgcttgcctccgtagcgtcatttattttgggttgaagcataacttgaaatctcatgtagcttttatgcagatggatcatattgcaggtatattccaatgtaccgatgatgcagagacctgattgcttccttttgcccaacatgctactctgga

SEQ ID NO: 243992 - DNA, 363 bp, Gossypium hirsutum
gtacagaacagaactgggtgttaagatcttgtattggggggctgagtcacaggcgggggatcaacacaggcgtgcaaaaattaggggttgtggtttgatgaaagctgaattggtttgcttaatgatgagcctggattgctgcaaggaagaaaaagagaaacttgaagcttctatgcaagactgcaggggggaaaaatctcaaatctcacttgaacttagcgtagcgcaagaattgctcgtggcatacacataaaccatgaatgtgcagaaggaaatagatagcaaactgcaaaatggctgcttgtctgatgaactagttgccaataatgctcaaactaccgacatttatactaaatatttgga

SEQ ID NO: 243993 - DNA, 290 bp, Gossypium hirsutum
cccacgcgtccgattttcttcatttttttgggatggaaggtgatgaaggggcggctaatgatcttaagggatcagtgactcatacgaatgctttaaacagcttcactgctagctctcagataatttttgcaagagtagtgggtgtgctgcttcttttgcttgatagcggctgactcaactaccttgtgatggaaaatctgaaatgtaagaccctggatccgtctttctgaccatggtctttatggtactatgtgcgcagccacacgttaatgctgtaccagatgcatatt

SEQ ID NO: 243994 - DNA, 409 bp, Gossypium hirsutum
  unsure (1)..(409): unsure at all n locations
cccacgcgtccgaatctttcaccttatcgtatttttgtagtagtttcaaatggaaacaaaagagaaaaaaaagaaaaagaaaaatccaaacagaataatcaaagcaaaaacgaataaaggaaccacctttttattatttttgattttgatttctatcggatttttttttatatttcgaatatcgagtttttatttccaaaatcccccttttgacaatcgttttttgtgtggctttatagccaaaatacttgttactgttctatcactattcggccttgcttctgctgcagcgttttcgctgtgtttttgctacttttgggttactctgcaggtctgctaagagttaacgggggcaggtntacgttttggtacaggagcgagtggtgcgctcgagcacaggggggagctg

SEQ ID NO: 243995 - DNA, 435 bp, Gossypium hirsutum
cccacgcgtacgccctcgcgtccgcttcttttcatcaaccagaaaaaaaaaaggaagaagaaacaaactatttttatataaaggaaatggaaaggaagaaatcggatgaagctcgtggtgatgagaaaaatgaagttgaagctcaagtgaagaagaaaaagaaaaagaaaaagaaaaagaagaagaagaagaagactaaagaggatggtgatgtggaacctgaagtgactactgagaaggagaaggaacatgaggttgaagcgggttcaatatgatactgagaggaaaaataagaagagcaacagagagtgatgaggctgttgctgctgctgttgatggtgctcatgacataggggctgatgaaattgagacaaacacaaataagaagaagaagaagagcactgagaatgtagatgctattgaggctattgctgt

SEQ ID NO: 243996 - DNA, 435 bp, Gossypium hirsutum
atcagtagacccatatgcagatgctgtggtggaaggtgaaggagaaaaggtgaaaggggaggtgtctgagcatcagtatagccgtatggaggagaggcatgaggaggaggaagatgatggggaagaagaggaagaggaggatgaggaagaaaatgatatcaagactattaacaaagatgaaggtcaaacgaaagagcaatcacagttcacagatagcttgtcagaggagcgcggtagaaaatctcagcctgaaacagtggataagtccagtgcagtacgtccaaaaccagaaaggaattataacacacaacgaacaagaaagtatagcagttcaacaacagagatacaaggaggctcaagaaaggcaacaaatgtctaaaatgttggagagcttatgctacgagaatcccatgcttcttaattatgtggagatct

SEQ ID NO: 243997 - DNA, 423 bp, Gossypium hirsutum
gtcagctccgccatgctgagatgtttttgcggactttccgtcacaagaggcgagttcgcagatgtgtccatatttgtattaccggtttgacaactccctgtttaccttgttttaccattcctgatgagggccaaagacacatatccatgggagccttaaatagtaaccgaccagacacacttaccacgcatatgccgtacttcaagaaggtgacatcatgtcttacttgcgtcgtatgtgatgaaccacatacactacgcctttatcttgtacataagctgagtatcagatagtcatcggttgcgctctgacactatcgcacttggtgtgtgtgtctgtgtaatataagacgggatcgctaactccactttgatatggcgttttacagatcgtaagcacctacagatctatttgtactagata

SEQ ID NO: 243998 - DNA, 362 bp, Gossypium hirsutum
  unsure (1)..(362): unsure at all n locations
gaacattttaccaaccttcacaagtgctttccatagttcaagcttagcagtgcacattttagtgtctggactccaagcaaaaccacttctgcaattgaaaaggtcgtaacactcataaaagtatgcttcagagtctttatacgatttttcaagaggccattgatttctctctttgacttacactttgtttataaactattgttaaattattttatttatatgtatattcaaatatctgtctaaataatagttgagacatcgatttgaatatagaataaaccgacttatactcctcaaaaaaaaaaaacaaaaaccataacaattattgctattaaaaaaacattaaaagccggaacttntgg

SEQ ID NO: 243999 - DNA, 216 bp, Gossypium hirsutum
  unsure (1)..(216): unsure at all n locations
gggnggcccacgcgtacgttgggatccttcctcagcatctcccaccaactaaaaaaaaaatcaacccaaggggctttgtctccacttcactctttttctattttctccatttgttcgtttgtgtgtatgagaagatcattattatgaatgatgatgatgaccctctccatgtatcactgttttttcacattgtgtgcagtgtaaatctcttttaag

SEQ ID NO: 244000 - DNA, 174 bp, Gossypium hirsutum
tcctgcctatccttgagacgcgggtggtgtgtcaacaaacgcacgcaagtcagttcttggtgaagatgttctttcgactaagatcttgaagggccttaaagcgtgtggcaatacaatgctacatctataagaaagtgttgtaggaaagtatgtatctacgcgtgtgtgatactg

SEQ ID NO: 244001 - DNA, 226 bp, Gossypium hirsutum
gtctcattgtttcttttccacccagtctttttctaacagcaggccaatggcggcgggtgcttataagatggcggcctacaacaactcaccactggagataaatacggtgggaggcaataccaaccgctttaagaagccatatgctggcaaaatgttccccaaggtatgcagagctgcggtcggaaacatcaagaacaatagggtcatgcatagtactgccaccttc

SEQ ID NO: 244002 - DNA, 273 bp, Gossypium hirsutum
gaatgaacagccgctttttcttctttagaagacaaaaaaaaaataaaatgagggagaagataaaagaaaaaaaaataggtcgaacgacctgagtgttccaatctcacgctcacgtgcacgcaatgacatggcttttctgtagagtaaaataaactaaactaacgggcggtcgcttgactaagagtagaatgggacacccattgtttttccgaagttattcctgttgcagtacatccaaataataccagtgggggttataacaagaaggtcttt

SEQ ID NO: 244003 - DNA, 311 bp, Gossypium hirsutum
tccacgcatgcgtccactctttcggttgtgttatgcgaaaacgtgtgaagaacgtgctgcttttacagtggcgcacaacccttgcacttgcttagcaacaccttcgtgcacagcttatggacttatgtttaaaattggctgcaacttcctccaactctggaacggtgatgcaatcataacggtttatgcacttgtaggaaagttgtacatctttgttatcggacactttgaatgcctttgcatccaacgtggaaagatacagtctgctttaaatactgagaagagcgtcaccagtgtataccggatggatc

SEQ ID NO: 244004 - DNA, 306 bp, Gossypium hirsutum
tggcggaggggccaggtgggaggggaataactagggttcttgagaaagggccgaagatctcgaatgtgaaagtgagtcccttgaatattcaccaaccaatgtagatcgattcctgcagatatgaaatgggaggtcttcttagagcccaaaaccgacagctttaagttttatcttgtgctaactgtcactaggtgatccatctctttttaaaagtctgaattggtgaaattattgtgtacagaaggctaagcctgtaatctgtaaccttgtttcaatgatacttgaattacctcccatattccacat

SEQ ID NO: 244005 - DNA, 329 bp, Gossypium hirsutum
ctgaagccgcatactaattagatactttgaatttgtatcctgcttggaatggggggggtttaatttagatgggagatgggtgaagaagctaatgctgtggatcccgaatcactattgaagaagaataagaggaatgaacaatggcaacttgctaaaaagcaacagcttgtctttccacagaagaagaaacattgctacgcctgtgctttccctgctgctcgtaagaggacatgtaagtgcctcatgcgctttttctttgatatcaagatcgtgaaggcaatcagaagaaagaccactggaaccggtcggatgaggtatctgcaccatgt

SEQ ID NO: 244006 - DNA, 323 bp, Gossypium hirsutum
cttacacggccgagttaagttcagcttgactgactgaccctgcggatacggccggggttgtttcttagcgggcgcaacataatattggaccttgataaaggcagggcttcactactgcccatctccaccatcacattgaaaacagcgaggatcgactactaactagcggcgcgactggtacaccccctgaatcagatccaatacacgatatcttccatattgataccactatgtcaagctataaatgtacgctacaaaggtttgagtaaaaaaacatatggatcctctgtaaaggataacctttaagactttcacgcaaattt

SEQ ID NO: 244007 - DNA, 372 bp, Gossypium hirsutum
ctagcctaaatattagtcccgatgcaacaattgaggatgatgatgatgatgtagaagaaaccgagacagaatcggacacaaaagacagtgcagtcaaagatgagttgtagattgcctgaaacctcggggacatgccttttgagttagttttaccctctgatgacaagccgaaggaactgtaacatgcattttcaagtctgaaacttggataaagggaaacattacaaacattacttagtagaatatatgtaaaccgtagtcgactgtgaaattaatctgtctgcaatttttgctcttttaatgcatcgcagaggttttaaaactaaaaatttcattagaaaaaaaaataatgaacggctcgatagaaaggtc

SEQ ID NO: 244008 - DNA, 405 bp, Gossypium hirsutum
tcggccacgcgtgcgggcaaatgtacttgtccatgaagatcaagcctggggcggacgaatccgtgggagcatgccattccgacggaccttgatcctattattagcagctgaacccctccagcattacctgcaggcctatttagggaacccacacgcccaaaaataaaaatatctgtatctgcacattcaacatgtgacacggcaccacagtgttttaacaacaaagctacccgcgtgcgtgacaataaatagatccctgcgtatgttatcgcaatcacaggccaaagtaccagaaagacaatcttcattgatggatctgcaacggtgtatcctcatggcgtcattgaccctactgaggagcttggtacactggctgatacctatggaatttgtctacatgatgac

SEQ ID NO: 244009 - DNA, 383 bp, Gossypium hirsutum
cgggccggcccacgcgtacgtacgattattcgatgaacttttaaaaaacgtgttagatttgtatttctgcgaaaaattatcggagtctgttagggcttaatgtgggtgaattgctagggtcatgtcattgtataaaaaatacatttggttagaccattcattccttggtttctaatttttgatggatcatatagctaggtaaggagactgtaacaatgatgtttgaaaactttgatgttttttgaaaacttagatatatactctttcttctcttcaaaaactccacaacgacaccaagcgcacaaacactcaacttaatactctgcagcggatacatcacgcactgcctcttcaacccgttatacgatgctcttaggctcctt

SEQ ID NO: 244010 - DNA, 263 bp, Gossypium hirsutum
  unsure (1)..(263): unsure at all n locations
taaaaaatgttttagatttgtatttgtgggaaaaattatgggggtntgttagggattaatgggggtnaatagatagggtaatgtaattgtataaaaaatagatttggttagaagattaattanttggtttntaatttgtgatggatgatataggtaggtaaggagaatgtaagaatgatgtttgaaaantttgatgttgtttgaaaaataagatatatagtgtgtgttttgtttaaaaaaaaanaaaaaaaaaaaaaaagaag

SEQ ID NO: 244011 - DNA, 330 bp, Gossypium hirsutum
gtccgatcaacgtattcttacatttttttcctccaaagactccccttcggaggtgtttgaaaagctgttcgtctgcaaaaaataataagacctgttatatacctcggcgaacatatgacaggagacgattggaatgcacatttctacatggcgaatagcctagtctatcaaggccaaatgactttctcgctgtataacctaatcactccttcaccttgacctatacttttagctttccctactctaacatcaacatctataatcggaacgctcatcaaatttaagctcgactccaaagcttaaagacgatgacaatctttgatggaattg

SEQ ID NO: 244012 - DNA, 285 bp, Gossypium hirsutum
  unsure (1)..(285): unsure at all n locations
gtccgctcaacgtatacttacatatcagttctgccaatgcttcccttcatctttggtggccagtgctgatcgtctgcagattatgattgacactgtttcagacgcggcgtagctatgcctggggacgatgggattgcacattcctacatggcgagaggcctggtctatcaatgccaaatgactntgtgcttataatcgaatgcacgcgttccccttcccctatgcttctaccgttacctactctatcgtcgacatgtatcaccggaacgctcatagaagttgagc

SEQ ID NO: 244013 - DNA, 319 bp, Gossypium hirsutum
  unsure (1)..(319): unsure at all n locations
gaccggaaggangggncgggccacgcgtccggccattcgaacccctttgtcggtggtttttttccgcgtataactcctatcggggcgggcttttaacttcaagtcctcggaaatcccatgctatatcgcgaattatctcccgcgtttgatgaaattacagcctgcttcttttgaattccactcgtgctgctaacattcatataaaaggggtggaagaggaagtagctgttatggctactatggaattccaatctcttggggtatctttttttcatgcaggggatgggtctgaagctgaggatgtagaacttcaacctat

SEQ ID NO: 244014 - DNA, 454 bp, Gossypium hirsutum
cccacgcgtccgcccacgcgtccgaaagattggtatgctggaatcaggtcagtaatatattctcgtggtgacctcaatcatagctgacaacagattagaatcccttttcacctgtttggcgtatgtggatgatttggagaagtgttagtcttctatgtggtctttgtcaagttgaagggaagaaaaatgttaacaaaaataaaaataaaaataaaaataaaaaattaaccatttctcgtgtttcttctagccatatcgtttgcaaatctttggaggaattctacgtaaaattattattgcttcgtaaaatcgatagatgatgaatccgtcatatctcctttatacttatactgctctaaatttgaaaggacacagaatcctgtatgttctagtatcttgtatatagcatatatgtatcctgaggttgggaaaactcatttaaaaatgtaaatta

SEQ ID NO: 244015 - DNA, 230 bp, Gossypium hirsutum
cccacgcgtccgcagactcgttcgctttcgcgtacgtttcgatgggcgggcggaattggttaaaaaagttattgcttgacattaaactatatatttctgctggtgatagattgataactttttctgtttgtaatatttgggatggtatgtcattacaatcttttaactttttgatgtactaaaactgtgtaacatatggattatgacatagaatttcatgaatttcattt

SEQ ID NO: 244016 - DNA, 333 bp, Gossypium hirsutum
cttaataactgctataatgtcattattaacagcggccaatcaagtgagggcgggtcacatactcatcaagcaccaagtctctagccaaaaggcttattgtaaggatccagagggtctcgtcttctacaccaacaatcgaaacacctctgtctcactgctgaaacaacatctcgacgacatcatttacaacattcctactgtagacaaggttgtgtctaaattctctctgatgctctgcgacaaaaattactaacatatattttcatacattcttttctagatgattagtctttttagagatgcataacatacaccgtacttcagttagttatg

SEQ ID NO: 244017 - DNA, 405 bp, Gossypium hirsutum
aaaaaccggaccgacccacgcgtacgactatacccaatagccatttcaacaacgcctttcaagacagacccaacggcgaaaaatcactgtgaatattcgcataacatgcggacaaaccacacctactattaccctcactccgaatacccagccactctgctcatctcccaacaagatcatccaatcatataacaccgaaacctacaaaaaattgaacggtatcctcttcaccgccaagcacactctccaaaaccctcagacaaaacccatggctgtaccatctattactgatctcgatattaatgctattaatgatcctgaaccgtatatgacgaacaccaaaaacattaaacgtcatgtcaacatcaacctttataacaaaatctatattgctaaaataatgat

SEQ ID NO: 244018 - DNA, 316 bp, Gossypium hirsutum
cccacgcgtccgcccacgcgtccgtgcaacctgaaaaataagtatgtaccattaataatatatgtttgtaaaaaaatgttctgcattcgcattcattggttaatgttgttgaactgaattggctttttagcagactcttccactttacatgattatatatagcttattttttctaaactaaattatgtctataaccactgggaagtcaataatatctgtcagataaatgatcatacagtcttttgaagtgttttgcacgagtctctctacattatactatcatctctaaaagagcactctccatggaaaatctttt

SEQ ID NO: 244019 - DNA, 374 bp, Gossypium hirsutum
cccacgcgtccgcccacgcgtccgccttagagctgggctccatggtttgccacaaactttgaggcgctatagaaagttttgtttggtaaaggaatattgaggtgagcgtagaagagaggcgaatgtttgaagcatgttgtactttgcccatttcataacttggtcagtcagtcagtcgcatcataactgtagtatttgttaatacataaacgtggaaaattttgccaatggaaaaaaaaaaaaaaaaaaaaaaaataaaaaaaataaataaaaaaatataaaaaaagaaaaaaaaaaaaaaaagagtaacaaaaaaaaaaagtttaattttataaataaaaaaaaggggggggccgttttaaaggatcaaagtt

SEQ ID NO: 244020 - DNA, 313 bp, Gossypium hirsutum
ctgacgcgtaggcagacgcatgttttttatccttgcatgtctaatactggggggggtatatgccgctaatcctagggttctaaaggtcaatctatgaacttaaaaagctagtacaaaatgttccattcgggcttgtgattcacataacagattttgaaacaaaatgaaggaactaagtaaaaacaaactgatgtcctttgtaaaacctaaagaatgagaaggattattgtggagcatctctactgatttaataaacacgagtatatattcaaaatactatcaactctaagacaaccaaaagtgatttccatac

SEQ ID NO: 244021 - DNA, 315 bp, Gossypium hirsutum
catttctctaccgtaagacattttcctttctccttttctcttctaagcaaattttcttccacatcttcatctccgttcataacctcccctcaccatctccgtccgtcatctccgtcgaccgtcggccttacttctattttgaagaaactgtcatctctgtcatcaacagcctgcacttttgtatattttaccgactgttattggattcttggctgctcactgtgtatggaatggagatgtcaaaaccgctatttggagttttgacgaagttgaaagactgcggttaacgtcctgaaagatggggtaggtgaatga

SEQ ID NO: 244022 - DNA, 254 bp, Gossypium hirsutum
ccgacgcgtgcgcaggcacgtgtgcggccgcatggacatcgagtatatgttctacatcaattgggaaacgtcgagggcataggctagagcccacaacgcgttcgctgatggccacaagcatacttctctatggagggggttgctcacatacccaatggatatgactcctagaggcccttgcatcctagattgacaaaacctatgttcgtccagctgccgaagaagctgaagtgaattctttgcacataaaggat

SEQ ID NO: 244023 - DNA, 407 bp, Gossypium hirsutum
atttcagcaggggaagaagatgatgaagaatatcctttgatggaatcattatatccagcagaagaaaacgaagaatatccattgatggaatcattacatccagcagaagaaaacgaagatgaagaagaatattcaccactaagatcgtcatttttggtggaagataaccgaattgatgatgatgaagaagaagaagaagatgatgatgatgatggagagtattcaacaaaggaatcatcattttcaacagaagaagaaaaagactcattgttgcaatcaccactttcaacagaagatgagaagggtgaaaatgttgcagggatggaagaagaaagctcagaaggagcatggagctcttccacagaacctaacacggaggtaatttggccagcaaagatgatgggggt

SEQ ID NO: 244024 - DNA, 407 bp, Gossypium hirsutum
aagatgggagattcagcacagacgccatcgacgccgttggttggcgacggaagctttgtatggtgaacgtggctaaacaagggattctttacgacgccgctaatgacatatgggaacagatgccggaggggatggtgggtggttggagaggacccgttgccgccatggatgaggaagttctatatgccgttgacgaaggtaagggattactcacgaggtataaccaagacagcgataattgggaggtgataatggaggtagagagtcttaaaggggcatgccaaatggccgccgctggaggaagattatgcgttatttgtggcgatggggagattctagtcatcgatgtggtggcggcgccacccaaattctgggcagtccaaaggccggcggagttggaaccgttg

SEQ ID NO: 244025 - DNA, 407 bp, Gossypium hirsutum
cccacgcgtccgcaagtttcataaaattcctcgtccatggacatgtgctaaattaaaggcttcagcattttatcttccttttctaccttgttttaagattctttgttgcacttaacggcatgaaaccttgcattagtaattgtcattgttcatgggttagaaagacaagtgccaaaataggctttgagaagttttaaactatgatacaaatatgattaggtttatatgcatataaatagcattcagataggcttcagaagaacaaatagcaaaaagtcttaacaaggttgcaatgtctctgctgattgttctgtggtggattatatgataggaagttgacgacagttgcatatgtttaatatttgaatactccttttttcatcgaagatgttagtatcttgatttct

SEQ ID NO: 244026 - DNA, 329 bp, Gossypium hirsutum
gttttcttctaccttctgcttgtttcagtgagctgtgatgttatccatgattcttgtgacaaagctgcaaagggtgatcccaatatcaagtttgacttttgtgtatcaagttttgaagggaaccccaaagctaaaacggctaccggggttgcagatttggttaaagtagccatagaaacagccatggctaatgcgacgagcactggtttgataatatctaagcttttggataacaaaacccttgatacatatgcaaggaattgcttagaagattgctctgagctttattcaggtgcagggtctagtatacaaagtggtgggaaagcttt

SEQ ID NO: 244027 - DNA, 388 bp, Gossypium hirsutum
  unsure (1)..(388): unsure at all n locations
cccacgcgtccgcccacgcgtccggttaaaagtgcttaaatgtgataagtctgtaatcccatctatatatgacttccgtagcgtctatttttttcacgcttacttgacgttggatgaggctgagaacttaagtgaattagaagaagtcgaggaagttggctttccaatgtcagaggttcctaggaaagcaaaacgaaccaggtctcgaacttccaatggtctactaaaagcaaagaaacaaaagactagtatgggcagcattctctcgcagcggagacaaaacaaagagaaatggaggtataatgaagattttgagccagagccagagtctgacattaagggtttagaggaagatgactngtcagaggatgatttgctcgatgattat

SEQ ID NO: 244028 - DNA, 336 bp, Gossypium hirsutum
cccacgcgtccgggaaaatgacggaagcgggagacccattcgttgaatccgaggtaattggaagtgatcatttgatggagccaagttttcacaagtacgtgacagttaggagaggtggtggtggggcagatatggaggaacaagaatcatcagggagcaatagtatagcgggcagtgggcagcagcattggggattttcatcctcctcgtgggaacccaattcagcagattcaacggatcgatggagtttaaggacaaaaagcagacaagaggattacaacagtcccctgggactccataggcatgcctttgctgaagcaggtagtggcatgaaaa

SEQ ID NO: 244029 - DNA, 374 bp, Gossypium hirsutum
aacaaattgagaaagagaaagctcaaggcatacacctatctgtcctcagcattctcacgatgcccagcacccacatccggaaccccatgctctcgccttcaggtccgccacatgctgatcatactactccaggccatgctccttcttctggaccaggcccccatgcgccaccgccaggaccaggtggtccaggtcatcattccgagccacacaagcgctcgccatgatccttataccgtgtatccaatattatgtacgcttaggctccgtacccgacttgtataactctatcacctacttggtgttaggctttatgtaataaattatgaaaacctatttctactagaataataataaagtagcacgtttgatgt

SEQ ID NO: 244030 - DNA, 357 bp, Gossypium hirsutum
  unsure (1)..(357): unsure at all n locations
aattggcgggtacgacaccacgcgtccgattgctgctgatgcttcagtcttcagttttggcgacgacgaagattatgacagtgagtgagctaggtttgtctaaacatcaaaacgagaaattcccattgatttttttttgaaaaaaaaacacacacgataaaatgcaattgaacaatttattgtacgaatttgttgcactaatgagaggttgagggtgatagcttgacctctcgttagctgccatttgttctttgctttatattgaattctcttatttattattnaaaaaaaaaaaaaaaataaaaaaaaataaaaaaactatttaaaatttttttaaatatattaaaattaatttat

SEQ ID NO: 244031 - DNA, 241 bp, Gossypium hirsutum
gttgaagtagtaatatctatagcatacagatatggataggcaaagaagcaagcacgtttgtttggtgatgtgggttttggttgcttcttttttcactcacaatagggtcattgcaattatctttactggcctttgttggcataaaaactaatatttcagttttttgacccttatgctggaactttcctttagtgttacatttcacttctaccattctttatgaagttgtttatcttgcttt

SEQ ID NO: 244032 - DNA, 159 bp, Gossypium hirsutum
gccacgcgtccggcagcattaagagaattattcaaagcaaaacaaggaaactatcctactgctgaggaacacatgccctatgccctattttcgtttaaagaccgccaaggaaattctgaaactgaaaagctgattgatcggatgtgtatgctggctttt

SEQ ID NO: 244033 - DNA, 418 bp, Gossypium hirsutum
  unsure (1)..(418): unsure at all n locations
ccggaccggaaggcccgacccaaccgacccgagaacctgagccttttgagccgcagtttacaggaatagaattcggtattatcctatgttttttcttcattgagttattgcctggaatatctttgcagtttaattcatttgttataatcttgtcttccacctcattaattttcactagataacctttaaagggttttcttttaggaattaaaaccattcaatggnttctagccggcacccaacctggattccaagttggccccgtcctttttggaaaaaccatctataggggccttacaaaatggcaatttcaaggttaccagggttttattttgcctttccttaagtgaaaggtattaactttaacaagcacctaccgggcttttaagggaggaaatggatttatttcttatttctt

SEQ ID NO: 244034 - DNA, 244 bp, Gossypium hirsutum
gctgatttgggtaatcactcaactgggtatagtcgtagactggatgtccctatgcagcctataaaatcattgtctgggattcttaatagtgaagtaactgcccatagggacttcgatttgaataatggccctgctgttgatgaggataatgctgagtaaactcggaaatagaatttggggcatgttttgccctgttatctttggtttggatgctataatttacttaaaaaacctgaatcttggc

SEQ ID NO: 244035 - DNA, 412 bp, Gossypium hirsutum
accttcacgaatctcgccatcttcatgcaatgaatcgaattcggggatccggcggacgttttcttagcaaaaagaaaccgcaatggtccgatccaacctccaattacatcttggatatcggttgcttcgaccaaaaggataataatggatcggaacttgagagccgttgctcacatacggcagaatacggtggttcatgtacgagctgctccaacatttcaagtatcaccaacaatggtggcgacatatctcgccgtgcggtcagttcgtgcaatggaatacaaaactgtgcttcgcttgtccggtgagaaaacgggcgacttcagaaaacgggcgacaagaagtcggcaactcatccttggcttatatatatatcaattatagtctttggttttcatgcatagtgtaaaat

SEQ ID NO: 244036 - DNA, 394 bp, Gossypium hirsutum
  unsure (1)..(394): unsure at all n locations
cccacccgtccgccacgcgtccggtttcatgagagggggacctaatgggcctggtctttttggccttctaaatgggcgtttttggaaaaatcgtaattaatcattttcacggcaaccctgaaactcaaaaaaaatggtnccaggggtctttttagttggggcgctttcaatgtctctccctatcttaagttggtaattcttctgtttcaatcatctcgctgaggcacattccactgaagaacgagtttttctcaacactaacggagccaatttatctggactctggactcgctgtagcaaggggtgcttcgtgataagttaggaaactggattgcgggttttcatagattcctggtaaatgctcagtttttgatgcggaactttaggtattctc

SEQ ID NO: 244037 - DNA, 283 bp, Gossypium hirsutum
gtccgtcaacgtatacttcatatcaattctgaaatgctcccctgcatatatggtgcacagctgatcgtctccaaagatgaagacctgaacaaacgcggcatacatatgacaggggacgaatggatgcacattcctactggcgagagagctggacttcaatgtcagatggctttgtgcttataatcgaatcacgcgttccccttcacctatgcctttaccgataccttctctaacattgacatgtatcaccggaacgctcaaagaagttgagctcgattccaaa

SEQ ID NO: 244038 - DNA, 151 bp, Gossypium hirsutum
ttacccacctttaattttaatgccaaatccaactacctttcgtttcttctcttcgagtagacccaccctagacccactaactttagctgactaccatattttttcttcttcttctctcgcttcgcgtgcgtggatttattctctttattcc

SEQ ID NO: 244039 - DNA, 327 bp, Gossypium hirsutum
cccacagatgcggaatgcatggaaaacggtctttcaaatactgattttgtgcattgcgtgatggtaatcagatggttagattgcaaaggacatattgctaagaactttagactgaaatacctcacctgctacagcattacgatcaacctcgcatgaagtaaggagctgacatagcactccctaatatcagaatgcgcaactcagaatatctagctaagcagcatatggactctttctactatcgtgtgagcaacaaaggatcattcgtcattccagcagttttgtccctgaagctttagcatccacatcaacggactgaggccgttt

SEQ ID NO: 244040 - DNA, 209 bp, Gossypium hirsutum
ttctttaatttaacctttgatgtgccggtgggattggtcagaagatttcttgctgaccattaaaccttttatttctggtgatgatattttcataaccttttctggttggaatatttgggatgggatgtcattaccaacttctaaccttttgatggtcttaaaccggtttacatatgggttattaccttgaaattcctggaatttctttt

SEQ ID NO: 244041 - DNA, 178 bp, Gossypium hirsutum
tggaccaagccgtccgccaacccttcggccaagccttccggagggttttaacaaggttttattatggtctattccacaaaatattccaggtcattttattggccctttccagaaacacttgacttttacccacccctttgagaataaaaaaccgtttcaaaggaccccgccaatttcc

SEQ ID NO: 244042 - DNA, 361 bp, Gossypium hirsutum
cttaaaaactggataaaggagcctactaactaccgccattcacgggtgggcgggacatatgctcataaggcactgagtctttggcgataagagctcttagaagcggacctgtgggtcaggtttatctgacaaacacacggaacgcatgggcctggctgcaagatacctatgccgtaaggaagtgtgacaacatatatgatagtgcgcacgatctgcctagaaacaggttatgttctcaacgtacacgacctgctgtgggaaacattcagagcgtgctaacgtggccataagtgcggttagaaagaatgatcatgcaccaaacggcggatggcaatgggtttggtcaatagtgcatcaaaag

SEQ ID NO: 244043 - DNA, 398 bp, Gossypium hirsutum
aatactttgagctctaagtccagaggagatggggataatcttgatgtcctagctggcatggttcctgtttgacaggttatctaaggaatggtggatcgtctgaaagtggagggtaaagttgtgaatacgcgagaggggaacacagaactggtggtgttggaccaagctgacaatggacaaattcaaggtcgaccatcaggagtggtccatggggtgaaagcgacgcgatactcatggacgattcatcagaagagtgatggtgccctcaaaggtgtttatgggagtccccgtagaaatttgaggaaggatttatggtatggcctaagctgcattgctacaaatattaatctcccttggttgattactgggattttaatgctttgcttgatgaggatgag

SEQ ID NO: 244044 - DNA, 290 bp, Gossypium hirsutum
aacgcttctacatttaattaaagaccgaccggggaccttagctatgtatttactcgaatgggacctatgagagtcgtcttcctttgcatggctgattcctttgacaaaaaccggcgatgctgtctatctgccttaggcgcactcacatatgtttgtgtctgtctgctctggcttgggagttagtgaagaagggcatgatatttgatggcgcaacaaaaagcgatctacaccttattggcactaggtaccaagagctatggcgcctttacaggggttaatgggaacttcac

SEQ ID NO: 244045 - DNA, 332 bp, Gossypium hirsutum
ctcacgcggccgctgttctggtggcgggattacttaccgcttgacccagcgatagaccctgcgagacattctatgctgtctcttatgaaaactctaacgaaaatccttactacactggattcttcaccggattcaccaacgtctggaccgagaacggtcaaccgaacggaccaccaccatgacccgagtcgtgctatgtctggaagtgtattcgggagcgcagtaacgacatccttagtgtggtcttcggtgttcgttgcggcgctcttagcggcgctatcacggacgtgaccctgtacttggtctggaccctgtttgaggatcagtctgat

SEQ ID NO: 244046 - DNA, 253 bp, Gossypium hirsutum
gcttaattttcctggattatcgtgggtctgttttgagtaaattgaaagagtgtcaattcatgtatgctattgcagctatagaaatttgtggtttctttccatcatttttttcagttaaatgctaagattaaatctttagataattcatagataaacagaataggaaaacaagaatgaggttcaaagtcgccagtatatggttagtgttcggatcatatttatgagtaatcttcttgagtgatggctgttttaa

SEQ ID NO: 244047 - DNA, 329 bp, Gossypium hirsutum
gccttgggtcccattttgggggaccaccaaacaggggaggttggaaaggttggcttggacctttcttttgaaagctttttggaaagttggtccaaggtggaaaaccaccgggtaagatcaagtcctaatagtcagggggaatgaatatcatataaccctcatctccctctgagacataattatctgagaacccctggaatcattatgacgctgaaaagcgcttgaaagacatctgagttgagcagttacaagatcttcgcgcatatgaaagagctattctggaatttttgagaacttatgtagcgaaggacagatctggatcacagatc

SEQ ID NO: 244048 - DNA, 316 bp, Gossypium hirsutum
cccacgcgtccgcccacgcgtccgtgcaacctgaaaaaaaagtatgtaccattaagaatatatgtttgtaaaaaaatgttctgcagtcgcattcattggttaatgttgttgaactgaattggctttttagcagactcttccactttacatgattatatatagcttattttttctacagccaaaaagaccataacttaatatagaagccaagagaatgtgaaagattattgactcatacacgctatagatttagtttacacaagtctctctacacgatactttttgtcttttcacataaaccgctcgaagaaatcta

SEQ ID NO: 244049 - DNA, 335 bp, Gossypium hirsutum
acgaaacccagttgccatttctgttttttatttcttgggagaatttagaaaaaagaagaaaaataatattctcttaacatgggtatttactcgaccgagatggaggccgtgacggacgcgacagggttattctcgacggcattcttcacaaacctggcaatgatggtggtggtgtacaagatagtgtgcggcatgtttttgggtcccgaagatttacgacaaaagcttcataaagagccaattcatgtcggagatattactgaatcaaagttaagagcttacaagggttcggacaccaaaaagcctatcctaattgccatgaaaggccagatcta

SEQ ID NO: 244050 - DNA, 297 bp, Gossypium hirsutum
cggacgcgtgggcggacgcgtgggtccctccttccatgtttaattttattgtctttatattcgtttaatcctaggattctaaaggtttatttatgtacttaaaaagttagtacaaaatgttccatttgggcttctgattcaaaaaaaaaaaaaaaaaaaaaaaaaaaaaaactaaaaaaaaaatagaacaattacactatataaaacctaaagaatatagaaggaaaaatgtataatattctctattgatttgatttacaccagtatatatgcgggggttctatcaactctaacatt

SEQ ID NO: 244051 - DNA, 384 bp, Gossypium hirsutum
cccacgcgtccgtgtacacggacggcatagatggcatcccgctggatggggaaaggatccgttatttcgtaagcggcaaggaagagagctgcaagaacggtctaaagctacatgtggaggtgatgccttttgggaaccccgagcccgaaaagcccagagttgcagtggctgctgcagcgcccaccactccttctggatcagcccggctttacagaagctccgtgttattattggttgggttatggctttgccatatggctatttaattgtaccagttatgacctctctgcactctttttcctctttagactttaccttctgctttatattgttgtacgagaatctactttaaatttcaaattatgtgtatcacttgatatcttc

SEQ ID NO: 244052 - DNA, 295 bp, Gossypium hirsutum
  unsure (1)..(295): unsure at all n locations
cccacgcgtncggaaaaatttgataatgggccttagttatttgggttaatttttggactggtgtaatgaatatttgggttggtcttgttctgagtgggccgggcaaaaatgggctattacagttgcccctctttgctcgttgtcatgtaatgggaacagagcatagactaaaaagcccaattttgcccggtcatactagaccttggtgctcctcttcttttttaaatagcctcattcctttctttaatataaattttatattaatataactataaaccttttattagcttttatt

SEQ ID NO: 244053 - DNA, 405 bp, Gossypium hirsutum
ccttccaaccttctccctccttttcatgcttctatcctgaccaaccctttaacaaaccctaacaaccctcaacaaggccttcaattacgaattgtatgaggtaacagagtaacagagaatagcagcaatggttcccaaatgttgagaatgcgcttgcgaagttcacatgggctaaagaagttcataagaagatggttacgctgaaagaggaaggcaagccgatgccaaagaactttgctgaggtgcaaaagctaatgggttcaacaccattggatcttgccaagtttaatatggtaaagagtggagaaatgagccgtaatgctccttgtccatgtggttgcaagaagagatacaaaaggtaatttggcacactatttctcagcgatctgtgttgctgtgagtagc

SEQ ID NO: 244054 - DNA, 403 bp, Gossypium hirsutum
cccacgcgtccgaaaccttagagcgcatcctatgaagcctgttatccattgattgaacaatgaaagctcatagagttgctatagacagcatgttggattaaattccttagacaacatgttaaaagaacctatcatgatgatgagaaacccaatatgtcttaattaacttgatgcatacacatgttatattttattggtagctgattaaatgcttcattcatattgatcacgagctatgcataaaaggtgaaaattttgaatgctgatatctaatctaggactaaatgatagggttgccaattcaacttgctaatatttggtgcaattttattaattgtagtttaacccaaatgagaatgggaagcccttttttttttaatcttacgaaattggtttttttaga

SEQ ID NO: 244055 - DNA, 268 bp, Gossypium hirsutum
acaggacggcattcttggatcattatcgctaaacgcggtgtagagagctatcgctactctctcatctgctctttataatacacacctaattggatcctcgtaccactgtgggtaaaaacactaatcatttatttctggtgaccctgccacacatgatagatattccaccaacagatactattcagagttttgatgaggcttagatggatgtcttagaacacgaactgcaggaaaaatctgtgatgacttacatgaaatgtgtatcttg

SEQ ID NO: 244056 - DNA, 245 bp, Gossypium hirsutum
gccattcatcccagggtaccatttgttcatggtcggcgtatcagatagcctgaacatctacagtttatgctgaaaccactgctctaggcgtaagaattgctgccggcccaaaaatgagcactgccaaggttgcgtcattcaatgctcttacttgcgtctattgtgcgcctaagacacacttatcaacaggctcttgtgtgaggacattttggtgcctgctgcctttacaagatgatcatgatggt

SEQ ID NO: 244057 - DNA, 359 bp, Gossypium hirsutum
gtgaggtacctgctgcagactctcaaacatgtaactcgcgatgatgctcctattgatcttattgctatgtgccataaacccatagacgaaaatccctacttccaatatgagtccagcttacctggccatgacaagctacgcacatatgtgcatggacttatgcttcgcctgttcagttatacgtgtcatttggagatgctgtgattttcgatacgacgcaccgcctggatgcctatgacatgctattaggtgtatgggctggagtagaaaatcatggaatgactactttttttggatgtgtccttttacgagatgaaaacatacaatctttctcatggggattgaaggtagaaaaccta

SEQ ID NO: 244058 - DNA, 415 bp, Gossypium hirsutum
cccacgcgtccgtccacctcttcatttaccttatgtggcgggtgcttctccagtggttacaatagatcacacattgtaacatagagaggttatgcacaaggttttaaaattttatctcactcgggcttaggatcggatgaaatagatggcagacaaatagaggtcagtgcattagaagttgtcacctcaatattttagccattttttcagtagaggctcgtgtgggacaggttgcttacaaactgttattaccatattctgctcgtattcattcaacttttcatgtctcccaattgaagaagcatattgggtcctcggttagtgcttttacctaaccaccagtggggtctgatggagctcttctcaagacaccgattcgagtattgaacaggcgcctaatcaagcaaggtaacca

SEQ ID NO: 244059 - DNA, 426 bp, Gossypium hirsutum
cccacgcgtccgcccacgcgtccggtcctctggcatggagattctttcggatccttgtattgatttccatgacctatatcatgctcacaagcttaaaagtgatgatcggtatgggactacaaaaacatgcaacctggtatgtcagtaggtgtcgtaaaaggaaacatcatctcgattgatttgattcaaaaatggtggcccgttacctgttgcatgcatatggttgttttgggttcagcacttatcaatcaatcatataataaatgcaacaagaagatggaggtttcagaatgagagtggtagcaggacatagcatatgatatcgcgatctgactaccgacgagtatactgattcttttgtagagaagatgttcagttgctgggttcagggagttagtcttttgatatgattgaaggtttaagtat

SEQ ID NO: 244060 - DNA, 414 bp, Gossypium hirsutum
aaaaactccaaatgagttccttgtaaaaagttctagcatgataactctctgcatactgaaattgaaacaggacattcacggaagagatggtccatattctttgttcctctttcacacctggggcagatggtagtatttgttaacatcctatttagcatattaactcgtataggtagatagttccatgatattttccagattgtaatttttattttttaaggtagattgagtagccataattttttgtaaaattccttatagtcggtttgtaaagcataagctctagatcaccttcaatagctctgtaatagtttataggcgctacgcattgtgtattctcccgaaagctcaccactccaagcccgaaaatcatcatggggtttttctgccaacggaatgcggaaaatcttttca

SEQ ID NO: 244061 - DNA, 246 bp, Gossypium hirsutum
cttatctgcttatgggtgcgtggcacagatgctgatctggaatgtcttctgtttattttcttcggtgtcaataaagtgatggtgaaatgggattgtaagcataatgagatgaaaactgaaacttcatttatgcattacagttgaaatgggatgatgaccgaatattaataatggaatcaacctcattgcttataaaaaaaaggaaaaaacaattacataaaaaagaaaacttaatactttagtaca

SEQ ID NO: 244062 - DNA, 424 bp, Gossypium hirsutum
atgagatgacagctgttggtatctttctatgcatgaaaggaaaacttgtaagctttcatttctttgtgcatgtgtttgacttccagggcttcgcaaacgccatggattggagatgttatgagttgctggttctatacagacttaatcgtgcatttctaaatatcgtagttactaaccacgtgatttaacttacgagtttgcgatttctccatgagaaagcatttgagccttggcaatgaaattcagacattagtgtgagttgtagttaaataacataacttttcggcttttgcttttctggaaggtgcaaaatagccacgattacagcaacatttccagcatcattgatccgaggttgggcagtagcttcacagctgaaggcatggaggaattcataaggttaaccgtccgatgtttggaacca

SEQ ID NO: 244063 - DNA, 411 bp, Gossypium hirsutum
caaagacagcttgctattgcggaaaatgaacaacatagattgtggaggcaggcaagaatgaagactgatatacatctccttataactaaagtgcccgaattggaaattgttgactgctttgacgctattgagaggcatcttctcggggaaatgcagctgcagcaatctggaaaggcgatatcggactctgcagcaatgtgtcagaaattgaaaggtgatctacaggcagtgttcaacgtacttccaaacgacatgcagcagcttttgcttttaaacccccaaagagcagctcttttacagggaagttcaagtccagaactaacgatacttcctggccgtccttcgattcaagtcggggttgtatcctccaattcaccaagataacctaaaagggaaaagaaaaggtatctc

SEQ ID NO: 244064 - DNA, 359 bp, Gossypium hirsutum
cccacgcgtccgagaaagatgagacaaagatctaagtagcctaatgttgcttgatgggtactttcttttttgttaaaggatttgagatttatctttataatttttatggtttagttttgtatttttgttgaacccttttttcatctacatgaacaatgttttctttttagaactaaatgcttatctttttttatgttagctttgagatgggtgtctttgttaagtgctgcccactaaaaaaataattgttaaaagccttttataatttctttttaataccctagaatggtaattttaatattattaatacctattctccttccataaactctattaattttttttgggggggccctttt

SEQ ID NO: 244065 - DNA, 397 bp, Gossypium hirsutum
cccacgcgtccgcccacgcgtccggagttgctcaacactttgaaactgggtttacattgcgtggacccatcgccatcggcaagacccgaagttcatcaggttctccagcagctagaagagattagaccagagagtgagacacctgctagctctgcaccttctggtgatgatggagctggaggagttccttcaacaagcgagtgaaaaaaggggggtgttcatgtattaggcataggcactagagagcattgattcttttattcttacaagagatatccttagatattaattttgtgtgctgtctgtaaatatgtttttaatagttccaggttgtttgcccctttgaattgttatgatgtagttcagttccactccctggaaagactaggcgattttg

SEQ ID NO: 244066 - DNA, 423 bp, Gossypium hirsutum
aggcgctcaatgctaatctgaaaagaattgaagaaagcactgcagctttggctgctgctgatgattgggtgctaacctatcccccaggtggtactaggcaatctggctggccctctagtgcatccgttggtaatacaacaatatttcaacataaacttacgagtagtgctcatcgattcaattcaatggtccaggatttcttcgaggatgttggaccactattaagcatggagttgggagggcaaacactggaaggtttgtttcgagtgtttgactcatatgtaaatatgctcattaaagcattgccgggtttgatggatgaagaaacgaattttgaggatactggaaataaaattgttcgaatggctgagactgaggcccaacaaattgcattgctagcaaatgcatcattgttggcagatg

SEQ ID NO: 244067 - DNA, 278 bp, Gossypium hirsutum
  unsure (1)..(278): unsure at all n locations
gtttcaaagtagagcttcatgctagaacaggaaaactggtttgaagaagtcttaagcttgatcactatttcaccattttgaaagactggtcttgtctgcagtgtaaatatgctgtctttgtcccaatggggacaatgtcacatgaataaggaaaagctggtagtacttttgttcttcattggcttaatgtataatttgatacacttttttctaacanaaaaaaaaaaaaaaaaaaaaaaaaaaaaaaaaaaaaaaaaaaaaaaataatcatttatttt

SEQ ID NO: 244068 - DNA, 344 bp, Gossypium hirsutum
cccacgcagcctgtgtccaatggttaagactccaaacatggctatttccagcgtgggtttcaaagtctccatgactctcatggtgatccagacgatacctacatcacccatggctgtcaatgccaccatcactgtgcaaagacataatccaaccacatagatggctgagcttgtgctacttacaaaaacagggttcacccggtgatccttactatgatgctgtaactgctctctaccgagatgctcacacctccccggcccgtggagacgtgtaccatatcatcaaatatggatcaaacggtgttaccgacaacagccctaacctaactgtgtgagccggtcta

SEQ ID NO: 244069 - DNA, 227 bp, Gossypium hirsutum
accactcgtacgataacgtaacacaggttaccttctcaccttccccaccttactactttaaaaaatcctctctctttcgccatgcatgggctgtaccggccccttatgtgccctcaccaccgccactgttctaacgagatccacaacgctctgttcaccgttactgcggagaggcccacctacactgatgtgacagctgctacatctattaacgaaggcgcctgcta

SEQ ID NO: 244070 - DNA, 292 bp, Gossypium hirsutum
aattgccggatccactccacgcgttcgggacagaatggttagacagataacgtgtattcaaactctactcttctctcttgcatgtgtcgagtggcaaaggggattcttgttaagcagggcctcctccagtaaagtcaccggcgtggttgaacattccgaatccatatcgctctaaccattccttacatcggttgattaaatgcgcacttttaatgttccagcatctcctgaaaccattaatgagagacacgtaccttaccgacagattatggacactctcttgccgagcact

SEQ ID NO: 244071 - DNA, 370 bp, Gossypium hirsutum
acggggaaagcatctcgacctggacacaagcatgattgtcaccaaccatgaagttgatgccattactgaggaatgcagccagaaaatctatcccggacaaagcttcatctttgcgattcattttaaaggcaggctgcatcctttgctcctaacttgctctgggaagctggttgaaacttgattatttttggcctcaatgcttgaactttgatcattcctctccccaatgctgataggaagacttacatttagcatgcgtgagcaagaatgggacccatagatcgcatctgtacgaccatgacactagaattttacactacgaacttgaatgcatggtcctaagctctgagcccttctatttgtccaacct

SEQ ID NO: 244072 - DNA, 225 bp, Gossypium hirsutum
gctgattgctttcccaggagcttttgttgaagatggatgttggtaatggtacaaaatgaatcagacactttgttgatgttgcttgtgctacaccactttttgtcattttgtgcctatggtactgtcatggtatggtatgggtcccttactatattagatttagggttgtttgaacaaaggtgaatgacattattataatgggaaaatatagggtgattgaccgat

SEQ ID NO: 244073 - DNA, 303 bp, Gossypium hirsutum
acgaaggctaggtgttgtataaaggcacctcaattcaactcactgagggccttcttactaacatccaacggataaaaccaccgcgtatcccaactttatctccttggggaagatttcaccgtctccagctgtcgttctaccaagaaagcccgcgactgtcgaccattcctatcagataaccagacccaataggccatgagacacactctgcagcggcgcattaagacgcggacgcggatgtgattacgctcatgcccgtccagatacacttgccagactccctaccgcccgctgcgttagatt

SEQ ID NO: 244074 - DNA, 426 bp, Gossypium hirsutum
cttttgcatgtttctgcatgtacatacatctgtttgattttttgaaccatgctggcattctaacattctattttggatgcaagtttgaagcactatttaagggttttgatagaaggggaaggaaaaggaaatgtctaaagcactacataattctttctgacttaataaaatgacaactccatgatgccgtgatttgctatgttggttttcatcaagttttttggaagtacatacaatgattcttgcttacagtttctgctttactgtaattgtgatattgttaatcttcagtttcaatctttaaacaacaagcagaactgaaattttatatctgcttataaatgttatgcagtctgcatttgcattcatacattacaagacattatcaaaatgtatccatcgcctttatgtttttattatgatata

SEQ ID NO: 244075 - DNA, 428 bp, Gossypium hirsutum
ccaacctgaatcgactagtcctggctggaaacaggtttacaggtcgaatcccagatagtttgggaaggttaaagaagctgttaatcttggatttaagtagaaattcactctccggccatttacctctaggtcttggtggtctggcatcactcttgaagtttgatttgagtaacaatcaattgaaggggaagctgtttgcacgtaatgcatatctgaagaatttgacccttttagatgtgagaaacaaccagttttcaggtgggttaaaccagccaattctagacatgcattctttggaagagttgatgctgtcttgcaacccattaggtggagatattatgaggctagattggcaaagtttacaaagtcttgtggtgttggatctcagtaatgtaggattaaaaggtgaaattcctgaatccctatct

SEQ ID NO: 244076 - DNA, 347 bp, Gossypium hirsutum
gctacgcgaacagatgccggactagacgcggggcggctaaaagggcggcgacgaggacgacgaataggatcccacacctgaccggggtggatacagtggtggcctcactcacggccgaacttagggaccctccgaggagacttgctacgatactggttcaccttccgatggacactttgatgatgcacgtgatgatgcacgttccggttactctcactgagacgatcacttagaagatgccgacactgcttacggaacctattacagaccctatctcagacctgaacgatgacgcagctggacctgcacctggcgctggatctggtgactgttgaagggaccctgga

SEQ ID NO: 244077 - DNA, 263 bp, Gossypium hirsutum
tcgagacataataacaaaaagtgtatcccatagtcctctggatgatttggatggagatcacggaattgctcattttgcctccttacaatctgttgaagatggttctgaaatagctttttacatatcacctactatactataggaggcctcacctgaaaattcggtgtgcattttctatgtactgggttggctgattttccatctggaccaatgtctattggagagggacttgaggaaatgtgtttggtgatgggaaggtaaaa

SEQ ID NO: 244078 - DNA, 281 bp, Gossypium hirsutum
ataagactcaaggttcgatatgctgaccgatttgatttcaaaacaacatatgtgggtgattccaaggaagttatctcgaatttgtaaggcattgattcaggactgctggagcaggatgttgcaccacatgcactcatccacatgcggaaagacaacctaaacttgatatggctacactttctaggctgcgagcctctgttaacataaaaacaaagccccgtttcattctccatcatgatgattaatatctttctgtcattacattaatgctcactttatct

SEQ ID NO: 244079 - DNA, 393 bp, Gossypium hirsutum
cccacgcgtccgcggacgcgtggggttggagaagggtgaccctccagatgccatcacatataaggtaatatttcgcggcctttgtagtggtggaggaccaattggagaagctgttgattttgtagttgagatgaccgagaaaggatttttacccgaattctcatcattttatatgctggctgaaggactttgtgctttatctatggaggataccttaattaagctggttaatatggtgatcgataaagctaactgttcagacagtgaggtttccattataagaggttttcttagaatccgtaaatttcaagatgcattggctaccctcggaaacatcctggacagcagaaagcagaagaaaccttactggtcaggatgaagctagatagtgct

SEQ ID NO: 244080 - DNA, 418 bp, Gossypium hirsutum
cccacgcgtccggggagctcaaagaggacaaaatgggattcaagtggaatgagtgatagacccggaggtttgggtgtaacagggttcaatatgtatgaaaccaggagttattgaaacataatcattgtattgatcttgaaagccattggagcttctagaacgtttggaaacacaaccctgaatgaatggggatgggatgctcacacttgttggatattagtgagggatgtgctagtatttttgggatttggatcttcaggttcggcatggcaagatcagattgcttaggcatctaacactcctcatctttggtgcaatttcattaattgtagtttaaccaaatgagaatgggaagccttttttttcttaatcttccgaaattggttttttgagaaaaatcgttatttgtagattgtag

SEQ ID NO: 244081 - DNA, 421 bp, Gossypium hirsutum
gttcggttcagtcggaggcgtttcagcgaaaagcaagcagaacaatggtgggcagcaaacagggctagagtatatcagcggtacaacgttcccttggttgaaaaacccactcttggtgtgggaagggaagggttagctcattgacttggcagattcaagactctggctacttaatccgaagttcattccgggctacagctttcaagactgagccaaggtaagatgccctcaattttgttttagttttgcgagggtgtgtactagttctggtttcggcactttaaatttcggctgtaaatgtataattgtactatgttggattttaggagataaactgtgaggaattgattgagttctttatgactaggctgcggagggctttgtattcgaaactgattgtaaatgcataagaaattactaa

SEQ ID NO: 244082 - DNA, 403 bp, Gossypium hirsutum
cacatctcagtttcccagcattcatgttaaggaaaaatgggcaaaaaatctctatcttgcttgtctatgctatggaaggactgtatcatgaaatccatgtcattggtgacaattttactgagggataaaagggtggattttgttttcttcccctaattttatctgttatttgctttctctcgatgttccatgttaaatgtttagaggaggggagtacactagggatgtctaaatatacctcaagcccttgctatttagtttttgtattttaaaaatgtataagtgttcacaccctttgctccttttaaatattacttatgtgtaatattttcttgatataaagtaatgatgtggaattaaaatgatgttcttttcaatgttgtggaattattttgaaaatata

SEQ ID NO: 244083 - DNA, 394 bp, Gossypium hirsutum
gctcatcaacggtccaaccaacgttaccctcaactccactggcgaacaatattacatttgcacaattgcgcggcactgtgaactgggtcaaagattagccattaccgtctccgccacttccagctctcctttgcctgcaccttcacctactactcctgcaaccccttctcctacttccaatgattgtacaccggctcctacatccggtccaacagctggctcgatacctgctcccaatgccactcctaattcttcatcttcatcatctgtccttgccactctgttgctgtccctattccccattttcatgggtttaattttctgatctatattgaggatcgaggataccaatcttcttatacttcatgattaattatttgttccttccacgata

SEQ ID NO: 244084 - DNA, 415 bp, Gossypium hirsutum
cattgtttgaacatacaagtgctgacaattttattactttctcttaacttttagcatattctttggaggcattatcacaattgtttttttgaggcgagtgccactttgatatgtagaaagaaaactgagaattagtgatgattttacccaattcagtccacttttattgttttaaatcttagatgctaatttgattctcccttttgaggctgtaatcttttttgggattacatttgcagtctctcctccaaatgaaacttgtaatctaaacatatatctattaaaagaaatgacttttcatgctcttgcagttgcaaaaaaaaaaaaaaaaaaaaaaaaaaaaaaaaaataaataaaaaaaataaaaataataaaaattattaaaaaaatatatattataaataatatattaaaa

SEQ ID NO: 244085 - DNA, 242 bp, Gossypium hirsutum
cttatatcaccttaccgttaacaatataagcttagataacaaacaatgcgatagcttaatgggtaggataaattcggtgaagaaacatataagggttcctgtcataactactaagatctccgtatattccactatacgactattcatggcagaaatactggcaaaagccaatcaatcgcttccccatttccgctaggatattataaattcaatatcgttagaaggtaaccccgttaggaatc

SEQ ID NO: 244086 - DNA, 404 bp, Gossypium hirsutum
ggcctgccatgtttgaagtataccagctcttaagagctatcggtgaacaatacaatttcactacagaagatgaaatttcgatgccttcagataccaatgatgtcggttatttagaggaacttatagttgctcgataaatcaacaagaataagtgcaaagatatgggatacggtgagtatttcttgttgtttacgtttaataaagggttgagattacatgcactttctaattaggtctgtgtcttttgtttcatagtagaatacttgattagtttcatggaggaaacactttagattcattactaagatattcttatctccttaattaggctttcacccttagttacaccaaggaaatgctacattgtaaagtaagatcaatttataattatggattcttgttct

SEQ ID NO: 244087 - DNA, 394 bp, Gossypium hirsutum
gagaaatgatagggattacagagatagattggagcgctctgaaaagtcccgggcagatgatattttgattgagaagtcgagagatagatcaatagagagacacggaagagagtgttctgttgagagaagcattgataggaatttggatagacttggtgataaagctaaggatgagcgcagcaaagacgaaagaagtaaagtacgatatgctgatacatccgtagaaaagtctcatgctgatgaccggtttcatgggcaaagcttgccgccaccaccacctttacctcctcatatggtcccacaatctgttaatgctactggtagaagggatgatgatcctgacagaaggtttggtagtacaagacacactcaaagactctctccaagacatgaa

SEQ ID NO: 244088 - DNA, 183 bp, Gossypium hirsutum
catacatgtgggtcggtaccttacacaggattatttacctgtacgaaaattaatggtgaaaaagattgttttgattgccattgttcgacataaagagcatgacaatgtacacattgtcctgtccaaagctgccacactttctgacctcacggttaacatggagcttacaggactttttaacaa

SEQ ID NO: 244089 - DNA, 395 bp, Gossypium hirsutum
gaaagaaactcgaaacgagaatctgaaatttcatctaatggtgacaccaaccaaaatgcattggaaagagcagcatatgcagatgcaaattcactacttgacaaggaagaacaagatattgaaagggcaattactgggattacagaagtgcagatgaaagagatacaagacaagtttcttcgttttgaggagatggatttgcagactgagaaagagaggcaacaactggagagcatgaagaatctactttttattgaccagctcaatctttcatttcgtagaaactatacatgaaatactgaacaagtggtgaagaacaattgttttctttttcttctgtattctgcctctgcagatggttatggccaaaggagaaaatttcttgaattgcaggt

SEQ ID NO: 244090 - DNA, 162 bp, Gossypium hirsutum
cccacgcgtccgctatacttaaatctatcatgcgagtgttgaaatagtttttggtagcccggaaatcagggtttgtttttggtagtattgcagatgatgatcttacatatgaactttgaactgctatggatatattttaatatatggacttattttggtacc

SEQ ID NO: 244091 - DNA, 400 bp, Gossypium hirsutum
ctagatcgcgagcggccgctcgcgatctagaatatcataagacattatagaggatgtgcatctgatcgactacgaataatgcgtcagagctcaacgacgacctataatcactaatgtagtgcgtgatcagtacgactagaggacctactgactctacagtactgatgcgtgcaccgtgtacggactatctgattggggtctgctacttcttaaccaggttgctgagaacagcattactagatgtctctgatttagcaaaagccttgtctacagcacttgatgcaccacttgcgccatctttttcttcgttgtctcctgcttaagctttatgggagctgaggcatgtttactggcgggatcagcaaaaaatgcataccacaccaagtacagaggaatcttt

SEQ ID NO: 244092 - DNA, 394 bp, Gossypium hirsutum
gcgaacggggagattagtggcttcggtttccgagtttcaagtgaagcgataaaatttggagaagaaaaagttatcgctggtcggcgacggtgagttggaaggaggggacccaccgccaccaaacaaatgccggagcgagttgccggcggtaccaataacgtttgcatgatgaccggatgatgtgcaagggccggttgggcaccgggaccggtggtaaatggcaacagttccggtttgcccaatggatttggaatttcatttggtttataccaagttcatggagaaatcgaatcattcttctgaatttttttttttgccatttaaaggtttaccatcataaatattggaccatgtattaatttaatttttattaatatatttgtgatagtattgg

SEQ ID NO: 244093 - DNA, 246 bp, Gossypium hirsutum
ggtggacagatgggaatgaggcagcttgatcctaaggcatcgaaggctgagggtaatggccttgctactgctaaagacttaaaccgtcttacggctgtcttaataaaaatgcgcggtggtcattgatctttgatcatctttgtctatatgatgaattataatggatgtatctcctaggaaaaaatttacctagtatatttttgatagtttacatgaaagagatcacaaactgttcttaaaacaaac

SEQ ID NO: 244094 - DNA, 319 bp, Gossypium hirsutum
cggacgcgtgggcggagtataaattaaatgatacaccgcaaataattccaacaacggataacaagtttcaacacaacgtctacttcaaggaatgcattcaccaaacatatctatggagcatccactaagaaagaaaatgcaacagctacgaacaagaagatggggaatgtgagtttagaataaaattatcgaaaaaagcttgtctcggaaacctccccaaattcattccttaagccaactttagagagaaaacaaaacctaaaacatctgtgtcgttggcttcttcctgtatctgcaactatgatcagcttatgcatca

SEQ ID NO: 244095 - DNA, 408 bp, Gossypium hirsutum
cttttttttcccgagaaaattaagatttccattttattttcttcctaatgtcatgtttcagtatgtcttctgttgggccatccatccctatcagaagttagtttctgcacccatatgcctcttcgaagcaccgacaatttctgagatgatgctttgttgatgtaacctttttatgtagagccagtaaaaaactgttattgtgtgatgtccagggggatgatcgtcccattttattttcaaccaaagggtagtaagaaatccatgtaaatgttagtccaaaatggctgaaaattgtaaaagctgtatgtcttatgcttgattgtatataattaaaagagctttcatgttgcaaggctcatcctcctaaaaaaaaaaaaaaaaaaacccacgcgtccgcccacgcgttcg

SEQ ID NO: 244096 - DNA, 247 bp, Gossypium hirsutum
cacatgcgtgcggcttgatcaatggtgcgattacttcaaacggtggacaatgacgcttggcggcagcttgtagaagtgaacaccttgtataaactgcttaactgatgtttcttggctatgaaaaataggcatggggttaaggaacattgcgaagttgggatataatatggaaatactattatttacaggtagatgatgtggatggatattaaatcaaattggaatgcaacatctatcagtttcagtt

SEQ ID NO: 244097 - DNA, 392 bp, Gossypium hirsutum
cccacgcgtccgaccacgcgtacgcggaaactacattacaaccctggtggcatatgcactattgtgcagatcaatgacctgaagaattccacacgacttactaaatgggagcttagacaagctaccaaacaagcccttcagttgctgtaggataactaccctgaatttgttgccagacaggtgtttatcaatgtgccatggtggtaccttgcggcgaataagatgataagtccatttttaacgcaaagaaccagaagtaagtttgtgttcgcaggcccttcaaaatctgcagagaaccttttcaggtacatcgctgcggagcaagtaccagacaggtacggagggttgatcaaagacggtgaattcggcaacaccgatgccgtcaccgaaat

SEQ ID NO: 244098 - DNA, 233 bp, Gossypium hirsutum
gaaaaaaataagaaatggttgaaaacatcgtaaaatagacgaatcccaatatagattgggaaggataaaataagatgagaatattggaaaataaaataaaaataaaatataacagacgtttacctctccgtctttgaaagtctggcttgactcttgaaatttattgagagttcctttttttttttaggtgaagctgttagcactttatgcctttctgaataattcgacccttt

SEQ ID NO: 244099 - DNA, 402 bp, Gossypium hirsutum
gggggttgtatgatggtttcatcactatcatctcggataggttgcatcacttttgcaagttcctccatgaagaagaccaagccaattggtttagcaaatgttaagtagtggttaatagcgtaagtgttttaagacacctcttgtttatttataaaactctaaaattgttatttgtttttctttttaagttaattgtaagtcggaattatgaaagtgtaagtgactttcttgacaattttgagaaaaattctcctaatgctctctctctctctctctctcccctctctaacaaaatatatattgaaatacactacatttataacaccaacatactggattgtttagaaatcgatgattatatatatttgtcatttttcatgttcattttactgtccatgttta

SEQ ID NO: 244100 - DNA, 137 bp, Gossypium hirsutum
cacggacggtgtatgataaggccattgttattaaggcttgctgtatgaactaggagctatacccaaggcatgtgcttgtttggagccaaataatcagccttctgtgccctttggggtatacaaaagcgacaccacac

SEQ ID NO: 244101 - DNA, 284 bp, Gossypium hirsutum
ctgatataactttatatcaaactcggtccgcttctaatctccttagtcgtgcaataactgtaacggtgattgctttcagcacaggtagttatgtggttttaaaaccttctcatggacttgccatcgcttcatgtttcatctgtcctgccgtatatttctgttattacatagaagtatttatagcttgggtgaagatggatctgtgataataaagaattttgtcacaaatattgtattatatgtgacgagttttatatgtgacactaataaaataagtgtgattt

SEQ ID NO: 244102 - DNA, 392 bp, Gossypium hirsutum
  unsure (1)..(392): unsure at all n locations
ggttctatgaggcatattaatagtcttgttgatgaaatgcaaaatgtccacctgtctatcaatccccctggaattctcaacagttttgcttgcttgagtttttgattcccaggaacaatcaacttatgtgaagcaaacaattgatggcagtttgaagatggaactttctcctatcatcagatgatgttccagagcaaggtaccaaagtattgaaatgaattatggggcagcatgaaagaaaagattgagttcctaaaaagagttccgaacactagcctatatccatccgattatcaagtcatgaaaagaaaggtagaaatatggtatggntcctattttttttttctttntctgactttttgttgatattcttttatcctaccgagagatca

SEQ ID NO: 244103 - DNA, 325 bp, Gossypium hirsutum
gaccttgcagctgcacttaaagagatgaacggtaaatatgtgggaaatagaccaatcaagcttcgaaagagtaactggaaggagaggatagatcaggatgcccttgtgagacagaaaaaccattatcagaaaaagccaaagctacagaagaaagggatattgcacaagtgagcacagctctggtgaagctttttcgccttccttgtcttggtggagcctgtttgaccgactgaatcattagtagtaaatcaagtgtgtttgctctactaagcaattcttaaaatttgggggggggggggagggagaattgaaggattaaaaagaa

SEQ ID NO: 244104 - DNA, 196 bp, Gossypium hirsutum
gcaagttcttgcatcatatgcggcatcaaaattaatcttcacaacctgatcagatgggtgcctccattttctaacactaaaagagtgttgcgtatttcttttatcactctcgtttagctctgatttttaattattaactaaagtcactatttcttttccagatttactagccttcttatgcactccagcgttcctg

SEQ ID NO: 244105 - DNA, 388 bp, Gossypium hirsutum
cccacgcgtccgggcaaactcgctttgtatctcgcaaaccaccaagagatgtaatctcaagtgttgaagctgttgcggaatcaatgggtctcaaggttcatacaagaaattacaaggtatgacttgtaaacatatcttcattgacaaattgcaggttactgttccatagagttatgctttagagacttttccacaaaatgaagtaaatttatctttttatgtaaaaagttctcaccattttatcattttcttctcttccaaagaagacaaaaaggggcattgctaacatgatagtaagaaacccttgaaatggctcctttatagcaggcacttattcaatattgattttgattacttttcaaaacactctaagaagtattttttttat

SEQ ID NO: 244106 - DNA, 385 bp, Gossypium hirsutum
cttgctatttcatttcctgatcaagaataggaagttgaaggatgcttcagtgctgttcaacgagatggttaaaaatgagtttttcccaagtaaaacagattgcattgcggcggttaagatttttcttgacattggggacccttatgtggctgtaaaagtttggaaattcatgatagagaattatgattctgatttggatgagactggaaatctgctgattaatgggcttcgtgatgcaaacatgcttcctgaggcagttaagtatgctgaggatatgattgagaaaggaatcaaggtcacctcagccacattgtcaaggctgaaacacagccttagccgagaaaaaaaggatggggtttatgaaagaactttaaagaaatggaaa

SEQ ID NO: 244107 - DNA, 406 bp, Gossypium hirsutum
caaaaagcttgaagattgtttagaagaggaagaaatggagtcagagagcaacaggagggtgctggtgatgcaaaggaagtacattagctatgagacactgaggagagacatggtcccatgtgctacccctggtgcttcttactatgattgcaatggcggtcatcaagcgaatcattacaaccgagggtgtgaagttattacaagatgtgctagaggtatcaaaggtatcaaagcttgaaaaaaataaaaatcccccccaaaattttatgtttttaacctaccatatatagctgctttgtcctaagtggtatctttctgggtttttcttatattggtgtatatttaaggttgttaaatttaacctgcttaatataattgcatgtttaactttgaatttttggatctg

SEQ ID NO: 244108 - DNA, 275 bp, Gossypium hirsutum
cccacgcgttcgggtgaatcctttggttttatcataaatttctttccagggggcattcatggcctgtaaatacctccaatctctatcgattagtcaacgatcatatttccttctttcggttacgtttcagacgacgttgggtgcttttcagatctgggttcagacgcaaactattttcatgtgtccatatctttcacagtgaaaacatacccttggtaaaaattcatactcaacttttctgttttttaccatcgattataatttgagacaccaat

SEQ ID NO: 244109 - DNA, 405 bp, Gossypium hirsutum
cggacgcgtgggtgttaatgttcacagatgtgtagattattttcgatggcaagctagagtttttatttaaaatatttgaggatggattttgcaccgctaacttgatgcttgattgtaggagtcgtgaatttctatggcaggaagggcatactgccttcgcaacaaaggaagaggcagacattgagtttgtggctgaaggcttcagtgcaagaccttgcttctcgtgcagctagtcgagccatggctgaagctgcaaaaagcatcagcctccaaatacagcatatcaatttgaggtttcctgtagagccctatctagtgtccgttcgctacaggctcatcttctgaaggtcgcttgtagttcatattttctatttctggtttacataataaggcacctatattggg

SEQ ID NO: 244110 - DNA, 263 bp, Gossypium hirsutum
cagtcatgttgacactaaatttagacttgaccattcatatacttgtgttgtgtgcgtataatattttttttcgtgttgtgtccgacatttccagtgtcgattaggaaatagtttctgttatcatattgttaatgtagatataatggtctgtacagaaatcaattcatcgccgtgaagtatgaatttgctgttgatttttgtgttggaatttttggaacatttaagaaacatagtgaccgataacctgtattgattcgtaatgg

SEQ ID NO: 244111 - DNA, 344 bp, Gossypium hirsutum
  unsure (1)..(344): unsure at all n locations
cggacgcgtgggttcggctgaacccctgcctctttcttcctgctttaccaaaccctaaactcccccttttttgttcgaatctcaataggccctagccgccacttgaccgccgaacggcgatcgacggagggagacttgttcgctcactaaccccgcttgggcccttgctttaaggactactgatttcaggccttacaccccgccccgactttgattaaagcgaatgagacgaagattccggaggttcgttcttagaagtaatccctttactccctttntatgctcgaaatgactgtgtgtgtnaccaaacaattagaaaagaagatgaaaaccaacgggaaaag

SEQ ID NO: 244112 - DNA, 404 bp, Gossypium hirsutum
gaaacaaaggcaagcatgctagccaagaaaccttcacacagctaaggggcttcttgtttcgtgccattaccatttcatctgaagtggtcaattccacgctcacccgtattccctgtagtgcgatttcggatttcacctctgatctctgctggtttggctctttgtagaaaatttgttgtttacgcagttttttagctgtaccaaagacagatgtcaattggtgttttggtttgtcttctgatgtattaactactcataataacatatcttagagattgatttggatctgaatcaaagttatcaacttttcaattttgatggatcggatcgaattaagcaaaacttgaatgtatttactagagatttaagactgaatgaagatatatataattttttacttattt

SEQ ID NO: 244113 - DNA, 398 bp, Gossypium hirsutum
  unsure (1)..(398): unsure at all n locations
tgttacgaaccacgacgtcgattggtggagcgcgtttgtatttaccttttaagccgctacataaaagattcattaacccatacaaaacctgactcgtttctcctcttcctctgaacgccggcctctcaaactccaaccaaggaagcaccaaacatttatttggttggagctgaaaatgaaaccttaccttattggctgtccagcacctcagcacttttgtgtctgctacagaaaaatttgcgatcaaatggctttttatctgctggcactcaacgctctgggggaaacactggttttcttgggagagtttcttatgataagtggattaatggtgcanatggtgaagctctagcgcgcagtgcnaggttttattgtgttgaacctattctatatgttat

SEQ ID NO: 244114 - DNA, 394 bp, Gossypium hirsutum
  unsure (1)..(394): unsure at all n locations
gttctctgcccttttttggccatttcctgtggaacaacactgagcataaaaccaacctcaaagataaagatggaaggccggacgaggctgcaccccaaagcactcaaatgaagcaagtaatgtgcgctctctcaatacaaaaagaaaacatcagcaaccatcagtccccaggagctaatccaagaccagatgatattgcagcctaaccttgtgattgctggagagaaagtggttgaagtggtgggctcattggtgatgtattagaatgtacagttttatatccctaaccggaggaagttgtcatgaaatttcctgaactccactctttgtatatctttgtccttaatttgaagtttctaggaatgaggactngagttggaaataaaaggaagac

SEQ ID NO: 244115 - DNA, 392 bp, Gossypium hirsutum
agtgattctgatgatgaggatgaaggtaggaggaagaggaggaaagaaaagagaaagaagagggatgattcttcggacgaggataatgatgaccatcgtcgtcataggaaaagaaagagtaggaaggagaagaggagaaggagaagtcataggcattctgatgattctgaatcatcggacgtgtctgatgatcctggtaaacgacataggaggaagagccaaaggcatgaatccctctctgattctgatgttagtggttcggatgattctcgggttggaaggggtgcaaagaggtctgagaagaggagcaggaaacgccatcacgaagatgatgagtagaggcttgttagctaagggatttagaagaggggatatgatgtttgtgctagaag

SEQ ID NO: 244116 - DNA, 359 bp, Gossypium hirsutum
cggacgcgtgggttctcaaccaaggtgtagaagaatccacagttgcttcaaatatgggtacgacgcaagatcttcatcgtgctctctctcttctgtcaaatgagtcttcggtttcttgtgagccaaaacaacatggttcacttgcgtaccctgtgcatgttagtggtagcagcatgtctcagcccacgatgaatgtgatttcgcagagtttccccattccatatgccttatctgaaaactggcagatggaacaagagcagactactcaatcccaagttgagggtgacaaccatcttcaagagtttcagattctcaaggttccatatgataatagcttttattccaatcagatgaattga

SEQ ID NO: 244117 - DNA, 252 bp, Gossypium hirsutum
gaaggtttaagtctcttgtgatgggaagtgcttagctttaaagggtttgggaccttattagtttagcttgccgccctcctctggctctattattctcgcttttgtaaaaaaaggaaatatagtttgcatctaatgaatttataaaagataaatttgaatatctatgcttatcctaaaccaaaatgttgtttaacttgcgtcatcaattcatgtttgattcttggagttattgataattataattgttgcctt

SEQ ID NO: 244118 - DNA, 369 bp, Gossypium hirsutum
  unsure (1)..(369): unsure at all n locations
caaggaatgaatgggaaaatgataaaacctgaagctggttattcgggcggcgctccttacatgtttggcgctgagagcaatgttctggaggcacgtccaacaattggggatacgtctttcagtactgtagaatcaagcactcaaccactgaatgaaccacttctggatgccgacatttcttcatttggatttttagaccagatccctcgtaatttcagtctttccgatcttacagctgatttttctcagagttcaggtttatttctctctgtcggtttgtgtggggacatgcatgttcaccataccacatatacatatatntgtctgcatgcaagcatgtgtttgtgcatcgacatcttggttgtgagt

SEQ ID NO: 244119 - DNA, 415 bp, Gossypium hirsutum
cccacccgtccgccaacccgtccgggaggtgcaaagagttttttatggtgaaatggaggatgaggaggaggcggactgcttgcagtggcggaggcagcaccggtggtcgatcagttagaatgaagatcaaaaggttgcaaaagctaattccgggagggaaattgatgcaaccggatcgcctgttcttgaggacggcagattatatactgcatttgcgcttacaacttaatcttctgcaagctctttccaagatttgccaaccctcaatttaatctctccttttctttttataagggtaaaggtaaaagttatttaaagatttgatgatgttaactaaacactccaataattcagtcgacattaatattcaaatatttatgtagattatatataatatagaatttatatggcattt

SEQ ID NO: 244120 - DNA, 351 bp, Gossypium hirsutum
  unsure (1)..(351): unsure at all n locations
cccacgcgtccgcccacgcgtccggattatagaaactacggattctatacaaagagaaagaaaataaagaataaccaagcagcttgatatatgattgaattacaatgtgctagctgtttttttttatctttaattattatatgaataaaagagatttaaagtaagcttgattgaaaattatcattaaaaatgcttgttggtttatgtggacattaaggagttaataagtgctgtgttttgagtggtaaaaaattaaatatgttgtttaaagctcaatgatgagtaattcanaagataattgagatttaatgtagtatgttactaaatacaaaaagtcttaattgttttttt

SEQ ID NO: 244121 - DNA, 389 bp, Gossypium hirsutum
cggacgcgtgggtgctgctgctcagattgaaggatcagaaaaatctaagggaaaaaggcctactgtatgggatcaatttatttggaaattgccagataaaatattggacaatagttctttggaagtagcaattgatttgcacaactgttataaggtatgaagctttttgtgacattattgcactttgattcgtcggaaacttttcaagacaagtatggaggcttcttaaatcgtatccttgtgttagtactatgtttgattctaacatttatttagctcttactagactttgctgcatgttatacaaactataggcgaatattgggggaggttgacccttttaaacttgaacaatacaattcttgctctttattcattttataaattaa

SEQ ID NO: 244122 - DNA, 339 bp, Gossypium hirsutum
gctccacccacgcgtgcggttctagatcgcgagcggcgccctttaaaagggaaatcttttttttttttaaaagtaaaaggctcatatcagataaacacggcaacatttttctacaactaaatcctacatgggggtagtctcgagtttagacattgttatgcttaccatcatgaatactacttcacaatcacctagtactagagttctgatcaacattagagatacagcttcttactttgggcaaaagcaagaaacacggcagttattaattaaacacacaaaatttcgctaccattaaacgggttgggattacaaaccaaccattttaaaataaaaact

SEQ ID NO: 244123 - DNA, 289 bp, Gossypium hirsutum
gtccagccgattcaaatggaccggaggtggcctaatggcctttggctaaatgcaatgcgttacacgatgggtgatgttagcaaagctcatggagcatcacaggagccacaattaacttcatcagataaatttgatatctactctaaaccaattgtgctctagtatttttttgttgctcataatgaattgcatcccgttatactcggagatttctctatccgttccatattcgtgcaatacttgtgtttacaatacattaatccatgttcatgagaatgaaatatattca

SEQ ID NO: 244124 - DNA, 387 bp, Gossypium hirsutum
gatgattctgaatttcgaaatccttttgctagggcttatatcagggtgaactcctatgaggccggtcctcgcaggggtcgaagccagagtagaagtcacattaagagtccaagggggaatcaaaggtctgtatcaaaatcgaggtcaccttcacctgccagattatccagatcaaggtcaaggtccaactaattgcaggttttgttgctgttgcaggaatgtttgcagaatggctagcatctgttgagtttcctgttgacttgtagcattagaaacttgaatagatatatgaatattttggtaccatatggttgtgacttgtgaggatagctcagtatctttatggtgtaatcttgtattggaccccgcttatttgatacatggact

SEQ ID NO: 244125 - DNA, 240 bp, Gossypium hirsutum
aaccttttgactgttaccgataaatttatgtgcttcaagttctttcttggacctcagtgctgttagtatttcaatcctcctgctgagatttttttttttttttgcttcaaagctagttgcaattgcttatttaacagataatatgaagaccattattatctacacgaaatgttacgtgaatcccttgcttttaagcggtagatttcgatttctaaataaaaataaaaaataaataaaatt

SEQ ID NO: 244126 - DNA, 153 bp, Gossypium hirsutum
  unsure (1)..(153): unsure at all n locations
gttgctgttggcattataaagattagaaaacaaagtaacttgttaactctctctctctctctctctctatatatatatatatatatattcatatattgtgcttgttttagttgacatgacatggaaaatgacattgagttctttatctttgnt

SEQ ID NO: 244127 - DNA, 413 bp, Gossypium hirsutum
cccacgcgtccgaccagctatagctgaaatcttaccaccacattccactgatctcctgaatgaagaagaaataaatgttgaggagcatttaagtctcacaagaggtttagagaaccacaataaagtacaacatcctgaatttggacaagttaatgatgtcatgttcccttggactcaactctatccaacaggtagtacttggggaccaaacaaactagttcgtggttgggcttttgaagcttaattgtcctacttctcttacaaacttatggcccggacaattctccatattaaaggatatggggtaatatataaaatctagaattagaatggagatttttgatattttatacactggaaatgaaaccaaaaattaccaaaaaatggatcaatggttatattggacttttata

SEQ ID NO: 244128 - DNA, 330 bp, Gossypium hirsutum
cccacgcgtccgggttttcattggaattgacaaaggtcatgtttgattaagttagggaattgatgtacaaaattgttatatgaatcaaagacctcacagctgtaaatacttttgagatcaaaaaaaaaaaaaaaaaaaaaaaaaaaaaaaaaaaaaaaaaaaaaaaaaaaaaaaaaaaaaaaaaaaaaaaaaaaaaaaataaaaaaaataattaaaaaaaaaaaaaaaaaaaaaaaaaaataataaaaaaaaaaattaaaaaaaaaataatttccccaaaaaaaaaaatatgggggggggctcttataaaaaaaaaaaaattttatcccg

SEQ ID NO: 244129 - DNA, 202 bp, Gossypium hirsutum
cccacgcgtactgccactcatgcacgaacgcattctattctgtaaactgctcgccgtggccggcattctgtgctgttcgacaggtctgtatagaatcaaaatagaactggagctttatggatgtcatagggtacgagaaatcagtgccacttggaagcaattggtggcttatcacctggcctattgcatggtgagcgtcaaa

SEQ ID NO: 244130 - DNA, 323 bp, Gossypium hirsutum
gaaagacatgctagtttaattgatcaatttggttaattcttctatagcttttggccatatcagttgcagccagttgctgttcaaattaattgttctacgcgaggacttgttatcttgagacaaattgtttcttcctctaagctttttatacaagtttgtattcgaaagaaattcaaaaaattatggcgtgtaatatctgctcaaaatcacttaaatgcgtggatgtttctgcagatggaagtctatgtatcgtggcgatttcatgtttcatggcattgggagatgaaaattgtttcatcggtgttctggtatcgagttcattg

SEQ ID NO: 244131 - DNA, 355 bp, Gossypium hirsutum
atcatgttagccataaaagtttgatgtaccaaaggatttggatgttgaacttggcttagactgaaatgtatgctagacatgaaaatgaggtccttgtattcttagtagtctctttgagttttaattttactatggatctagaaaggggaaattgaagttttgatgacttttgagctggggatatcaatggggactggggaggaatggtttaaaatccttgtgaatgttaatgtagtaaaattgattcaatgaatgcttgttgatcttacttgtagtaaatatactgatcttgagtttgtcttactacatgctatatgttaattgatgcaaattaaacttaacattatcgtatcat

SEQ ID NO: 244132 - DNA, 402 bp, Gossypium hirsutum
cagacacttccctcttccggtggttggccgcctgatcttgcagtgaagccaagcgtcctcgtgtcgagaacgccttttacggtggtttctgatttagtgtacttatttttttggtttccctcatcgtagcatgtattattgtatatagtagaaaatgattgatatggatatgatgggtgtaaagtaaaaggtctgagcaaaagggaaaaagcttatgctggtagttgataatggcgtcgaagttaaaagcaaagggagagggccctagtccttgttttaaagtcattgcagtgcgactcgcgcaacctctcccacaacaaaattcaaatatgcctaaagcttattagcaatggctgttgatatgggttgaaataaaaaggcgtgggctgtgtttttagtatt

SEQ ID NO: 244133 - DNA, 364 bp, Gossypium hirsutum
ggactccctcctcttctccctcgacctcctctcctccgcccgcctttacactttctctctctttctccacgtctccccacatttcctctcctcctcagacctcctcgccctccctcgccccgccttcatcgacaccctcctccctaaccgtcgactcttcgtagaacatgctatgtctacccgcaacggcacagccttgctaactgtttccgtcgacggggttgtcgtctccgtcccggatcttttccttggatccaacattgttgtccacgggcttgatgggattcttgttgcaagatacgggtccttgggtagtgaaggtagtgacaatgctattgctgagccaccccaagttccctatcaa

SEQ ID NO: 244134 - DNA, 429 bp, Gossypium hirsutum
gcatcgggcaagaaagatgtgagtatgagaaggacctcatcttataatgaggctgtagtgtctgaagcatcattcatggagattcttaagaagccggctcttcatgggacagaggtccccgtgtatggctctgcttttgagccaccatcatctgatgttgcttcacaagctggacgaagtggcaagaaaaaagggaaaaagggaagacagattgatcctgccttgcttggttttaaggtttcaagcaaccgcattttgatgggtgagatccagcgtcttgacgattaatttttctcgtttacacgcgccatgtcttgttgtacatttcctgtaaatttttttactttctttttttttgctttctatagataaattttaattttgtatagtatattcgaggtaattaattgattttttgtccttaaaaat

SEQ ID NO: 244135 - DNA, 176 bp, Gossypium hirsutum
agccatccatctgtgctggtttacgctggctttaattggaagcgggtcaacactgatgctgaggaggagactatgtgcgaacactactggcgtgtctgaaacgaacaatcgcgttggattccttgaaagagaagcaactcgctgaggtgcgatgaatgctacagcatatggctact

SEQ ID NO: 244136 - DNA, 394 bp, Gossypium hirsutum
cccacgcgtccgtggtaaataagattctaattcccggaattgcagccaggaagtttcatgccgtggatgttatatattctgatggtagaaaatcaaagctgtcaattgttttttatgctagcaagttgttagttgttagtgtttttaaataaagcaacatgttagtgagtttttcacaacccctctggcagctgctttattagtttgtgttataaaaatgattttgtctttattgaacaaaatgttgatttatttatacctttgtttttttttttacttctctcaggaatttggtcaaaatttgttgtgaagttgaagtaaaaaccaaactatatgcatgcataagccttgcctgcactcctttcaaagtttttaagatgtaccctttttttat

SEQ ID NO: 244137 - DNA, 217 bp, Gossypium hirsutum
gaggccacgaaattcactactgttaaactactcactcggccactgaaacaaccactcttgcatgcggacattggttcaccatgatctttatgccggatccaatcaaatttcactcttggcgcacctacaattgttgtttatgagacaatatatatactgtggagactcccacagctacctttaaaaacgccggataatgaaacatttatggattatt

SEQ ID NO: 244138 - DNA, 227 bp, Gossypium hirsutum
ttcttggaaattggccctggtttttatcggcacgttccatctaatattcctctagtacctacaatgaaaactattcgacactgagctttagcatagcttagctaggtgtcgattctatgctgtattgctggactgcagcccgaaggattttggagtttgggtgggctgattttcaggttgttttcaagattctttggttttttatcaagaccattttttaatttttg

SEQ ID NO: 244139 - DNA, 344 bp, Gossypium hirsutum
ctcacgcgtccgaataaatttttctttctttcctatttatctattcctttttgtagaaacgcttgcaaaacttttcttatattcactcttattcattaatatttcatgtttcgattgtttaatctattagaatggtgtaaaacccaagttaatagtgtttgaatgcatgattacgtttgattttacattctttgtttttatcagacatttccattctgtcggaatatattgttttattaaaaatatagtgtatgtatcttgtatttagatttttgattttttattattttttttgttattttttcattatttcattttcactaataatttcttttttcattttt

SEQ ID NO: 244140 - DNA, 322 bp, Gossypium hirsutum
cgggactgaatggccgggccgacccgtgcgtccacgcgtccgcctttttcttttttgtgtgcgctctctgtcctcatatataattctctcttgtatttttaccttttaattccattaaacccttttaatttcaaagaattattattaggcgtctgttacgctcgcctgttctctcaggttcttttactttcagtttttcttttttgggtttgaatgggtcggatttggcgaagactatttttgtgaaccgccgggccgggtattttgggaggcacaccggggtgcaggtggtggttagccggtaccaaaccaggggtggtgg

SEQ ID NO: 244141 - DNA, 327 bp, Gossypium hirsutum
aaagaacatgaaggcctacaataagagacaggctgagggtcccaaagacgaagatgttgagtctgacaaatcagtgtctgaggtgaatgatgaggatgatgatgaagaaaacactatattaggtacgaggaagatcaagaggcatatatgtgctagcttatgtcgttttaaagcaacttttcgtccctagtagaacattgtttagtcttcctgttgggttatgtttctttggtagtactcagtaatgtggtacttactaaaaacattttcttattttggttttatgtactattcggtcaatggatttaaaaaaacgatattttttgg

SEQ ID NO: 244142 - DNA, 366 bp, Gossypium hirsutum
  unsure (1)..(366): unsure at all n locations
gtcatgatgtgaacactatttaattcaattggggttaattatatccactaagctgaagctttcggttatactaataactttttccctattacaggagcacgctactgctgccctccagtatttccttggaatcagaagtaaaacagcattgcattctcttttgcactgaatatgcagctaccaaattttattcaccaaagtctgcaacttgtattcttctctggtaataaaacgatgaaccctttggtacaacaaatgcggacggctattggcaatggacatgcaatcagctttaatcttacctnctgtacatcgtccttatcgaactctttctgtttcaaaacaatcatcgactcaatctatttt

SEQ ID NO: 244143 - DNA, 322 bp, Gossypium hirsutum
cccacgcgttcgcggacgcgtgggttgttacactgtctatttccctatattttgctggtgttgcgtattctgtttgttgtgcaggtggtggttgaacggtggagcagaggctggttgggggttgacagagatgatgggacagaagcggcgggtagggatcttttttctgataatggtttgggctgatgttagtggcttaggggttgtttaatttgggctggtagtttacgttttattttgttttggcgtaaaggttgttgggccactcgggtttgattgttaacaggctaaaattggcctacaacaacaagtgttttttttt

SEQ ID NO: 244144 - DNA, 181 bp, Gossypium hirsutum
tccgcccaaccgtccgtttatttatccttcttatcatttccaaattttgatgattttcctcttttttatttaatttattaaaattgaactgctacatattcatttattgccttaagagaaaaaaatgtatcgttaatgttggtatgacagcacaaacaaattcgagggcttctgttacaca

SEQ ID NO: 244145 - DNA, 286 bp, Gossypium hirsutum
ctccctctctttccttcatccccttctaaccccccccccccaaaaaaaaaaccacttgtgtaaacaaaatttcagcttgatgggtattgatgatgcatgtaatacaggccttgttcttgggttaggcttttcatcaaccctggaaactccattcaaggccaacaacaatcaaactcccaagaaatcatctatgtccatggcagcaacaagtttcgagccatcgctgacgttggggttatccggtcagatatacatagttaatgataataacaaaaagattgatgtg

SEQ ID NO: 244146 - DNA, 285 bp, Gossypium hirsutum
cccacgcatccggatctacagcgggtactgaatgcgacgcatgctctgcacctcggagtgagggatacaaacgcacctctattggctaacgctgttggagcgctggaggctagctgcggcgcaagcataagctaggagcaactgcctaggacatggcttttgggcattgtgcctatttgtatctgagccgtttctatcaatacagcttgcagtacttgaagctgctaactgggcatttaatggactggcacaatatagattattggttgaatcaaaggatgaccc

SEQ ID NO: 244147 - DNA, 269 bp, Gossypium hirsutum
cggacgcgtgggatcgcgagggccgcccttttatttatttttatttacctttttctattcggggtagatgaaatccttactgttactaaatatacattatcaccaatcaataaaaaaaatgatttatggtatcaaactgtcttgttttaataaaaggggagaactggtgcttcaaacagaaggaatggtattgtaacccactgccttatgaagtgaaaaaaaatgcaccgtttaccaaaaaaaaaaaaaaaaacaatcttttgtttatt

SEQ ID NO: 244148 - DNA, 372 bp, Gossypium hirsutum
  unsure (1)..(372): unsure at all n locations
atcgacttcagcgacggagaggagaatttcgatggccgaccacggggcgttcggggtatagccggtgttggtggtggaagtgtcagacggtatgggcgtcgtgggggcgagggcgcgcatgcaatgctggggggcagacgagactgagcggcgcacatgggcatagggctgctagggtttctgtcattttttgatttgggctagggtttatttttgttggcccgttgggtttgtttagttagggtaggttagttgggttttgggggtgggccaaaaatggcctgtacacagactaaacatatcaaaaatccaggaaaccatccattacaagttaatattggttaaatcaattaaaacatttaccttgttnna

SEQ ID NO: 244149 - DNA, 379 bp, Gossypium hirsutum
cccacgcgtccgaaacacccttggctggctcctcctaaggaggaaggctacttgtcactggaaaagatatgtttttccaggccaaatgagggaagaagatattgatcaaattagtcaaaattgacaccgggggaagaagagacctgttgttcaagaaacgaagatgttcttgatgatgccacattggttcaaagcaatcatcatgaattacattactgtgactttcaaatagtgtacagtagtacatttagggttccggtgctatattttcgtgcttactgcagcgatggaagacctttgccattggatgaaatagaaaaggagctccctgcatgctcttcaaaggaattgtcaaaaaaaaaatggacattcataactc

SEQ ID NO: 244150 - DNA, 239 bp, Gossypium hirsutum
  unsure (1)..(239): unsure at all n locations
cggaanttcccgggtncnngacccacgcgnttccggtgctannatggtgtnntggcgaanccaaannagaacttctnctcactttnacggtggcngtnntgggggcctancctctggagagttggcttcttaatgnnngctttgccatttgnnngtggagtttggnngggtcttgggtagggattacctnncccctcggtgggtgcacggttggactctggaaggtggaagtcgggggc

SEQ ID NO: 244151 - DNA, 460 bp, Gossypium hirsutum
  unsure (1)..(460): unsure at all n locations
cggtgatttggntcttggnnttcggtcgccgctcgaccctaataagaaccctaanctaagcgcattgtnagccatggaaggtgatanaagttacctttctcgttagaaccccacttcggagncttcanngctcccgttctcttttgtggttccaaacggggcatgtttgtgattcaaggggggataacttgtattgtttcaacgtgattcacnggcattttggtcccttcttccttatgnggcttattgaaagggaaaagttgtttatgaaggggtatggcccacnnctagcaagctttggtttatttgggttaaatgaagaaagaatacattcaaaggtattataangttcgcttgttaagtgggcttttaaagaaactttgtgataatggttcgaagaaaatggtcttttctgggtgctaagttttaaaatgatgtacaaattgtttttttttttttt

SEQ ID NO: 244152 - DNA, 387 bp, Gossypium hirsutum
cggacgcgtgggtgaggaggtggctgctgctgctcaatacttaaaggatacgctgggaaaggagggtgtgcaagacctcatcaccaatctttcaaaagatagagatggaaaaattcttgtggaaaacattgtgaagttgggcagtcagatggaggatgacaatagtagggaggaggaagagggaagaatgtaaagattataatccattttggaccgagcttaatggctataatcttatattatctccgaatacccttttaggtagaaatagtagttggtggaatgcatatatgttcttggctttggcaggcatggcggtggtctccgaaaatggagtttcttctagatctttggctctctttctttatagggaaagccgaatttagt

SEQ ID NO: 244153 - DNA, 317 bp, Gossypium hirsutum
gacgaaaaagagtatcttatttaatggtagttaatcgtaaaaactacataaagcaagttcctgaaaaccaccaaacccagtgacgataaaaacagcaccataaaagagtctaaatgacagacattaaatattctagacattagacaacatcccaacttaacacatagttctctttttcttctctaagagagctgtccccataattttttgtaaaattccttatagtcatcttgtaaagcgtaagctctaagatcatctcaatactctgaatagtttataggctcttcgcactgtgaattcgcccgacgcctttacac

SEQ ID NO: 244154 - DNA, 392 bp, Gossypium hirsutum
gattcaataatggaggaaccttctaaatcgccattgcccgaaccgggccttggggttcttcaagcaaatgggatcgacccatcaatttatatagcctctgattcaacccctcgttacctaaggttgaaaccagggaatgaagctgaaattgaaggaattgaagctgagataaagtgtaagcttgaaaaagtgaattggttacctggtttttattctcttcgacctgatattttgattgccaattcaaaatcatacttggatgggaagatttatggaattgatgctgcttctggtgctgctgtctcagtcttgaatatttcaccaggggaccatgtgctcgatctctgtgctgctcccagggcataaacttgtatgattttggatcttctcgg

SEQ ID NO: 244155 - DNA, 394 bp, Gossypium hirsutum
  unsure (1)..(394): unsure at all n locations
cccacgcgtccgcccacgcgtccgcccacgcgtccgcccacgcgtccgcccacgcgtgcgcccacgcgtccggttagcagtggtggattctccagtctgcttgtctttctggcggagggcgtgctggtaaaacttttgggtgcttgggttgtccggaacctgtgtgcacctgtggggcaggtctcattggaccaaatcaggcggaagatagtagttaaaagtgccacggggctctcagctgcaaggatggccaagcagttagcagttgattcgagttgggtatcaatcaccgaaagcttaatgttcattctcaatctggaagatgtgattcctgtacgaacctgaattcctttgatttggacacaaagagtggagcttggatatgactngatag

SEQ ID NO: 244156 - DNA, 399 bp, Gossypium hirsutum
cttagtgatagtgaaggatgcctgtaatgtcccagatgatgatagcgtgggaaatgaaagtggagttcgtttatttaaaaattctactcctgggatagtatttgaccacttagatgaaattcaaggaccccaaaagaaaccaaaacttcttcccagaagagggattgatgagaactcaaaagagttcagacgacaactattgtccatagctgttgatggaaaagatatattggctgcagcaagatatgcaagccagagatcgttagctagattggaagctaaagaagcaacagccaaagaaaaagcaaagagagaggaagccaggatcgcggaactgaaaaggattaggggagagaggtggctaccttcaatggctagagagatgcagttaagcaaaag

SEQ ID NO: 244157 - DNA, 214 bp, Gossypium hirsutum
attttatgggaaaatcgctgtccggctcaaccaagcttcaacatctctcagagagtaccttcgccatccacgcatcttaacacaactgggaaaaacccataacccactactctgaaccggagcattatatatgtacacaacaaacccaattccaagaaaaatatggacagctccaataccagtcaacgcataacactttccgaactcatctccg

SEQ ID NO: 244158 - DNA, 292 bp, Gossypium hirsutum
cccacgcgtccgaccacgcgtccgcccacgcgtccgcgatttttatatattggctgtgttcctatacccaaacatcaatttagaataaggttcaaaatgttatatttttgttctttttttggccaaaaaacgttatatttttgttagacaattgtggttgaagtgtttttccaggaaaactttgggcttcattgcccctttttctttaaattggacctcataattttcccttttaaaaaaagggtaatcgagagggcaagttacactctattcatactttagctacaaatac

SEQ ID NO: 244159 - DNA, 182 bp, Gossypium hirsutum
cccacgcgtccgcccacgcgtccggaataagaagagatatcaacttagcagcaagccaaatatatagttttaagtgatcaaatcctattttcttttatttagttgttgaaaaatacatgtatttattattatactacgcttttgcttctaagcctttttgtatatgatgggggtgattcttt

SEQ ID NO: 244160 - DNA, 390 bp, Gossypium hirsutum
aagcagcggtgctgcatgcttaattgtttaggaaaatgtaataacgccatgtaatatggataccgccctgtatttatataccatttataatgggtaatatataatggagtgcgtaaaatgtaaactaataaatatcagcacatctgactatatatactgcgcacatacctttaattgctacccaatgcggtgttgatgtttctcttccgccaattaccagcgacaaaaattgttggtccaatctcttgacttgacttcacttgatataccatgcgattgtgccacactatggaagatattaattatatatagctcaatccatcattctctaaatttgtttaagtaattcacattgtacttagagaataacaaattctagttgtagacaaa

SEQ ID NO: 244161 - DNA, 118 bp, Gossypium hirsutum
ggcattcctagaccccacggtaaaacagcaaaatatcatttaaaggaaaaactcggagtctgaccactagctgcacactaaaattcgcttgttactggattgacatccctatggttta

SEQ ID NO: 244162 - DNA, 272 bp, Gossypium hirsutum
tctctctccattgacgcagactccaatctacagcgcacacaaaaatcaaaaagaagcaacgatgttcccaggcatgtttatgcgcaagccatacaaggctgcagccttgaagcagttgaaggcacacgtagccatgtttggggtgtgggtagctgttgttcgtgtcactccttacattcttcattacctctctgatgaaaaagaagagctcaagattgagttctagaggtcatctctcattctttttcagttgatcgacacgaagagaaagg

SEQ ID NO: 244163 - DNA, 298 bp, Gossypium hirsutum
tttcaaaccatacacacaatctttttttcacagctatcccttaacttaagaccagaccacttttgccgggcactattcattctcttgacagaccattctccccccatcgtgctgtctagccatctcatctcatctataagactatagacatcctttcaattcacctcaaccaccataaacctctctcatcttcactgcccaataacaaagcctgtggaccccaaccataaactcctcctacttgttcaactacacgtcatggacacatatatattcaaattttgacttggcgctacac

SEQ ID NO: 244164 - DNA, 401 bp, Gossypium hirsutum
cggacgcgtgggaaagtcacaactcacaaatctgcaatcgggttctcaacttctcggttctgaatctgaatctcagattttcagacgggaaaatccaccatttttgctatccatttctcttcctgcacactaattgactaatacccagaggccaggtttaatgcaaatggagattttttggagagaagaaatggatataatataaatagagaatgttaaagacttacatttcaattatgtgttaatttcaagacttatgtaatatttttaattatgtagtgattcaaagacttatgtaatgtttttaattatgtagtgattcaaagacttatgtaattttttaattaaaaagaaaacggcctataaaaaaatacttgctgtaattattttacaatctagta

SEQ ID NO: 244165 - DNA, 194 bp, Gossypium hirsutum
  unsure (1)..(194): unsure at all n locations
cggacgcgtgggctgacgcataatacaacgcttttgcaaactcatgagcagacaagtaactatacttacaacaaaacctncaacaaccaatttaccatcattccaaaattaaagaaaaaaataacatgctaaaaatccaaaatgaagaactccgttttaatcttcggaaaaaagaaattgttctttcacattta

SEQ ID NO: 244166 - DNA, 400 bp, Gossypium hirsutum
ggggggttctgatggaattctccacccaactttggatgaaaagttgaataacttgcatgaagctatagcagaacttgcagcaaagcctaaatccgatgaatccgaggaagaacatgtgcttgaaaacttccattccagtcgcaccatacggaaactaatcttagactgccctgcacttgcttccacattgtggaagaaatctttggaaggaaagtgtcaattatgggcccagggtcacagttcaaaggtagtgtctgcatttttggaatcctcagactccgaggtccgtaaagtggcaaaagaagagttgcagcccttggtagatgatggtactctcaaaatccctgaaaccaagcaatcagcaaatgaaaattaggtctgcctgaaacggagaagacta

SEQ ID NO: 244167 - DNA, 390 bp, Gossypium hirsutum
cccacgcgtccggtaaactacaataaaaaggtattggaacttgaacgagaagtggggaaactatctggccaagaaaacctccaacaacgaattcaccatcatgccaaaattaaggaagaaaataacatgctaaaaatccaaaatgaagagctcggcgtcaagctgcggcgaacagaggttgtactttcacgtgtaagagaagagctcggtcattatcgtgcttctattgggaaaagcccttgcgttaatttcgacgaggagcaacgtttgaataacaaactgagggagtctgatgaagacgggtgcaactgcgcacaagttattggcattgtgtacaagtgttttaaaggctgccggtataacaatgcctatttctgatatatgccctgc

SEQ ID NO: 244168 - DNA, 368 bp, Gossypium hirsutum
gctacgcgttacgataagagatgttttatatgcacacaatctggatgtgagctcagcccaataaattatatatcataagaatgttaacgaaactgtaagcaccatcaataacaactaatgactgaaataggtaacaaacaccaccttgaaagcgatatgctagaatggatggcactgaaaaaactgctgaatcataaaaactgtgtcatgaaatgtatgtaagatgactgaatgtatatatatacaatcacatatgggatcactggatgtggaatcagtcttatgtgataagctatactcagcagcatatgtgcttgtactacaatgagatgccacacgacctatggtgagccactcaacatatatac

SEQ ID NO: 244169 - DNA, 290 bp, Gossypium hirsutum
gcttttggagagtcttggtaagggtaagatttggggtgtttttgccaggccgtaggaaatggaagggattatcttcaaagtggggctcattgaactgtatgtatatcataaattcatagttgtgttttttttcccctcttgttcatattggttgtttatttgctttacagctggtctatatgtttagtgtaattgttcatggagaaacaactatgtttgtagtttgtagacaaaatctttagttttggtgacataattagtctggttttcagttttcatgaaacatattt

SEQ ID NO: 244170 - DNA, 210 bp, Gossypium hirsutum
ggtgtggggaattgctaaacgtgggtggagacggatgccattaccttggcatatgctgcagcaccaatttgcttcaatcttcttaaggtttctgctataccctgtgttcttttgggctaacaagctaatgctagcaatattggttgtttgggtattgggcttgtaaattggttattgggtcagggagatattgggtttaaaactgggtct

SEQ ID NO: 244171 - DNA, 397 bp, Gossypium hirsutum
gtgattccctgcctagaggaagttgtggtccaagtaagatcaccattaaatgctgaacagaaaatgaacactctggaatcccttctcaagtatgggaaaaacttgaagaaaatggtaataaggattcttcaaatgaagagcagccatagcagcacggatgaattctttgatgagatttgcaggcttagatttatgaaccgcaaaatagttcgaattgaataaggctgacaacagccacctcctatttgttcttttcttcagcttccaagtgaacagcattgactgctaatcaaacaacggctcgaatagatggttgcttcatgatgattctcatggagatgcttttaacttctcaagtttttcatttcacacctcttctgttgcaatgtcttctgtt

SEQ ID NO: 244172 - DNA, 372 bp, Gossypium hirsutum
ctctcctttccatcccctattccaccgtcgaccccatcatttcccgccattttgactccgagaaaaccgataattccgtttacatttatattctcaatctgggtgttgcccccaagcaaccttatgcctactcttactctcattccgagtcttccgcaggctacaccaattgtttagggacgctttggactggcaacaaaaggtatctttggattgatctcggggctggtcccgttgactatgggccggctttatctggtgatggggtactcccgagaggcgagtttcaccctttggcagctgcacatggaagacccaaatccgaaaaaaccttgcttgccgacttggcttctttgatatacagtgcttatc

SEQ ID NO: 244173 - DNA, 396 bp, Gossypium hirsutum
cccagaactggtaaaatcattgaagcaagtgaaagaaaaggtggtacaaattagcctaacaaactcaatacactggaatgcccatacatttgcactcactgaatcagggaagctttatgcatttggggcaggagataaaggtcagctaggcgtagagctaatgaacaatcagacagaaaggataaaccccgagcgaattgatattgatctcgaatgaattccccctccaatctcttagatcatatcatccctttaacttatcatgtcacaaaattgcattggatgtctagattttcaatgtgttgtaaatagatacaaacagaaggatttgaagctttcagttaggttagtaagggccgataagcagtgctacacgtttgatttcctaagaaaatg

SEQ ID NO: 244174 - DNA, 328 bp, Gossypium hirsutum
aaagaaaccaaatttgaacacgaaagcaaccaaatctcctggagatgtttgagcttgcctagtcctcgtggtagatatttaattccagatctgaaaaatagaatagattcaagacaagcggtttcctcaaacttttgggctatgtattccaactctggacattccccaattatcaaatgtttaagtgttatgggaaaacttggtgtttgaaaataggcaactcagctttgagcattcggtaatttggagaagttgaagctgattgcaaatatttttgtgccctttcgatgacaaagacattagagacgagcacttatagatagacaac

SEQ ID NO: 244175 - DNA, 390 bp, Gossypium hirsutum
tgatgatcaaaacaaggaacaaagcaattcaactggattttggaataataatggtgtattaggtggtggaggatcatggtaaaaaaaagaagaagaagaaatgaagatgatcaagaaaggaactgctttttctagtttttaattttttttcactatttttcacatggttgatattattattacttgttcaaagtttcttttttttagaactaacagatcatcatcatcatcatcatcatcatcatcatcataggatacatacatatataatggggtttcttttctttgctttctttttttaaattacaagattgtatccaatttgggttttggtttcttgtatcagattcaagtctaaaatttgttgcagtgatgagtgatatatatgga

SEQ ID NO: 244176 - DNA, 386 bp, Gossypium hirsutum
  unsure (1)..(386): unsure at all n locations
tgaaaatnaaaacaaggaacaaagttatttaccttgattttggaataatggtggtggtttaatttcttgaggatcatgctaaaaaaaagaagaagaaaaaatgaagatgatcaagaaaggaactgctttttatagtttttaattttttttcactatttttcacatggttgatattattattacttgttcaaagtttattttttttagaactaacagatcatcatcatcatcataatcatcatcatcatcatatgatacatacatatataatggggttttttttctttggtttctttttttaaattacaagattgtatacaatttggattttggtttcttgtatcaaattcaaatataaaatttgttgcagtgattagtgatatata

SEQ ID NO: 244177 - DNA, 403 bp, Gossypium hirsutum
cccacgcgtccgtggggagggaaatttgttgtgaataactatctttagtaccaatagttccccccctcagatcccaccccaccagacctgtcgctgatttgaaatttctactgtcaaacgctgcatcaaagtagatcgttattctcgcataacagaaaagtcggtattgagcgtcgttaccactcttgaaaacctaggacattcacggaagaatgaaggctttcttctgcccaagagcagcaacggggatatttgtcgtttgagtttataggcactgcatactgaaaactcgctggataattctcctttccaaacttgagtatcctcgggatcaatctctgcaagagggatctgtagaattttctaagcaattttcgtttgcaagttatcttcccagatagaa

SEQ ID NO: 244178 - DNA, 113 bp, Gossypium hirsutum
cccacgcgtccggccaatctgaactacttatatatcgttcacgcttttcccagctttaagcgatcattcttttaacaatgcctcgcccaagctctggagggaggggagcccca

SEQ ID NO: 244179 - DNA, 395 bp, Gossypium hirsutum
atgaattcgaggtgggagacgtttgtgtgtttgagctgatgaatgaaaatggaaacttgttggaagttgtcattcatcgcaagcttttactcgtcgaaattaattaagttgtcaagtatttcaatccaaattggaattgtttgatgattttgtgtatttattcaatggaactgagagttgcggatgggaggagttggaaagttgagtatgaaagaagaggaaggagtaaatgtagaaaagcagtgtttgggggtaagagttggggacaatttgcgatggacaatgaatttgaggtgggagacgtttgtgtgtttgagctgatgaatgaaaatgggaacttgttggaagttgtcattcattgtccaaattggaactgtttgatgattttgtgtatt

SEQ ID NO: 244180 - DNA, 264 bp, Gossypium hirsutum
atcaaaccagattattacaccaacaaggtatctgatattctcagtttattgggagaatgatctgattgcttcattttcaccattttactccttattcttgcctgtttggtagtgttgtttgcaaatgtatactcaaaagaattatctccgcgatttactgtacccggtaaatgttgaaatattctcgcattatctagaaactggccagtttgcttcatggcctatccttgttctgaaaacaaactgataaatttaagctcatag

SEQ ID NO: 244181 - DNA, 310 bp, Gossypium hirsutum
ataagaaacttaaggttatgcctttactggtccacacaggaaggaaatggctggggtgtggacaagtattgacagttcatccaatgccatatttatccgatgtgaacatatccagcaacaatcgttagccaaaactatcactgtgaactagatcaataaatcgtgatatgtttcaactggcacaatactctatttaacgtggattgcatttattctctatcaaacacataatatgtattgaatggagtggtaccaattttcaaacacaaatttcagtgttcaaagtgttactattattgtatttattaat

SEQ ID NO: 244182 - DNA, 249 bp, Gossypium hirsutum
cccacgcgtccggctgcagctaccattcggagttattcatctccgctagaaattccaagtgccgttggccaaagatgggatgttcctgtaggcattagtccaagttctggacttcatcccgaacctagtattggttctgtaccggctggagctagcatatagggttatccttctcctctaaaagattcaaccttagtttaccaaagagatgacagtccaccgggcacaaattctggcattcccaatgcg

SEQ ID NO: 244183 - DNA, 299 bp, Gossypium hirsutum
cccacgcgtccttccacataaacctatcttttcaattcatagtaaaacaatattatccaggcctttgaggttcttataaacttctctgatcttcattcttcaaacaaaacctctttaggactcaacctccctaacttcctttagaacacaactaagatcctccattattctaatatcatccttttctaaaacatcttatctctccatataaaaaatatattttctttaaatatccctctaccattatgttatttttccctaaaatataaaaatcaattaactcttgttcttccaaaaac

SEQ ID NO: 244184 - DNA, 397 bp, Gossypium hirsutum
cccacgcgtccgcccacgcgtccgtcactctccaccccaacaaatggctgatcgggaatcccccactgctaaggactctgccgcaccaaccacggagccccaccacacccaaacccaagtagacgacactgccgccaaactcagcaacctcacctttaaaatttggccccccacccaacgaactcgtgacgccgtcctcaaccgtctcgtcgagacgctatcctccgaatccgtcctttccaaacgctatggaaccatcccaaaggaggaggcttccgctgcggccaagttgatcgaggaggaggctttctcggtcgccggcgcatccttcttcaccgacgaggacggcatcgagatcctccaggtgtattccaaggaaatcagcaagcgtatgctc

SEQ ID NO: 244185 - DNA, 179 bp, Gossypium hirsutum
gttatgtgtttgcataggcccggtctcaaaattggttataacagctgcccttcggggctgatgttagtgtaaggagaatagcgcaaatactataaaacggccactcttgctcgggttggctgaccattgggtcttctaagcccttaatactcttcatgtaaaattagcatggtatgctt

SEQ ID NO: 244186 - DNA, 391 bp, Gossypium hirsutum
cccacgcgtccgggtttatctagggtttcctattttctaccgttcctctctttgtattcggccaatggcgaaaccgacgagaggccgccgttctccttctgtctccggctccggatcctgttcccgctctcgttcacggtctaggtctcgctcccgctcttattccggttcagactccaagtccagttttcgctctcgctcagtgtcccgctccagatctgcttgctcgtctagctctcgatctcgctccaaatctttatcctcttgtccttctcgtagcggtagctcatgaagtctcatgcctcctcagcgtttaagtgcgactgatgcatctaggcgaggtcgtccccctccttcatattctaaaaaatcatattctgtttcgaggaag

SEQ ID NO: 244187 - DNA, 406 bp, Gossypium hirsutum
cccacgcgtccgatcaaaataacccatagatgaagtccgggataagggtttgtgtgttggtttgtctaaaattatttctctatattatgaatccaagataccccaaagaaagtgaaaggtccaatttcactacgtggttgttgattcatgtaaattaatcaatgtatgatgatgtgttgaaagttagcagcaaggaaatttgcaatgtgtaatttggatgtttgaatttttttgtaatatgtaaactaagtcttgtctgattgtaattttgtttttgctaaggttagtcagctacttagctgatttagtagcttcttaacttatcattaagctgattttacagcttggatactagaacaagttattttttgtgttcttccaatgtaatgaactagctatttatgca

SEQ ID NO: 244188 - DNA, 338 bp, Gossypium hirsutum
  unsure (1)..(338): unsure at all n locations
gcccaccgtcgatatatagccatacatgtaatcctgataagggttggtgttgggtgctaaaattatttcttatatataatccagatccccaaaaaggaaggtcaattcactacgtggtgtgancatgaaattaatcaatgttgagatgtgtgaagtagcacaggaaattgcaatgggtattggatgtttgaattttttataatatgtaaaccttatcttggctgattggaattttgtttttggttaagttagtcacctccttactgtttttataacttcttaaactattattaaacttattttacaactttgattcttaaacaaagtatttttttgtg

SEQ ID NO: 244189 - DNA, 355 bp, Gossypium hirsutum
cttctgataattcgaataattctgctaccttaaactgttggcaactggatgagttcttagggcaaaggttcggtgcctaagccagttgagaattattgttttgtacagtaatagagacatccacatctgaaggaaacactattagaaaccaatcctcagctcatgcaaattgcttttgtagaaatgactcaaggtaaggaatctattaacctattctattttttcggtccctgctagattcggttgttgaaatgttttttaagttagaaaatcttgaaattattaacctacattggtgaaccacaatcttgtttttctacctataggcattgatttttgaaccctttaccaattt

SEQ ID NO: 244190 - DNA, 211 bp, Gossypium hirsutum
cttctgataattcgaataattctgctaccttaaactgggggcaactggatgagttcttaggacaaatgttcggggcctaagccagttgagaattattgttttgtacagtaatagagacatcttcattcgtaggaaactctatcataaactcttcttaattccttgcaaatttattttggtggattgattcatggcatggattttattaaca

SEQ ID NO: 244191 - DNA, 270 bp, Gossypium hirsutum
gtgatatgtacttggacaaagatggggaatttcgtgaaatgaatatatatacggccatatgcgaatttagaggaacttcacacacaaccaaacaatcttacactaaatcactacaaaacaaaatttccattctaaaaaaagaaaatgaaaggcttatgaaactcaaagagctataaaaactgtttgcctccctaccttcttccgatccaaaaaattaaattctttaaacattaatattccctcgttctaaacaaattccgtatcaattta

SEQ ID NO: 244192 - DNA, 317 bp, Gossypium hirsutum
  unsure (1)..(317): unsure at all n locations
aaaaaaacaaaaatcctatttcgtggaggctcctttcatcgggcaaccactaaccttcatgagtttgatggctaatagtgctgatgatgatcggattttatcaactgagattctaattttagaaatccggtatgatgcatcaactgtacggagaaaatgcttcgtgaaagttgtgagaaatcgaatctctggtgcacttctagtatattccaagagctgttgctgaaattccctatattgctaggctctttcagatatgggctagactttanggtattaggattggtcttcaattcatgtaaagggtcttggggtat

SEQ ID NO: 244193 - DNA, 224 bp, Gossypium hirsutum
cccacgcgtccgctagcgttcgaattggcaagggttttcaagcagaaattcctgactggtgtggtccaatggatattgatgatgataccattcgcgaacccctatacttgtattcttctgaatatacttattacctctattcaaacaagtcatgtaagtttaactcaacagggagctgtcttcaatgccatgactttctaaactgctaaggaggcaagatatga

SEQ ID NO: 244194 - DNA, 286 bp, Gossypium hirsutum
gacccacgcgtccgtgttcatacaatcatttgttcgaatacacatagcttaatcttgatgcaaaagaatgggtctctcaagtctcccagccccatcagaaggagtgctatgtgtactcttggtaaacacagctttatccatatctatggttaaaggcataattcgatcaatccttcacgtagtcggtatccatctctcctacttcttggcctgctactacttgtcatcatcatcatcaccgccatcctcggatcttattgaaatccctgcggtatcattcgacatc

SEQ ID NO: 244195 - DNA, 392 bp, Gossypium hirsutum
gtgatatgaccaggcggtctgttatttcgtcttcacagcaatcgtcaaggcttccaactgatcattctttggacataaggtcagcaccagtgctagataatgcaagtcttcaaaacccgaatgttgcagttcatgttccgactttgcctcgaaatgtacagtcatttaggtggaatggaggttctggctctagaactggcaatacatcaagttctaatatatctgggggataggaatgcttgaccccaatgaggaccttcaatcaaaaacattgcttggaacctggtaaaacattctatggttggtccggccccttaattgaaaaaattgggtcggaatccaatgaatccagaagtaaatagtggaaatttaagtggtcctggaaattttgc

SEQ ID NO: 244196 - DNA, 407 bp, Gossypium hirsutum
acatttcattacaagccaagaagttcaaaatgtccaaacgaagcggccgaggaacgaagcggtgtacgatgaagaaaccgagttgcagaagagtacatcaccttgcattgatcagattccaagcaatcagcataataatattggagttggtggaaccagtggtttttgtttagcattgtgtctgaaccagaacaatggggttgaattggaacaacagccattgctgcctatgaacttgtgtcataatttcaggttggaaagcgatggtgaactgagtttgaaaccagggttttgatgttgggaagaccagtaccagagcatttgttttggtatgattgtttaattggttttgcttaatatttggccttttgaaaaacttttaaactttgttacttgttttttttttg

SEQ ID NO: 244197 - DNA, 402 bp, Gossypium hirsutum
tggcgatcatgcggtgtatcgatgtccaaccaagcaacgaaatgacggtggatgaattcaaagcatggctccggcgtttcgatgcggatcacgacgggcggatcaaccaggaagagctgaaagaggcactgcatagcctgagagttcggtttggatggtggaaagcacgtcaagggatgaaagaagcggattgcaaccatgatggccaaattgagaacgccaaggagattgagaagctggtgaattatgctcagaaacgcttgcatataaaaatttatcaaagcgattggtgatttgattttgcaaaccactaaatgcaagtgtaacttttaaaaaaatatgggcctatgaataataaaaaatgattttaaaaatggggtcccctggctttttgaattttct

SEQ ID NO: 244198 - DNA, 311 bp, Gossypium hirsutum
atgaattcgaggtgggagacgtttgtgtgtttgagctgatgaatgaaaatggaaacttgtgggaagttgtcattcattgcaagcttttactcgtcgaaattaattaacttgtcaagtatttcaatccaaattgtaattgtttgatgattttgtgtatttattcaatggaactgagagttgctgatgggaggagttggattgttgtgtctgatagaagatgctggagttaacttactaatgcagtacttgtgggaaatatttgttgactttacgcaaataaccacaatgtctttgacttggactatcaagtg

SEQ ID NO: 244199 - DNA, 362 bp, Gossypium hirsutum
cccacgcgtccggttgcttttcccctgcttctatccatgtttgttgttaagtggtacttggtcgagttcagaagattgctttgttctttatttcccaattcttctcttgcaatctgcaaataatcataattctctggtatgaactcaagatttatggtgaatacaattgtgaatcttccatgcatacttaaaaaaataaaaataaatttaaatatatgtattaaaataaataataaaaaaaatgtattttttagtaatctttttattattaattttttttattaattctatttatttactacttttattttattatattttattctcacttttaaattattctcttttctttatttttttct

SEQ ID NO: 244200 - DNA, 215 bp, Gossypium hirsutum
tataaaccacgcactgatactcgcatagatgtcgacttatatttgtacaaagagcttgatgctatatatggacatgttcatcacactctctgtgcctcttgccgatatttacaaggcattctactacattctccacaatatacgtctgagatgcatgaagcatagagatgcttaatgaaatggtgcagctatatatttaggcatccatagctcaa

SEQ ID NO: 244201 - DNA, 380 bp, Gossypium hirsutum
cccacgcgtccggccacgcgtgtgcccacacgtgcgcaaaagcatgcctattacagatgggggcctatattgtgtgttacgtttacaccttttaggcttgatgttggcgttctggcttttggaggggtttcccccatacagtgcatgatgattcaaccttattcattctcaaatcatatgggggtatttaggcagctacacggtagtgctaaatggccatgtataaaggtgtactgtgtgagttttgcacatggaagaactgcttcatgctcgtgtttagtagttgccatgtgtttacagctttgatggggtgaagaaagcaaaaggtatcttctgctctgctgctcataataaatgtgctgatgctgtctttttgaagt

SEQ ID NO: 244202 - DNA, 257 bp, Gossypium hirsutum
cccacgcgtccgtaaatgataaagaaatcgtttgaaataggtaaaaagaaaagaggattagaaggaggaaaaaaatcaccttctctgattttccattgctttctatattgcgttttttggatgccttatatccccagggtttcataaaaaaaaaaggagcaattccttgctttctgttttattgcccgaaactcccaaaaatcaaaactaaaaaatcccttttctcttctttttctattttctactttgggttggct

SEQ ID NO: 244203 - DNA, 370 bp, Gossypium hirsutum
cggacgcgtgggtttagaagcaaagcggagtaagctatcggcatcagctgaaccattcaatgccggagcactctatcaccctttaaactcagtttctgttacatgtgtttatgatgtaacagctagtcaaggcatgcttgttgagcctgttgtacctccagttgctgctcgagttccttgcgggccaaggtcgccattgttttacagaaacaataattcttacggtagctttcttagataccaaactcctattttggaacaaaatggatttggatctccgagagttatgaaccctcatgcacctgagttcgttccaagcaaaatttggcatatgactggaactggtgatttgagtggctctgaagaagct

SEQ ID NO: 244204 - DNA, 148 bp, Gossypium hirsutum
accaagttcccagccacatgagtaaattgtcttgttgagaaattgagtcatcagagaaaaatagggactgtcggtccaatttctgacattaaaacagagacaaattcacgaccatctgatgtattggaaagtgctcgagctgatattg

SEQ ID NO: 244205 - DNA, 218 bp, Gossypium hirsutum
cccacgcgtccggttttcatccactgcacttcttgcttcttagtatatgtgatagattagaccacaaatgtgcttgcttcttttgctgctgaaagattgaggtgccttcttttgtcatcttatccaggaacgggtttcctttcattttgcaacctaggttgtaattctattgcagttttgttgtcacctactttttgggcgctcctatttctcccatt

SEQ ID NO: 244206 - DNA, 185 bp, Gossypium hirsutum
cccacgcttccgcccacgcttccgtccactttttcgaaaaattggcaaacagaaccagagaaggggttctctaatatcatttttaacaacataccttctatcttagtcactccaagctcagagagatcactttctagttcctgacagaatgtttgctacttcatctagaatagctgctctaaatc

SEQ ID NO: 244207 - DNA, 189 bp, Gossypium hirsutum
aattcctgaaccactgttttactggttagactagcttctactctagtcattagaacgagaaggtatcattttgcaatagttctaatctcttatgtatgcttctgagcttgagctccattgtagcagccctttcttatgcttaatggagttttttctatgatatgattatgctgaggaattatatattct

SEQ ID NO: 244208 - DNA, 140 bp, Gossypium hirsutum
ttatgttctgactataggcagtaaattcatgtatctggttcgttaaatgcttctttggtattagtgcatctgggggggaggggatttaaatttttaccagacccaatttactgtggaaggtccggagccagggagaacct

SEQ ID NO: 244209 - DNA, 280 bp, Gossypium hirsutum
gccacgcgttcggtagtctgaaggaaacttctcttagtatatgtgtttctagatgagcatgggaacatacagtgggacataatgtcagatcagatttatctgttgagattacagatgaggcagatgatgttgctcccagcagcattccacttgaaatagtgtgtgatacattgtcacatttgcgtacacagggctggccttgtcattgttcagattcagtctgtgttcagcttgttagcctgttaatctgaacttgtatgcatctttacctagttttttt

SEQ ID NO: 244210 - DNA, 431 bp, Gossypium hirsutum
cgccaaagttccaattcccgttggatttgggttccgttaaagatggagagaggaaagaaacgcagaagagaagcagaagagatcgaggctgaaaatagagacgctaatcattctctttccctagagcaaaatctcagctttagcgatactaatgtggcccttcgtatgatgcgagctcagtttcctcaaattgataaggtcgcaattcaaccttttattttacagtcacaattgtatagcagtgtaaaggacagaactcaagtggatagggagctagagtctctaaggagggacaaggtagtgcgcatattcaaactaaatacagggcaagatgatcatggaataatgtttttagaagattatctaaaacagttagagcatgttgtcaaaagaatggaagaaaagaaacaaggtgatgttgatgtttttaa

SEQ ID NO: 244211 - DNA, 137 bp, Gossypium hirsutum
tccacgcgtcctcaccaacctgagtgcgatctctcgccaagcgtgttactataatgcccaagaacattcttttggctcgtaagatcactctctatcgctcttaatttccaagtgcgtcgatcacttaactcagaatg

SEQ ID NO: 244212 - DNA, 322 bp, Gossypium hirsutum
ctcagtccctggcagcagtgctcccccaatacaaaaatagtagtttctgttagcagtttgcctgaatctgctgcaattagcatctggctatgggtttgggagttctaccaatattcctggaggacttcctctgaatccgcctacagcacctgcaggcacaaccattggctatgatgatattctgagttctcagtacaaggacagcaatcatttgatgtcgcttcaacagactgagaattcggccatgtgggttcatggccctggctcacgaacaatgtctgctgttcctggaagcaattattacagctttcaggggcaaaac

SEQ ID NO: 244213 - DNA, 214 bp, Gossypium hirsutum
ccacgcgtccgaattatcaccaatccctgtttcaagaaagtgtttcaaagaaaccaaattcaacgctgaagaagtggtttttaaagagtatatccacaccaccaagtgcttaatctccttccatataatctcattatcaaccgtattcgaccttcttcttttattcaacaacacctacttttctttccataaagaacatttcttattatttaat

SEQ ID NO: 244214 - DNA, 138 bp, Gossypium hirsutum
tcggacacgcatccgatgtttgaaaaagtgcttttaacacgagggatacactacgattggggatggatgtactgcaaattctgaatatagagccctcttttcgccgaatattcatcagaatggaaaataccataagag

SEQ ID NO: 244215 - DNA, 181 bp, Gossypium hirsutum
aacacgcatccgattgttcgaaacaggcgcttttaacaccgagcgatacctacgattgcaggtggatgtgctgtttataccgttcacagccctccctctcatcaaattactcatcattatgaaaaatactataatattttccctcaccatattcaacttaaccaccatatttcatcctttt

SEQ ID NO: 244216 - DNA, 257 bp, Gossypium hirsutum
cccacgcgtccggtcgtactcccctgctccgagacgaagaggaaactattcagtttcaccagatagaggacatgaagaccatccaagatccccaagaggtcctccacaaggttgtggcggtgattacaatcccggaccatattcttcaggatatgaaaatgctggtggaaatggctatggcgagaagtctgcatacgaatctgatgaagcaccacttgtctgcacggaggccatcgccacctggtagagcatcaagg

SEQ ID NO: 244217 - DNA, 132 bp, Gossypium hirsutum
acgcggacgcgtgggaaagatctttgtgatcagatgttaatgattcgtgctcttccgtaaacatgtttccatggctcctgaagttgagcacaaaactgtcacgggtcttttgagaatgattgagggtgagag

SEQ ID NO: 244218 - DNA, 178 bp, Gossypium hirsutum
cccacacgtacgaacaatgctgcattaattttgtgagaatatacacaaaaagactgggcatgtgtatttttacaacatgaccaacgcccaccaacaccacccacgatcaacaacctccggctagcaggcaccaagaagtcagccataagaccctttcgcaaagtgattctctatacca

SEQ ID NO: 244219 - DNA, 124 bp, Gossypium hirsutum
attgggttgaacatgactggctcttaagattatgataccaccaccatcaaaattgggtgcggtaagaaatgaactagtaggtctgaaagagcattagtgaagttgatacgtgtaatgaatgtgt

SEQ ID NO: 244220 - DNA, 411 bp, Gossypium hirsutum
aagccaccgtctacgaggaagcagactgaaacctcggaggaagatgaggaaatgttggagttcattaggacattgcgggagctgtatatcaaggaattggaggacgtgctgtctaggatgtaccatgacgaaaagaggtaaaggatcaaggatgtgtatgtgcaactttatgttcaacggtaagccaagcagtcttgcctagtaagaaaactgcagacaccatacatgtatacacccgatcagttgagggaaacgaacgctcatgtgaggaaaatcatgtagagaaggaatgtagtagtgcgtacgacaatagttcagaagaggacaaccatagagacaaaggatcttctagtaactgttcagacaacatacaattgactggagaagactgctcgttgataccgtcaaaat

SEQ ID NO: 244221 - DNA, 253 bp, Gossypium hirsutum
cccacgcgtccgcccacgcgtacggcttgtaaagaagtgtcgatgctgccgatagcaacggtgtgccgagttcgttgacatggtttcagcgttgatgctttaagcaaaaatataatggatatagtcccttcagctgtctcacaggttttggcttattgcccatcaataatataaacgttaagagaagaaagtcatgaataatctgtatgaaagattggagtataataagtattttgctctttagccctccact

SEQ ID NO: 244222 - DNA, 402 bp, Gossypium hirsutum
gttcagatcagttctcattggaacttttttagagagagagggaaatggagctctcacagcatggtttcctggaggagctattggctccaagaagggacagttggaccactttttcagctggggcgactgagttcctccctagcggctcatggaactttgattcttttgatgagaatccaactttggctacatcaaatctctccttggttgcattctctccaccaccaccacctgatcaaacccccagctttgaatgtcctttcagcgatcaaccctacccttttgttgatggattcacagtgcgggacatggattcttcgtacaccaacgtcaatgtcgtccacccccacacattttctttcccagctactcaacaagacttcccattcatggttgatgatg

SEQ ID NO: 244223 - DNA, 340 bp, Gossypium hirsutum
ctcacacaatgtcgcggatttccaatcaggcttgagggagatcgacagcggaaatgcatggggaggacattatgatgatactttaactgcctctcttaacagataaaaaagtgaaaaacaaattgattggactttacataggctcattggcggatgcctttacattaacaaagatcaatgtaatgctcttacaaatacacaggagttaaaaccactggcatagaatacacagaaggatgaatgttgaattacatgtaaaatgcaccgttctcatactaagcattttttgcactattattgtctatgtgaggtgatgtgacaatggacgttattgacaatg

SEQ ID NO: 244224 - DNA, 420 bp, Gossypium hirsutum
cccacgcgtccggctgtaaggactgcatggtatgattctaaaaaagtcgttgaacacatcatagatggctatacgaagccattgagaactaagggttgggataaagctcttgtagaattcactgcagcaatgcttgcaaaaggcgagtctgaaacgaagcccccattgtcgaaacgactgcacgaaatctcctgccctgttctgattgttacgggtgacaccgatcgaatagttccttcttggaatgccgagagactttcacgagccattcctcattcgaagctcgaagtaattaagaattgcggtcacttgcctcacgaggaaaaggtcgacgagttcgttagaatggtcgagaagtttctgcaacgagctttcggtggtttagtgtaaccatctctacaagtagtaacctgaaatctg

SEQ ID NO: 244225 - DNA, 290 bp, Gossypium hirsutum
gatcaacaaggttttgtttgcgtgcttctttgccagataataatggtgaatttaaattggagtatacaccatggttggttgttggattgtttcaccctggaaataagttccattgcactcgacacaatgttgcatctgaaaagattgactcactttcacaattgaaagggattgcattgaatactatacggtccaaatcttttagtactattaggggctattgctcatgtgacatttttagtgctatataccctcatggagctttttgattaccttattgactccatttt

SEQ ID NO: 244226 - DNA, 421 bp, Gossypium hirsutum
cccacgcgtccggacccacgcgtccgggctaattggtcttgtatgctattttacggggtattttaagggcttttaatgacctggccaagcaagaaccaaaacgtggagggataagggctacactttttgtctatgataaccattcatttcttttaatttctttctttcctttccttctttactttagaaatttgcttgtcttgtaatgtctttgattcctatttgtttatgattttcttggcagccatggaatggctggagaatatggcatttatctcaaatgtcataagcctggtaatttacttttatgcctacatgaacttcagcctaaccaaatcagcaaccacccttacaaatttcatgggtctttatttttagtagcactctttggagggttcatctctggcacctatttgtcaag

SEQ ID NO: 244227 - DNA, 411 bp, Gossypium hirsutum
gcctgggcttatggaccgacgggtcgacaagcaacaaaagttaaatcgattgcaggatgatgatttgtctaatatagggaccaaggttaaaacctgaagtgaaatgggttgaagattgtagaagattacattgatcggagaaagcccttatatttgttagcttgatgagtgctttggaatgactgttgcagttcaaaatttgtctacatataaaatatagtttggtgtttagtgagtaggaaatatagtttttgaaaccatataacatcttttatgcctatcatttacttgtgtgaatttcttctccaaaatctgtgtcatatatatcattctttaccctctttttacattgtatttttatcacactgctttagtattgcagtaaatagtgggttgatctgagtctgatgt

SEQ ID NO: 244228 - DNA, 437 bp, Gossypium hirsutum
cccacgcgtccgggcttactggtgctgcatattttggctacactaatgtttgttccctctgtggtgtcttggttgcaggtatcggatttggccaattgtaatgcctttccctttttgagttttcacaaaaatgcatccatttaaatttcttttatcatcttgtgggacctattttgcgattgcagagaatagggatgcatcagagcttcccaaggttcctagattcgttcctttgcatttgtttgattcttcacggtatctttagttcggagtcattgttaaattctgaagtgccccttccacgcatcatgggtaaggaagtgagactgaatttgatctacctaactgccggaatttactcttatctctctggtatggaactggcaccctataaagtattgtacgccatgggtgccatcgggatcattttctttgca

SEQ ID NO: 244229 - DNA, 338 bp, Gossypium hirsutum
  unsure (1)..(338): unsure at all n locations
gcctaatgtagccttttgcatttacagatggcatgtatgataataaataaatgggcatacgtcctaaatgaaaatgcttccttaatatagtgatgtaaggggaagtataaagcaataaaattgggcttttacttttaaaaaaaaaaaaaaaaaaaaaaaaaaaaaaaaaaaaaaaaaaaaaaaaaaaaaaaaaaaaaaaaaaaaaaaaaaaaaaaaaaaaaaaaaaaaaaaaanaaaaaaaaaaaaaaaaaaanggggggccccctccggaactaaaaatgcccccctggaaaaaaaaatttttgggggacccccccccgggggggggggtggttacc

SEQ ID NO: 244230 - DNA, 244 bp, Gossypium hirsutum
cattcatctcctcttttcttttgtgatttttaagcaaaacccagaaatggcaacaagcaaagctgaagggaaaaggagactgaaggaaatggcggaggaggaagaagaagaagaagaagaggacgaggataatagtactactggtgacgatgacaagaagaaaaaaggcaaaagagggtccaggaccgtggtcggaggcttctgtcttcccgcctgtcaggtcgagaactgcactgccgacatg

SEQ ID NO: 244231 - DNA, 349 bp, Gossypium hirsutum
aggggcggcgcgcgtacgtatgatcataccatgggcatggtgatataaaacctgttaatgagttgattactagctcgggggcggtgaagataggggatttcagtgtcagccacttatttgagttttatttaatttttgtagaatgacaatgatgagcttcgtcgttctgccgtgactcctgtggttaccgaacctgagtgttgtctagggtctaaatattacggaaaatatgcttacacgtgggcgtgaggagttacctaggactgaatggtacttttaatatattcatttctcgttgagacacttcatgatacatatgagaagatcgttaatagccctttaatcctgc

SEQ ID NO: 244232 - DNA, 218 bp, Gossypium hirsutum
cgggaatgaacggccggaccgacgcacgcgtactcacctactattttttttagatgcttttacgctggaaaccactaatgaaccaagtcacggtggtggataaaagaaaatccaagaatttgccacagcataaatagaagatcaccacatcgacagggttaaagttacttttatcgtttatctcctgctactaatccgagaaatccattcacttcaat

SEQ ID NO: 244233 - DNA, 403 bp, Gossypium hirsutum
aaaaaatggagatactatacttcacctagagtccattttgaacgcatggccttgtgttctgttccttagtgattttaatgtaatcacacatcatgatttccagaatgagagttttgtttcatttcttcttctaagtatttcattgttggcatgattcagttgaaagagcaatctaaagctaatggtgctcagaatggggcttcatactatgttcctacccaagatcttaaatcagaatagacgctcatcaacagagcaacttgttggagcagcttcttcagcatacctctcgcacgtgacgactcatggaaatctgatttcaacttgacatcattgttagtgtacatttcttaagtgattcagatgaagagtaacacgaccatttgaactgtgatttgaggtg

SEQ ID NO: 244234 - DNA, 425 bp, Gossypium hirsutum
gttagggccatcaagaagaagatttcgggcaaaaacgctgtcatccaatggttgagcctcgatttgttggaagcttgtaccaccaattgcgagaaggtagcttccgaggtggcttccgagaaagttttggaagagatgatgaagatgattgagaatcccaacacggatcacgggaatagaggaagggctttgcagttgattcgtgcttggggacaatctcaggatcttgcttacctccctgtgtttcaccaaacttatgagagcttgaaagaaagtagtacacatgtaccagtaggtaacgggaaatcaggccctttgcagtattccttggagtcttgtatgagattgcctccctctgaagattatcctgacaatgagacagaattgcatgccagtgattttgcctacaactattggaatttttc

SEQ ID NO: 244235 - DNA, 356 bp, Gossypium hirsutum
gaaagaaaagaatcaactgagtagtttattatgttgggatttgaccaattattacaaaaatttatgcaaatgaaaagaagaatattgaaatctcaagacagacagtcctcttctgtgtagaaaaaaaactagcaatacatactatgagatatggcaggagttgttcacttaaagaaaacctgttggatatatgcattgctgacctttgattccacttttagttactcttggacaacaaatgatggatatctttccagggtttatgggagcaaccgctgccggatttatcttcacaccagaataccgacaaatatgatattcacgtttggtgttagactgtatgagctgatttgatc

SEQ ID NO: 244236 - DNA, 273 bp, Gossypium hirsutum
tgacgcctataaacagacgaagacagttgatccaaaacagttggtggaatactataagcagcgtttcatggctcagaagtgatggaactgctgacatcttaagatatatacataatatatatatgtatgtatgaaaataagcttggtgtttgttgatgagtgtttcttgtttgttttcttcagtgatatactctatgatagtatgtacttgtgccagtttgaagtatctctagcatgtaatagcatttggaattttacatgaataaatttgaa

SEQ ID NO: 244237 - DNA, 268 bp, Gossypium hirsutum
ccaatttgtatggcaacataagtatttttttgggggggggggggattttggctcatattgagtgggttggttcccaaatttaaactccaaaatgtgacgacagcttaagctccgtcccctagtcccaccttctatgccacaatcttcgtgccgacttagcttgcttccctcattgctattgcatttgagcttgttttttaaaactctgctgactaatgagacctataatatagtttataattcctctctattttctacttatgactac

SEQ ID NO: 244238 - DNA, 226 bp, Gossypium hirsutum
gtactactgaaatgatcaatttcttaaaagcaggccctgcaccaagcggatccgtggaagtattttcacccggtgttcaaaatttggaagttgacactgttatcgaacaacggaaagaggttgcactttcacagacactttttagtgcaatattatcactcttggttggaatgattgtctgggaagctgaagatccttgcatgcctcttgtggtggctctctttac

SEQ ID NO: 244239 - DNA, 434 bp, Gossypium hirsutum
  unsure (1)..(434): unsure at all n locations
acgaatttccattggctgctcttctgctagtttctacaaaggtttcgtcatatgatcaagaggagaagcttgagataccagtcaaggcacctccagccccggttcagaccccaactccagcaccctcagccgaggttcttagtcctccatatgaaccaccagctccaccaccagtcaaggttcctagtcctccatatgaaccaccagtcatggctcctagtctcccatatgaaccgacagctcctacaccaccaactcagccacccactccaccatatatacctcaaaatcctacaccagcacctncagccacaactccaccgncatacaagccaccaagtcgaacatttccaccagttataacanaaaaggattgcatacctttatgtggaccaagatgcanattacgctcaaggactaagctatgcttgaga

SEQ ID NO: 244240 - DNA, 275 bp, Gossypium hirsutum
cccacgcgttcttcaactcttgcaatcccctacttccactgattactctgctgaaggtggggggaaatttggccactgtcgaattgcctaataagccactctactatcccattcttattttagtcactggaaaacttgcctgtatataagactcacattccaccaattacattgactgattaacgaaatatatttacctgccatatcacatctctgcatttactatcatggttatcacaacatcttatgctgtttacttcccttgtttgttttgg

SEQ ID NO: 244241 - DNA, 409 bp, Gossypium hirsutum
cggacgcgtgggcggacgcgaggaggccgtcatttactcctgttcgcgacgaacatagtctggaacaccacccaacagatcgaccatagtccatagcaaaaaagacgacactgttcactagtccaccgactaaaaacccagggctatgctggaaaatgggattactgtctttctcagaggtacgacatggcagacaacaaatttacacagccacttatttatgctggagattagttaaagtagggatataattccaagagattctccatactgtaattctgactttttaaggaagatgtaaatgccatagtttcctgtaaaaagctctaatctcagtctgtataagattatgactaggacccgaattagcctcatgtaatagtttataggcacttctgattgagaaatc

SEQ ID NO: 244242 - DNA, 356 bp, Gossypium hirsutum
cggacgcgtgggatctttacctattgtaggcagggtaaggtgaagactgcggtccgaattttggattgtgttcgtgcttcgggcgattggcatcccgacgtagtctcgtataccagtcttatatggggactttgtaattgggttggtatagaagaagccatctgttatcttaataagatgataaatgaagggatatgtcccaatgttgcgacatggcatgttttcgtccagtgtttgtttaacagcttaggtcatttgggaccgattcgagtcttggatgatattctaggtaacggatgagaacacgtccggctgggattcttttcaggccaaggtcgtaacaatgcaaaagatgc

SEQ ID NO: 244243 - DNA, 390 bp, Gossypium hirsutum
gtggggctcgcaatctggattttgtcaaaagcctcggagcagatgaggttcttgactacaaaactcccgatggtgcagctctaaaaagcccttcgggtcgcaaatatgatgcagtgatccactgtgcaatgggcattccttggtctacctttgaacctaatctaagttcaaacgggaaggtaatcgatataaccccgggtcctagtgctctgctaacttttgctatgaaaaagcttaccttctcaaagaagaacctggtaccactgctattgtcacctaagaaggagaaccttgaatatctcgttaacttagtgaaagataagaagcttaagacggtaattgattcaaagcatcccttaagtaaggctgaagaagcatgggctaagagca

SEQ ID NO: 244244 - DNA, 232 bp, Gossypium hirsutum
aaattatactggatatactacgttattttcacttccaacggggggggatatgaaaaaaaattatgctattgatacccttcgaacatctccacgcttctttatttagcagtgaaaatggattataagaatcaactactttgttttaaaaaaaaaaaataaaaataaaatacatctaataaataaaccaaaaaaaaaatttcaataccacaatttttaaaaaaaaaacaaatcc

SEQ ID NO: 244245 - DNA, 331 bp, Gossypium hirsutum
gctgttcaatgaatatggaacacgcccaatgtcgctgagcatatgttgaacgagaccacaggtgtcatcaacacacacaattatttggcaatgcatggagagattgctattcgaattctccgacttgcagcgaaaattatgtgctctacctcgaaccgttatatctccacaaacatttagggggaaacttgctccgcttgtactacagctcagctgactcatgctgtacaaatgttaaccttgtcaaagatgaacctggaaccactgctattgtcacctaataaggagaaccttgtatatgtggacaacttagtgaaagataagatgctta

SEQ ID NO: 244246 - DNA, 426 bp, Gossypium hirsutum
ccacgcgtccggattaattgaggctgcattaactttggtaatttccatgtgcttgcctatggtaaaaattttagtttcccttttagtggaatttgggtcagttcagttttacatgcagatcaatcaggagcgtgaaggacaacagattgactgcgtcctgctgaagaatgtcttggatatctttgtggaaattagtgactacaaaggggctaactattatgaagattttgagcggatcatgcttacagaaatctctggttactattctcgattagcttcagagtggcttctgtatgactcatcagctgaatatgttcaaaaggttttctggtgcttgaatcgggagaagcaaagagctcgacagtacctacatcctgacactgaagtaagatagtgcaggttgtcagatatcatttgctagatcaa

SEQ ID NO: 244247 - DNA, 210 bp, Gossypium hirsutum
acccacgcgtccggctaaacattgtttgcctttcatttctttctctattcctcgttgcttcctcggcaggctcgtgggtttttgagtaatcgaagatcaaaaaggctggggctgccttttgctacgctgtttagtcgactgtctgccaagaaagagacgccaattcttatggtcggttttgacgccgccggtacgcctaccattctgtac

SEQ ID NO: 244248 - DNA, 130 bp, Gossypium hirsutum
tatgattcttctttcttgatgttttgtctaataacaagccatactttgcctacgaaaaccattgagtaggtaaattgttcttatctccacattgttctaccaaatatacttttgcctattaagattttat

SEQ ID NO: 244249 - DNA, 253 bp, Gossypium hirsutum
accacgcgttcgcccacgcgtacgggcctgcccatgttaccgtatagcctgctatgagactatcaatgagaatataaaagctgcctaagcactctgcgggtacatggacgagaggtttggtccttgttgaggggaataagcgcgatgaaacaagctgagcgaaatgaacacctttggatcatgtgtgatggcgtgcctcaagaaatcatagaggtgttaattctgcaggaattgatctctgatttccaagaat

SEQ ID NO: 244250 - DNA, 413 bp, Gossypium hirsutum
  unsure (1)..(413): unsure at all n locations
atctggttctctgctccaacttccttcttaaaaatcgtctctccctcgtaccagggaatccctcataactgtcacagaggggagctccattttactccctaatttaaccgtctgtaaactcaaaagggcttcagtaacaaatgaagactaaacattctggtgtaaaactgtcttcgtcgccatgagtcgtccgcccctgccccagaccagcaggccggatgccgacttaaaattcctgctatcaaaggctgcgtcgaactgaatcgtcactctggttcctccctcttgatacctgtaactgctgctcggtttaaggtacttgtntcatcctcaacccttcgagtcagctatgtagtgttaaacttgagagataactcctacctgttctgtttctgtcatgatgaattattcct

SEQ ID NO: 244251 - DNA, 226 bp, Gossypium hirsutum
gaaaagaaatgatgctgtgttgcctgtaaatatttgcgctcctgcactgtaggatttgtttttagaagaagtcaagaatattgtggttgcttttaatgaatggttaccatatatttgaattctcagctataccaaattatcgaccaaaactacttgggtccagatctgttttttaagttaccgacttatgaaaatcgattgaatgaaaatccatatttatttgtat

SEQ ID NO: 244252 - DNA, 314 bp, Gossypium hirsutum
acgtccacgcgttcggtttatggtataagatcaaggacaagatccacggcgagggaggtgatgaagatggtcaatagggaccaatgttaaaacctgaggtgaaaagtgttgtggattgggccatattagatgatatagtggagagcggtgctagtttgttgatatatgaacatctacaggagtcctgtgtgggataccttctagaagagtcgcaacgtgttcttgtggtatacgcattttatgcgttgatatttgcaacaaattcgaacacgcaagatatggaagggtgcttacagtcgtatcttgagagatta

SEQ ID NO: 244253 - DNA, 288 bp, Gossypium hirsutum
accacgcgtacggatatttcttgattctctgggagggggtgacaggagattaccgccttacattattaaacttgtaaccagatgcattgggtctattatcactgttcgcgtgaggagaagaaaaccatgccttattgaactgaacatacgccgtcgacaatgcgtcctgatttaagaccctacttttttgatatgacacttttgggacagaaaatcatattgtggcagaaacatatttctgcgttggatgatgtataatgtgcgatatgagtactaatactacttgtc

SEQ ID NO: 244254 - DNA, 229 bp, Gossypium hirsutum
ctcaagggtgcggccacgcctgggtttaaggcttagcgtctgtagggttatagtatctcggatcgttgcatctgaggccttacacatcgaagcatatttaactcagcgcatccggatttccttgatagagagcagcgtggatgaacagtgctggcgagcagttgtcgatcatatagaagcacgatccggttgatgacgctaaatatgatcgcattggagatgcgatata

SEQ ID NO: 244255 - DNA, 394 bp, Gossypium hirsutum
ctactattctccattaattataagtgagttggatatgtggcctgtgaattggctctttaaaggtaattacgtcgatatgaaatctgttatgtatgttggatctgttatgaagtttatacttgtagtccccaatttgcagattcctggctcaaatatattattttcagagtcactgcaactcacactgatcatatggaaaataaactacctaataaatatttctctatgatgacaactttccctgttttgaaagctgaaggtgcttgcacagagtgctattttatagtatgaaaacatagtaaatgatatgtggtttagctttagcttgagtatctaacaaggagtggtgcaagttcgtggattgccttgtgctcacaattttcatgtagagtgc

SEQ ID NO: 244256 - DNA, 414 bp, Gossypium hirsutum
cgggactggaaggccggaccgacccacgcgttcgtaaagaaggatgcttattacattatctattttgagctacttgaagcttgtattatatgagagagggaccaaattttgaggtgcaaatttgagatttattgagcattgcattaggaccacacatgcactggtctattttaaatatttaattgtggctgaagctagctgaagatggaatatgaataggatcacctcgaaacatggtttaccacggtgaacctgatgattggaaattgaaagttgggatgttctacttctacacacagcagttagtttgaaggtatgtttccttctgactacctttatgctattaatgcaagggtctgaaaaattatattgtaattttaatccaagtgggaatatatcgaacaatatttgctt

SEQ ID NO: 244257 - DNA, 346 bp, Gossypium hirsutum
gtgatcacatttattcaccttgtatctaaccaccgtttgaatttttatatacgtcaacaaagttctcattatcttaggtgattacaccacctaatgcataaagattgtaccgatatgctcaatgaacatgaatggcagcttctgattcacatgttcccttgatagcttggatgtagaagaccattcgatgccacaccaattacgcatgcagcatatcatagccagcattatgacattgatatgtattgggaagtcctcaacagcttttcactgtaaaatgaaaagatatgcttgaagtgtgtgactgggtgcaccacatgacctatgttgacagtcaaatatctct

SEQ ID NO: 244258 - DNA, 320 bp, Gossypium hirsutum
  unsure (1)..(320): unsure at all n locations
ntaatggtcaacgactgctaccgacctcgccttaactaccatgatccctacataagaagagaggtgtggcatgcacccggccggaccgtttttaatcccacacgagtcccttcgggccacgaccgtcaacggtgcccacatacaacctggtacacgtgtcttcatcaacacccatgggttggaccggaacactagattatgggactgatgttgaatcgttcaggcccgagaggcattggctggctgatggcgctcgagtcgagatcagccacggagctgatttcaaaatcctgcctttcagcgccgggaaaaggaaatgt

SEQ ID NO: 244259 - DNA, 186 bp, Gossypium hirsutum
cgggaaggaacggccggaccgacgcgtgcgctaggaaattgcatgatatcttccaaggggatactaacatattcgtgacgagacatagacggctgtgcttcgataacaaaggacgtatggcaagatggataagcgtatgctttcagaggatctagctttatcatggcgagtatcgcgagcaataca

SEQ ID NO: 244260 - DNA, 404 bp, Gossypium hirsutum
ggttcgggttcaagtactgggtcaggatctgggcaaaccatgttgacagatggatcatggttagctggtttggcaatgggagattcaccaagaacaataccatctcccacttttctagtaccatttgcactcatggcatcaacagctttgtgtttcttgttttcattagttcacttgtagcccatccctatccttttgtattatggcttttgttaaatgtgaattctttacagatttgcagctttgatgggtaaaaatggggttttggcctttgtttgaggaaaaaaaagctgacagattcttggtccagattgtaaaccatcatcagcttcaagattccccaatgttatataaacatttaaaactgttgtttctctaacattctgggatttagagatattttg

SEQ ID NO: 244261 - DNA, 435 bp, Gossypium hirsutum
  unsure (1)..(435): unsure at all n locations
cggacgcgtgggttatactttacaattttcttccgccaccttaatatattgtcaagggtattgttgagatctaggagtgagagaagatttcaacagtataatctaaaatgaatttctttggactcaattccaggaaggactaaaagcaacccaggaaagaagaagaatcttcttgggacctcttaaagacgtcaacatagtcctaacttagaggggcaaccaaaccttcgcgctgctgaatggaggaaagatacggccacaataaggtatcaaaactatcgatgctcggaatatttaaaaaggtatcatctatgccattcttcgttacattctttattattattattattaatataatgccagaattatttataatccttactcaactcttaaatngaagtataaatgcatttcagtatattcaaactcacgtgc

SEQ ID NO: 244262 - DNA, 429 bp, Gossypium hirsutum
cggacgcgtgggttcaacttcgctgattcagtagactttgagaatattagacctcctgtaatggaaggcttagatacattaatcatggtatgtggcttcttacttttaccttcttaaactctatgttccatatgcttagtgtctggaatttcttatcattttgcttgatttattcaaagaaagaaaaaatcttcaaagtcaagtagccttgaaggcaatggtatgactttcttgttgtaacctttgatgattagtttactccgatttcactatcatatgttatttttacaagttgggggcttgcaagtagttcttcaaatcaaacatcacctgcatctcaatggttttcttcaaaatcatcaaagaagaacaaatatctttgtcctttgtgacttcaattatagatggcttaaagagattgtaccttca

SEQ ID NO: 244263 - DNA, 215 bp, Gossypium hirsutum
tcgccatttctgcaagagtagtggacttgattaccgtcacattcttcatcaactgcggcaggggaacatgattgatcaccatcctaaaagatgacgtgagactcacactccactctcaacgtgaactggaccacccacagtaaaggcaaagaaactacatatgttcctgattgagcttgacctagattctctcgtgatgagtatagtcataggta

SEQ ID NO: 244264 - DNA, 318 bp, Gossypium hirsutum
  unsure (1)..(318): unsure at all n locations
aattnnaggtcgacccaggcgtacgcccacgcgtacgattgctaagttcattgaacagattcagaataaccttcctgcagaatatagaggaggcgtgctcttgtccatttgaagaaccttgcatctgctgagaaaattaccaatgttgatgacccaatgtaaactctacatcgaatcgagcttcaaagaccgttactgatgattttgctcctgcaaaatataaaacggtttctactaagtgcaacctaagcctgcctcaacccctacagaagctcacaggactgatgctactcctatcgcgatggccactacaaacac

SEQ ID NO: 244265 - DNA, 442 bp, Gossypium hirsutum
tgacgacattgataatcggattattactgaagttttgggttctgaaaggcatggtcaggttcgatttcaaggatcttttgttaatccaacccaatattttggatccagctcgtatcaatacatgccttcggggagtcagactcaagttgaagttcagaggttaagagaccagatagctcagatgcaagtgagcacagttgagcaaattactcaacttaaagcggaggtagtatcgagagaagctgaggttcgaagaaaatatgaagatctccagctacaacttaaagcagatgcagtagcgagggaagtagaggcaatagcgagagaagcaaaggcagcagcgagggaagcagagcagaaagcacgacgcacttcaactacaacttcagaatatgatgaatatgtttcaacagtcgcaaaatccgccatcttaaactattgg

SEQ ID NO: 244266 - DNA, 366 bp, Gossypium hirsutum
cccacgcgtccgggacttggcagcatgttcgatccgtgcgttggagagctgcgttgatggggttatacttttaggtttggttgtggtgttttggcttttatatttagctcttttttagtaccatttttactcataatatcactcagctttgtgttaataggtttgattagtttactttgtgtcaattcatatcctttagtattaaggctactgctaaatagtgaattatttacatatttagagatttgatgtgtaataatgtagttacgatcttcgtttgaggaaatactatttttctgttgattggtgcagagtgttaaccattattagttttatgattactcattgttaaataaacatttaaaa

SEQ ID NO: 244267 - DNA, 275 bp, Gossypium hirsutum
acccggaatgacaggctcgaccgacgcatgcgtaacgccaactaggaaggaagccgtataattcctgtgcatcttaaagtgaaatgctagaatgcggtttaaagtgactggcttggggagaccgggattgcagccatgcatgtacatattgagtacatgtttacagatatagaggaaacagaggctgatgaaatgctactaccgtaaaaacggataatggaaccgtcaaaatcagaagacagtatctggttatgttacaccgctggatactttca

SEQ ID NO: 244268 - DNA, 202 bp, Gossypium hirsutum
ttttctctgtcgaagaatccccaaattgaaactcaacttcctctgctttcaagaaacgggggaggcttgttcttgtccattccacaaaccttgtcacttctgttaagttgttcaaagttaaagcttcttttacactcccatcttctctatcttctaagtctgctactgctgcttctgctcctgcataatagaacatgtattc

SEQ ID NO: 244269 - DNA, 173 bp, Gossypium hirsutum
atttttattagaaaaacggaaacaaaaaggaaatctctttgatttcctgagatcaagttatacgatacttgatccagaaggaaattgcaaacttgattgaagatcttgtgagcttgttcatcgtcattaactacaaacaagccagcagcatcggtaaaagtgttctaactgcc

SEQ ID NO: 244270 - DNA, 165 bp, Gossypium hirsutum
ggcatgggatgttggtaaaatggatccttatcctcatgaaaaggattggctataagggctgggctctaaagtaccattatctaaccattgttctaccaaagcactgctcgagctgctaccgctgctagagcggatctacttttactggactaaaaacaaaataaa

SEQ ID NO: 244271 - DNA, 557 bp, Gossypium hirsutum
  unsure (1)..(557): unsure at all n locations
ntcggacccgacgcgnttccggaacggccatatctaggaaggggaagccnnggatgagttngtngtttcctttggacccagtgccanntgctagaaaggtgtgattanngatgacnntggcttnngtggagacctgnnagaagtnntagcctatgctatgaangnnatgaggnnagatctatctatactnnngaggtggaacccaatnntttgcggagaattgatatngnngatgaacnnatgaganngtgaagnnaaaagagnnnacctgcangnnaaatggtcaccccaatagcnntggttttaattggaacctnnttggatgttanntcccttctggctggagggtgttactttaccgnnatgatganntggtcttgggattttcttgatgaaatgatttnngacggattagttttaatcttcaatggtggctcaaatcaaaacttggagtanctgagggaagaaggttcaatctcagcttccatgttcacanncgtatgaacggnggtaccaaaagggcttgtggggggaagaagaaatcatgtttttgattc

SEQ ID NO: 244272 - DNA, 441 bp, Gossypium hirsutum
  unsure (1)..(441): unsure at all n locations
cttttcattgaaataaaaacaataactgatgcaaacacaaagagcaatcttcacgtgtcttgctttgttgcgtactgtttttgttctttgatcgtctttgttttgattcttagacggtgttgctttttaaatatatagggattcacaagagagcaaaagagaagcttgattttgtgtgtagagaataatggaaggaaataaaaaagtggggtcttcttcttcttcttcttcttcttcttctttagcttcagagctatttggttcaaaagacccaccttcttcttctactgggatttttggctctatttttgctcctccatctaaggtattaggtagggagtcactgcgtcatgaccttattaccaaaaggtacgattcacccaaagagccatggaacacaacanagccaggtccctatggtaattcttccaaaggacatga

SEQ ID NO: 244273 - DNA, 341 bp, Gossypium hirsutum
gaacgccaactaagaaagaagccggatgagttggtttcctttgacagtgccaatgttaaaaggggggtagcataatgggcttgtggagactgagaatttacccttgcttgaaagaaaggagatcatctatactgagggggaccaattttgcggagatgatttggatgaacatgagagtgaagaaaagagacctgcagaaatggtcacaatagctggttttattgaacctttggatgttatcccttctgctggaggtgttactaccgatgatgatggtcttgattttcttgatgatgatttgacggattagttttatcttcaatgtggctcatcaaaacttg

SEQ ID NO: 244274 - DNA, 321 bp, Gossypium hirsutum
ccacgcgtacgtttttagctatctctagatttaaggtttttagtttaaggaaaataataagtactactctggggggttttttaacatataaattcaacacaatcaactttcttttgattcttagacggtgttgctttttaaatatatagggattcacaagagagcaaaagagaagcttgattttgtgtgtagagaataatggaaggaaataaaaaagggggggcttcttcttcttcttcttactacttcttcttaagcttcaaagctatttggttaaaaaaaccaacttttttcttctattggaatttttggctttatttt

SEQ ID NO: 244275 - DNA, 357 bp, Gossypium hirsutum
cccagatcttattgggccacttgcctgtgtttagttcaaactctatttacagttcttactggcaatatttacatcaatgatgtcaaacctcatacatgctgctgcagtaaataaaccaaatatttaggctgccccaaatgattatgaacatattgattgattctgaacaaactgatttttgggttgccccttagaggacgctgcttaaccttatacattttgcctcacaacacttcttccacggatgaagcatactatgataggctgacctttttaaggctcctacctcatgtaaatacctctaagataatattacttcaatttttatacaagattcttgttccgtaaaaatataaa

SEQ ID NO: 244276 - DNA, 412 bp, Gossypium hirsutum
  unsure (1)..(412): unsure at all n locations
ttccgcggccccgtggggccaggttcctccaactcccttggaatcaaagaatattagggtttctaaaatttcacaatcttttttctttttccctctgcgagccaagntacaatatataatctagattttaatgatattggcaaattgcttaccggagggatatggaattaggttggggaaatttaggagacccataaactccttggttccaagggaggcggtggaacccgcgccttcgccacggcggacgcgtggttccgcttgggccttttggcccggtacatggaggcgttgttggcttaaccatattatggtgtatgccaacatgattgagatgggggatcaaattgtgatacactcactgacccttgtaggtttgatggttagaggatgctaatggtgattgggactg

SEQ ID NO: 244277 - DNA, 212 bp, Gossypium hirsutum
gagttaaaattacaccggcctcaacgttactcggatttggatggaatattgatgtgttttaacacggtatgttcaattttcttaaatatttacttgcatttgggaaaatatctatttatgtatatcttgtactcaatacttattcgtacatcaggtgttattggaggtttttggcgaatatgagtaaaaaactatgtacatgatgcctgctg

SEQ ID NO: 244278 - DNA, 481 bp, Gossypium hirsutum
  unsure (1)..(481): unsure at all n locations
cgtcgcgatnatggatgcttctcaagcatnnggtgacgatgctttgctggctncattagttgnnaacttgtctacgcgnagtgtatgcatttatgttgnnttttaacattttaacggtagataatnnngttgtgttttattcgtattttacattatanntgtgnnntaataaatnntattgtagtggaaacgagcaactaagttatgaagaatatgaagggttgttcttatcnncacttacaatgtatatagggcaattacatttgtttcaagacataatattccattctaccgtaagaagggattgtacanaaaaaaaatttttttaactctgaaaaaaagaggaattaatttttttgaaacttggtaaataaaaattcgggccagaaaaatctttttttggaaaaaaaaaaatttttcaggttctttgattgacaaaaaaaaatggggcggccgttttaaagaatcaaagttttttttt

SEQ ID NO: 244279 - DNA, 391 bp, Gossypium hirsutum
caaatgttgacaccgatgagaatgaggtccagtcttcagatggaaagctgatgctcctgcagaattcaccgtttttcaagaatggcaatgtaggaaacctactggccctagtgaaatatgacgagggactaaagagtgaattatgcaaacatggtgagcgtgttggaaaattggaaaattgtctgaagactcttaattgctggaagacggacatcgagctctatatgtctgagttgcaagattctctggaacctgatttagtgaacgatctggactgtttgtccacgaaagaagaaataacaaagctgatcgagggaagaggtcattctgcagcttctactcttctctgcagtattgctcaaggacattggatggatgtcatgcaagatgt

SEQ ID NO: 244280 - DNA, 403 bp, Gossypium hirsutum
aatacgctcaatgtggactggcgaatggatgcattcactgatttggacctaagtggtgcatatttgattacctagatgcagaatatacataatggcgaaaaaaatcggggttgaggggagaaacaaacaattgagttgccgttggagcatggactttcaattatgttggatataggggcctttgaagtaaagggaaacaggggaaatgggcttgaaatctacatgtttgtaaactggatagctgaacaagcattgattggcacactgattcagttgcgcgagatatccatatacttaacgtctgttcctttcatgtaaagcatttgcaagtcaaaactcgaaaacagcagaacaagccgcgggaccccgctttgcaggcttaaggagtcatgcattttttaat

SEQ ID NO: 244281 - DNA, 409 bp, Gossypium hirsutum
  unsure (1)..(409): unsure at all n locations
ccattgcactctccctctttcttggcctcaagggtgatcccgtcccatgcgatcgttgtgctggaaattgaggtacaaaatgtgtcttttgcgaagatggtaagatgaagcaagaaacgggcttgatcgattgtcgggtgtgtaaaggtgcanngtagatttagtaaaagatcagaactcaggcttagcttcattggttcttcgtactcaacctatccttaaaaggtgacatcctagcaggtttggcactccaatcccagcattggaacactttctccttcctatacctatgatctcctttgcaccaaaaaaaccgaaggatgctttattgattgtttaattttacttgatacatgacctagaccttatttatgctaccattacagtggctgtttctcaatagactttg

SEQ ID NO: 244282 - DNA, 301 bp, Gossypium hirsutum
tatgaattttgatataaatataaaatattttaccgtttcctaattgtgtaaagtattttatatttatatgaaatactttacacaattaggaaacggtaaaatacatgaacacaagaaaatacaaattgctagttctatcggagaagatcaacatggcttattattggatttagatggtgaagatggcatggcttttaccgtttcctaattgtgtaaagtattttatatttatatgaattttgatataataacacattacaacccagaaaatacaaaaattaatcacctagaataaaaatat

SEQ ID NO: 244283 - DNA, 262 bp, Gossypium hirsutum
aaatgggcctaaaaaatcgttgcaaaaagttctttaaaaaaagaattccttgaggagttggggggaatctcttaagggggaactagaaaatgtgaataaagagcattctaagctgaaggagaaggaagcggaaactgagtccattgctgggaatctgcatgtcaagcttcggaaaagtaaatcagagcttgaaactttcctttcggaggaatccaaaacaagaggtgcctgtgcagaaatgttatcaaccctccaacagcta

SEQ ID NO: 244284 - DNA, 350 bp, Gossypium hirsutum
acccttccggaagaagacccgcaggaatcaacatcaaaagaacaaactttgactgaagttccattgagtcttgagaatgaagctgccattgaagagctgcaccaagctgaagaggaaaatgttaatggaaatggagaggaagaaagggaagaaccaacaaaagctgaagaggatgaaaaagaagattcgacaggggaagggggaggagaaggtgagacaagccaagaaagatccgaacttgaatacccgggaaccgacctggaaaacgagtcaaaggagagtgagagtcaagataagttattgccagattgtttactattaatgatgtgcgaaccaaagctgtcaatgga

SEQ ID NO: 244285 - DNA, 403 bp, Gossypium hirsutum
cggacgcgtgggggctttatagccgaaaagaaattaaaagagaaaaatacaaataatttcctattggctgccattctcgctgctgttttttgtttcctttcgcaggtacaggtgcgtggcttgtgtacgaggctgtactggcgtacaagggttgttgacgtggaggcacgagcggcgttggggctgtacggcggctgagagctgtggcgcaaagagagagaaccctaatggtctaaagttgtaattttttgggcctatcgggcctgtatttgggtcttgggtctttaatcatgtaacttggactgttataagacttgggttttatatttatttattttgtatttattttgggtttcaaaggggccgagcaaattggcctgtttacaacattgatagcaataaa

SEQ ID NO: 244286 - DNA, 397 bp, Gossypium hirsutum
gcggtcacacacttgaggcaccaattaatcctttgatgtgcacaaagaatggcttctcttgtttgctgcctgcaggattttggttcttttggttccattacttgcttcctgctaaaacattgacttcccttttcacattaatacttttcttttcttttctttttccttttcccccaaagcagatagtggaagtagttttcaggactataatgttgattgtttttcattagacatcttgtagtattgagtagtagagttggttccattagttccagttttcactttcccccacttttgtggaaccaaaatttccattagtgagcaaattggattgacatgatgttgttgcattggttggtttctgcatggtccattacttgtaaaacccatatgcttt

SEQ ID NO: 244287 - DNA, 377 bp, Gossypium hirsutum
cccacgcgtccgatggaagcagtcccggaacttctttccgaatatcggacaccgaaatcttcttgcatactggtgttgagactacatgggatgcttatgatgctaatgatcccagtagcagaggaagaagtcgttcatcctcaattgattacgattctggtgatgaaaacaggaaatcatcagtcaatataaaaccaagttcgaagaataaggcagcacagagattgaaaagtgttctcctttggcctcatatgaaagggaaaaaaccgaaaagattgaagaaatcaattgaaggttgctctgaagaaactccaatcccacttagacaaagattttcaaagccttcatcatcacttcctaacaacaagagaacacta

SEQ ID NO: 244288 - DNA, 256 bp, Gossypium hirsutum
agccttccggccaattgccgcctccaaggaccaggccaagaataatcgttgtctgtatttacaaaacaaagtgattactaagaaggctgtgctgtgctgaacttagcattagcgggaaatgctcttggcacaactaaggtagttctgttctaacgctcgcattcttgcgtgtttgaaaaaaaaattcgacagtggaagaggaagaagaaggtgagacttgccaagaaagatccgggcttgcattctaggggaccca

SEQ ID NO: 244289 - DNA, 297 bp, Gossypium hirsutum
gtttatgattatgcttgtactatgcatatgaaatggctcgatcaggttggaagctagtcggagatccatcacactatccatcaaatttatcggtagattttgatgctctggtcgtggttataatggcatgtataggtgggcgtttgtctaatgtttagtcaataatatctgtatgtaatgttgctttgaatttgtgaaacttatgatatttgatgccttgatgattggtgtgcttttggcactttgatgtttaaaggttgatgattataagatcaaatcaatgcatgttttatggcc

SEQ ID NO: 244290 - DNA, 398 bp, Gossypium hirsutum
aaaatttgaaattcatattctcaaatagagcacgatagaatgtaagaacaaaggaaatttatcttctgtttatttgtttgtttattatcccaagttcaagagatgtttgagtttattatctgataaggtaaggcatatttaagtcgctgaactaacatggtaacttttggattattatctgatatattggattattattctaacttcgaccaactttagtaagtcgcttgaactaacatagtagctcgaagataatgcgtggacttcaacactaagttgactgatttagcaaggtttgttgttatatgatcatagcatcgaccttcataatatggctaagctctccttagggctgttgtcaagctatctaccggctgcttttgttttgcatgtattat

SEQ ID NO: 244291 - DNA, 295 bp, Gossypium hirsutum
aacaaacgtgaccactatgaggattagcttatttatgagatgcacaaagtccccaaactgacaaagtgatgaggcatatgggattgctcatatgatgcagaaacattctaacaaaacgccttttacaggacaacgaatcttttaggggaagaacctgtacttgttatgaaacccaaacacgcttttgaggatgccaagacccatccaaatgagcgggatacttcaaatttgtagtacacagacggcaaggaacatccacactttactatcgtcgtgccagattaccaaaattggg

SEQ ID NO: 244292 - DNA, 283 bp, Gossypium hirsutum
cccacacgtcctcccactcatccgctctgctattaggcctcgaaagtagatcaataggccgcgaatttttagccaatagctcggattgtcacctcctaaactaacattgtgttggcaatatttgctgaggccatctatgttgttttccgaaaccattgcacaggatattgctccctctcctgcattggctaccgaagcaagctctgtcttgccgttttccgctgtcttcttatgctcttccatgttgtactctataattcctctcttgttccattgaattcaa

SEQ ID NO: 244293 - DNA, 339 bp, Gossypium hirsutum
agccttccgaggaccccgggccatgaactaagtaaagttgcaatgattacccccttgggtaggcttcctgggacttgattttagttgaatgagttcaattttagcatgtgacgtaatataaaagtgaaatgtcatatataacacacaaaatagtccggaagctttcatgtcaattggagttgtggtgttgtagttgtaagcgtgttcgattgcattggaagtattgattcctccttttgaggttgagattgatgacttaatgtaatgatggatcatggggtcgtaaaagtactaacacctgtgagcaagctgagcctggcttaaaccaatgtcaatatg

SEQ ID NO: 244294 - DNA, 390 bp, Gossypium hirsutum
  unsure (1)..(390): unsure at all n locations
ccccccttccgggacacccttggccggacccttggggttctagttcttaaccgaccnncctcgatctaaaacgggctttttcttttcatgaaaatgcttcattgaatgtggtagcttatggtcatattagccatttttcatctcaccaattctttgttcaagcactttacggataatctaaccagtatactacacccgcctaaatgatcgtttgatgaccatcaactaacaactccatcttattgcctcaagtgttcaagatttaacgttttgctactgtttacaaccacctttttcaatcaacattctttccatctctaccaaagattctagtgcctaatctttgcatttacgctaatttaagaattttatcttgcgggtcgtattata

SEQ ID NO: 244295 - DNA, 259 bp, Gossypium hirsutum
  unsure (1)..(259): unsure at all n locations
cttccgaaaggtggtcttattataattgttagggcttttaaccacgttacaatctgctggatcatcgggcgactagcgatccgaaattcattatgaacagaccttctcccaaaacttagtcgcatcgtcagaatatgattttaggactagctcccgcntcgcgcacagtctaatgtcatcatgctcaaagaccaagctacatgaattccacatagtttattaaagctaaacagaaagagacatttatgccttttcctga

SEQ ID NO: 244296 - DNA, 393 bp, Gossypium hirsutum
  unsure (1)..(393): unsure at all n locations
cccacgcgtccgcccacgcgtccgccacgcgtccgctgaagaggaagtcaaacctactatatctacaagaccaaggggcccatgagccatgtgtaccaaggttacaaatggttggaagacttgtgcagaagaacagaacttggaaattggtgatgtttgcatctttgagatgataaattcaaagggccatgaattgttagactgtagctatctgaaaggccctagactagaggatcaaacataggtttgccataaaaaccttgtttatctttgttgaaacgtagttaaactcaccattaataaaagggtctgctgtggaatttccttttcgtccnaaaaaaaaaaaaaaccttataataacaaatttaaattattttaaaaaaaattactttt

SEQ ID NO: 244297 - DNA, 344 bp, Gossypium hirsutum
caaagagctagaagagttagttgatcaatcttggaggatggaaatgggtggatttctgagggaagagcagctagtgatttagtttagaatattgctcaggttattgacatttctcactttgaggtttgatagtcctctctttcttcaagttttcagactaaattcaggtattgctgtagctcaatgatggatttctttggggtacattgcatgtggatcagattatctcaagaaagaatttggatgagacttaaaaataatcataagcatttcttcagaagactagagaaaccaagtgaacaactttattatgacacccataaagataatatagatttcttcta

SEQ ID NO: 244298 - DNA, 202 bp, Gossypium hirsutum
cttccgcggacccttgggggctgaaattgcagttgccattgtttggggggctgcccatggactgctgtccgtatgtgctcctctgcaaactggctgtacttgggcttctggattcactggtacaggaactcctatggagaatggtgaagcttcggctgcaaagatggaaagaaaaatgtatgctggtcaagaaccattcatg

SEQ ID NO: 244299 - DNA, 394 bp, Gossypium hirsutum
cccacgcgtccgaacgaattaaaaaaaaagaaagaggaaaattcgagagaaaaagagtgaaccaccttcaaaaaaaatatttgctttctttgattgcttggtattcgcgttctctctgtgcgcgtcgattacaaggttaaaatctggctttatatccgaaaagagagaggaaaaataaatcaaaatacaacattttctttgtttgtatttgttgctgttttccttgtctgtttgcaggtgtgcgtggcgcgtggaggtgtatggtgtacggaggcgctggaggcttgtacggcgctggaggctgctgcggcgctgagcgaacggggcttgggttttgagtgcttaatgttgttgggcttgttgggcccggtaactttgggccaggtcttaggtt

SEQ ID NO: 244300 - DNA, 405 bp, Gossypium hirsutum
cccacgcgtccggattattccatcctctctacgatttgcttacaatattagggaaataaaattaaaaggaaaaataaataaacacccagttctaaaatttcatctttttttttttatcttggaaaatctctgagtggaggagaaaaagagtgagggaaagatgtttttgatggggttaagcatgcagtcgttgatggatttgatgctcgctgggatttctctgatgattgggttggggatttttgctttcattgcttcaattctttgctctgctgctttcttgcaccatgctaaatatgtcgcttgattttaatatttcaatgcacaggtgccaaaagtggtaaaagaagttgccatttcgttggtcaaacgtttcatgttgcagtaattgcagtactagatggg

SEQ ID NO: 244301 - DNA, 402 bp, Gossypium hirsutum
accaaaagtaatgatacagaaaagaaggttgttcctgtagcatttactattctaaaaagttttcaatgaagaaaatgaagggtaactatattattaactaccatcagtgcaagcttcaaacaaagtgcagctgcgagacttcattttgtaagcaactaaccccatcatttgctcaagaataggcttaccatcagttgagaaaaagccagggtaaggtaaagctgtatcgactaattgacgctgttacagcccattttgcccgggcttaaggcccaactacccaccaaacaacccattaacccaaacccatttctaccagcccaaataaacaaaaaatagagaaagaaagaaaacctaatcggtcctgactactggcggccgttctttgaccaccgacgcacg

SEQ ID NO: 244302 - DNA, 416 bp, Gossypium hirsutum
ccaacccgtccgcagaattcttgctagaccttctacatccatgcaaacttcgggatcattggctgccccaagttccgaatccgtctatgaagagacctcgacatcaacctcattcgcatcttcaaccacgttgtctagcaacactcccgttgcaggcacattagaagataatcatgctcaaaaaccaagctacatgaattccacagagtctattaaagcttaacagaagaagacattcaagttttctcctgataatgtgcggaggagacatgtggttgatgatgatttacaatattttcataagaaactgatgacactttcttgcgaggacgacacaaagagcagtgctgattcttataatccatcattatatttctccagaaaggtgtacggaccgagacaaatgggtgggaggc

SEQ ID NO: 244303 - DNA, 394 bp, Gossypium hirsutum
gtttggaaaccccacagccctttacctccactaagcttgagaataccgccctctgtcactcctagaggaagtgctcttaagaaaggtttacctccaggtcctataagggaaatgcctcttatgacaaagaaggtaaagaaagctaaatctgtgaaaaaggttcggaaagtagtaaagggcatgcatcctctagtcaaacgcaccaagaagttgaaatcaaagtccccctagcagactatgctttatcatgggaaaaaaaggttttgcatgcatagtcattaaaattcttctaaatttggttgttttttctcttgtttttgactggttagactttccatcacacaagttctttgactttatagacttttggtctttgaatactcgactgtgatga

SEQ ID NO: 244304 - DNA, 243 bp, Gossypium hirsutum
cccacgcgtccgcccacgcgtccgaaaccttgcatcagtcctcaagaatgttctatcaggggcttttttaacctgatttttcattctgcataacaaagctgctcatcatttaaaatataaattctattctttctacaaccttccagcactccctttttttaacattatcatccatcattttaattgaacttcttttatctacttaagcttttattttatttcatatcattaacattaactcct

SEQ ID NO: 244305 - DNA, 146 bp, Gossypium hirsutum
aagccaattccaaaagggtgggagaatcttggaaagggccttcccaaaaccttttttttgagaagttattaaaccaaggttggtttttttaaggccttttttaataggacctactggacctccataccatgatggccttttggttt

SEQ ID NO: 244306 - DNA, 330 bp, Gossypium hirsutum
cccacgcgtccgcccacgcgtccggttctctaacggagtttccatttaggatgtaatgtaagttgttgagagatgttctaaagctcgtgctggcttgcaagagcgtcatatcaggcatgtatctgtgactcagttatctttgggagctttcatctcgtgtcccatcacagccaggtatcttaggagaaagctttaaaccccatagctatttagataatttaatcagatgattgtctcgtgacaataggaggaatttgtagaatactctgttgaggtttttccaaaaagttttgaatgacttatggtcaggagctaaaagttcttcccttg

SEQ ID NO: 244307 - DNA, 343 bp, Gossypium hirsutum
ccaacgcgtccggtatgaggagggagattgttttatcaacgtcacgcatcataatagtggatgagctgactcttgtgggaccatcaataccattgctctagatactggatgaaatgaacaaacagaactctggcactgaaaaacaccttcaagagctaagaactgcatatgcaactctagaccctgagggatttgttgaactttatggcgacaaatatatagagaatgtgagaatgtgtaaactcccaaaaagacccaaacttcaaacacgaacgaaataccacacacaatgctaaccactggtaatgctgcctcgtgacttccgagataccctatgcaaaag

SEQ ID NO: 244308 - DNA, 406 bp, Gossypium hirsutum
gttccaaccgccaccacccccttcaaatacagcttccttcgaccctgcatggacattaccctttggacctcaacatgatcaagatgatgatcaacatcatcaagtccaagttttcaacaatgaagcagctcaaaactttgtaagtgacaagcttatgaatccacctttcgacaatccgttaatgggtcctccaacagtgccgaaactctgtgaaatccttgaagggaacatggtgtgcaacattccacaaacatcatcggtttcattagaaaacaatatcgacccactagtctccaggctatcctcatgtttccccccaatacctgctggttcaaactatgcacatgacatgcaagtgggggcaagccaaatggagtacattgataacatcatcacatcaataccc

SEQ ID NO: 244309 - DNA, 198 bp, Gossypium hirsutum
tccatgcatcagtcacttaggtcctatcgtcaatctcctatgagcttcagccgaagctcggtagaccttaggaacgcatcttctcaaagatctcgtgctttcatctggtttcgccggcatcattgaattacccttctatatcgcctcttaatgcaagatacatcttcccatattttccaagcccaagcaacgcattac

SEQ ID NO: 244310 - DNA, 397 bp, Gossypium hirsutum
cggacgcgtgggagctgatcaaagattcaggatattcgcgaaaatatggtcgattgtttcaactctttctccacatcgaaggcagcttgtactactgacaagctttcggtgctgcatattaaccctcgtcggcaaatagttccatgaaattctctatactgtaaccttgattttatttggtagatttaggagccagagttttttttgtaaaaattcctgtagtcagtttgtaaagcgtaagctctaggaatttcatcaaaagtttgtaatagtttataggtactgcggaccggaaactagcctctccaagtaaggaaatcatgatgaggttatgcgtgctaaaaggtatcccggatattttccagcatctttcctctggaaaaggttatggtttatt

SEQ ID NO: 244311 - DNA, 145 bp, Gossypium hirsutum
ggtggagctcggccgtaactggctattgtaaatggacttagagacagagggctctccttctgtgagaatgtacctggtgcattatcaaaggatggaatggtcctggcttttgggaaacaatactttgtctccatggaggagatcg

SEQ ID NO: 244312 - DNA, 126 bp, Gossypium hirsutum
gtttgttctaggcctccattgcctattttttttggacgtagagacagtcaccagtggtggggtaattttaaacctggtgcatcattaaaggataggattgacctcgtatttttcacacataacttt

SEQ ID NO: 244313 - DNA, 156 bp, Gossypium hirsutum
gagtgatgtgaaaattttactgcgaaattttattttcggtttcgatttttttctccaaattgtattttaaggggtggatgcccgatcaaaggtgaaaaaaagagctttaggaaaggaaagcggcggtcccaaaaagaagaccggttttttttttgg

SEQ ID NO: 244314 - DNA, 299 bp, Gossypium hirsutum
gtttgttgcaggtgtgcatggcgtggaggagttatttgctgagcatggcacgagtggaagaatcggctaaaggctgtggtggcttgagtttctagggtttcttcccaaaattccctaagtattttgggcttggggtattttggggtatttagggctttttgggttaagtttaataatttgagcctgttaattttggttgctgggctatgtaagaaatggacattggattattattggtggtttattttatttttggttttagttttggtgtaagcccgggcacaaattgggtcttacac

SEQ ID NO: 244315 - DNA, 405 bp, Gossypium hirsutum
  unsure (1)..(405): unsure at all n locations
gcgtactaccccattcttcttaagggctattcaatgaggaagacttaatcttgttatggagggcacaaggctttctagtaagaagcacaagataaacaaggcattgaagaagtaggtcacaagtactttagagatttagtgtcaaggtcccttttgcaaataatgatttggctcaatcagttgctggataactatgcttcaagatcgagggtaatcaacaaatttcaaagcacgctggctactgatcttattttgctaattgttatgatggcatcacaaggtttgtgggctcttttaaagggcaacgtttaaggagcttttgccattgacactatgaaatgatcataagatgtgctttgttgacacatttgatatggttaangatgttttcttttagagggtatc

SEQ ID NO: 244316 - DNA, 140 bp, Gossypium hirsutum
atttgttcaaaaatgttctattaagatttgctgattaacaaatgttccactgtagttaggacaattttttttaaaataacttagttcaattccactccttcttctactggcaaaagttttcaactttattctgaacaata

SEQ ID NO: 244317 - DNA, 261 bp, Gossypium hirsutum
  unsure (1)..(261): unsure at all n locations
atttgttcaaaaatgtgcaataaagaagtgcttagaacaaatgttccactgtagttaggacaatttgtagagttgaacttagttcaggtccactctttcttctactggcaaaagttttcagttgtagtctgaagaatataaattttgtttaattttggtttatctccgtagttgcaatttaagttataggctttgatggcctttgaattttgcttccnaaaaaaaaaaaaaataatagaaataagatagaaaaaataaacc

SEQ ID NO: 244318 - DNA, 421 bp, Gossypium hirsutum
cggacgcgtggggttaaaaatttctccttttctttagcttgaagtgcttttggctgataattgatctttttaacctggttaaacgttctttcctctgctattggttttttggagctgtatacccttttttttcacattttcgctttcaaagctctttcctgttctttgctcctctttcgcaggcacagttactttggagttgatgcctggaaagcttacatatctcacaaggaaagtagcacaagtatgtttaaatggaatctggactatataggaggctctcctatccctcacagtccttgaagaagttttgatgcaatcgatcgtaatgtgtctgttaatcgtcagttaaggagcttcttctaatatcaaaattcagatgtgatgtgaagatggttacaacataaaaaataaatgctaa

SEQ ID NO: 244319 - DNA, 208 bp, Gossypium hirsutum
atgaaatacaattcttctttcttcgtctttgctgcttttgtctgctctcctttgcagttgcgagtacggggctgttcgttggcccttggcgtgaggtgtacggggtggtgctggcgtgtgtacgggagcgtgcgttgcggggctgtgttctgtcatttggtggcacatgggaaagaaccgtatggttattgtaacgcctcatggttgg

SEQ ID NO: 244320 - DNA, 383 bp, Gossypium hirsutum
cgtccgcaggacatgaatttccaagaatgatggttttttttagctaaactaactcaagcttatttgggggcggtttaaaccggaactgacgtgcctatatctgctactggtttttcagagctcaataccctcttgtttcacattttaccttacaaagctctttcctgttctttgctcctctttcgcacgcacagttactttggagttgatgcctggaaagcttacatatctcacaaggaaagtagcacaagtatgtttaaatggaatctggactatataggaggctcttctatccctcacagtccttgaagaagttttgatgcaatcgatcgtaatgtgtctgttaatcgtcagttaaggagcttcttctaatatcaaaattc

SEQ ID NO: 244321 - DNA, 111 bp, Gossypium hirsutum
ccttccccggaaaataaccgccggcttaatccccggggggttcggccctcccgttgggaacccacccgcggggccattgggccaattccaacttaccgaccccttccccta

SEQ ID NO: 244322 - DNA, 219 bp, Gossypium hirsutum
cttccggggttggaaccattgcccttccgttaactaagggtttggaaacggttaggcaaactggattgcgtcgttacagctacgccgaggatcgtgatttatatgttgccggcgatctctatgagaacgatgttgttacccctgccatgattgttgttcctcgtaaaaagaaaaaagtaggagagtcgcatgttaaaaaaggcaaaaagcaaaagtggg

SEQ ID NO: 244323 - DNA, 428 bp, Gossypium hirsutum
taccgtccggattcccggcagacgataaacaaagttagtgcattagcatgaggatggcatcttacttagagcttgagcacgggggggcacactgggtggcttggttacagctacgccgaggatcgtgatttatatgttgccggcgatctctatgagaacgatgttgttacccctgccatgattgttgttcctcgtaaaaagaaaaaagtaggagagtcgcatgttaaagaaggcaaaaagcaaaggtgggaggcgagcgaggagaaagcagcagcagcaacaagccccattgttatggccaagccaactccaaaacccgttgatgaagacctttacaaaatctcccctgacctcctttacccaaaacccaaaaagaaaaaagggttggggttactttcaagctgcttggttccaagttggttatcgtg

SEQ ID NO: 244324 - DNA, 378 bp, Gossypium hirsutum
cccactcgtacaatcacaatgcgacttattattattccgaaacgggatcgaacactggggggcttttttacagctactccctagatcgaaatttatatgttgccggcgatctctatgagaacgatgttgttacccctgccatgattgttgttcctcgtaaaaagaaaaaagtttgagagtcgcatgttaaagaaggcaaaaagcaaatgtgggaggctagcgaagagaaagcatcaacagcaacaagccccattgttatggccaaaccaacttcaaaacccgttgatgaagacctttacaaaatcttccctgaccttctttacccaaaacccaaaaagaaaaaagggttggggttactttcaagctgcttggttccaa

SEQ ID NO: 244325 - DNA, 391 bp, Gossypium hirsutum
cccacgcgtccgcccacgcgtccgtgatcgtttagttcctgagaaggtttctactctcaagtaatataagatgaatattgttgcttgtggatagcggcataccatatcaagctctgttactggttgaatatactactatggctttatctagttttttctactataattattgttactgtattttcccttctcttctcattttatcttattttttaatgtattattttttttcttttttttttatttctatttatattatttaaaattttttttttttattttctttcaaatttgaattttttcattatcttccttattttataatattttgtctcttatattatcatcttttaatttatttataacacatctgttttattattttcctctt

SEQ ID NO: 244326 - DNA, 249 bp, Gossypium hirsutum
cccacccgtccggtgaagacggggtagaaatacggaccatttatgtagcttatccaaatcgagagtacaaagaaatggctctcctcacctttaatccacttacctgtctctcttcttctccggtacgttcttgctcaacgtcgttgcccatcgttgttttaccaatattcaggttgcgggtgaatagaatcgatgaccattgttcaaaatgttcaattggcacacagtttgtcctcagcaagaaaagat

SEQ ID NO: 244327 - DNA, 376 bp, Gossypium hirsutum
agtaagtctccaaatcctttaccattatatttcctaatccacttcctgatcactactggtggtatcttttataaaagaaaatcctcccaaaataaacattcttgcttctttcaagctacagtccccctatcattctattaacccaatcaattacttcaaaagtcattaatcttaacatttcaaacaacaaatctattattactgaagattacttattgaatggtactttgtcaactgctttttaaaaaatataattatttgccacaaataaaaaacctattacctttcttaaaatttttaaaattttgatgtattaaaatcatccaattcttttttcctcctcctttaatacctcttctttcaaatacaaaaattt

SEQ ID NO: 244328 - DNA, 320 bp, Gossypium hirsutum
ttttatttctatttagaactctttccccctcacgtgttttaaaaaaagatgtactatttgagcttggatattcgtttcttgaaaagtgttggggaacaggtagaatttcttctcagaggacacaattgctgttttcaggtttccaagtgttacgcaaacaatgacctttttttttcttttttgaactttttcttaaattgacagatgttttatggtgactatttcttatatgaatcagaatgtttttaatttaattttatgcgagacaaaacttttccacggtgttggtacattttcttgggttcttgtgaatttttaaa

SEQ ID NO: 244329 - DNA, 225 bp, Gossypium hirsutum
  unsure (1)..(225): unsure at all n locations
ccttaagttagctattccattgccctactttattcaacatcattcaaagcttgtttgctagantatttttataaaataaattttatacccataacccactctaagttcttcctaacagctatttctacagcactaatgctcttaaataaattgcttatataaacaatggtaaaattacatttcccagaaccttttctgtcttcaattattctttaccaagttaaa

SEQ ID NO: 244330 - DNA, 119 bp, Gossypium hirsutum
aggtcaaaatttcttgaccacacggaattccaatgccatgggggggtttttgtcggaggaaagaacatagaactgaagccagggtttttaatggggcatgataaatatgttggggctgt

SEQ ID NO: 244331 - DNA, 256 bp, Gossypium hirsutum
cttcggccaacttcattaaagtggggggggtcctaaaactaaatatttggaaagcaagccgatagggggagatccaaagaagccaattctgtaactctcttgagactattatattcaaaacaaggggattgaaagccttcctcaggcttatcagagttttgaggctgagttatcaaaattgccttgagaacttgtagaatggaaatgtaagggaaagaggttgtgtgttggactaccaaaggggagaaatgggggt

SEQ ID NO: 244332 - DNA, 254 bp, Gossypium hirsutum
cgacccacgcgtccgcccaactgcatgaatttcttgaggatcttatgactacatacgtgaaacccaagctgaggggggacgttcaaaagaagcaaatacttaaaccctctgccaactattatattcaaaaccagtaaatagaaagcatgcctgctgtctaatcataatattcgaggcttcatctatctacaaatgcacacaaataccacacataattttttcttctaaaaaaactagactgtttgttttttttt

SEQ ID NO: 244333 - DNA, 162 bp, Gossypium hirsutum
cccacgcgtccgttagatatgacacttttctattaaagcaaaaacccaaaatcagggggggtgaatgttctaccaatttttgctcctgccctatccaaaaatatgtttgccaaaattcggtaactctgacagctccctcccatattaccttttacttcaata

SEQ ID NO: 244334 - DNA, 152 bp, Gossypium hirsutum
cgccttcccggtcagggcaaaagtttgggttaaacactttgtcaccataactttttagcgttaaccgagagcgctcgtttcgcgagagaatcagaggagaaccccgaatttctggcgagaatggaccggttttttaatgcggctttcgaatt

SEQ ID NO: 244335 - DNA, 345 bp, Gossypium hirsutum
cccacgcgtccgcccacgcgttcgagcatttttatcttactcctcttagcaggagccgcaggactcaccgtctggctcatatacacgccccacaaaccccgtttcatccctgtgtaaacaaaacagaaaacaccccacccctacgcccatgttaccagacatacggtatgccagtttatgacagctggggcggctgctgccggtatagctactgttacacgagccgcggtgaatgttttagcgacgagaacccaaatgtgggcttaatcatgtaaggtaacgcgagcgcatcgtcaaattcacgaactcatgacatcactagcaataatgtctttacatggttct

SEQ ID NO: 244336 - DNA, 258 bp, Gossypium hirsutum
ccaacacgtccacccactcattcaaccatttttattctacaactcttaacaggaaccggagggggcaccttttgactcataaaccgaccacacacacccatttttatccataattaaacaaaacataaaacaccccacccatactcatcatgataccaaaaatacggcatccaattcaaaaactgaactatcagctccatccattctagctactattacacatatcctcgaagaatgttttaacgactagaacccaaa

SEQ ID NO: 244337 - DNA, 261 bp, Gossypium hirsutum
cccacgcgtccgcaagagatgacactccttctttaatgttaaaacccaaaatcagatcagtgaatgtcccacttctttctgtgtttgccctatcccatgatatgtttcccagaattcggttatcctgccagctacccttccttttttcttcaccttcttctcatagccatatgctattcattgatgcagctcttcttgattgtgcccttaatgataagtcccaggctgtttcagcgatttccacccctaatgtcatttttg

SEQ ID NO: 244338 - DNA, 182 bp, Gossypium hirsutum
cccactcttccgtttgataagacactcttctattaatgctaaaacccctaatcatagggcgatatgttatacaaattaatgtctttgacccatcccataatatgtttcccaaacttctataattcctccaactcccccttcttttatcttccacttcttgacataaacacctgctattcatt

SEQ ID NO: 244339 - DNA, 225 bp, Gossypium hirsutum
  unsure (1)..(225): unsure at all n locations
gacatatcctagctgttgttgataacaaaaccaagaatacttctaaggatcctaaaactccattgactgaacacaagaagcaaagatatcaatttttaaagtctgatggaaaaggatgattcgaaatgcgggcagactgcagtggtggagaggaaaaccgtattagtcccgaaaagtgagaccatagttcatgccaattgttacgnaatgttaaaaacattttga

SEQ ID NO: 244340 - DNA, 226 bp, Gossypium hirsutum
tttaatgctatatatggttcacccgattgtggcatttaacactatggaagggaatatatgagaccaagctccatacctataccaaacagaaaccactgttttataaacatggacacaaaaaaaagcctgaaaaatatctttaatcaaatcttgtggaggacaatgatcaccttctcattcttaaatgaaccttcagttctttgaccgtccttaaaacaattaccaa

SEQ ID NO: 244341 - DNA, 381 bp, Gossypium hirsutum
  unsure (1)..(381): unsure at all n locations
cccacgcgtccgcccacgcgtccgttcactaagaaaagattcatggactcagtatatataggcttattgttatgtgcatacttacaagtttttattttcttttgttcaggaatcgctacctaggatattattttgatttatcataaaaaagtatagctgaaggtaacttgtgaagcaagtgatctgtgaattctgcacatttccctcattaatacgtttctgctaaaataaggttatttaaagctaactggagtgcttttatttttcttttggagatcaatatatttagagttaagagatcacaagggattttgtgttaaggcttgagcttttagttacttggtttagggttcattntttggtatctgtgtgacatgtaaa

SEQ ID NO: 244342 - DNA, 200 bp, Gossypium hirsutum
tgcgttcggtacataatcccaaaaacttttccagcatgtgggtataattttattttcggacgatctaggctccatagtattttgtacaaagatttctacccaggatgttatttttatatactacgaaccatactttgtaatagtttataggctcttcaaactgatgataagcctctataaacccctaattaaaacggttt

SEQ ID NO: 244343 - DNA, 187 bp, Gossypium hirsutum
gtttattttgatttttatgttagaatttcaagggtaaaggtatgttaaacaacttttggtaagcgggtttaagccaaaatgagtaaaatggcttaatccggaaaaaatattattggtcataactatgtgttagagggagaatttgatggtgtcattaaaggggaaagttatccgcctgtcctaaaac

SEQ ID NO: 244344 - DNA, 290 bp, Gossypium hirsutum
cggacgcgtgggttccaattaaaaaaaaattatatataaaaaaaaaaaaaaaaaataaaaaaagagagggtttaaacaaaaaaaaaataaaaaaaaattaaaaggtaaaaaatggttatttgtaataaatatggggctgcccttcgcatttagaattattcccccccttccaataaatttttgctttgataggaaatcttaccaccccctgtgatttgtaaaaaaacaaaatgtccgttttggattaaatagccaatgtaaaaagcaccacccatcggaaaaaataaaaa

SEQ ID NO: 244345 - DNA, 312 bp, Gossypium hirsutum
  unsure (1)..(312): unsure at all n locations
gaaaatcctttgcatagaagagaagagaagaggtggagaaagatggtgatggtgatggtgatggcacctttttctaattattttctagctttcctttcttgttacggttttgtaaagatgagttaagatgtaatatataagtgctggtgagcaggtgaaacctcatccagtcaatgttgtatttgaacttatttggttctttcaatgaagaaaatcgtgctatatgccatgttttttttgncnggntaccagagcggatcgcctccggtttcgccggccggatcgacccctccggtatctcctttttccgga

SEQ ID NO: 244346 - DNA, 284 bp, Gossypium hirsutum
actagttctagatcgcgagggccgccctttttttttttttttggtacaaacaacacttgatcatctctaaagatatacagcattgcacacattccccttggtatgggttagatcttgcgaatttgtcagattgggtttcattacactagctaaaatgactactgtccagtcacgggggctgacaaaagaaaaggatagctgagctgtaaagatccacctgaatatacctcaaaagaaagcagctttcatggggcggactttgctattatcaagcataaaaaggg

SEQ ID NO: 244347 - DNA, 422 bp, Gossypium hirsutum
cccacgcgtccgctattaccacttgtataaccctttataccctttggtaaaacctcgtgcaaattgtacaaatttacataaattccaggacgaaaaccgaacggaggaagaaagagaatggatgggggagaagtatttgcttcacttctttgagtatgaaactgagaaggaaaaaaagaagtatacaatatggggtttaactgctggggttctgataagagctgcttcattagtttaccagcaacctcctgcttttttggaacaaaatcccaagttcaagttccctaaaatcgttgacagaaataccgtcatgcggtaaatgaaagtatgcgtagtcggttgaatcataagtgaagtgacaaaagatgtatgttcgagtttttagttgatattagtctcgagatcgatttctagacaatctt

SEQ ID NO: 244348 - DNA, 320 bp, Gossypium hirsutum
gttttctccatgacactggaaggcagaagtttctcgattcatcaaactttcaggttttattgaagcccattgtttctcagcttgtcattgagcctccaacttccgttgaagagcaaaccgatgtaccgtctctgaaggaagtagatgacttgctggttgtttgcataggtcagatggctgttactgctggaactgacctgctgtggaagcccctgaaccacgaggtattgatgcaaacacggagtgagaagatgcgtgctcgagtgttggggttgagaatagttagggaatttctggagaaattaaaagaaagatatttg

SEQ ID NO: 244349 - DNA, 425 bp, Gossypium hirsutum
gatggagaagattcatcgattaaaactctgtagtggatgggaattttttaattttcaattatgtcggtggttgtgtgttcgatgtgaagatatatgagtttgatgcttgtgagaagagcataccttatgtggtgtcggaagatgaagaatcagagtcagaatcagaatcagaagatgatgatagtaatagcgatgatgctatgaacgatgaaggagctgactctacggaggttgaggatgaggagatccatccagaagattatgttcaacatttgaatccttattttgtggtgaagaccacaaagtcttcacagaggacgaacgaactgtgtattccaactggtatagccaaagattttggagtgagtttagaagacggggagaaaattacatttgttgacccatacaaccggaaaagcattggg

SEQ ID NO: 244350 - DNA, 304 bp, Gossypium hirsutum
ctttgacgccattaataataataataatagtaatagtaataactcagacatggcattgatattattgcagaatagtagtagagaagaagggaataagttgaacgagttcttgaattcgagttcagattgtgatattggaatatgcttatttgctaagtgaaggggaagaaaatgaagagattacgatgatgatgaagaggcttttattgcttattattatatcgtttgatgcataatgaagacatatttttgtaaaaagaaaaatagttgtgaaatgagtgaagttctctccatttcttgctcg

SEQ ID NO: 244351 - DNA, 403 bp, Gossypium hirsutum
gcttctgtaacttttccaaccatctctacttttccctttttttccattgattgcagaggagacctagatatttaagatctttatgtagtgcacaaatcaccggcgaagtactttttggatgaaatgtatagtggaaattaattgcggaggaccacaacacttggtagtgagaaagaacgagagcgagtgtatgatactatcttccacttgccatggagatgtgaagtgcttatagatgttggattctttgtttgctttgatgcgtttctgtccttgttaactatcatgccaacaaggattctgattaagctttggaggttcctgactgcaagttcaagaggctttctgcagcagagctgtgttattttttgctgctttcttgttctagcatgtggagtcattc

SEQ ID NO: 244352 - DNA, 332 bp, Gossypium hirsutum
cggagatacggccggatgcggtggagaaagtggcgatagtgagtagtggattgtcttatgcagatgaacagagggatcaacagttgagaacaattggatggcatccgtcggagattttggttccgaagaaaccagatgatttgaggttattggtgaatttatcaacgtttaagcaaagtactctcaattgggtccctgattttttgcttcgacagttcataacggtatgtttgatgttccttagagttaaaattatggtctattttgattttagtccctctactatgctaaaatttaaatttaagtcatttcattttaatttgacattattt

SEQ ID NO: 244353 - DNA, 325 bp, Gossypium hirsutum
gctttggctaatattcaggcagctcagaggcgtcctggttcagatccagtttcacaggctaaaccacatgctttaacaggtttgagacctaacagcacagtgcaggcggacatagatgaatacgacgatttgtggggttctatagcaccagctactccacaatttgcttatagaccattgaatgtgaacacagctggagcacatgatgatgatgatccctgggcagatattgctggtgccgctacaacaaccaatgttaaagcttcatcatcatgtagaggctgaggaaatagagcaggtgctgccatattgggtgcacagagga

SEQ ID NO: 244354 - DNA, 239 bp, Gossypium hirsutum
aaaaaaaaaaaaaaaaaaaaaaaaaatttttttaataaaaaaaaaaaaaaaaaaaaaaaagggaaaaggttaaaaatattatggattcaaaaataataatcatgggcttgcgacattataagttattttttagttgaagctaatttcatttcctctgtccaccttatttactccgttttgatggggtgaattctttgggtttcccatttcattcgcctacaagcaaaaacccttttttt

SEQ ID NO: 244355 - DNA, 372 bp, Gossypium hirsutum
gaatcttttggattccataaggtcttgcaaggtcaagaaatttttctaagctctctgtatagaagaggctcaactatggaagagactcgaggaaatgacggtgctggtctccctaatgttgggcaaatgtcgggaactagaagtggatggtcttcctcgatgcagggatataatacacatagtcctgtacaaccatctgcgcaagtttcctcaccatcttctgtgttgatgttccaacaagcaagcaatccagttccgaacttcaatcctactcgtaacttcaaccaggaaatggagcggggagtgagttcttttcgtgtgcctgaaacttatggggccaagttactgtcatcgtcaatcagcgaacatgat

SEQ ID NO: 244356 - DNA, 426 bp, Gossypium hirsutum
  unsure (1)..(426): unsure at all n locations
acggaacccaagcagaatatgaagccaatcgagttgaaaacgtcgccagagcaaatgcagaccataaccaagtcgatgatacttgggaacgagtcaaggaggttggattgagaggccttaccagcaagaggcacatgaagatcgtgctgagatggatgagagagagacaaaagattaggctaatatgcaacgttgtggggcctcacaaacaatttctgtatacaacttggttcagtaaaccaagcattagccacacaagagctgtccataattcctcaacttctacacctagtttttctgtcgatacttctagtccaaagttgtcttcaggttaggttgtagcacgcttgtgctggctgcaataccatcgattgcagaacatgtacttgtttttgcaacagtgtaatataattgtntctgtttcat

SEQ ID NO: 244357 - DNA, 200 bp, Gossypium hirsutum
  unsure (1)..(200): unsure at all n locations
taaagcatttgatgatgatgacactgggtggtgctgatgatgtcgatatgccatctttggaggaagagggcaatgaagaaagcaagatggaagaggtcgactgaacagctaataaatacgtaaacactataaaaatctngtcattagtacatatacctacaaagctcgtcgctgagtgtcgggttctggtgggtgtctag

SEQ ID NO: 244358 - DNA, 364 bp, Gossypium hirsutum
cccacgcgtccgcggacgcgtggggccggctatgactccggttaagtccacaccaagctttgctgtttctacacgaggatataccatgtctttgtttggtttgcttggagctgtggcactctttgtttaggtcacatcaatgttctctataaattttaaatctttagattacgctatttattttgtgtattaattttttttagtgtccaattttctctctctagtggttcattattagttttttttagatttaaattggattttcagctctttggtagcattttgacttgcatgattgaataaagagagagtttatgattcttgtttttgttcgtactctaataattagtgttaattatttctt

SEQ ID NO: 244359 - DNA, 327 bp, Gossypium hirsutum
cccacgcgtccgctttgatcttcctgccttgattttctcatctgatctgagttttaacaagatgattgatttcactattgggaatttgagatcaagaaatagaaaggatctgttacgatctgtcacaattaggggcggtttagggttctacgtccatcttttagaaacaattgaagcatacaagggttttcagatcacattggttgaggacttttaatcgtctctctaagaaatggttctggacggaattgtatcatctccccttcgaaggtcagcatcaacgaggaggcaatcctcgagagatgaattcggtagctggtcgacact

SEQ ID NO: 244360 - DNA, 216 bp, Gossypium hirsutum
gtggtcctttccccccgtttccttgatgcaggatttcagctttgtgaaaaggcataactggatgatttatttcactattgcgaatttgcgatcaagatatctaatggttctgttacgatctgtcacatttaggggcagctgagggttctacgtacatcttttaaaatcaatttaaacatacatgggttttcagatcacactttttagaagactttt

SEQ ID NO: 244361 - DNA, 204 bp, Gossypium hirsutum
gtcagacgttcggttctagaatacgcaagggccgaccttttttttatttaaactgcttccgagggccgtcatgaaatttgcgaaattcatagatagtcccaccgacagaaaatatctgaagtgtgtgtaacaagtctctttacttccaaaccctaaaattctatagcgccaggaaataacgccgcttgattattttcattcaac

SEQ ID NO: 244362 - DNA, 425 bp, Gossypium hirsutum
atattttcttgttttagtgaagatacaaacaaggtgggaagaatacaagtcattgcttttcagtcatcagatgggaaacagaatcatgttacaggaccaattgctttatcaccactgaatagaagctcagttatcgatcttgagtcatctctaagctcttctgaaaatccattgttgacatctggatctgcagaagtagatagtcacatgcaagacactagtgattccagaccggctcaaggatctgccaaggtgcaatttatgattattgaagttaaaatttgtcatatggcttgttaacgtatcagggctcttaaacgagcgaaagtgaggagataagtaatgctttagatgatggaatggaacatttttgtatattatgctgcacaaattttaagttccataaacaaagtgcttttttagat

SEQ ID NO: 244363 - DNA, 345 bp, Gossypium hirsutum
  unsure (1)..(345): unsure at all n locations
cggacgcgtgggcttgaactcagtttttggtaccagttattttgtaaaatagttgggagtcgtggcattgttataaagaacaagcaatgttcattgtaatgttgttagcgaggcccattgccaagttgggatatggtaaagatgatcatgtgtgtctgtcttcattgtacgtcaatgctgtacatatgcatcttgaacttgaactatataagtgtgtttcgccagtctgtctgcaaattgaacctgcaatttgttctgaacattccaaattacccaatcattagggaaagaattgaaaagcttatggcttacattgtttctcnnnccgnnagggaaagagaaaac

SEQ ID NO: 244364 - DNA, 346 bp, Gossypium hirsutum
ggtgacctctctaaggcaggctttgaaaatagcagtttggaggaaagacagagagctgaaaagaaaaacagggaggaaaagggacataaattcacgcctaaatggtttggctttcgccaacgaagttgctgctacaccttggggtgacttggaagtttatcaatacaacggcaggtttcccaacaacggacttgcataaattgctttagtagcaatgaagaaaatgacatttagtccacttaattccacccatggcaggatgaaaaattggctgctaacttaaagcacatttttgcgcttgcttttgaacactctgatatattctttttctatgcctcttacactt

SEQ ID NO: 244365 - DNA, 472 bp, Gossypium hirsutum
  unsure (1)..(472): unsure at all n locations
cgnntccgcagaatggggagggangtcttgaacannagtgaggataccaagaaaattcaatgccgnngttctcnnacaccagttgcgactttgggnngtgaggnnattcaacnntgtggacccannagaagctatacnaattnnngtccagagnccannggtaatnncaatcccanttacatannaatcaagnnttttcggggcccaatcacangnnattttgtacatnnnttgatgtcnnacaaaccnnntagcagcttcttaaaatctaaatgcttgtctaattaccattgcnntacatttactgcctgtannaagtggtatnnngtatggtatggtattggtatgggtaatggtattgcaaagtannactaacttcttcttacttcaagaagtaacaaataaggccttctttcaacttgtaaatttaactttaagggttttttccctttttttttttataaacacaaaa

SEQ ID NO: 244366 - DNA, 299 bp, Gossypium hirsutum
cccacgcgtccgcccacgcgtccgggttgttgttgtgcagttgtaaatttctacaatcttgtacaagttggtcttgttttagacaagggtgttactctttttacaagtgatactacaaccatcttgcatctcttaaatcttgtataaaaacaaaacttctgtcccaaaacaatacacaattaaggctctctctcttttttctttttctttttaatctgtttgaaatttacctaaaggttgattcaactatgaagaggtcacttggcagctcagatttttgggtgctttgatgtctatct

SEQ ID NO: 244367 - DNA, 226 bp, Gossypium hirsutum
ggctctaacaccttgcagatttccctacgatgaatgtaccagaacactagacgagtattagatatggatgtgacatcttgaattatttgttataaatataactaaatattgatgttgtatgtggctctgataccttgtagatctacctacgatgtatgtcttggaacactagacggagtattatatatatgtaaatggaagtcatggtgtttgacacaaatgtcca

SEQ ID NO: 244368 - DNA, 366 bp, Gossypium hirsutum
  unsure (1)..(366): unsure at all n locations
agcttatgcaagtgatgatgacgaaaatggtatgggagattttttgaacgaaatggcagtgatgatgagccagactaaatctaataagaatggagaggagagctttgaggaattacaggaattgtttgaagaaatgttccaagtggacattgattcgttcgggtctaatggtcagccaaccacgtcctgttcttcttcatcttcgtttgcatcgtacggtgaaagttctggctccaacaaacggaattccgctgatatgagctctggtgagactatgccggagagtggttctagtttcaatgtacaatttcacggcttctgcgtgggagtggaacacangacagatatgaggcaacagagaggagc

SEQ ID NO: 244369 - DNA, 244 bp, Gossypium hirsutum
ctccgatatcagaattatctgtgataatcctattgacaattgaatcgtatgttttagcattgcaaaaatttaggcttttttgttttgttggtaaaagtaaatttggtttggttgattagtgtaatagcatgagacaaaacttatttagtaaactagcactaatagtttgtaataacatattgaaatggttcattgtttggtaggtaaaaatattgagtaaatagaactgaagtattaatttatg

SEQ ID NO: 244370 - DNA, 397 bp, Gossypium hirsutum
atttaagtctgtgaaggaaaaggagttcaacgaattgaaggatggtgaggtgaaaacattgaagtccgtggaggagctaaagtttgccaaagatgtggaggaaatgaaatcaaaactgaccgaccttgaatctaagctaggcgaggctgaagctactatatcaaaactgaccgaggagaggaggttaagcactcaagagcgaaagaccttagaagaagagctggcgttattgaggaaaaaggcaaatataaaaggagctaaagtgggataccctctgttatttgtttggatggtagcactcatctgtgtctacatcggatacttgttggcaccattgacaaagagcaaggcatccatgtcagatctttaccagcaaatgcaataatcaaatacgaga

SEQ ID NO: 244371 - DNA, 244 bp, Gossypium hirsutum
gtttaacccttccaaagaccagaaatctgttaagtttcagttgcctgaggatgatttagatggaagtgatgatgattttgatgatgagttcgatgatgaatttgatgatgagttcgatgatgagtttgatgatgattttgatgatgaggaatttggtcatggacatggccatgggaaagggaatcatcaaatgcaaaacaagatggtagctatggggggaaaagggccaaatggcatgattaat

SEQ ID NO: 244372 - DNA, 250 bp, Gossypium hirsutum
  unsure (1)..(250): unsure at all n locations
cccacgcgtccgcttgaattcccgcactgccatgccatatggatgtcctgaaactgagtataactaggtggtttcatttttagtagggacttgtttattaagtggtttgcattaatgtgaaatgtatatgttttgtaagtttacattgttacgtatctttatatgtagtttgagttgttgatgctaatgcatccaataacttgttttcatctctcctacacgangncaccatagccgccgacgtctcggg

SEQ ID NO: 244373 - DNA, 329 bp, Gossypium hirsutum
atcagaataagcccgtgctttctgaaccttctcagatggaattatcacctcctgcttctttgaatcctgctatagtttctactagtgacctagataatttggactcgcaggaaccatccgagggaccatctaagcaaaccacaccgcgttgccctgtatctgagctagaatctcaagcaaactgtaaggaggcagatcaacctagcccagtctcagttatagaagctccttttacggatgatttatcatctggttctgaatgcttcgagagtattagtgctgatctccatgagcttcggatgcaacttcgacaattaaagctagaatct

SEQ ID NO: 244374 - DNA, 348 bp, Gossypium hirsutum
  unsure (1)..(348): unsure at all n locations
gaaaatcatttggtttttgaagagcccttaatagagcaaattggtgggctttattaaatctggtgggaacttattcttaaaggggcccaccagtacttccttcttaaaaatgtgggatttttatggatcacacgcttggtgtgtacccacccccaagaaaaagggcgcgaggggaagactccacagggtatctatcacaaaaaaaattttgtgagtgaaaaaaagcgcgtgacgagaatatttttctcacccgatatttgatgttctccaaaaaaaaaaaaaaaaaaaaaaaaaaaaaaaaaaaaaaaaaaaaaaaaaaaaaaaaaaaaanggggggggccgcctttt

SEQ ID NO: 244375 - DNA, 387 bp, Gossypium hirsutum
cccacgcgtccgcttttttttttttcttttttttcttttttttctttttctttttcttttggtctttctttttttttttttttttctttttttctttttccaagggaaacatggaattttttttcataaaaaaccctcccctaaaaaaaaccctagataaaatcgtttgggtttatttatgaggccttaacagggcccaacatcccaatctttcacataaaacccaaaacccccattttcataggagagcttaaaacccccccccaaaacccaagacaggggtgcagaggggacccccctaaaaatttgaaaacacccaaagcccttccttttccaacctttttcccaaaaaaaaaaaccctttccggaccgggggaaacccctctt

SEQ ID NO: 244376 - DNA, 400 bp, Gossypium hirsutum
aaaaaaaagaaccttcctccctccctttttttctctctgcagaagccttaggccgatcagagctccagcgaaccgctgccgcgaccaccgccctcgaccgctgtgcacagttgttggagctcggaaagaagccccctttttagtcaatcggagaataggtaataaatccctctctttttttgtgtgtgtttttgatatatataggtatatatatagtagtttcgaaaaaagaaaataaaaataaaatgaagaggtaccttagcacgtctcaaactttggattctctttcgaaattctttttttttttggatctttctctggtttttatttcaaaaaatcccccttttacattgaataacgatggctttttatagtcgattatgttacatttgttgctact

SEQ ID NO: 244377 - DNA, 353 bp, Gossypium hirsutum
cccacgcgtccgctcagctgaaggtcgtggttgaagctctggtggtcagggtggtgatgggggtgaaaccctttacttaaaagcagccgatgacgggaactgaaaggtaacaccagttggtcctacggatctgttttatcattgaaaaacggatggaatgggaggaaattttcttgctcaaggaacttgttccttatgccaaaaaaaaaaaaaaagaagctaggaaatatgctttagaccttaaaccatatgttttatggatttcaagtgtgagacactgcatcttatggtaatctaacatgtaaatttgtaggggctcatggttcaacattccttaattttggggtttaatt

SEQ ID NO: 244378 - DNA, 342 bp, Gossypium hirsutum
gccgcagcaacagcaacaacaacaacgcctgctgctgctgtttgcatcaatttataatattttcgattccttaaaagaaaaccctttttttttattgctgcctttttagccgtgatgggttgtacaggatccaagcgaaccaggggtgacgaaaatgtgaagaaaatcaggaaaccaaaaccttggaaacattccgaaccgattacgaggacacaacttaagcagatgcgtgatgaattttgggatacagctcctcactacggtggccagagagagatgtgggatgctcttcgagttgcggcagaatctgagctaacccacgctcaagcaattatcaatagt

SEQ ID NO: 244379 - DNA, 393 bp, Gossypium hirsutum
gcaaaatagaggatcaagattcgagtttggatccaatggaaaaagcagcagattcatctcagacgcagactactggaaatgatgtgatgatggaagaaacagggaaagaagacggcgccaggactcaatccgaggctatatctagtgaaaatgaaagggaaagtgcagagaaatctgaagcaggggtcattgttttggatgattaaattaaaatgtgatataatagatgatttattgagaggctataatattccttacccaaaacttgattttcttttaataggtaccttctacacaaattctttcgtgctttaagcaaggttaaaggctaatggtggataaagaataatttggctatattttggttaaaatttttaaatggtcatttaccat

SEQ ID NO: 244380 - DNA, 309 bp, Gossypium hirsutum
tggagaagcagtgtggaagaagcagtgtggtacgtgggcggttaatgaatataacccgcctttggattgatttactttcaccgtgaggtaagttcagtgtcattatgtagtaaagttgttgaaatttgaaggggcaatgaaaagaatcaagtcggatgctgtaattattacaaacgcgtgcatgcatgacacgtggacgtattagatttcagcattgtggtttttgattttacgtgaagggattcgacagcaaatagctaagttggaatcttttcccgataaaaaccttctacacaaattctttcgtgc

SEQ ID NO: 244381 - DNA, 401 bp, Gossypium hirsutum
caaaactctaggtataattctaagtattcaacatcttttttttaacacaatccatggaagttccagttatcaacagaataagcgattttgaaacggccggcacaacccctctaaactacccacctttcaattccccacatcatttgctttctgggattcagaaaatctatgaaacccatagcttttttaagttgggagctttgattcttgccctaatagcttcgctatctaccattatcaataacctaagaactttattattggatttccgggaccccattctttaccattccaacctttttttttttaatcaaatttcgacccttacacttatttcttgtcggacgacgaaccaaaatatgaagaactggcgtttactttcaagacctggcgacaaggtg

SEQ ID NO: 244382 - DNA, 392 bp, Gossypium hirsutum
gctccatattactgactgcttaaagctgagttgcctattttcaaacaccaagtttcccataacgcttaaatatttgagaattgggggatgtccaatgttggaatacatagccgaggagttcgaggaaagtgcttgtcttgaatctattaaaattacatattctggaattaaatctctaccacgaggactagacaagctcaaccatctccaggagattagtttgggttcgtgttcaaatttggtttcttttgaagaaagtgggttgcccagcaccagcttcagagatatcgaagttattgattgtggaaattttggagcccttcctaagtgcatggccggcataacctcccttcgacgattaagtgtgagcaactgttcggcagacatatcat

SEQ ID NO: 244383 - DNA, 386 bp, Gossypium hirsutum
cccacgcgtccgcccacgcgtccgcccaacctgtgaactttgggcaggtaatccagctagggttgttcgagctctaacccatgaagaaaccttagaaatccctaaactcgcggtagcaatcaatgacctgagcaaagaacatttctcggagttccttccatactcaacagtatatttggaagttgagaagctcaagaagtccctgggaataaatatttgattgccttttgattttcaatgtttaaaagaataagttttttgaagcaacgaaataagcaggctcattaacaagaccaaaaaccctttttatttttgcatatccatttactttattggggtttttggcggaaagagtaacaaccgtaaggttggtgggttcaattcta

SEQ ID NO: 244384 - DNA, 173 bp, Gossypium hirsutum
ctcctccttcctccagctcctttttccttcctcctcttcatcatcccctgcttccgtcgggtcgacccgttctggcagtggcgaccccgttttttttcaatcaatttgccttaattcaaggtaatttaagcgatctacgttaacccggggcgcaaatcaagttcggaatcaaa

SEQ ID NO: 244385 - DNA, 227 bp, Gossypium hirsutum
tttgatcccaaatgaaaccaaaagcagcaagatggataacacagttgtggttgatggggctgatggtgtgggtggagagaaacttgaagttttgaaaagtatgttaaccagtttagttatcgaggttcgtaatactggtaaaggtgggggtctattgaatgatggggttggtgccgattatgtacagaaagagaaggttgttccacgtggattttgttcaatgatgt

SEQ ID NO: 244386 - DNA, 264 bp, Gossypium hirsutum
  unsure (1)..(264): unsure at all n locations
cgagctcaacgttatgtttttgtaatagatattttacgcaaatgaattcaatcttctgagctattcgctnttaaaaaaaacagaaaaaacaaaaacaacaaaaaaccaaaaataaaaaaaacaaaaaactttttattaaaaaaaaaaaaaaaaaacaaaaaaaacaaaaagaaaacacaaaccggggcggccgctttaaagaaccaaactttacttccccttgcatgcaaagttatagcttttttataggctccccaaaaccca

SEQ ID NO: 244387 - DNA, 397 bp, Gossypium hirsutum
tgggaatatttacctggagcgttaccgcaatgagctccgcttgtatcgccggttcttatgcggattccggattccattgaccattcttggaccgacgtatgcggtggcggttgtggattcgccatggccatttctggttgtttttcctgtctctctctttctcgttggctttcctccccttctttccctgattttaaattttatttcttataaaaatattttaaattttcgataatgtaattgcggcttttgggctggttgttagattttgtacattttgatctgtctggttgccaagaaaatgtaaaaggactgggcgttataattagattttttcgttggtttcatttttggtttgccatgaagtcaactcacttgactcaattagctatgtgag

SEQ ID NO: 244388 - DNA, 390 bp, Gossypium hirsutum
gcatgggagaaagagagaggggttgaatttttgtatgatggtattcgtctgctttctatgcttgaagagtacactatcttacgacaagagaaagagcaagagcgtcgtaggttgcgggaccagaagaaacttcagggacagctgatagcagagcaagaagcactgtatgggtcaaaaccaagcccatcgaagccgcagagcgtaaaaaagggtcctaggtattcaactggaggtgcaagcaatagaagagtctccttgggaggagccatggttccagctcataaacctgattctcttcactctgcaaaggctactcccaaaacacgtcctagcaagaaaagtgaccatttaaatcatcgccaggacgatggcattcccgctttctcagct

SEQ ID NO: 244389 - DNA, 328 bp, Gossypium hirsutum
aatgacttcaagaggcaatgatggtagtaactatattgctctgagagcatctgatgtaatggctgtgctctcttagttgtgtaataaggtttggttttagattttgaggttaaaactggattgattggatgagttgccggtaagcacaaagattttgtaatttcttttccttaaatttaaatggatgcagcatttggtaaaaaaaaaaaaaaaaaaaaaaaaaaaaaaaaaaaaaaaaaaaaaaaaaaaaaaaaaaaaaaaaaaaaaaaaaaaaaaaaaaaaaaaaaaaaaaaaaaaaaaaaaaaaaaaaaaaaaaataaaaaattta

SEQ ID NO: 244390 - DNA, 371 bp, Gossypium hirsutum
cccacgcgtccgggcaactcggacgaaaacacttctgggggaccggcatggggaccaacgatggcacctgttcgaccatcagcagctccatacgacgatcccaagtaccatccagatcaatgttattttaaggtgaagcatacatgagccgttctaaggactcattgcaggaggcacgggtcatgcgcaggcgcgatccaagagttaaaatgtcgtggaaaaatggacagtaccgctacttttcggatgcgagctcatccgtcggtgctagcgccaacacagccaccgagtctactgtcggaggatcaaggcctggatgtactcagttgcgtgaggagagagatgtgggtcatggtctgacttaaggttac

SEQ ID NO: 244391 - DNA, 415 bp, Gossypium hirsutum
tctggtactaaacataaccaacacaaaaaataagaatctttagaggagggaaggatcgatgtaagcaagtaagatggattacgcctacggttggttattggattgttaattgtgatggtgccttcaatttattgtcgaaagaagttggaattggggagatcattagagattctatggctgctttagttgctaagaagggaagaagtttcttggctagctctacccttgaagttgaggctcttgctatgcatgaaggtttgttacttgctgacaacaagagacgccaacagagctgtagattaggttgcatctcaattcaggaagaggatgtgcctttccaactgggtggattcatcccatcttctctggttcctattctgagttgagatgaattaccaacaccccattgagtgtg

SEQ ID NO: 244392 - DNA, 133 bp, Gossypium hirsutum
  unsure (1)..(133): unsure at all n locations
gccatgccaaagaaaacttatgctgtcaatttttcatttactgacccacnagtcgatcagcggatcggagaaaatacacacctccccgatttcgtcaacataaaccgactaaatacttctacaaccagatatt

SEQ ID NO: 244393 - DNA, 194 bp, Gossypium hirsutum
gccttgcagcctctccgccagtatgatacaacccctacaatgtctttaggccagggaaaaagctacagacttacacaagaaggatgcaaggagggaaaacaatgtgcagtcgtttgaaaagtttgccaggtcaggcgcaacctatatcaagccagaccttacttgagctttgattagagagaggagaagaagag

SEQ ID NO: 244394 - DNA, 408 bp, Gossypium hirsutum
ttcttgtgaagctgaagcattcacctccacctcacatgattcctcctccacccgctccagcaaaggacactaaagatggaaaggatgctaaagatggaaaagactcgaaaaacgttgacaaggctgcatcgaacggaactgcagagaaaggggcaaccgtttcatctgcaaaagatggcgccgccacctccgctgaacaagatgccgccgccacgaccgctcccgccaaggaccaaactgttgcggaaccagaggcaacagcagcctaattgcttacaacacatttaccatggttgtttccttgccctattcttttttgtttttgctcaaggtttcgatttcaaattgcattccctattaacatggtattttcctgggaagggattagtaccattagttacatacaca

SEQ ID NO: 244395 - DNA, 353 bp, Gossypium hirsutum
gagagaatgaagaagctgtaacggaaccatcatcttctccttcagtctggtaactttctttcctttccatctctgcgtttccctttttttttcctttgattgcagaggaaacctaggtaagctgtaaagggatttctattcccttccctcctcacctttaccctcacaaattctcacctcaaaacggcagccaatccaaaagctatttctgcaaagcaaagtcaaggcttcgattattcactttcatcatacgctacgcgcccttcaagttttcttaatcttcgcatctttcgccagctccactgtctcagatctccggcccaactgtttcgctcactctctcattttgcaat

SEQ ID NO: 244396 - DNA, 238 bp, Gossypium hirsutum
  unsure (1)..(238): unsure at all n locations
aaaattgaaagaccgagactagagatatctttctgttcaagcatgttttggggcagaaggagctgtagtagagagcatcaatgttattcanaaataaatgcttgatttggtttttcttccattgtttgatctttatgttctacaaaaaaaaaaaaaggtattgtgttccatttatatcacaatgggggtttttgggttgttttatgtaattattacaagttgaaatttatttactgct

SEQ ID NO: 244397 - DNA, 257 bp, Gossypium hirsutum
cccacgcgtccgccaacgttctcttccaatataatcttattacctgacattcgactttaggggacagagtgatttatttccgaaccggactctctcatagcaagaaacggaggatccttctatctcacataggagcaagatgaggaacattgcaataaaactgacgggagatatggaagaatcaaacattgctattgctgaatgatcagcggatgtttctgtaaatgcgtataatatattatctgcaggtaatattt

SEQ ID NO: 244398 - DNA, 354 bp, Gossypium hirsutum
gagatttctttgcaatcagacagcaatcttaccttggagtcgaagttagatacagaagtcaccagtcgtgaacaatctatcgagaccaattgtattcaaagtccatccatgaatgcaaccaagtactcagtttcgggcataatgcagaaaaaatcaacatcaagactgggcgaggatggatcagtggcagaacttgctatggttactccggaacaacctagtccagtttccgttcttgacacctcaatatatcgagatgatgcgccatctccagtaaggcagattttgaatgccccagaaggtgatattgcagaagtttcaatgacggtccgcaaagaagagcaatgggacccc

SEQ ID NO: 244399 - DNA, 356 bp, Gossypium hirsutum
cttcggtcaaaagttacccctcgcatgcctgtaatttcagagaaaaaacctgggaaaaaggcgggtgttaaaatgggaaaggccaaggagttttccgtgatagacttcatgactacagttgtcccgagctggaagaggtacaacctgtacgacctgcatatgcagcaggcggttaacgtccacctcgatatccctgttcatctgcttttctgcgtaggtgcctaagacacaaatgccactgtccatacatttggaactgctgcagctgcaaagaatacggctccaacagctgctattattgctgatgttcacaaaaccaaagacgagttgcttgaacaaactgccaacatacaaca

SEQ ID NO: 244400 - DNA, 280 bp, Gossypium hirsutum
ctccaatggttaagcaaatgcaagagaaatttaataagtattgggctttgtaatgaaatgggttgttattattttttatttttttattttggtttctggtttatggacccgggctaaattgggcctctacatgtttaaagcaaaaacttctcgctttcattaaaaaaaaaaaaaaaaaaaaaaaaaaaaaaaaaaaaaaaaaaaaaaaaaaataaaaaaaaaaaaaaaaaaaaaaaaataaaaacaaaaaaaaaagatattaattgatatcaaaaaaata

SEQ ID NO: 244401 - DNA, 426 bp, Gossypium hirsutum
tgcgatgtttgttcccattggtgccatgctgcctgtggcattcagaggaatcttataaaaccaggacccagcataaagggaccatctggggctatgcaattccattgtattggctgtggccatgcttcagaaatgtttgggtttgttaaggatgtatttttatactgtgctaagaactgggttcttgagacattgacaaaggagctagactgcgtgcgaaagattttccggggcagtgatgattcgaaggacaaggaactatacgtcaaagctgatgagctttgcaaccggctgcaaaacaaaatgatgtctgcttcagatgcttgcagcatcattatccagttcttcaactactctgatggtttgtcagactttcctacctccggtgcatgttccaaagagttaacaacaactcaagttgacctt

SEQ ID NO: 244402 - DNA, 273 bp, Gossypium hirsutum
ttttggtttttccatttattatgttcgttataagctccggggagtgggtagcttcgatagcaatcctagacggttataattgaatctactgtttgctgtactccgccaattgggtgcaatatgcactagctactggagtatatgttggccattgggaaggcctgccggttaacccttcataataaatgaaccagcagtaatttacacaatcgagatgactgacgcagcaacggaactaagaaagcagataagctatcatttttagttaatgaa

SEQ ID NO: 244403 - DNA, 253 bp, Gossypium hirsutum
ggcacggccaacctttggattggcgtttaacttggaaacccccttaaatttatttcaaaaagaagaccactggcgggcttttttttaaccataccttcccctttactggtgcggaagaaaaactctgccccaaactcgccatgaattcaacctcactgcgcagggagtctatgtgggcggatcaaaaaggacaccctcttaagtcacccacggttccgtatcctttaacgtgtttgggccacttccttaccgg

SEQ ID NO: 244404 - DNA, 411 bp, Gossypium hirsutum
gcttcgcactcaatcaaggcatctacaagacgttgaaatcgcaaggggctcgagaagagggaagcggtcgaaacaatcgagtcgaagtcagatgaaaggccggctagaagaaccgtcaagcgttcggccttcgagatgtgagatccataggctgcaagtaaaacacacaaactagtgattttattcacataggagcgaaccgagagactacctttccgaagggagcgaagctcatgtcgcaattgcgactgcttcgtgcttgaatcggccgcaaacaaactgttggccatgagccacacatcatgagcagtcctaacatcggtaaaggaggacaagaaagacgggctaatggtggagagaagccaagaagtaagcaagctatcttgctgatcaaaaaccagcacagcggga

SEQ ID NO: 244405 - DNA, 166 bp, Gossypium hirsutum
agaaataccaagcttaagcatttcatgtttatggtgattttccctttgacaacatgtctgccctggcaagaacgacttgcgacggattttcgagaagcttgacaagaatggggatggcttggttagcctggaggagcttaattggttgcttgagagaatcggagtc

SEQ ID NO: 244406 - DNA, 131 bp, Gossypium hirsutum
ctcgaatctgaagattgtggtaacttgtatacaaaggttttaacattgtattaaaaagtacacactattaaatccaaaatagaactcaaattgttcatgtaagtatacagcaaatctaaagtttgaatctt

SEQ ID NO: 244407 - DNA, 397 bp, Gossypium hirsutum
cttcattattccaatgataccagtctattacgttgtttcaaaaagatctggcttttataaggacttcataaccggaaaatggagacctccagcatgaatagaatgcacatgctagacagcaagcttggggtttatacaccatatatgatggtcatgatgttcttcaagtgagcttaaagtttccaagccattgatttgttcgtgtattagttagttggcatttcatattttcacaacaaagacaaaactggacaagactaggtctaggatgaaggagtttcttttacatctttataacttgagtgataatgtccatttttgagttgaactatcaaaaatgcatcattggtttatctataaagcacgtgaagggcattacaagtcctgtttttgaaaa

SEQ ID NO: 244408 - DNA, 246 bp, Gossypium hirsutum
gggccacatcagcctgaaagggcaagggttttttgaaacataaacccggtttctggtgttagaagttagcatttgcgatggaagggttgacactattatctagactttttatctggtgaccattttaatcgacacggccaacaagaggttagcgcttctatatgaaagggagtggtatgtaccagtgcgatagataaacatcaaattgttctgcaaattattaaacttgctagaaaaagaatggct

SEQ ID NO: 244409 - DNA, 307 bp, Gossypium hirsutum
gatcaaataagagaaaaacaaagcgattcatttcttgtgagtgctaagctacaattctgcaacaatttttgctatactaacaatatcaagatattgtaccattttttttcattgccgcgttattagaacatatgcctagcacaacaaagaagaccatatgatgtggtgctttcttttttttttttttggtatatatctatagaacatggagaaacacattcataaatgtttttacaacgtagttatcttattggtaagcgccattacagtatactaccacctacagagttcgagtttcttagcctac

SEQ ID NO: 244410 - DNA, 389 bp, Gossypium hirsutum
cagcaggggcctgcgtattttccagattgtttctgggaaaaaatcgagtgactcatagtttgaggttggtattattcatcatgagagactatctggacaagagttgattaggtagattaaagtgcttggttctatggagattcttgtaagacagaagatgtagctgccatggcattagtttgattttggacttagcggctggggaggatattgccttcatgttttgatctattgttcataatggctagcttcagctttgtttactgtttactgtaattaagctatgtttacttaaattacgtgcttctttttttttttttttcaactttcccaggtttccagagttactgatgctctttatgcagtgttgttgataacgagtatagctt

SEQ ID NO: 244411 - DNA, 379 bp, Gossypium hirsutum
cccacgcgtccggccttttgcagaaacttatatttgatacatgtagaatctttagcccgcacgtgttttgaagtgtcgactctatgatcctgctgcaaattacttgccgttacggtttcctccatagcttaagactactgagcttcttgttatggcagccatgttcaaggttcacctgtgagcctaatgctgctgtgaattcatgttgtgaaattgctagttgtatcccatttttgatgctgggtttatctcaataatgaggattatgaatatggttatggttccttgttaataatttaggcttgtaggcagacaaagctggattctcttaataaatgtaattttcattgatctattatatcatatgttttggtgcttt

SEQ ID NO: 244412 - DNA, 237 bp, Gossypium hirsutum
aaataagccgtaccttatttaatattagaaccgagttggaggtctgtaaccacttcacaccaaaggatatttggataggagattatgaaatagtccgaaccttatttaatatagtaagtgagttgtgggtctctaaccacttcacaccaaagtatcattaccttaaaaaacacaagttatcttatgggtgtacatcttgaaataaaaagaaaacaagacccccccccaagcggaatg

SEQ ID NO: 244413 - DNA, 409 bp, Gossypium hirsutum
cccacgcgtccgttcagctgcaatacaaggtcaacctcttgctgaacaagttctggctgggatccaaattttcaggctaggctggcctattgatcaagttccggtcaaaccttttaatcggtggccagcccttcattcctttatggggccagaaccggaaggtcattaaccctttcacaacctggtgcatttttcattcccattccacaacaacaacaaccggcatgggcttatggtagacaaggaagtgccacggaacttggtcaaccttcttattacaatcgatgacctgggtctattctattatgaaattaaatgatcctttgtctatcttatattcctcataaagattcgccaattggatctcttaagttatgactgaaattaaattttttttttattggattgg

SEQ ID NO: 244414 - DNA, 395 bp, Gossypium hirsutum
cggacgcgtgggctcattccccttccaaccttaccatccactacctccaccataagctccttagaattattattgtaatataactatgctagtttttaatatgtaaaactaatgtatgatctactttttcatttgcaaaactaatgtatgatctacttttttatatgtgaacctaatgtattatctaaaaaaaaaaaaaaaaaaaaaaaaaaaaaaaaaaaaaaaaaaaaaaaaaaaaaaaaaaaaaaaaaaaaaaaaaaaaaaaaaaaaaaaaaaaaaaaaaaaaaaaaaaaatgataaaaaataaaaaaaaattccattttggggggggcgttataaaaaaacaatttttttacacaagtggtacccaaaaaaatttttttttttggggtccc

SEQ ID NO: 244415 - DNA, 426 bp, Gossypium hirsutum
caactaaaggccccactccatataaaccccttaccaaggcccccactccaccatataaaccagcaaccaaggctcctactccaccatataaacccccagctcctgcaccaccaaccaaggctcctactccaccatataagcccccagctcctgcaccaccaaccaaggctccaactccaccatttaagcccccagcaccagcaccaccaaccaaggctcctactcccccatataaaccccctactcccgcaccggcacctccagtcaaggcccctactcccccatatatgcccccaacacccccaaccaaagcaccaactccagcaccagcaccgccaactaaagcaccaactcccccatataagcccccagttcctacacctccagttaagccaccaacaactccagcaccgtcttacaagccac

SEQ ID NO: 244416 - DNA, 260 bp, Gossypium hirsutum
aggtgaccaagcgatgcttcttattgtgtgctttatatccggaggatcactcaattgatgtggaagacttggtgcgatatgctttggcattggagttatatggcaaggttgactcagttgaagaggtgagggttcaagtcttggaagccattgattacctcaaagattcttgtctattattaaaagatacgcaatggtacgatcacctttcatggagctggtatttttagtattttaataagtagaaatgtctaaaacac

SEQ ID NO: 244417 - DNA, 355 bp, Gossypium hirsutum
gtcacatattccagcctgtccgtttattattttgctgttcctttcgatacacaacagccaggccttggtggatagccgttgcaaaagatatgcaaatattgctatcctgaactgcttcctactgcgtgtgctttcatattcagttggtcagctgtctacatttaccctcagggtctggtattctgaggatcgtcttacccgcatccgaagatgtgtctcccacgcactaacgctgttttgctagacgagggcttgaatgcctttgcacatgaataatctgcaagataactcctgatacccgggataaactgctttgtatgcgataaataatcgatccacgaaccgatttatccat

SEQ ID NO: 244418 - DNA, 264 bp, Gossypium hirsutum
ctttgaaggctgagagagaaagagagagcttaatacagggggaaagatggattctttttcaactggttcaagcggaacaggatctccccaaatttcaacagatgaattcagggaccagatgaaggctcaacttgcccaggcttatgctcaagagttcctcgagactgtgagggggaagtgctttgaaaagtgtatctcaaagccaggaacaagtcttagtggaagtgaaagtagttgcatctctagatgtgtggatcgttacat

SEQ ID NO: 244419 - DNA, 414 bp, Gossypium hirsutum
cgcgagatgcaggcatcgaccgagtttgcagttttttgccgttttggtgcaagactgtcgggctttgggcggtgtgcacgctgagggcgcacatggggcaggctggagaaggcgtacggcgctaggggttggatgcggcgcgaggaaaggagggaaccctagggttttctaatgctgcttaatcttttgaggcctattgggccgtttagagttttgggctggtgattgttattgggcctagggttattgggctaggatttgggtaggttttgtttaattttgtaatgggcccgggtgaaattgggcttctacaacatatataataaatataattacatgttattatttattactatagaatattaattcaaattaaaagtgatataatttaattaaaaaaaaaaaaaaaaagag

SEQ ID NO: 244420 - DNA, 280 bp, Gossypium hirsutum
cggacgcgtgggtccaatttgcttcaccattatcttacactatattctgtttaattaaatgggacatgtatatactgtttagccgtgaaaactgaatatgagtatgagtgtgatatgaatataagacagaaagggggctgcttcaccatgggggagtctttaattgtttgaggcgaaaaataagatgtaagactgaatttgtcattatgtcatttactaacatgatttttaattagattataaatatatgatgataaataaaagagttaaattttccatt

SEQ ID NO: 244421 - DNA, 375 bp, Gossypium hirsutum
  unsure (1)..(375): unsure at all n locations
cccacgcgtacgtagacgcgagggtgctgcttgctacacatcatgatcagcagaagcgaccccagctgaattgctacaacacctccaaggcttctctccgtctcaagcctaacttgcttactcttcttcctctgcaaattatttaccaagaagcctatgacgcaatgcctctgactctgtgtggtgaaatcattaattaattcctggtatgcataaaggtagtagcagtagaagtgaattaaagatttgaatcagaaatagatggcggctgatgatgagtgaatagcaactcgattgattgacttccctgtgcgaatgacagctagcattcgggtngaatcacctatattactatctcatgctcatttatttaaa

SEQ ID NO: 244422 - DNA, 300 bp, Gossypium hirsutum
actcaacgtatttttttgctgagaggactctaaacggcgcggtcggtggcaactatattctactcactgatatttccatggttacagacgaatattcgaacaaagagctggggctggatatcgactaatgaatcacacactctgtgcgtagggtcgataataacacggcattcaactatctgcttcatgcaatcatgtgtaatatacatgactcatgttgacacctaagggaatgtagctgttgtgtatttgtacatccactaatgaaaacttttatgctttggtcgacatagtcttata

SEQ ID NO: 244423 - DNA, 232 bp, Gossypium hirsutum
gccacgcgtacggccacgcgtgcgcccactcgtgcgaaaaactcatatgcttggcgcgccgaagaaggcaaagcacaggcaaaaagtccaacgtgttgccatcactcccggatcccaaaaacagccggataactgctgggcatatggaagcgcctaccacacacctgcgtatatacagccttctgtaccacgatctgcacgatcctcactacgacttggacatcactgaagc

SEQ ID NO: 244424 - DNA, 369 bp, Gossypium hirsutum
cggacgcgtgggttgaggcctaggctaacttgatctactaaaaatattattgttgatgtagatgcttggcacgaccaagagaaggaatacgagcagctttactcggctgatgcctatgaagtgatccaaactcacctagcttttattctgggaaatcgattgactgattcagaataacgttgcacagattggtaaacttagggtcggtcaggtctatgctgcattggtgatgtatggatatattctaaagcggttcgacgagcgatttcaactagagaagaccatgagaatccttccagatggttcatatcgggagggtagtcgtatcgataacgctgtcatagaagacatatgacctgcaggggatta

SEQ ID NO: 244425 - DNA, 404 bp, Gossypium hirsutum
cctctctgctggggtctccaatgcccttgacgccgactgatgagccacctcagtggttcaccgcaccaccactatggctggtggccgacgacaagcgacgacggggaggtgtcagacgagcatggtgaagtgcggcggcggcgtgcagggagttggagcggcgcacaggggcaagggcgtgcatgcggcgctggagagggctaggttttgctcccctctaccgaaattgttaatgttatttgggctaggttttttaatattttgggcccgttgggtttatttaattttggttttgggccgcaactgtaatggactgttttattttggaatttggggttctattttggacccgggcaaaaatgggctcttacaataataataatcaattaagtcctctttaccat

SEQ ID NO: 244426 - DNA, 162 bp, Gossypium hirsutum
cgaatcgtcgacccactcgcacgcgtcgaaagctttgttgttatgccagttttatcatctattgtgcattcttataaagaaacttttgcttttcacgcttttgctggtataattttataaaggttcttgatgatttttttataagttttaaaatttttaaaa

SEQ ID NO: 244427 - DNA, 394 bp, Gossypium hirsutum
aaaaaaaaaagagagaggaaagagtttaggggctctgggcatggacgattttcggtgatcggaccgccgttcttttgtcgctggtgaccaccgtatacggcggtcggaagtgtaaaatcgtccccttttaacccttttgctccccttaacctaggtccgtagttgtagcccccaaaaacctcacgaatgctgctggaagtcgaaagaaacctctcggttctaatctctccgatcacctcctcaaaaacggtaaaagttcatatttttttatgtatttatcaacgaataacagtggtaaaagagaaaagaaacatagaaatcacctttctcttgttcgattgcttctcaatattggtttgtgtttgtattgttttgttcttttttgaatattcgg

SEQ ID NO: 244428 - DNA, 412 bp, Gossypium hirsutum
gcaaattcagcagtaaacagcattggcccactcgggcttccctctagacctgttagtttccctctagtcttcaccctgtcaagtatttagctaagtatccatacaggggcaagccatatgttctagctatgctatgtatggtctctgcaaatatgggccaacttgcagattcgatcacccatacatgggatgcccttataattatggtctaagtgtccctttatccgtgttggatacgtctctcttaccatatcaaagaatgtcaccaacagcccatttgtctgaagctcctctgccgtcaaagctctctgatttggcatggaacactgactctgtgagcaagaaacatcagaactcggagattaaaaattcggatgatccacctcctcaacaggttacgtcaccacattct

SEQ ID NO: 244429 - DNA, 404 bp, Gossypium hirsutum
cccacgcgtccggacgacaacaacaacaaagttcgtagttttagtccatcgacgccccctccgacttcggttaattaccgaaatgctaaacgtagaaaagggattccccagcgagctccaatggcaggactaatcatacaatattaaagctccatagccttaaagtttagacatatacacaatgtgatggccacaatgccccaccacaactctttccctaaaaaagatccggcattgtctcattcccctcccattctcaagtgttttgtaaatagaagcaagcaaaaaacatacaagtgggagaacaaagtggaaaaataagccccacgcataggattagaattgtctaaagatcgaattcgagatcgatgtgaattgaagacttaaatataaatcttttatca

SEQ ID NO: 244430 - DNA, 405 bp, Gossypium hirsutum
cccacgcgtccgaagagctgaaactcagttgacaagagaaaacttcaatgacattcaatgtaacatggggacactagaacttgaacctgaaaggaatgaagaaagtgttggaggatggattctaaacgagtctcaatacgatgggcttggactttcagctggaatcgattcttccaaagttgatgcatatggtgtgacaagattaggtcctattaaactgagtcctggggtgaagcacatcctgaaacccagccaaaaggtcgatcaggataactcgaggttgatccattcgactatcccttttgcatctgtgaccgagtgtggcaaaatgttggagactcttaagaaatcaacgaagatttacgggttttaggagtaagtaatatcctcttgcaggtaattttt

SEQ ID NO: 244431 - DNA, 304 bp, Gossypium hirsutum
cccacgcgtccgaagctatgggtcaatgactgattggagcaagaggctgcggtctagaaattgaacggcttttgcaactactggtgtatgtggctcattggtgcttacatcacatggccgaacttatgcctaacctggactacgtggaatcgatgctttgatgacatattgttatacatgtgccaactgttacacctaagactgtggactgtgttctatccttaaatgactatgataacagccctgctatgaataagctatcatcatgatcaaagaattcgactcctacggtgatggtttcata

SEQ ID NO: 244432 - DNA, 416 bp, Gossypium hirsutum
cccacgcgtccgcccacgcgtccgcttttgctaattttagatgtcaacattttgcttgatgtctataggctgccagagatgcaagatacgataaggaaggtgtgatgaagtttttccatatgttgatcaggagaagatatttttcggatgacttaccaacgccaaatacatggtccgcatctcctgttcagacaacctctcagcgtttagatgaaaattccagtgatgatgaacagctgtacaagcgtacaagtttaagtggtgacccttacaagtacaacatccttcctcctctaccagcacagcgcaatctgactccaccacccacactttaccctcaacagcctgtttccgtgacagagaattacagcctgccaagattctcctttacaggctcccaagaaatcagcggcagc

SEQ ID NO: 244433 - DNA, 416 bp, Gossypium hirsutum
gggtgaagatggatgcataatgcttgaatttgtgtaaatggtggttccgatgctgaagaaattaatattcacggtttattggaatcactgaaccagagaaaagatgaaagcaagaccataccaacatgtatctcatcggtggttaccaaattgagtgcaaatgggataggaacagtatttggtcggctatttattggagcagctgaaaagattccaccatcagaacttgttgacacaaccggtgccggagatgcatttattggagcagtagtttatgctctctgtgcgggcatgccaccggagaagatgttaccatttgctgctcaagtggctgcatctggctgtagggctttgggagcccgaacgggtcttccacacagaacagatccacgcttggtgaccttcttgtgacatgt

SEQ ID NO: 244434 - DNA, 242 bp, Gossypium hirsutum
accacgcgtccgtccacgcgtgcgaaaggatgtgcgttaggatcacgtacagggcaagccactggatcggctgttaacactcctgatcgacaaccaattgggaccggagataaaactgctggcctagacctattgggacttcgaagatggaactggcggagatgtactatctgtcttagatgatgaaacaccacgaaatctgaaattgttgttgaatttgaagatactacgtatccgatgtc

SEQ ID NO: 244435 - DNA, 421 bp, Gossypium hirsutum
cggacgcgtggggaacagttcaaacccttatttttctagctcttggaggcgaaattttgagggaggttttatcttggatatgggagtgcattttattgctggcttgaggatgatagttggttgtgaggtgacctcagtttcggccataacctctcatatagatagaactttacctccgccagacattatttcttctaattttaagctggagaatggatgctctggagtctttgtgatggttgtatcctctagttcacctaagataatttggcgagttgttgggtcaaaaggaaccgtacaagttgagcgtggaaaagtagatggaaagcatggttacttggtttcactatacagtgcagatgggcaatgcaaaagcactttccatccattctgtggagtgcacgaagaattaaaaattttt

SEQ ID NO: 244436 - DNA, 405 bp, Gossypium hirsutum
gttgagttgtacgttggctttcaacttgattttgtgaattggttaagtatgcctcggataggctgtggaatcttgacaggcagtatgccaacaatatataactaccaagcttgtcatgttatgtaaatcctcatagatgctgttcaggatagtcagagaaggtagaaagtagactacaatttactttttctgtggccattcggagttcagtgttctgaagatatatgcagctaaattggaccttgtgagcagttttctatgtggtgtttgaagtttgaaccaagtcggggataaaatatttccatttcgccaattgttgaatttaagaattcttttttggtttattgacacaaataatagtcaggtgttgagaatttgtgcatccgaacctggatgactgtagca

SEQ ID NO: 244437 - DNA, 376 bp, Gossypium hirsutum
cccacgcgtccgcaattactaatattaaatttgctctcaaaattaaaactataatgataaaatgttgagaacttttatttttataatacaatattgggggagatacgaagggaaggggataacagaaggaggagaaacaaagaacaccaacctggctgttttattttataccttaatgatttgctttcttaaaaaaaaaataaaaaagtaaaaacaaaaagaaataccacaaaaaataaataaaaaaaacacattaaaatcgatacacaagagccttgccggtttgctaccactatttacgaaaaacatggcctacggtcatgattctgctcgcgaggctgagatcattgaggcgtctacactaaccatcgcccac

SEQ ID NO: 244438 - DNA, 407 bp, Gossypium hirsutum
cggacgcgtgggtaatcggctcgtgttaaaaacgggacgtccttctaaaaaacaaaaaaaaacttgcaacttctcatttctttcaatcggatcacacttaaatgtcaaattgaattcgtatttttgaaaatcaagacaacatgtgtttaataagataccaattttgggcgtcgcgagggtgctaataccttcctcgcgcgtaaccgactcccgaaccctaaattttctctggattttaacgtagacctaaactcaaccttttatttgttttaataagagatctaataggtgtccgatcacacctaggaaaaaggatcggtggcgactccctgtttatttcaaaaatcaaacgtcaaatttcaaactttttttcaataaatcgccacaattagcgaccaagctaagct

SEQ ID NO: 244439 - DNA, 326 bp, Gossypium hirsutum
ggctgaggtcctgctttccctttgcaacgcccttgaaggaaattgaaggttttaatcgacaggaataagggcgattgccgaagtaaataggcaattacacttggcatggttttgagcaattctttgaatctcgtttaagtttatattggtgtttgttgtattgttttttaagcggatatagctacaatgatgactgtttttttttaaacgaaactttaataataatataaaaatatgagtttgaaaaaaattaaaaataaaaaaaaaaaaaataaagaaaataaaaaaataaaaaaaagacaacaagaaaaacagtttaataaaaa

SEQ ID NO: 244440 - DNA, 296 bp, Gossypium hirsutum
  unsure (1)..(296): unsure at all n locations
cagactcttntgttattttacccgttacttgtacacactcgcactctcacccgaggaggagcttttactgaatttaccaccccatctcgactacattcacaaacaacccaactcgtacactactcctttatgatctacacgatcctttttccatattattccctgtcataaacagatattgaaagatcatcctaaaaataacatctttcatctctctccttatatatataaattatagaaatactgtcagatctatatcttgttaactggcttacaaactacctttagctgcaaat

SEQ ID NO: 244441 - DNA, 412 bp, Gossypium hirsutum
cccacgcgtccggaaattagtgaagtgggttattgcaagtaacattattgacaagaaagactttgaagctgctgataatcttgagaaaggcaaagttcatggggctgctgatttcattttatataagctaaaagaggtgagaaagatcaagcaagaggatatttcatgcgctatgaaggatgcaggtatcggaattggacaaaatggttggcggtatttatttgtttatactggttaatttgacggaattttaggcctggaagtagaagataacccccttgaacatacagaacattggacccttttaagagaaaaaaaaaacctaattaattacaaatgttaaggatcttattaatagggaattaaatgagaagagaagagaaaaaacatataatttcattgaaattgaaac

SEQ ID NO: 244442 - DNA, 416 bp, Gossypium hirsutum
cccacgcgtccgcccacgcgtccgctgaaactggacataatgaagatgctgaaggatcaatcaatgtagcaggggatgatgagcagcaaaaggagagttcagataataaagtcgatactgatttagtatcagatactctgcctcatgtagggctttccgaaactgaaaccgaagaggaagctgaacataatatggatcaggaacagcattgaaagccggggagggacattgatgattggaagataagttttttttttttcctcatgaagttttgtatgttttgataagagagagagagagagagagagttgctgatagccatagaaaggtttgaaatcacattgaacgccttattgcaggatgttggcccgtgacttttagagttgtttattataaaaccatgacgtttttttaaa

SEQ ID NO: 244443 - DNA, 382 bp, Gossypium hirsutum
cccacgcgtccgggtcaatgtcataatttgttgttgaagtgactcacagatatgaatcagggtccaaacttttcctgcttgtgccttttattgtgatagaattgacccagcaatggagtttttctgatggaatctgatatctggccagtgtttcctgcttaacatgataaaggctcctgtatatgaactttcttttcttttctttataatttgttttaagcatagctttaatggggatgggttggaaagttactcccaaatcctccaaaatgtacactaaaatactcttttgtagaaaattaaaatgaacatttattatcattagtttgtaaaaaataatctgttattacaatctatttaaacattgtgtttttttatacat

SEQ ID NO: 244444 - DNA, 409 bp, Gossypium hirsutum
gcgtaagcgtgccgttgtaaataatccaattctaatcaaggggacttactagcccatacccggatgcttaaatatgttggttggccttcatttgggttcatcatatgatatctaataactatataaactggaatatgatggatcatgcatcgatgggatactatgatttaatatcttcttatattctaacagagtgaaattgctatttgctctctgattgtggttacatgtgatgatgagtgtttcctatagattgatgcaaagaaattatcaacacgttatgaatctaaatcctagcagtagttatatgaactggaatatgactgaatatgcgtatttcagcagagggatattactatatactctgatttctttcattcatatagactaactggttgctacatgttac

SEQ ID NO: 244445 - DNA, 406 bp, Gossypium hirsutum
gttttcccagatgggaagtctgcctgattgaattgatagccatatcaaagagcctgaagcagatacagggttagttgcagtcttttgcatctttcttaacttgttcttttatacgtggattgggaaaattggtctatttgctttttcaggtttccgcttgctcagcttcatgcagtgagaaaacctagtcctaagaacaaggatgcctgtgacaccgaggatgatgaggatgaggaagatgaagcaggagatgatcaagatgaagatgcagatgaggaggatgcatctggtgaagatgaaggagatccagaagatgaacccgaggccaatggggatggtgctagtggagacgaggatgatgaggacgaggatgatgacgatgacgacgacgatgatggtgaggaag

SEQ ID NO: 244446 - DNA, 400 bp, Gossypium hirsutum
cgataacaatcgaagctctgctaatgcctcatctaataccatttgggtcccatcaaatgctcgaggtgctcatagacttccacctggacttgctaatgctgtatcaaactcatacttacacttattgtgacgcaagccgaatgacgactcgaccaacgcttcaaagtatcctgccacatttactgtcggctatactgaacgatagaatattgatgcggctattgaaacgggaattttaccatgcttctctcccatcacgattgtcattcaactgaatgggctgcgttttagtggtcaaagcaggcatcacatgtgagtgttcatatgcatactcaatggcggtctgcctagaggttttcgcacactgatatgctcgctgcatttgactacatattcatct

SEQ ID NO: 244447 - DNA, 333 bp, Gossypium hirsutum
aaaaaatattgtgatcctctgaaagaggagctatagaggttccctccagaatcacgcctcctggcactgggctgcacgcgcacacgcgccgccttacacgggcgttggaaggctaaaagccttcgtttttcttggcgaatcgcaggtcatcccttcttccttttaaacatcaacaattttttttgcaaaaacgattgacatacacgttggacaatgaagaacacactgtaaaattaaatcaccttcctcaaaaaaaactgctcgtatctctttgaatatatatatgtatctatttttgctcataatctaaaaaaaaaggcctcctattacaga

SEQ ID NO: 244448 - DNA, 281 bp, Gossypium hirsutum
gaaagtatatacccagttgcccaagcttgtttcaaaatttcaagaggcgttcaacaaggtggggccggtgatggaatccatgatgctctgcgattacgttctgccaatgataccctgtcaaaaaatactggatttacccacatcgagtgaccacttgcttgcttggtgtaccaaagactcacttttgcgatgcgctagaaaaccatgtactatctctatatatccacaaatatttcttcgaggaacaaccttttaagcacttgcactgcacacaagagcac

SEQ ID NO: 244449 - DNA, 280 bp, Gossypium hirsutum
gaatgtatataccaaatttacgtagcatctttcaaatctttcaagggcgcgcaacaaggtggggccgatgatgcaacccatgatgcactccgataacgttctgccaatgataccctgtctaaaaatgctggctgaacccacatcgagtgaccgcttgcttgcttgatgtgccaagagctagcttattctatacgctaaagacccatctacaatccctttatatccacagatttttcttcgaggtaacaccttgaaagcactggcactccacacaagagca

SEQ ID NO: 244450 - DNA, 324 bp, Gossypium hirsutum
cccacgcgtccgcccactcgtccgacatatccctggtgccctcgctgcaattcttttgttccatcttccctgcctatgaagaagcctaggattgacctcaatgcatcattttaatccttttttctctttctcctgtgaacattgattggagattttaaaaaaaaaatgttgtacaactcttcagccctgcaaatattcttgattcatgtaaattgaaaaagaaaaaaaaaaacaataggttcagaattcaaataaaaaaaaaaaaaaaaaaaataaaaaagaattaaaaaaaaaaataagaaacataataaatttatatggtta

SEQ ID NO: 244451 - DNA, 244 bp, Gossypium hirsutum
gaaaacccggcacaacgcgagcggccgacctatctttctctcattaagcccttttttttttaccatcatattttgaacaaagacagattctcctctaacttagagaaccccacccaacaaccatatggcatagaaaatgtccctgtaagacacctcacaaccctatgttaacatcttatcaccacctgaaaaacaatgaacggatctaataattgtcactacctatgcaatagcacaatatata

SEQ ID NO: 244452 - DNA, 398 bp, Gossypium hirsutum
aatttattgcttagcattaaacttttggtgagtttgctttgccttcctctaagtttcctttgcttctcttgatttcatcgaatgttgattttaaaggatggtttgctcgtgatccatctgttctacaccgtgttggacatgttttacttaaagtaaaagcagtggaacctaaaagggaaaggcgccttgtgtttgctgacgatctattccagctttcaaaggttaccaagcagaagacagtttatgttgttagcaaagcaatagaaaagctttctggttgtaagttgtatggccttcaatttttatttatatcagttgcatgttttttgggtttctaaatataaaaaaataaaaaacttaaaaagggtccgtcatttttaaaaaatacaatcttactt

SEQ ID NO: 244453 - DNA, 250 bp, Gossypium hirsutum
cttataaaccaggtgctcttggctttgcaccagaactcattctcccatataagaaatgtgaatatgaaaacaggcttgttggtactgttgtttgccgcaaatattagttaggtgcatgatgaacttgttttcttacatttgctggtaatttgaaggttggataaacagcgatatggtcttttatgtgatcagtaaactaccagctatagccaccaactttaatggggttattacatttacattttggaat

SEQ ID NO: 244454 - DNA, 270 bp, Gossypium hirsutum
cttatgaaccaggagcttttagctccgctttttaactttttctcccatataagaaatgcgagtatgataacacccttatttggtactgttgttatgccgcaaatattacttaagttcatgatgaacttgatttcttacatgtactggtaatttgaatgttggataaacaaacatatggacgttcatgcgatcagtacactaccagctatagccactaactctaattgggttcctacatttacatgtcggaatacacactactgcttttag

SEQ ID NO: 244455 - DNA, 235 bp, Gossypium hirsutum
ccgtcgcctggcttcttctaaagtttcttttctgacaaagccaccctacctactgctgggggctgtatttccggaacagaaacgaccccctcggatgaacccaatgagatagctacattcacacccaaacaacaccgactgaacccccaaaaacatggataaaatgactttatcagccgctttccaaaaaccaacttagagagcacttttagtttgcatgaacaacaactagcta

SEQ ID NO: 244456 - DNA, 409 bp, Gossypium hirsutum
cccacgcgtccgttctacttcaccgccagtgtgccgaatcagttcttcgctctctaggtgtgtattctctcctttcttcaatgattcacttccgatattatgagctctcctattttttgttctctgaaagtatttgaacttgatcttttgaaagcatgatttcttgctgtggatgtcttcaataattgttccgataactaagtaatccctttttgtcgactggaatttttaaattagtgttcttgagtcacccaatatctgaacttcctgaaaacccatttcgattcctaactttactgcatccatccctgcatgtgcctctactacgaacggagatgcaatattggcatgaatgattgacttcgaaaccagaaactcgtccctcatgccccaaattaccaaccctgac

SEQ ID NO: 244457 - DNA, 375 bp, Gossypium hirsutum
gggatgccttccagtcttttccagccacattttatgcatttgaaactgattctgtcgttgggaggacagtaaaagaatctgtccatgatgaatccattttttcagctggggaaatcatatctgataatagataccaatatttatcttcagaaaatcacaatagtgtaaataactctaatgcggagcattcaaaggctgcaacacaaatattatctgattgctcagatgacagaagatacacggaaaagatttagtgcaatcttgcagccgaagataagaaagaaatgtcctcctagatttatgatcacgtgctacaaagggcactaactgacactttacataccatacatactgccagatctattgaactaacac

SEQ ID NO: 244458 - DNA, 218 bp, Gossypium hirsutum
  unsure (1)..(218): unsure at all n locations
ggaattccttaaattcttttacaacgacgctgtatgcctgtgcaacaaangctggggatgcgagggctttgtatatatctggcccttaccatgtctgctataggcatttgaatatctttcccaactattggacacagtttgtatgtataataagctgacacggcatgatatgcctcctatgcttatcactgataggctacatcatgcaaattatattt

SEQ ID NO: 244459 - DNA, 129 bp, Gossypium hirsutum
  unsure (1)..(129): unsure at all n locations
ccccaaagnccacaacttctgtggccaagatttaacttaatattttcttgaatcaaaaaaacctcctatttattatattacaaatgtttcacccccctttcaatgttctaacaaaaaaaggaaacctaa

SEQ ID NO: 244460 - DNA, 243 bp, Gossypium hirsutum
gccattacagagctagcttcatctcttgatattcatgaagggttgcaagcagttaagacaaatactcttattccgacaccaccagctttacaggaggaatatgatgagaaccgtttgggggttgaagggagtgagatgcgtgaagacactgaagaacttaatgctttgctttactctgatgaagaggaagatgattttggtgttggtgatgatgattgtgacgatgatgaaataatgagcaca

SEQ ID NO: 244461 - DNA, 416 bp, Gossypium hirsutum
ggctactgttgttgaaatcaacccaccactcaccgtatcaggtacagtggaattttactgagaacgctgtatatgaccctttctacattagctcatgagagttgctcatgaattgggctggaatcggatcaaattgggtatacaagaaaaggaaatagaattgcctactccgagtttccatttcatgagattttgcggatacacaataaaggggaatgggcctagtgcagtgccacattttttgttcaaatgaatttgggctctaaataaattaatgtcaatacacgagaatggttattgtcaataccaggaaattcatggtccaaattggcataagaaaaaaatggtgcgaatgggggttacatctaatttgggtatggtattctcacaaatatatatatttataaattttaata

SEQ ID NO: 244462 - DNA, 411 bp, Gossypium hirsutum
aaaggaatctgcaaaatctttttagcaacttccgcattgaagaggtcattccaaacagaaatacgatcccccttaccaaccctccagcaaagtcctccttccagaatgccttttgccgaccaaatactcttccagctaacaaagaacccgaggcatcggcgtcaaaaggaaaggagaaagttatcgaggactaaaacgggagaataacggtcgatagaagtcaaaggtcccggttcagcatccatattaatcccggcttcggcaaaacttggtgatgtatttttcctttggtaaaggtggcatgtacatagattgtgtataaatgttattatgttttaatatataaatgttaaaaatgttagtattaaaaagttatgggattttaatgaaagaagtctttctattttatct

SEQ ID NO: 244463 - DNA, 383 bp, Gossypium hirsutum
  unsure (1)..(383): unsure at all n locations
gcgtagcaggagctcggtttaaattattgtttttgaattctattgagtttaagtaccattttcaattggactgtttttggaatttttagggactgttatttgttttggattttaaaaaaaaaaaaaaaaaaaaaaaaaaaaaaaaaaaaaaaaaaaaaaaaaaaaaaaaaaaaaagaaagatatttaagactaaaacgggtgaataacggnggattcaaatagaatgaccaagtttaagttccatgttaatctcttttatatgcataagttggtgaaatatttttcctttaaaaaatgtaggatgtacataaattgtgtataaatgctattatgctaaaaaatataatggccaaaaatgatactatttaacatatatggttat

SEQ ID NO: 244464 - DNA, 250 bp, Gossypium hirsutum
aggaagttttgcaagcaaatagagtcagacgtatgcaaactttctggggcactacggctacctcagaaaaggaagatccgggaagcggctttcgatgttgcaagatcaggtacccgatcgttcgacatgttggcttttctaatgcgccacttctattcacctctgtggccgtgcctagacaacggagcgtctgccaaaatggtggcgttacccacataaatcgccttgatagatataggggtatgatcat

SEQ ID NO: 244465 - DNA, 279 bp, Gossypium hirsutum
cccacgcgtccgatgaccctgggcttgtatctattattgtatcattttagggtggggagggtgatgtatagtatgttccattacaatcgtttatgagttcgattttaagtgttagatctgatgagagggatttgaaagttttattgtgttatgtaaaatgtattaaaaaaaagatatatttgtattttgataaatatttttttaaaaattatatctatgattccgatttattttacatgtttagctcttaacattatttttttatattggtttttattt

SEQ ID NO: 244466 - DNA, 421 bp, Gossypium hirsutum
cccacgcgtccgcccacgcgtccggcaatagagcaccaaaatcccctgaacaaagaaagaaaattgctgaagccattgctgccaaatgggctgatcctgattaccgcgagagagtttgctctggcttggcaaaatatcatggcattccgtctggggctgaaagaaaaccaaagaggaagccagcggctggtacacagtccaagcagagccctccaaagaggaaagctagtgatacaaactattcttctggaagtgagactataagcccaattgagcggttaaggatacgaagaagaaataaaccactttataaggatcctatggcaagctccaagctcgagatgttgaagaacttaagagcacaaagagcagcagaagaaaataaagaataaccaagcagcttgatatatgattgaattac

SEQ ID NO: 244467 - DNA, 305 bp, Gossypium hirsutum
tggagattcattaggtggaaggtcgtgccggcggctccacaaacgattcctagtaaagtggcatgacaatagaggagatggaaattgagaagttcagagtaaaggttatcggggccagtggttgtgggcgaaagccacctaatgttcgataaatttggtgaggaataaggaataagtctagacatataataaataaattgttgtttataaaataaaactaaaaaaaagagagaaaagttttaatctagtttaagtcttgtttgtggttttttttaatatcattttaataaaaaaatttaggttag

SEQ ID NO: 244468 - DNA, 416 bp, Gossypium hirsutum
gatgcatcatcagctttactatccacagcagcaacagttctcaagcagcagtagtccaggagagtcacctggaactagcagaggaaatggtctatggagtagaacaggtggatcaccaacactcgcggctgcatcttcacttggacttttcactggttcaggttctaccaattcatcagaagcctcttctccagttgactggagcagtggtagctcaatggctcagttggattataccaatattgattggagcttggatcgcacatctccgagacctggtgggatatggctaggaccaacatctccaatgaagagcagtcacctttattatcctaatacaaatggactgagtgttaaaccaggaatgagattgacgcctaatgtgagtggtgtagcgattgcgggtttacaggatg

SEQ ID NO: 244469 - DNA, 217 bp, Gossypium hirsutum
agcaaattcaacatgatctccagattgcgttgaacgagcccactgatgccgcttggggtggggcaaccacgaacgtcattgttgatcccaatatcaaagatatcatcactgcctaccagacacacaggcagacggccactactcattatgatgagcatgattaccgcagacagacataccttccatctagcaagaggagctactaaacgttcatagg

SEQ ID NO: 244470 - DNA, 212 bp, Gossypium hirsutum
cggactcttattctctactctcacacattttatgtatgcaaggctgggaattatccaggagggggtttattattgaccgtttatgctaccccatttatcaaatgtaattagctataccataattctcatgcctatatgatatttacatattaccctcaaggaaatattataagatcaaaactattggtgtctcatttagttgggttctgtaa

SEQ ID NO: 244471 - DNA, 411 bp, Gossypium hirsutum
cccacgcgtccgtgagattagtcggtctttgcatggtaaactagatgattctagtgagctggtgagcaatgtgtatttattggataattatgatgcaaaaatctgggacactaggtattcgacaacttcaacgaagggcatcgatctccagccaacgggcaacattattgaagagatttttggacaagataacacctgagataagtgcagatgctcttgaaaagtccagaatcttctcagtaaagaaggctatgattttggttatttaattatttatttttcttttatttcccccttgtaaattcatttactaaatgcaatttggtttaaccaggttaaaaaagtgatctttaatgagatcctttttgctttttgtatatttgattaaaaaatccttttaatttttatttt

SEQ ID NO: 244472 - DNA, 221 bp, Gossypium hirsutum
  unsure (1)..(221): unsure at all n locations
taaattcatacataagcaacttgaagttatgttctacacntagattattgntcaggcgggggcactatcactttatctccagaaccatccntcaccaaaactttaaactttcttcctttcaaccaatctctttttattctaaaatcccaacctaaaatccttttcatcatcgcatcatcctattaaactcttataacacactaatttcccatttaattcct

SEQ ID NO: 244473 - DNA, 413 bp, Gossypium hirsutum
ggaattactagatcttccttgtgttcttgataatgcatcggactccagggatgctccttcttcattgcctcaaaaggatgattacagtgaagacattcccaatgaagatgagattgatctagcagatgatgcagaacggaataatgaaaatcggtgctcatgaatatgaataatattttctatcaaccaagaggtttattagtgcaaaaagattgatagcaatatcttgctatactatgacgctttacttgtttgtgaagttggcaacttggtttaatggcccacacttttccaactttcatcagtagaggagagcacctatacaagtttctttctttctttgtatctaaaataatgtataaacatcaaatattatatcaatagcttttatcacaggcattcattatatgagc

SEQ ID NO: 244474 - DNA, 418 bp, Gossypium hirsutum
ctcttccttcattacatcacattccttactcgctttgtagcaattaagccaatggcaaaacttgtggctgctttcttcttggctctcattgccatctccatgcttcaagttatggtcttggcatcgcacggacatggaggtcatcattatgatcaaaaacattacggccctggaagcctcaagagttaccgtaagcaaacttcaactcatctcacatttttcttttgcttttctcttaaagatctcatctgaaacattggaaaacagtaacatggtaaaaaagaaaaaaaagaaagaaagaaaacccagtagtaaaaagtttcataaatattactctttcttgaatggatgagcagaatgtccatcacagtgctcgaagagatgcagcaaaacccaataccataaaccatgcatgttc

SEQ ID NO: 244475 - DNA, 201 bp, Gossypium hirsutum
ctaaggccactggaacaatggactgcagggccccacgctatatctgaaaggattggtgaattcggatcattcactatttgtgacattagctaagaaatcattacggactcttgctgcgggcataagaaagacatagatcaaagaaaactaagtgacgattacatatatcgtacatatcagcattgcgtaatgtgaaccgta

SEQ ID NO: 244476 - DNA, 250 bp, Gossypium hirsutum
cggacgcgtgggttcagatcgggcggccgctcgcgatctagaactagtggtagtagtaccaggatttgttacctatgacatggttcgatttgtttatcagatgttttcggactgttgttctgtgttctcttctgtttaaacataattgaatcggttactttatagtctttatgacttacttccttatgttcaattttttgttgtcttagcttcttgtttttccatgtgtttctgattgaagcacacttta

SEQ ID NO: 244477 - DNA, 394 bp, Gossypium hirsutum
agatggtggagtccaaattgtggagccattggagtcggaaggaaaatggggcacctctcctccagctgaaaatggtgctggaccaagtaccacatcaggtgtaactggttcagaacctccccagcggtgaccagcacacgtgcaggtattgatagaaaggatataaccaaagcatccatctctagcatgcatttttatcatatgctccctggtgtcatgttaaaaagaaattctcaaggggaagcttcagaagtataatggattggtatgaatcgcatgacatcctttttgcagccaaggcatatagtgttgatttcagggatcttggtgtaaatttaggagatgttggcttaaagaaagtgggtctgtctgactatagacttgaaaaaaaaga

SEQ ID NO: 244478 - DNA, 330 bp, Gossypium hirsutum
cccacgcgtccggttctagatcgcggcgccgcccttttttttttttttttttgttcccaaggttaccttagccttgccttgtttgtttgtttcctcgtaattatatatattacaagtgtttcagacagaacacaattacagtgtaaaattagaaactcccagaatcccgagcaatttctattattattcccatagcatctcttctatattttgctaaagctgaagaacgaggctattattaaaaagtccattatgaaatgagtttggttcaccaaaatcactcacttacacagaagccatgtgccggatcaagtcgatcacacgagaact

SEQ ID NO: 244479 - DNA, 304 bp, Gossypium hirsutum
agccttcggccaagccgtccgcccacgcgtccggaaaaataaaacccttgctttactagactttatcccatggggcaccactaacctccatattggggggtatgcccaccatggcggtttaccatggtccaacttgggatctgtctccttggggccggggcccctaagacccccagaccgtcgggacaccctgcatgttgctgtcaagcttcggtgctgtgattcttgattggcttcgagctaggtatgattggttatgtggataaaatgaaggctgacttaatattggttatttatttttttg

SEQ ID NO: 244480 - DNA, 408 bp, Gossypium hirsutum
cgcacgcgtccgcccacgcgttcggaaaaattattcccttgctttactagactttatccgagggggcaaccactaacctccagtaatttggtggctaatagcacagacaatggacagatcttacccatggatgccaagacttttgggaatctggatcatccgtatggaggagcggggagaggcacgcgtaaaagaagccgtgcgaggaaaccgctcgtgagacccaaccccctggcactgttctggcatgttccagaagcttccggtgcttggctgctggaattccttttgaatttgggctatacgagctaggggtttatgaatttgggtttattgatggattaaaaaatgtaaatggactggactcttaaattattttggctttatttatattcttatttgattcat

SEQ ID NO: 244481 - DNA, 409 bp, Gossypium hirsutum
ggccgacccacgccacgcgtccaggcgtcgcatgggttcaaccgacatccactttattggttggatcccagcgaagctgagaggcatcccatgccacaagtgactgccagttcgaaaaagaaaggcttcaagaggtaaggtcattcaaattgatcttagcatcgttagaggtttctaggtgactgaatcgatgttttcttcttttatgcgcttcgatggatactatagtccaactgatttttctgaaatttttttgaaccatgaaacaattaattgaagagtaaccttcttatgcattaattactcttccttcttgacaattatactatattacatcggtgctataggattttgatttagatttccttgattatattgtggtcggatcgttgtttataaattaatataa

SEQ ID NO: 244482 - DNA, 398 bp, Gossypium hirsutum
cccacgcgtcccaacaaactgtccaatttttgatcaaagcaacatcgaaagggcctgggggggtatatccaagatattatacatccccaaatacagcactcgactcaaagaacacgccacacacgaatcaccaaactaatctacgagcaaacccatggtgacatcaataccttcttgtagaacgtaataaacaactgcataacctacaccaaacattctacgaaccatactcatactgctactaatacaaatcctgcactgaagatgcaacgcaagacacagaattgaacagctgattcgaataccaagtgatcataaactaacgcatacaatttcggaaatgctctaggactcatactatcattcatgttctttcactagcattctgactcttaatc

SEQ ID NO: 244483 - DNA, 315 bp, Gossypium hirsutum
cgtcccgttcacgatatctgtcactgatacaaattaatattatattcagcttctgctataaacttaaaatcgtatttctttccataataaacgattatacatgttttcaaactaaagtatacagataaattacacatatagaaaatttactgtaactgtcacactataatatacgtctttttaaaattaaacttatgatcacatacattttcagttaaattacaacataatttgtgatccatacaatattctaaccaatcacatcactaatatcgtactatacaatgaacaaagtcatttcctttgtttataact

SEQ ID NO: 244484 - DNA, 230 bp, Gossypium hirsutum
cccacgcttccgcacacttttctttaaactttcttttccctccaaaactctcaaaaaaggtgtgggcttatttgtatcatcaccacaaaaaacatatctaaatctatggtaaaccataccaaacaatactaaccatacagcttgaaacctacactgtaaccaccctttgataaagaatatctaatcacgattactcaatccgagcacctctcgacactgataaaaatgga

SEQ ID NO: 244485 - DNA, 403 bp, Gossypium hirsutum
cccacgcgtccgcggatgatcaaatgttgtcgatagaactgcaaagagaaaagcaggtaacaagtcaagacaaagctggttggagtttgacaatggtaatggcatgttgttctagcgtgctgtcgcatgtcagtgtcggatttgtcaaagccacattataagtcatatttaactgtgttagtgttaggtagatcaacagtttgatggtttgataggataggtagcttgaacattcttaaagaacaagtatcatattgataaattcgttaatcttcaggggctacttataaaaattgtcaactattttataacaaatatgggcttgaagggtttctattaagtttttcttcggcgaggtattttactcgtgtatatggacatataattccaatatatattacat

SEQ ID NO: 244486 - DNA, 239 bp, Gossypium hirsutum
cccacgcgtccggggaggcttgactttttttgacttacttcacagacttgctttagaagggcatttcatatatttcaagccttccctcccaaagcaagccaaggtgaggatctttgactggttgtgaaaagtgaaagaaaagctggtaaatgattcttgatatgctttaagtctagcattacgtaagcagggtttgtggttcatgttttaaagtttctgcttacctttggttttcaaaa

SEQ ID NO: 244487 - DNA, 277 bp, Gossypium hirsutum
  unsure (1)..(277): unsure at all n locations
ccgtccgcccacgcccgtccgnngcctatctgatagggtggcacttgggatggggtaaagccnncatctgataagcaacatcanctgtcacanctgccatgccagaagncgtttcaggcnagagaaggangatgggancttaaacaannaacagaaattttatgggancttaacacnatctgaaaaaagatgtattgggggtccttataaccatgaataagagtggaaaattttagagtgaaaaacaaagaaagcaaaatagaaaataaggaaggtc

SEQ ID NO: 244488 - DNA, 493 bp, Gossypium hirsutum
  unsure (1)..(493): unsure at all n locations
ggaataacccgggctcgaccccacgcccgtccgnnctttgcttttttttccctttcctttnncttttctcataaatnncggttcccttttcccccatccctaaagagagatccgtataaatttcaactttgaannatttcttctcttttnnttttccctaattttaaatttttcccaaacccanntttctccccttaccccgattccctttttatttnnntcccccaatttcctcaaatncggcagcccctctgcatttctccgtcggtagcccaactgctgtatnctctgtcgacatcnntgctgtcgtccttggttttggattaatgagaaaagtgagcctggtggtgaagtcgccggtgaaggttgggaagaaaagcgtggcggaagagaaagttatagcggctttaaagagtcacagcaaagctgagaggaggaggagagaaaggattaatgctcacctggacaccctccgtactctcttgccatatag

SEQ ID NO: 244489 - DNA, 309 bp, Gossypium hirsutum
  unsure (1)..(309): unsure at all n locations
ggcaagaaacggtgatggaaaggggtatggttgtgggtggggatatggttccccaggtggaggaaaaggtggcagatatggttcttctgcttctacgtctcaaaaggaccatccacggctaggagactgagtcccattggtcttagaaattaaggtgcccactcagtttttcaaatcttcgttctgggagggaagagaagcaagccagcaaaagcatgtgaaaattgattgctgcggtgtctaaactccccatccaacaacaactntaagcatccacgaaattttgtcaattttcaatggaaataagtc

SEQ ID NO: 244490 - DNA, 208 bp, Gossypium hirsutum
agccttcggccaacccgtccgccaacccgtccgttttttttttttcaactcaaaacctcccaggtatattagaaataatggtgttggcacttattactattagtcttactcttcaggcccccctggccggcttttcaagggtttttctttttaaacttaccagggttggcccaaggcttgttcttaagccgtcaaaaatggtgagggt

SEQ ID NO: 244491 - DNA, 286 bp, Gossypium hirsutum
tttttatttgacaccgcaaaagaatcttcgcttttttaatcaaatttcaaccccatcaagttgcctgggaatactgacttccacaatgttaagactgctattaatagcctaaatgaaaacatccctattgtgctagtacaagaaagtggactttcactagcaacagaaaggctaatctctataatatgttgttttaaacctttattcaggagttgctcagacaaacttgaaaagcttatgtcatacatatattgaactcccaaatacttttaacaatggaaaaatt

SEQ ID NO: 244492 - DNA, 404 bp, Gossypium hirsutum
ccggaaactccccgatgaattggaagatcaaagttcatgccttaaggacttgtaagttgtcatgtttctcctttctaagctttttcactgcctgcatttttacactgactgacacagcttataccgtaataacaactccgataatctaaaatgataggcattaggattcagaaatccagcacccaacaaccagtcaacacactggttaagataatattcaaggtaaaataaataaataaatcagcagtgactgactggtaatgctaaagttgtatgtaaaaatgggtagactttggtactgttcttgtttactatcaagtgaaactctactgtatgactatgtatggattttcatcataataacaaagatgtatgaagaaaaataaactagtttgctgatacct

SEQ ID NO: 244493 - DNA, 251 bp, Gossypium hirsutum
acccactccatcatgcaaagttttttatccaaacctttaaaatctccgtggtgcggccttccttaacaatgtcttccattatggctttctctgcttctcccactgctcacctgccttacatcattaactccttagccgatctccgtcgacacagccgccgctcgctatcatgcgctgcccatttcttctactcctcctcctttcgacccgattacttctcccccgctcccaccctgaggatcatagactct

SEQ ID NO: 244494 - DNA, 349 bp, Gossypium hirsutum
cgtccgacttttcattaaaaatattcattaaacggctatttatttacacaaattgagatagagaccgctgtattgatattaatgcaagaccgcatcttcttacaccgacaactgaaatcacatgcccagatatgcacacgaaagcttccatgtccaagacttttgagacttttgacaagcataatgcaagtccacttccatttaaacctattgctgccaaaattatccctctatcaaagaaacctgattttacctactacgactgtttatatcaccatctataacacgctgacctacttatgacaaaatagtctacaaattaattagctcaatatgcatgggctacaca

SEQ ID NO: 244495 - DNA, 410 bp, Gossypium hirsutum
attttattcttttttaaaaaaacgtataaaaaaatgagcacaaatttaataccattcatccttcacccatatttacatatttctaaaatgtttgggctctcatcgattaccgttcaaccccttccaacaccacgattgaaggatgacgcctttggatccccttccaacttcgatctcaacaaagtgaacagagatcaaaggctgaattacaaggtaagacttgccttccctttttctttgttttaaaatgtagatgatgagaataatgagaagaaaatagataaaaatgacaggaaaactaaaaaaaagctaaagaaaatcaccttttcagagactgtttttgaattttttttattcaatatgcgtattgcgtatctattctgtgtgcgtaaaaatatatggatgaaatc

SEQ ID NO: 244496 - DNA, 283 bp, Gossypium hirsutum
caaacatggaaaatgatgtatcatcatcatacttgcaatgcagggttgattttgaagcatcatctaccatccttgaaaatgagtgctttaagaaatatgggaagagtgggaaatctttttattactcgcaagtggcgagtaaggtgaggtggctatctacaacaagctctgcagctgagataacaaatcaaatcggtactggtatcacgtctcctttggagaatatcacaaggaaggaagaaccctctcctcgaacagtgtcagctatgttacatgatgagag

SEQ ID NO: 244497 - DNA, 416 bp, Gossypium hirsutum
aaacggccgggccacgcgtccggggacacatgggtactgatcctaccttattttgtgctggcataggcataggttatggaggaggcccttactgtatcgactgcgacgatgtggatatcatgggcggcagcttttgccgcacctgcaattacggatgcccttacccgcagttcaataacgggtgtggaggtggtatcgcttatatgggttgaactaaacgaacgattaaagaccttaccatgaaacttgatgccaatggtcttttagggaaaaagaaaggccctaaatatacaagctatggcgcccgaatcttcatagatttatttatagattatagaaaaccctggttcttttccaagagagagaaaatttagaatatccccgcggcttgatatatgattgaattacaaagtgct

SEQ ID NO: 244498 - DNA, 410 bp, Gossypium hirsutum
caacacatgataacctggaagcatcactacttgatctttctaggactgggaacattggaggttgtaaagctgctcgaaaagcagctgatggtttgttaaaagagctgtccaaagaattgaaacccttgctgaccttcttgcgatcttctccatcagctgctcaagtattacccaaggtggaggagctggtggctaaggagagagaattacaggaaaaagtaatggtgaagcactctacagtggtggacggctatgagaagaagtcgggggcccgtgatattgagaaccgggtggctttgcagcaacagaaacttacagcactgaggcaagaagttgatgatcttcttgagttcattgatgaaatataatagtaagtgctaaagtaggcataatattttggtccaaaccat

SEQ ID NO: 244499 - DNA, 406 bp, Gossypium hirsutum
aaatattgtcttggttgtttttcgatttttaatttaatcaatcttcactgatatcctcggatcttaaattgctttgagtgtgggctcaaagaatcaaattagtgcgcataatgaaaattttacttaactttcagtagggaagttgattctctttataaactgacaactatgagtattcttgcaaaaaatataatttattcttaaaataaattgccattattttttggcagaattttggtgctcaaaagatatgtgttagtaggttaactcatagttattatttatagagaatcggttttcgagttctgtttgaataaagtcttaattaaataataatattttaatagaaaatacaatgttccaattgaactagagcataagaagcgaccacattcctaattaatat

SEQ ID NO: 244500 - DNA, 189 bp, Gossypium hirsutum
  unsure (1)..(189): unsure at all n locations
cgcactcttctatcttcttaaccaatttattctatcacccacngacagacaacctccccgcctttttatacataatcaaaacccacccccacaaccaacattaaccaaaacaccaaacaatatcaaccctaacttacctccaacccaccaacttcatcaaattctcaaacactacattcttactaaaaa

SEQ ID NO: 244501 - DNA, 257 bp, Gossypium hirsutum
  unsure (1)..(257): unsure at all n locations
cgacccacgcgtccaaatcatacactttctcttacatcatttattacctcatccaacccaccaccgtactctgatgtttttatattaaccaatacccccactacctatcgtttttaaccattaaaatatcactaataatagctattacttacattgcaactacatacccccttaccatatgttcaatacaactattcaaatcttttatcaacaattaaaacaccaccctccatcaantatactaccacaccatcaac

SEQ ID NO: 244502 - DNA, 378 bp, Gossypium hirsutum
cctgagattacatacccaactctatttttttttacactgacaagaaaaggctgggtggtgggccatttttaaaaagccttctcttctcatactctgctgatatttcctaattattatcatcattattattacgagtgaatcattataatatgtgggcttccacggagattattttagtgccaggcttaaatttactctttataaagaaatttctgaacttaaaatcttttacataaagcctaacatatataccattttttttcctattaaagtttcacgatattcccacctttcctctatgttgggtgtaatttgtttcgattttaaatgtctttagactctggttattacttatctattaattgtgtttggtgtttt

SEQ ID NO: 244503 - DNA, 387 bp, Gossypium hirsutum
ggaactctcacttcacaaaaccaacaatcagttcgcaaacgtctggcttctgctacatctgagttgagtgaggatttaccagttcccggggagaccagcacggatgtggttgtacctgctcttaagaaatcaaagggtccagattctggacaagaggctgctgaaggtcaagctgctgcactctcagaaaatgttggttgtccacaagtaacagacgaagcttatgataatgttggtgatgaaactcaaggttcaaatgaggagcttgttgatgttgagaaggaagaggctgacacaatggaggaaaatcttgaaaagtcaaaagaaccccaagtagatggcacgaatgaggttggattgcaggaaaataagaacgatgagatcttg

SEQ ID NO: 244504 - DNA, 418 bp, Gossypium hirsutum
gtttgtgggattgggagcttcgatataatgaaaccatgagacagttgaagggcgagaacgcggcgttgcgccgtgtgtttgccgaagaaaatcgaaaggaaaaggctgaaaactataagctgaggtgtgaacttagacggcgaaccaaggaactcaaagattataaatctcagaatgataacaatatggaacgaagaagctttttgaatgaaattgaagcgccgaaagagaatgtgccttgtcgagatcttattgaactcgagaaaactacgagcgatcagattgctgctctaaaggaacaattggaggaaacatcagaggcattgaaagatatggaaagccgatacagttgtcttacggtgaaacaattcttaactaatcaagaagtgcaagatgctcgaaaagaatcgataaatgg

SEQ ID NO: 244505 - DNA, 342 bp, Gossypium hirsutum
tctcggtcaatattttaaaggaaccttaattctattctttgtgaatagatactttcaatcgatgttctttgtgaaaaaaaaaaaaaaaaaaaaaaaaaaaaaaaaaaaaaaaaaaaaaaaaaaaaaaaaaaaaaaaaaaaaaaaaaaaaatggacttccaaaaaagagctaccggcacactccacaacatgaatcgaaagactgccttatatatggccaacctaaacaaccttcatgagccgcttaattaaaacgagaaggctgctaaaatcagagttggaccgaacaaaaaacccatgtatatcagaatgagtcccaccatgtgatataccattaaacaaa

SEQ ID NO: 244506 - DNA, 199 bp, Gossypium hirsutum
taatcacacatactcttttcctcaaaattctcttatatgccataattgtaaacgcgtaagactctagagatcattcttcaatacctctgtaatattattataggccactatcatactagtgaattcactccgtcgacctatgcacatccaaaacctgaaaatcatcattactgttaaaaaaaatacatcttaaatcaca

SEQ ID NO: 244507 - DNA, 314 bp, Gossypium hirsutum
cccactcatccggccccccctttctatggtttttttttccccaaaagcccacattaaacagaaggagccaaaccatttacacacaagaatgataatcaaatagtctcaacttccattataataaaaaaaaaaagacaagatccttgccggtctaaatataccaatctaagctcaccctacctccgagcatacacgtccactctagttatacctaaaggtaacctaatttccggatgcatacaactatgtgactaaaaactcccttgcatgtctctacttaatagcttagaaccacatactcttttcaccagcta

SEQ ID NO: 244508 - DNA, 349 bp, Gossypium hirsutum
cccacgcgtccgtgcaagttggaggatggtggggcggtgttgcagacatcggtggtggatgggacaagggtcaggggcggccagcagctgattaggctagggttttggtttttttttgttttagggtttgaattgggctgctattgggttttggatttagtgggttttgggctcatctgtttagtaggttttgggctttggttagtttgggtctggggttatttaggtaggttatttgttttgggcccaaaattggacttgtacaccgtttttttcaaaaaaaaaaaaaacggttacgacaaaaagcaccttaaaaatttaagtgacgaaattataaaaatttcatttt

SEQ ID NO: 244509 - DNA, 248 bp, Gossypium hirsutum
tcggccctggaggagcttgataagagaataggcttttctaaaacatcagcttgaactctaaagctatgtatgagatgatctgacagtgtgtgtattcatgccatattttatgtgtggtatccaaatgtacccacaagataatcatcagtcaatgacgagattaattatttccatttagatcattgtattcaaaccaaggcaaacaatgtagctagtaatggaagcacgatcatttatatcgttggccc

SEQ ID NO: 244510 - DNA, 376 bp, Gossypium hirsutum
gctttgcaacactcgttgaagcgaaggattaaaaaaattcgacaaagacttatggctctgaaatttgaaatttctgaacctcctgctgctcctgaaaatactggtattggatataggactgcagtgggaactgctagagcgaaaattgggaggtggcttcaggaacttcagaaacttcgacaagcaagaaaagaaggagcctcaagtatagggttaattactgcagaaatgatcaaggtataccaatttttagaccaccattcaaagatattatgatcttaacatctactacggttgtgatttatcaacatgggatgtcttctttaaggatattatgagttttaatggaatttatatgaaccctttagtggtagca

SEQ ID NO: 244511 - DNA, 390 bp, Gossypium hirsutum
cccacgcgtccgcccacgcgtgcgattggtgtgttaacaaggcaatgagaccttggtctgtcaaaagcaatttttgcaggcatcgatagtgatatgttaaaggctggaaaagttgtgttctcggtggccgattagaaaggtaatgaattggcatcttccgtggcgattgctggctttaatagggagaaaatgtttaaagcttggtggtgtgtttttgtattgttgctctgatgacgtagtattgttggtagacggtttaattttgtctgctgttttttctgattctctgctgctgatcttttttgtctttgacaacagttcagttcgactgtagcaaaaaaaagtaatatgtgaatttgtaaaaaaaaaggcttctaatataataattat

SEQ ID NO: 244512 - DNA, 243 bp, Gossypium hirsutum
agagattagatgaattgcctacgagaagagtgtggccagcaagaaagtctattgcattaggagaacccgtggaaggacccctaattgacttcaattctgagtccaaggtcgatagagttcacttgcatgaagataaaaacgacgatgaagatgaagaatatggtttccaggctcttcgaagagctgtgacggaatattggggcacaatgaaggaatattataaagccgcttttgatgctttcg

SEQ ID NO: 244513 - DNA, 130 bp, Gossypium hirsutum
caacattaatgttaataatgttgggaatataatggaggaaggtttcactaatcttcttcttaatgattccatcgaccggagtttatcggatagcggcaaagaatctgacgaaaacatcggaggcagcggg

SEQ ID NO: 244514 - DNA, 304 bp, Gossypium hirsutum
  unsure (1)..(304): unsure at all n locations
ccagcgtncggtttcttttttttctagataggacaaaaggaaaaaaaaaaaacccacgacccatcaagtgttcaataatggtgattgctgtggattcatctgcaacgaaaatggcagctactataacaatgggttttggaagctcgtatgaagcgtggagtaaccgtataaggaaccggtgactgaggcggtggcgacaggtgtgatattggcgggttcggctcaatctctatttttcttttttggccccataatgttgggaaaaagcaaccagtaggttggggttttaattaatttacttttt

SEQ ID NO: 244515 - DNA, 372 bp, Gossypium hirsutum
cccacgcgtccgcggacgcgtgggaaactgcaatgcaaatcaatgtgaaaaagaaagttgagtacacatcagttaattagagaagaccccatctcattacaaaacctatggtaagatcttaattttgttataattagctttgtcttccgtttgatgcaattttgattgatgagtgctgggccgcgcaagcgtcatgtagatttaagtatgataaatgttgacgatctcatttatattgtgacgtgggatttgaatttgtggtatttacactttccatttcaatctcatttatttaatgaccaaaaatatcaatttagttattgtttctatactcggtatatagaggcagtccattcatgacaggtgtacaat

SEQ ID NO: 244516 - DNA, 418 bp, Gossypium hirsutum
ggccacaagaatcctccaacttctgcatctcaccatggtattcaacccttaattagcccgccaccaccatctcgagtgatggcgcctccaagcattggtacccccgcattttaccgtcaactcgttccacaatacggactaccttactcggcttacgggtatccgggttacacacacaacagttatccattgaactattacaatgtatatggagggcaacatttggcatcccaatacacaactggagtctacttaacttacttcccactctatccccagtatcccaaataccgagcattggcaccctctccagttgctgccgcaccagcaagagcggaagaagttaaagctatagtaggagctgcttcctctgcacaaagttcagcactgtaattatgccaatggaacgtaaacagac

SEQ ID NO: 244517 - DNA, 269 bp, Gossypium hirsutum
cccacgcgtccgaaaaaaaataaaaaaaaaaatatataaaaaaaaaaaaaaaaaaataaaaaaaaagggaattgttagagtaaaaaaagtgggggggcggtggatctatgcgttgtatgcgcaaattatgtgacattgtattgattatttttttgatctgtttgatggtactttgttttaccactctcttgttaagtgtgttaggtttgaaatgtatgcgggttaacttgtggtaattccgtttttggcttttgagttttttttgattt

SEQ ID NO: 244518 - DNA, 332 bp, Gossypium hirsutum
cggctttatagccgatttgttacaacatttatttgctatcttttcttcgtgcaggtgattggagcaagttgaggagtaggtggctgacaagggcggtggaacaggcatggtgcgatgggacagggggcagaggcggctcctagggtttctgttctctgtttaggttatgggctataattgggcttaaggttttttagtttgggcccaaaattgggctgtacaaaccctacttagtaaaccgaaagaagaaccaaaaaggatccaagtgacaacgattaaattgagcaattagaggccgaagttgaagaaagaggcaaaaggggaagggaccc

SEQ ID NO: 244519 - DNA, 362 bp, Gossypium hirsutum
  unsure (1)..(362): unsure at all n locations
gaacaagcggagcttgtgaaacatttgggaacttatgtttggcgcataaccaagactttgaaccaaagaacatcgagctttggggattcacacatgcatcaaagcactttcaaaactgaaagcaagtgaaacgagacttaaaagcttatttattttcatctgaaatgttaaaaaacgtatggtttaggaggtattgaagctgccattctttattctttaacttgtaccatccatgatttaatgaccttgccctgcattttgcggcttaaattgtattatagcaaattgcttgtaagttaaaaaattatgtgctttctttaaaaaaaaaaaaannaaaaaaaaaaaattttaaatatttatta

SEQ ID NO: 244520 - DNA, 397 bp, Gossypium hirsutum
  unsure (1)..(397): unsure at all n locations
cccacgcgtccgcccacgcgtccgggaatttggtggttgctaaggaataccattgaattattcaatttatgccacttaattgcctgatttaatgtgatgtanatgcttaattacgagttagacattaactgtgtttggtaattgataaagcaggtaagttgttggaagtgggatgttggatgcttggcagtcttggagggggctcaggattccgatggtgtcaatgaatataaaaagaaattggtagtgtggaggtgaacaatactttttccgggtaaaaacatgcattctcatctcatctgcggttttagggttaagattgtgtcataatacaatgggaggggaagggcctaagcctggtgaatgctcgtttcatatcctcaaaaaagccgacgag

SEQ ID NO: 244521 - DNA, 216 bp, Gossypium hirsutum
  unsure (1)..(216): unsure at all n locations
cccacgcgnccggnnnnncaaagcataaaaacctaannncnaacagagcagcngcaacgatcaggacccanggcggcaccgaacggggcaagggcannaaacgaagccccaacacaaannccnaccgngaagggaaacacagaaggcgaggccccnaaaacgacgagaagaagcccaacggaacccgaaaacgggccccagagcagggagcccacc

SEQ ID NO: 244522 - DNA, 407 bp, Gossypium hirsutum
cccacgcgtccggtagcagcggccactgctgcccctactactgctcatggaatcgaagtagccgtggagtttaaaccggtagaacatccaattgaacctttggacaacgaccagccgattcaatgcccattgcctgagccttcaattctaaatgacggaagaatatggaaggagcgtgtatcagctagcgtacggaggagagccgacttgccggttatgcaagatggaggcacccttcaatctcaatccgaatccgaagctactgtcggaaccaaacctcggccgacctcaaatcgtatgatcttaccgtctctaagtgctccggaacataatttactaaagctccttgaagagtgtactgcatctatgatctaaaagcatgctgctacaatgctacttcaacttta

SEQ ID NO: 244523 - DNA, 338 bp, Gossypium hirsutum
cccacgcgtccgcccacgcgtccggtgggtgagttcataaaccctaaataactgctacagttgatcaagattttgttcatgattactgattttcactaggctttttcccaagctatctgtggttaaataaattctttctagggaaaatgctaaccactgcctgtgtattaaatgaaaaaaagaatggtaactcgtaaaattattattgattaaataatccgtaatgtctataggcaaaaatgttggctcaaaaaaaaaaaaaataaaaaaaaaaaaatataaattaaaaaaaaaaaaatatatttttaattttaataaaaaatatttaattttatttt

SEQ ID NO: 244524 - DNA, 366 bp, Gossypium hirsutum
gggaaagtcagtcagaacttgaagaagaggctgttgaatgcatcagagaattcaacagcctcatcgtctagggaaagtcagtcagaacttgaagaagagcagtttcttttaatcgggttcttgatattgaaaaaggaagcattagaaaagcaggagtgagtctaaacctttgcatcaacagccagacaggttcctgatatctaatgtaccatactatcacagatatcgcttttaaatatgtatatgggtcaaaatcaaaattatggagcccctaagattgtttttggtaccacaaaatgagaaaccatttgttggctccccacttacctgttcataccatggtgatacaacttcttcgggaattgt

SEQ ID NO: 244525 - DNA, 369 bp, Gossypium hirsutum
  unsure (1)..(369): unsure at all n locations
acgggacgcgtgggatcaaattgntctattccattatctaccaagcatggaccaggcgggttacgttcatttgtatttgagcgtgaagacaacaatagcagcacaaccttgatagcagaaagttcttccgatgtgatccaaaaggagaaccgaccaaagaaaaatgctccatcagccaagtttagcaattcacagatcaaatcaagttcacaaccaagaaaagatgagatggaaacaagttctggagctcaattattggaaatattaaggcgttcctcctcagcgcaaacaagtgagtgcactggtaagagatgtattgtaggccaaactgaatccatatttgttgcattcaagcttggaaaagaaatc

SEQ ID NO: 244526 - DNA, 161 bp, Gossypium hirsutum
cttttctttatgttcattaagactggtggaaaaacatagggaatgagctgtgttaggaggattgtctactctggtgttatagatttaattgcaatgatgtgctgatatgtagatcattgaaggattcttcttttgcttttaacatagtaatgtttaattcc

SEQ ID NO: 244527 - DNA, 398 bp, Gossypium hirsutum
gtttaagttaagactaaaacatgatgttgtttgttccttgtgacagggatctagaaaagattggtgttggaaggggatgggttcgcagatttggtcgaggacgtggacatgaacatgaacatgaacgagatggaccaattggtaagaaattaactgcagaagatcttgatgctgatttggacaagtaccatttagaagctacaagaattaaatgatgatattttgcttgttccattactcttggtttttgaggggaaaaacacagaagaggttatttcaattgttgggttactctagtttttgaggggaaaaaagaagaggtatatggttggaaaatggtcactgacattaagaaggttcaaagtgcagattctctcgtggtttttattttcctcgat

SEQ ID NO: 244528 - DNA, 240 bp, Gossypium hirsutum
cttttagtaggataaaagggcatttccattcgaatctttaccaacaatacctgaaacgggccgatggtagagttttttttatatgcgccgacaaagcttatgcttgagaaactccctctgtggcccaaagcgcgcaatatcaaaatgcgtcatcgactaacgtagagctgttcacaccgtctaaacattcccgaaggacatgagtcaataaaagaactctctgaccacataaaggaccac

SEQ ID NO: 244529 - DNA, 165 bp, Gossypium hirsutum
cccacgcgtccgacacttttgcattactattcgacccggccagacaccccagcggagggtaaactcaaagatggggggctcaaacacaccaaaaaatccaacaccattccatagcataagaaataaccaaacaaatttactctacattactacacaaatactact

SEQ ID NO: 244530 - DNA, 236 bp, Gossypium hirsutum
  unsure (1)..(236): unsure at all n locations
cggacgcgtgggcttggaataaaaaataaaatttaaaaaaaaaaaaaaaaaaaaaaaaaggaaggggaaaaaaaaaaaaaggggtggggaaaaaaaaaaagggggggccgctaaaaaggacccaagcaaacnaacccgngcaggcaacatctcaccttctgctatattgttcccaaaatacaagacaagggccgtcgaataacaacatcatttctgggaaaccccgggcggaaccc

SEQ ID NO: 244531 - DNA, 283 bp, Gossypium hirsutum
cccacgcgtccgggacaaggaggtgcaggcggtggtggtggaagcggcagcactagtgttaccagtggaggtgttggaagtggtactaccggtgcaaatggaaaatttagtcatagtggcaaatttagtgtttttcataatagtgaaactaaatcatctcgtaagagtgaacacaaagctacttttgaaggaaattttggaggaaaaggaaatgttgatggaagtggcaggtctgtaaatggtgctcatagtagcacaaaaactagtgctggcaaagctagtg

SEQ ID NO: 244532 - DNA, 307 bp, Gossypium hirsutum
ttcaatgaggaggacatttgacatgccagatagtgtcatccagaaggaaatcgccgagggggtggcagaggtggttcgaatgtttgaaagtgatgcggacactgtttgatgcactcttgtaaaaatgttgtgtaatatgacaaaatcaccctttatgggtgctttgcgagtcagatgtttggaagatgcagattagtttatgatgtgtggacctgatctctcgttttattttctgtggcacttgtgtaattgtgttttgcacgaacatattgggacttatttgaagatggtggtacttgttttatgc

SEQ ID NO: 244533 - DNA, 323 bp, Gossypium hirsutum
gcagtgggtaatgtggaagttattgcatatacaaaccagctgctggcttctgtttctaagttacagttgaggcataagttaaaaaaccgagcaccacaatctgcaatgcatcgtccggaggctgtcattgtttcatacaccgttgatgggcttctgtttctaagttacagttgaggcataagttaaaaaaccgagcaccacaatctgcaatgcatcgtccggaggctgtcattgttccagacaccgttgatggctgattccaacttgtaagagtttacctttttttttttttgggcttgtatctacttttttgactatgaaaa

SEQ ID NO: 244534 - DNA, 281 bp, Gossypium hirsutum
cccacgcgtgcggtttgcttaaaaagataaaagggctcattagggatattacaaatgagataccatatggcaccagaagttacactctacataaccgcacacatagattgagacggtcgatggcaacaatctcagaagaagatcatccaagagtacataaactggatctccgccgtagatgccaacacgcccttctgctgccggctggtggaagaccgcacaactatatacggaccaaactggcaccaacatgtcccatactgagcatttaggggctgaga

SEQ ID NO: 244535 - DNA, 282 bp, Gossypium hirsutum
acctggtgccggacttttgtttatggttgcagatgggatgtgggataatatagtgaagacacttttggtgggagaaaagtagtcttcagttcatttatggattttgccgtttgtcccattatcccccattacaaccgaacttgatgcctgcaatatttagatgagaaatgctggggttgtagtcattgagttttaaagaggagggcttattcaatagttgagatcttaaacaattggtagttacccttcaatatatttgtgtttagcatgcttgctgatggt

SEQ ID NO: 244536 - DNA, 285 bp, Gossypium hirsutum
ggggttctctgcttgggtttcgaccctagcaccttcatgccgccaccgtcgtgcccaccgtgaggccaccgcgaatggcgctcgaaaccaggaattaccttccttgttggtgccgggccaccttccccacatatgtggccacctttgggccgttactgcggcaccagtttgctgctactgcttagggtttctgctgtgttgtgtttttgctgagggccacactgtagttaggctaggctttaggttagtgggctaggtattggatcatttgggtttaggttattt

SEQ ID NO: 244537 - DNA, 287 bp, Gossypium hirsutum
ggcgcagataagagtgataggttcgtacggagcgagggcaaggcaggatctaccaaagttggtaaaactagcagaaacaggaatcttcaatctaaacaatgctgtttctcgaaaatacaagtttgaagagggaaataaagcatttcaggatcttaaccagggaagaattgtcagccgaggtgtcattgagataatgtaagttgcttctcctttttctcaataataatacaactttgacacatgcaattcagcaaaatcaaagtaatattgggatattatggagttgt

SEQ ID NO: 244538 - DNA, 312 bp, Gossypium hirsutum
aggctgggcaaatccctcacaatctccggtcgcttcgaaagtggtgttccttcttgtcggtgccggtccgttctcttcagttttaacctatacttttctgcatctcccaggtttgtcccgagtggggcaagaaacgactcgaaccaaatagaaagagttaatggattgcccagaaagtcgggacatggagaacataaaatcgtaacattgacactgcatatacacttagaaggattttcgagcaacatcgacaagacaagcagaccgtgaccaaggtcacgacattggaagctaaagtcgcaacattcaaca

SEQ ID NO: 244539 - DNA, 286 bp, Gossypium hirsutum
gtttatcttggtaaacttaattttgcagctgctactggattttttgagcttctctgcttctagcttttcatctatagtcagatactcagttgtgactgataaggtctcaatggaggttgttgaagaattcattctagaacagttgaatctgacaaaagtcacaatatctgaaattaagcacattcatttgataggataatttggaaaccctgttgcaagaggacattcaggctgatctagtctgttgcagcatttgcagttaagatttgaaactgaagacaaagca

SEQ ID NO: 244540 - DNA, 283 bp, Gossypium hirsutum
gggagaagtaggaacttcgcatttgtcacaatggcttctggtgaggaagctcaggctgctatcgataaactcgattttcttgtaagtttctctttttcttcattttaaatttatttactcttttgcttggtctgtttgaataaagggtattttgtttcctatctttttttacacactttgattgttagattggactaaatgattgttatttttaatgatattcaattatgtcctgtgaattagctagcctctgtttttcttttaattgagagagatacatttg

SEQ ID NO: 244541 - DNA, 325 bp, Gossypium hirsutum
aagagatcccacgtatcaagatctaatgaagaggctttttttgtcgaggcaaagaaaattgttcaagaagaataaatttgacgttgacaggttgaaggagttacaaaacaagtgcaaaacatctctggatgcctctgcatctatccggaatcgtgtaggattggaagtagaactagatgatgccttacacaaggagtaggctttatccccaccttcactttggttgctttcttgttcttattattaattgtcttgataaccatttctaacctaaatcaaagcttaaaacttttcctcatttatccatttctttatttctttcttc

SEQ ID NO: 244542 - DNA, 302 bp, Gossypium hirsutum
  unsure (1)..(302): unsure at all n locations
gattctttgggctgtcttggaagaaatgaggtttgattcaacttggattggatggatcatggagtgtgagcagtgtttcttacacttcgctaatcaaatggtaaaccaagtagaagaatcagtccctctagaggtttgagataaaggcacctcttgtctncctatctttttcttttgttgtcgatgttttatctaggttaatatctaaagaagtggagtctaggtcggcccatgggatcagtcttagcaagtcgtgtccaattgtttcacaccttttatttgcagatgattcactactattc

SEQ ID NO: 244543 - DNA, 316 bp, Gossypium hirsutum
aggcgacgaggcaaaacgatgttaaagctattgttcttacggcaagggaggaaggttttccggtggttttgatatcaatgttttcacgaaagttcatggaactgatattgaaggtgcagcagaggatcaatctcttcaagctggaaaagccaaggcttagcacttcttcaagtgaagcgttatttaatgttgcattccatggtcattcatcttagtcagaacttgaattgtgttatggaaatagggttttgtagctacgttgtgtaccagcttctttaaccatgatggttaattattacgagttttgtagcttctt

SEQ ID NO: 244544 - DNA, 287 bp, Gossypium hirsutum
gtgcttcatgtgttatgttttcttgctcttaaaacaagggagcttttggaagtgaaaggtgctaaaaacaaaccataatcatacaaaaagagttgattctaggatccacacggcctgtgcctttccacaccggctggacactcacccatgttccaacctatgtcagttttgcaccttacttttaaaacaggcagaaaaacacactttttagactttttgagcattctaaagcctataaatactaattagaagaagaaataagggggccaccagagaatatcgaagaa

SEQ ID NO: 244545 - DNA, 284 bp, Gossypium hirsutum
ggaacgtaaaagtacttgatttggaatatgattcatttaattaaatctttaagatgggctgcaggttgctttgtttatcgaaaagtataactcccaactggggctactgatggagttttagcatgttcagctacaaactttcctcacttttttggtcggtttcggtcatcgttgtcatcactcttaaaccttcttgttgattaggttacagttggtttcactttctgataattttcactcaaatcatgtcatgttttttagcgttgcaatatgtttgtcactgt

SEQ ID NO: 244546 - DNA, 280 bp, Gossypium hirsutum
tgtatatatagtgcttgcctgcgattaggaaagctacatgtagccctgagaatgagcgacaaacggcggtggaagaagcttgtgagtgtcttgttccagtaaaaatttagcaacttcagttgctttttgttttcctcttttacccatatgttcttcaattgcattcttcaggcttttctgatgtctgttaccttcttctcccctttccccttccccttccccttcccttttcccttccgcttgggttgcaaatcattttggtcaaggacttcttccggtt

SEQ ID NO: 244547 - DNA, 288 bp, Gossypium hirsutum
gtcaaaaccctcatatttgatatgctccaagctgctcgagctcaagtcaactgatcacactgctaaaagtgacccaagtggatattgggttacagtttcttcaaacttctccagaatatggaccaacatatatttccagaattcatccaataaaaatacaattacagaagacaagcagctgggataattcagctttctgcatcttatacctcggaaactttcatttcaagttattactattacagtctatgatgccatttgaaagttgaaactaagggacgtgaaact

SEQ ID NO: 244548 - DNA, 283 bp, Gossypium hirsutum
cttatgcaattgcttgttctcacgagagggggcagatgttcatggttcctgcgattgaagtgtataaagggcacatagtcgacatctatcaccgccctgaggactcatgccttaatcactgcaagaaataggctgcaaccaaagggcgctccaatataagaacaacacagcggttcttgatacaccatatgcactatagtctggaccaccgcattgactatatccaataagatcagtgggaggaggctactccctcaagcatcagaatgtgcaaacatccaaa

SEQ ID NO: 244549 - DNA, 284 bp, Gossypium hirsutum
ataaaaggggtccataatcaaagaacccagaaccaggaaaccaaggaaacgatgagaaaaagagcaaaaagggattgcgactattagctcgagttaaaccatctgagattttcttgaaatctataaccaaggatgttaccaatgttcagattacatacccttgcaggttctttttcctgttccttactaatgcaacatattctgttttttatatgattaattttttcgaaaacactgtcatggctatgcaaaccggagtaggtttgtcgaagatcttgatctta

SEQ ID NO: 244550 - DNA, 255 bp, Gossypium hirsutum
aaggctacgacttttttcttgggaatttgcgtggtcgaggctctagggggcatgtggataaaaatatcccctcacggaagtcactcaatatatgctttcactatcaatatgctttaattcattttctcagacattaaaaccggaaattaaaacacactattttgactcagatattgctggttcacagcaaatgagctcgggacaaaagatgttcacggctttgaagctatagattaacttttagaaattaggaaa

SEQ ID NO: 244551 - DNA, 288 bp, Gossypium hirsutum
aaaagagttgaaatgggaggggttgcttggactgaagaagaagattatttgctcaagaaatgtatagagcggtatggagaagggaagtggcatcgaatacctgttttggctggtaaatttattttatcttctttttttttttttttctaagtttacatattttgtttaagcttttagtggaaattaaaggattagttttgaatagaagatcatctaaagcgtgaatattatttagatatgcctatgaagagagacagaaagtaaagaaatgccttagctttctatctt

SEQ ID NO: 244552 - DNA, 285 bp, Gossypium hirsutum
gtgaatctcctccaataatgactgattgccatccccgagccactccgattcggactgctctccaacaagccactgcttcaatggcgaatgaatgcagagcaaaataaacgacttcggcaaggattgagttgtccaaaaacccagggcactctcggaaaatatggtcaatgtttcggctcgtgcttcacatcgagggcatgttgtgatgtttaaaagctttctgtgctgcatattcacttttgtggatgaggaaatcttcatgaggcgttcgtgccagagggatcc

SEQ ID NO: 244553 - DNA, 158 bp, Gossypium hirsutum
tcccactcgtcctctttttaaatgccccgataaataggagggaacttcaaaatttttataacccaaatcgccatcccttaactatcttactatattctcaaaatctatatactactatcatatatttaatacattaactaatacccacttcctataat

SEQ ID NO: 244554 - DNA, 304 bp, Gossypium hirsutum
  unsure (1)..(304): unsure at all n locations
ggataccgatatttgttgtcggagagtcaggtcctgataattaagtccagatatgcgttgaacacagataattggagagtcggagtaatgcccgataacatgtttattttacaagtgaattgctggcctcgtgtccaatgtttggggaaaaaaactattctaaccatttgataggctgtagaatatccagtataatattctgcatattgtacagatgacgctgacaaaagatattattntagcaatttacatatgagaaaaataattcctatttttcataaaaaatatttggataactttcaat

SEQ ID NO: 244555 - DNA, 281 bp, Gossypium hirsutum
cccacgcgtccgccaaggccaacttacttcgagatttcatcggcttcacctccagaaaaaacataataaaaccaccttaggttcttcataaattttggtaaataatgtgtctcatggtttgttgagctatatatagcatgaaatgggtgttattaatgtgtaaaaaacttggtttagatcacaaagctagcacttattatttgcttgggttgtattctcatactatgatatcaaacaagttgttggttttgtaaaaatacatgtatattgaagttgattgt

SEQ ID NO: 244556 - DNA, 413 bp, Gossypium hirsutum
gttattttgcaggtgatgggacgatgggatgaggttaggtggtggcagtaggtacaaaggctgagacatatggctaggttttttttttctgattttgtttgggctagggttagtttggtttaggttgaaattgggttgggcaatttgggcattctacatatattatccatttaatttcaataatatgttaaaaaatatttgggtaaattacaccattagtcactattatggtaagttttcgttttgatcacttaactaaaaaagttacaatttggtcactaaactattcaaatatttttatttgagtcgctgaactatttaattttttttaagtcactaagttgttatttaaaaaaaagtttcattagtgaactccaagtgacaattcgacaattagtatggtggatcagcac

SEQ ID NO: 244557 - DNA, 354 bp, Gossypium hirsutum
cccacgcgtccgcccacgcgtccgcccactcgtccgcccacgcgtccgcataacctggggagaaaatggtggcagttattccttaaaaaaaaaaaaaaaaatgccaagaaggctgctgggggagatggcgatgatgaggaagatgagtaaacgttaaggccattaccctgcaactaggaacccttgaaagcatatgtttgaaactttgccatcacctccattgttagacatgggtcgagttctgcttccagatctctactgcaccggatattggtatatgtgttgcattgagcaatctgtgttattatatccctgatttaaagctatttaagtaattatgctggtttaaaccaa

SEQ ID NO: 244558 - DNA, 322 bp, Gossypium hirsutum
  unsure (1)..(322): unsure at all n locations
acgagatcaaagcgaaaaaatggggctgccctgtttgtcgtgccaagatcgagcaggttataaagctatatcgtgtttgattgaattttgcatctgaaatttgtataagctgtaaatgattttcagtgatttctgcgcgttgaagaagtttatttctctttatttgagcattggcgctgttagtttttgtaaaatatttaacatatatcttttaaagaaaatacatttaatatatagttgcaataaaagagtttgtattttcctaanaaaaaaaaaaaaaaaaaaaaaaaaaaaaaaaaaaaaaaaaaaaaagggcggncgg

SEQ ID NO: 244559 - DNA, 419 bp, Gossypium hirsutum
ggtaaagtccaagacttggatctcttgagtgcaaggtattgtctttctcctgaaactgggaccactgttgatttgcttcaactttcaacacacctccaaagagtggagcaacagaggaactccatgcaagtaaagcaggaaaatgaggatctgttttatttcctttccacttaattggtacaagagggagaaaggctttcagggagagttgcaaaagtgctgcattaaactcttttttttataacctcattggtgcattttcacaatacgctgttaggagactcgataccattggtagtacatctcgttttccggtcagtacataacagagcgaattctggaactgtacattggtgcaatttcagtaggatttgttccttttctagaactcttgttctctggtgatattatgtagttaa

SEQ ID NO: 244560 - DNA, 372 bp, Gossypium hirsutum
cccacgcgtccgcccacgcgtccgcaatttcttccaaatcaaaaggtgcatctttggttgcaatttggaatcctgaatggaatttatggtttcgcacttttatgctgcatttctttaattatacataatcctagaaaataggggaaaaggttgaatttgcgttctatggataaatctttcccctgaaatatgccaacctaattttatcatatcaggtaatttctcttaaatctgaactctgatattagaatgcttgcattatttacgttaatacttgatgtgagagggagatgagtacaaatacatacaagtgtcgatcgaagtgataagtagtaatcgcgtcgcttagcatgcttatatttcttctctttt

SEQ ID NO: 244561 - DNA, 262 bp, Gossypium hirsutum
  unsure (1)..(262): unsure at all n locations
cgcgtccggtctaaatcgcgatcnacccttcttagtttttttttcttaaaagaaaaacaangtgagtgctgcgtttataaaacaaccagtcctcccccgcagaaacaatactttaagcatttatactaaagctaaccacaaaacaactaccaccgacaacaaacagattacaaaacgccctcccgataataagaatcaatgctattcctcccatccatgcaaccaacatcttctaatacaatgttaccaaaacacaaattaa

SEQ ID NO: 244562 - DNA, 238 bp, Gossypium hirsutum
cgccttcactggtttttgccggaatctgacccgtataccgtgtggatcgtgtcgacgcaggtactgcttcccaaattgctccaagcccggagatggttcaaatggctcaaatggtttgtggctctggccgccaattgttttcatatcctgaaggaactcggcaggctaaatgttcaagttgtgaaacagccaactttgcacttggaagaatggggatgattctatagattgacactgg

SEQ ID NO: 244563 - DNA, 354 bp, Gossypium hirsutum
cccacgcgtccgcttgaggaagaacataccaaacattgagaaagctgttaggaagatggagtcacataccatgtgagagcatcatccgtagacggacactgaaatgccggatttcaaatatgtaattttgaaacttaacctcagcatctatggtggctatgcacacacttgccacttccccttcccctttcaaaagactatatcactgtttcgatactgtaatgcttttgaatcccgttttggaatactgtggcagatctagcctgtcggaattcatgtgaattgtgtaatcgatgctgatacttatctagaatgtatgtgatatgctttggcaagaaagtttatattcataat

SEQ ID NO: 244564 - DNA, 283 bp, Gossypium hirsutum
cccacgcgtccgcccacgcgtccggtcactttgttcatactttccttttttctttttcaggttgaggaaatttatattcttttgttccactttcccttaaacagtgtgacctattttatagtatctatttttaattaataaattgttgagcttaagctccaacttctaggagaaaaaaaaaaaaatgaactattgccgaacaaaagtaatataacgcaatgaaaaaattaaccgctctacagaaaggccatcataacaatgaccatggataaaaacaaaaatc

SEQ ID NO: 244565 - DNA, 277 bp, Gossypium hirsutum
gccaaacctacactcacccattcatattcctaatgatactaatgacccaccaacagcgagggagcccaaatcaagcttgcggatcgtcaacaggatcaccactctatctacattctcggtcatacaacgtttcaaaaattaacttaccgcatgtatatactgcttaagatcaaaaaacgactacttgagtacaatatatacagttgatacccatacgaatatagcatatatcattatagtcgaactagattcacatatcatgcttaaaaacataaaa

SEQ ID NO: 244566 - DNA, 345 bp, Gossypium hirsutum
  unsure (1)..(345): unsure at all n locations
ggccgaccgaggcgtccgaggatgttagcacaaattttatctaanttttttttataaacccacaaaaccccaccagggttgctttcctaaaaacaccaccccgcctaagctacaaagcaaaacgtatccatatcacccataggatttgctgcatcacaaaaacaagctatgtgtattctaaccattttgactatactatatcatattattgatattcaagttacattacataactcattttgagataatgaagttgaattacgcttttgtattgccaaagagaaaacaaaatctgaactttattatgtcaccaacaaaaaagaagtttatcaaaaaaacaaacaa

SEQ ID NO: 244567 - DNA, 394 bp, Gossypium hirsutum
tgctatgagaaaaaggtccgatacgagagcagaaagaaacttgcggagcagcgaccgagagtaaaaggccaatttgttcgtcaaacacaggtcgatcatcctacgcagatacaagcagagtgtcattatcacaattcacccgatggctagttacaacatatagaagtgcatggattgaagtttaccatggatctttagaattggttgcacttgcaatttcagccaaacactaaagattcttctgttcatatctacactcaaaatcatattagtagttattaacacagtaggttactatgtacttgtaaaaatcacattttgagcttagagtttacccttaacagagtttgcttccctggttttcattaggtttctctggggcattctctatttg

SEQ ID NO: 244568 - DNA, 337 bp, Gossypium hirsutum
  unsure (1)..(337): unsure at all n locations
gtctacaaacatttctattgctgggtttaatggatgaaaactgtgcattagatcaacatggttgaccttgtaaatcctctgattgaagctatacttctttccatgatgagtatcctctttttaagctattgctacacaaatggcaagtcaaatgaagtcatggttcatttnaaaaaaaaaaaaaaaatgattaaaaaaaataaaaataaaaaaaaaatttttttttgggccgccccctaaaaaaaaacccaaactttatctcccggggggggcggcctgtaaaggtttcttatattgaaaccccatattgtgattttcttgggccgcttttttttaa

SEQ ID NO: 244569 - DNA, 253 bp, Gossypium hirsutum
  unsure (1)..(253): unsure at all n locations
cccaaccattanaaaaattatacacagacttattttttcaaatctgccaccaacaactgagggggtttctttattgtgtacccaatttccacaatacaaacatttcctttgatccaatatgaaccttttataataaacaaattgctactcatcaatatactaacaagactctatgttatctacaccaattactataatatacaaccattaaaagcaccttcaccaaaaactctcctcatataattctttttct

SEQ ID NO: 244570 - DNA, 398 bp, Gossypium hirsutum
ctttaattaatctgtgttttcattacttataccactaattgtcagatatgcatactcggaagatgtgggggaggaattcgatgatgaagaagctcaatctctaactagggggcaatcgaacggcgatgtgagtttagtcaagcaggagcaaaagaatggaaatgctggtatctccgatgaggaagatgaatctgaagaggataaaagggagtaaaatccatcgccggaacatgttttctatcaaaccaacttttgagcggatcccacgtgaagataagcgtgttatcctcagagcaatggtttttcgaatctgataacttaatattttgacttatgtctatgttttctgctggaggtaagagagaactagtagtttacatcatattttgtccatattt

SEQ ID NO: 244571 - DNA, 369 bp, Gossypium hirsutum
  unsure (1)..(369): unsure at all n locations
gacccacgcgtcctcttacccatttaaatacctattatcacgcttcttttttcaaatattctcccatcatctgagtgggttttttataatattacccagcccatacaacatangaaaaagcatatgacccaccttacatccattaaacactctttatgaatactacacaccaacaaactaactcttttcaatactctctacataaaaatcccacaaaaataatccttttttaattccaacacaaaacacaaatcataatttaaatcatttttaatggataaaaataaaaaaatctagctacctaactatatcttcttgaataccaacttgataaaacatcccttactcattcaaattttaactaccaac

SEQ ID NO: 244572 - DNA, 229 bp, Gossypium hirsutum
cctatttttacttagaataatttgcaaattttttatcatccccgacatccggacccggggcaggattttttaaacggaggcttacaacacactccgttacacgttcttaaaattaacccctgacttgccaacaaccagtgggtttgcgttgttccacacgtgctacaacttgtcttcaaaaaccactgttatggtccccacggttgcgttttattttaacagcggactg

SEQ ID NO: 244573 - DNA, 386 bp, Gossypium hirsutum
  unsure (1)..(386): unsure at all n locations
cccacgcgtccggggagaatggtcgcaatctagctcgcttaagagagtcaaaatttgtgggtatttcgatgcgaaaggaatggcgaattcnaatcaccactcaacatcattgtacggttcaggtgcgatgaacatgcaacgaaacccagaagaggaggaggaggacgttcccggcggaggcggcggaggaggtgaagagtcggtggataaccctcagattggataccaagaaagcggcggcggggttgttacggttatgaataatggcatggaagaagcttctcacgccaatctttatggtcaaggatccgatttaaccgccgttcagggtaattcaagtgctgatcagctcaccctctcgtttcaaggggaagtttacgtctttg

SEQ ID NO: 244574 - DNA, 360 bp, Gossypium hirsutum
cccacgcgtccgctgctttggaggactttttaggtgcctcctattttgtgccttgggaggggttgttaatgaggctttttagggccttcaattatgcataaggcttcaggagacattttctatgggaagatattcagatccggttgccatggataattccatgaatgttccaaagtagatgtcagatggagcagagagcgggttatgatcacaactgagtaacagataatccgaatatgcagagttatcaaggtaactgctacgagccttgtagcattattttgagtatgaaatttgtagactgggtggaccttctacgatttcatttcagcttccaccattcacctggcatatttgatt

SEQ ID NO: 244575 - DNA, 223 bp, Gossypium hirsutum
gttatatgtatatttggcttgggttattcagatttaatccaattctttttgttcgtcgcacttagtaagcattagttgttaagttgaagaattttttggttaaatgttagaaagggcttactgctttgaacactgtttgcaaaagtgactttgcaaaagtgatctgctttgaacattagttgtatgatggcaatatctaatcaaccataattcttctctaggc

SEQ ID NO: 244576 - DNA, 395 bp, Gossypium hirsutum
cccacgcgtccgatccccctctactccgatggtggttggctctcccacaacttcaatctcgagaagtgctggtggtagtcccaggacaacaggttccacttcaactggcaacaaaggttgtcaagcatctagtttatcttctcagcagaccaagaactctccatcagtgcctagtcagatatcatctcccgttggtgggaggagtgtgccatcagtcttgggaaacccccatttaagttcgtcttcaagtatggggacgaagccccaatcagtgctacatcaacagcagctgcagcagcaaaagcatgcactacatccggcgcaactgttcttctcaaatgcttacattcaggcccaagctcaacactcaccaaccacaacagctgcaagtgggt

SEQ ID NO: 244577 - DNA, 165 bp, Gossypium hirsutum
  unsure (1)..(165): unsure at all n locations
agttggcgtaccagcatcttcatangtgagtaaatatctaatttatataagtagtcaaccatgaaatttttataaatatctattcaaatttaatataaaattgtttggatgagttttatatcactctttgtaaacactcatttaaattcgtcttaatttatgatg

SEQ ID NO: 244578 - DNA, 379 bp, Gossypium hirsutum
gaaaaaccctacaatccgtttcttgaaggttattatttccaaatatggaaataaatggaggcgtattaatagtagttttaattcgtacattcgagtgctgggttgggtttagctggtgatattgttcatcaagacgacgttgctccaaagagacctggttgtgctaataattttgatctggtaaaagtcccgacatggattaatggtttaaaagacaacgaatatgttggtgttggtgctcgttttggacctactatggagtcaaaagaaaaacatgcacaccatcccaggcttgcacttgcagatcctcctgattgtcgcagcaaacctaggaatcaggttttctaattctaatctttttaacaatgtattcatccaa

SEQ ID NO: 244579 - DNA, 362 bp, Gossypium hirsutum
  unsure (1)..(362): unsure at all n locations
gaaaaaccctanaatccttttctagattgtaattattcccaaatatggaaataaagtgcagtcttattaataaaagttttaatccccaccacnagtgctgggttgggtttaactggtgatattgatcatcaagacgacgttgctccaaaaagacctggatgagctaataattttgttctggtaaaagtcccgacatggattaatggttcagaagacaaccaatatgtnggtgttggtgctccttttggacctactttggagtcaaaagaaaaacatgcaatccataccaggcttgcacttacaaaccctcctttttgttgcatcaaacccaaaaatcaggtttttaaattcaaatctttttt

SEQ ID NO: 244580 - DNA, 135 bp, Gossypium hirsutum
gtggatttctgaacaagataaaagaacttttcctttccaaattttggccccaatacttggaggcggcccgatttgggttttattattttcccccggaaaggttgtcttggtgaacctccacttgcgttaccaaaa

SEQ ID NO: 244581 - DNA, 346 bp, Gossypium hirsutum
gtaatagcaaggttgaaatggaagatccccttaaagccaatcctaaacgtggtcggccagagggttcaaagaataaacagaaaaagcttgctagtggagttgatcaaaacaatattgaaagctgagcaaacatgggtggttgtgctaccaagcccaaggttttgaagggtgacgaacccgagatccctgctccagcaccgtcgaaagaggcggttcccgaaccaaaggaggctgctcttgctgttgctgctgatggtgaaaagaaggtggaagctgatgaggttgctaaggacaaagatgttatcgatgatgatgccattgatgatcaatcaaacaagagacgatc

SEQ ID NO: 244582 - DNA, 256 bp, Gossypium hirsutum
  unsure (1)..(256): unsure at all n locations
ccggntcggaataccggggcggaccacagccttccgacacagtnttggaacactaaggccatatatttataacgcggcacacaaacaaaagcgcggactctttatacactgtagccccaaaggggataatcaacggggagaagattcccaaccagggtgggcaggggttttggccaaatattaaaactaaatgaggaaccttcacctttgtaattgctagaagccggcgggtcctaacgggttatggggttaaaat

SEQ ID NO: 244583 - DNA, 301 bp, Gossypium hirsutum
cccacgcgtccgaacataaactcagcttgaagcctatacatgatagcgataaccaccaagtggatggattaattagaccagagtcatctggacctacaacagtggcttgcatacctgtcaaactagtatttagtaggttacttgagaagatcaataggccaccttcaaaagcagctagtaaagtgattttctccactagtgatgcagtaagaggtccgtcatagattacattgtacattgatacgatgagacattaaatattgttagcaaaataagcaattgctaatttcctctttttgac

SEQ ID NO: 244584 - DNA, 115 bp, Gossypium hirsutum
cggacgcgtggggcagagtccagctgtggcagcagcgaccaagggtggcgcgaggtggtgacaccacaagcacaggggagttgtggggcgcaggataataataaggcggtggttg

SEQ ID NO: 244585 - DNA, 277 bp, Gossypium hirsutum
  unsure (1)..(277): unsure at all n locations
gcaggtttccggnaaccggaacttcccgggnntcgacccacgccgnntccggagatgaatgggaggtatgtgccatcggagagacgtacccaacttacgagaaggtcttaacgttgtgcgatgcatccacaaggncgatgtgcattgtttgtcacccggcaaaggctttttgtgtgccgtnntattgtggtttttgcggtcttgtaccagggacttaaagcaagattggtccctgtttgtatttgggtgtggccgacactcctttgggagggggcca

SEQ ID NO: 244586 - DNA, 296 bp, Gossypium hirsutum
gttcagagcacacagttgttgttactgtgaatatacaccaaggcttataaagaaattagaggatatcagggtcaaaagagttgcagctggcttgttgcattcagcatgcattgatggaactgggtctttgtttgtgtttggggataaagtggtaggtaatcttggatttggggaggccaagaatgcaaccatgccatccatgatcaatacattgccatattcagaagaagttgcatgtggtggctaccacacttgtgttgtaacaatcaggtgaccgggattctgtttaacaattt

SEQ ID NO: 244587 - DNA, 293 bp, Gossypium hirsutum
gaataagatgttggttttagccgagaaagtgggttggaggagcaataaacaaaactgctgtacttcctcctcgtattggttatagatcctgcaacccacaagaagaggaggaaatacagaactttttgtgctgagtatggagtgaaaaggcaggtatgcaaggtttgaatgcttattaacagaacgtgaataagccgccaccggaattagagttgttaattctcatggttgctaaacgagtataatgacatgtgaaacatgtatatacaagacgcagcctggattaatgagac

SEQ ID NO: 244588 - DNA, 295 bp, Gossypium hirsutum
gtttcttttaataaacaataaaaaaggcataaaataaaaggaaagaacagaataagatgatttgtgaatgggaaagaaaaaccgaaaatcacctttcaagtttttatatttctctcgaattttttgtattcgaatccgtgtgttctttttttacaacgtttgtattggctttatatcgcccgaattacagaaaatcaaaaagaaaataaaaaatctcctcccccgaatccccctttttccttattttccccatttttgctgttgttttctgccttttctgctttgttgcgtttgt

SEQ ID NO: 244589 - DNA, 165 bp, Gossypium hirsutum
ccacctcgctcggtcgactcattagacgcggtaatcagcaaccagcaaccttaaacagcaaagctcccaatgctacttttcaccacaagattaaccaagcctcgggacgtcaagctttaaatcacctaaggcgtgtctaactgcccttttgtattagattcaatt

SEQ ID NO: 244590 - DNA, 244 bp, Gossypium hirsutum
cgtcggccgattcccggtcacccacctcggccctgatgtcatgtgcttgggagagaaacggtttgcaaacttttaagcggggtatgctggaagtacaagaggtacatttaatttagctttgtgcaaacgagctaaggactgcactcaaattttacccgtgtctaccgagcatttatctaaatgcagtaaggatcagtggggtctccacagaatccaatttcttccaatttacagctcaagggaa

SEQ ID NO: 244591 - DNA, 201 bp, Gossypium hirsutum
gtgaggctgtggtcattcggcatttatactaaccgaaggatacagtgatgagaggggtcaattaagcaaattggtggtactttgcctaagcccaagaagacatccttgaacattgcatgctataggatgaagttattctttacccttgttgcatattcctcagtcaaccattcgatgaaattcttgactgctcattcagat

SEQ ID NO: 244592 - DNA, 293 bp, Gossypium hirsutum
  unsure (1)..(293): unsure at all n locations
cccactcttccggttctttcttaaccacgcaaagcaaaggagcaattttgtgcattttactctcattgncatctattgtaaattctcaaattacgttgggtatattgcagcttgtgcatgttgttcaaagtgagaaaactagggttgtttactgtaaaaataaaaatcatggcaaattttgttaatggtcgttaaaaattccacttgtgaaaataaacaataaaaaataaaaaattgttgtttaaaaaaaaacgaaaggtttcaaaaaaaaaatatcaatctttttccaaaaa

SEQ ID NO: 244593 - DNA, 291 bp, Gossypium hirsutum
ggcaccgcctgaaactgctcggccatgggcctctgcttgcgctgcccagactttggacgcattaccctacattgacgacgactacgggaacccaatggtcaaggaagaggttgatcgattggtcgaagaagagatgcgaaagagtatcaagaagccggctgacttcctcaaggatttaccccctcttccctccttcaattttcagcatcacccaatgattggcaaagaatatgagcgcgtcagagcgggtaggccacccgtgacccttgatttttcttcacggtatcaagt

SEQ ID NO: 244594 - DNA, 293 bp, Gossypium hirsutum
cccacgcgtccgcctacgcgtccgcccacgcgtccggaagaggaggctgccgaaaagttggcaccaatcaaactagaaaatttagggaccgcacgacttgtggttgatttcgataggtggtggactggtgaggaatctgtgaatgttctcttagaatccacaggtcaagtgactacagtaaagtctgctagacaggtcattgatgcactgaatgttgagggacctgacattgatataatacttactgaagtcgacctccaaatgacaaaaggaatgaagttgctaaagcatat

SEQ ID NO: 244595 - DNA, 290 bp, Gossypium hirsutum
ggacactttgcacgacaatgcaccactggtgcagcatctagcttatgctacaagtgtggagaaggagaacactctattcatgaatgcagttctgctatggttggtaaaagaaatcgtgagtcatctactccaaatctaagatctcgtttagaaaataaagatctcttgggatacaagtctgtacctcatgataatggcaagagccgctgcaaaaggagaaaaaatccagtttgaagaaaaaggcttcaatacaccacgaaaagaaaagaaaagaggtggttggattgcag

SEQ ID NO: 244596 - DNA, 382 bp, Gossypium hirsutum
gcaggttaccgggaccggaacttcccgggtgcgacaccactgccgtccgcagtatattcggatgctttatattcaacgaactattacgtaattgcatggtataaacacaatcatgacgctgtactttggtgcagaactgaatgatatgtataccctatcgttcgtttcgtgaggtgtcgcgatacgcaatattgtatctttacacacatttaatatcttttaaaatgtttttgtttttgtgtgtaaaaagttacaaggtcaatcgttatacaccatatcgcggatatattgtatgttcggacatagtggttagagcaaggagggacacatgactactattcttggatttttattttttatttttgatcaaaatactactatt

SEQ ID NO: 244597 - DNA, 290 bp, Gossypium hirsutum
ggctgctgcccggtcctttttaatttttccttgttatttaatggttatattgatgtaaaaaagaaaaaccaaaaaaaggaaagggatcaaaattgttgcaattgtcgttcatgtagaatatataattatagatttttatatatagattttgacgaaatatgtaggaaatgtgaagaaaaaaaaaagggggacaaaattatgaaagggagagagaaaaggttgtagatctatcgagatgaggtgtaataatttggtggggtctgcttaagaaaaggggcaggtcttgaccg

SEQ ID NO: 244598 - DNA, 206 bp, Gossypium hirsutum
  unsure (1)..(206): unsure at all n locations
ntacgacctcacgttngtccgcccactgctgtccgatttggtgttcttcattttacttatattttaccctgtggggattttttacattttgctatgttaacgctcggtcgaacgtgagtatgtggtgaattcgtgttcgctaattatcgatgtatttgaaaatttgacaacgaatttgttgtctttaaatgttattgatgtgtttg

SEQ ID NO: 244599 - DNA, 236 bp, Gossypium hirsutum
  unsure (1)..(236): unsure at all n locations
cccacgcgtccgggaagaggcaaaggtgttggaagctaaagaaggaaccatttccgttgcctctgcttttcctggtcatcaagaagctgtacaggatagaaatcacaattcttacacancaattggaaacatataaggggtgatgtaaggatgaggcgttgggcattgcgtcgaatgacaatcgtgtggtgtacaacatggttgaaaaactgccctctgacatgcgaggtactgta

SEQ ID NO: 244600 - DNA, 268 bp, Gossypium hirsutum
cggacgcgtgggcgtactcgtggggtttttgtcatttcagatgttttagctagttgcaattgttgaagggaatgggagatcctaatattttgggtttgaagtagtaaaaggacatcggttttcattcattttcttcccttttctctattatattatgtaataggccaactttaatcaatttttattatattccattaattatgtggaaaaattctctttttttttttaattattattaccgaaaatgagtatcaattcattttcttca

SEQ ID NO: 244601 - DNA, 291 bp, Gossypium hirsutum
ctttttaatctctattaattcgtaatgtagtgtcttatgtggtcaaaatatataaatttaaattgataattctctaaatatggaaacctgataagaaattgggagtaaaatatacgtggaatctatggtgtagtttgttatgggtgacagattaaaatgcatgtttctagtttccaagtaatatcatcttgccatttttatgttagggtgtgaggtaagtgtgcttttagttttacttaagcatcagcataagatagatgcatctggaggtgctatgacatagtttgtagc

SEQ ID NO: 244602 - DNA, 294 bp, Gossypium hirsutum
atttaaaccattcattgttagtagctgcaccaagcagtgtgctagtctgtacgtccattcttgaagaaacaatctataggtgctttacaaattgtcatctgcaggctgacaggtgtattatttggcattacattagttgaatgttatgactttcaacagtcacctactggtctatgatggaggaaattccatctatctcttattactcagatgagtgaattatttatgtatttgagtctctcaattggcctttgtgcaactacattatattactcagtataccagtcctttgac

SEQ ID NO: 244603 - DNA, 242 bp, Gossypium hirsutum
gaaaaggttatggtgggatgaaccgacaatgaaagagctgggggtgcacaatatccaccatctggtgtgggtgagggccaactacttggtgcttgactattgagccgacattgttatgatgcgtgccatgcctgaggagtgagacatcaccaccactagtgacggccggctacgatggatcggtggggtacattgtaaaatatgtggatggggtgatgataaggaagaaaagtcatcatata

SEQ ID NO: 244604 - DNA, 220 bp, Gossypium hirsutum
aggacattgcctaatcacaatggaaactatttttttttgggggacaatattgggggccccttacattaatgggcacttttttatatttgatattaactaaggaagggatgtagttccaggaaattcgccatatgagaattaggatttttggtagtaattgtaaattccataattttctgtagaaatctttagtttcgacctgtattaaatagttataatg

SEQ ID NO: 244605 - DNA, 139 bp, Gossypium hirsutum
acacaatggcttattacgggcatgctccacctccacgggggccttttgcacccccaccgccagggcatccggcaccacctccgccagacccctttgctccaccaccgccagggcatccggcacccactcctgacagtat

SEQ ID NO: 244606 - DNA, 197 bp, Gossypium hirsutum
cccacgcgtccgcccacgcgtccgtgaatgtgtcgaaggtgtacttagattgacaaagtcagatttcctcaaagctaagaacaatttctgccatctcattcatgctgaccatgtaatcacttccaatgttcggcatgattgagatggcagaaattgttcttagctttgaggataaaaatctttgaacgggctcagat

SEQ ID NO: 244607 - DNA, 294 bp, Gossypium hirsutum
  unsure (1)..(294): unsure at all n locations
cccacgcgtncnnngactcttgggcggactctttttttcgaatacgangatgtnccactgacggggtaaattctcagcataaactaancaaaaaccattctatccccaacaacaagtaaaggaagatgcataaagacaccattgtggaattgcttttaataggcaaagcaagctccttttttttgtcgaagcttttcaattactgctacagaangnggcttcttcccactcagggttttcagaatattatcctatactataccttattttggctatcatcaatccattgttaat

SEQ ID NO: 244608 - DNA, 389 bp, Gossypium hirsutum
gacccacgcgtgcgtacaaaaaatttttgccgctcagcgatggctaattctgctcgtcttctcgttttaccggggttcattgcactgtcactttcatgcatgaatgttgctcaaggggcggggacggctcgccgtctcttgcaggcaacaacgacgaccccaccaatatttccaaatttgcctccctttcgtggcttccagtttcctccttacagcggacctttcccggaatataggttgccgccatttccaggtatttcaaacgtccctccttcagcacctggctttcctggctcttcagcacctggctttcctggctcttcagcatctggctttcctggttccttcccttcgttccctgctccaccaacattgcccaacactacccc

SEQ ID NO: 244609 - DNA, 239 bp, Gossypium hirsutum
acaggcttacttacacgctttcgctgtttggactgacactaagcaaccctataattgtggggctattcctgaaaggaacacattaaatttttgcataattaaaaccattggtgacaataggaaaaaaagaaaagtcgtgcttatgtcaactaaaattgcagttcttgagctgcaatgtccaatcaatgtaaacactatgagggcggacctaaactgaagaaacattttttacttattta

SEQ ID NO: 244610 - DNA, 368 bp, Gossypium hirsutum
  unsure (1)..(368): unsure at all n locations
ccggtaagaattgcccggtcggcccattccggggaaggtccttccattgatggttgcaagggtgactgtgcttacctgtcagtggcttatgggcgacatgcaagggtaattctgtggatcttcctgatggaacctcttacaatagcggtgtttatgttgagagatgcaagtacttagaggaaagtaagtgcgtanggatttgtatcaatacttgtaagcttccaacacagagtttcttcaaggactacatgggggtccctctgctgatggagcctaacttcagcgattatagctgtcagttcaaatttggggttagcccaccattgccggaggatgataacaccctaaaagagtcctgcctggatgta

SEQ ID NO: 244611 - DNA, 361 bp, Gossypium hirsutum
cccacgcgtccgcccacgcgtccggggtttcggcgcagcaacctttatcccctagggccgtgtaatcatcaattcacccttaaaattggtgagtgacgtaaaaccttcttttgtttcattcaaatccacccttaaaaacccttttccactcgcttttttacccccacttttaccgaaaaaaccaaatcttattgattccttcaccaaaggaaaattctcggttctctttcttttttttttcaaaaatgttcttaaagaaaacaaggtgcatgcgcagaaaaaatattgaagacgaaaactattcaaatcaccttttgattttttgctgggtctttgtattgaaaatgtgtagtatgcgcgc

SEQ ID NO: 244612 - DNA, 271 bp, Gossypium hirsutum
gtttccccaacttgaaagaagttcaaatttcttttgctacgaaacttggtgaaaaggggagcttgtggacaagctgatttccaatcagtagattttgcattgaactcgtggcctgaaacgcctgagacgatgccgttgtcgttcttggtcaacaaattttgtggggattacatttatgaactgcaataacatataatggcatcacaagcttatcatcttctcttaagggagttaggtactgaatgcttgtaagcacaaaaaccatgggaga

SEQ ID NO: 244613 - DNA, 295 bp, Gossypium hirsutum
gatcgaacaagaacttgggactgaaattaagcaaatccctccacatatcgaccaggctgtgtactgccggtgatttttgtgggatgtttccttagcctactatggtaacaacggtgagcaaccatgctcatctgaattttagattacatgcacaaagtaatttctttgtgatctttttccatatccagaatgttctctgattttgctctttgctatttataccggcgtttgttaagttaatgatgctggtctttcaaggtctcggtccctagtcatgggtgtgcattctaaaaac

SEQ ID NO: 244614 - DNA, 299 bp, Gossypium hirsutum
  unsure (1)..(299): unsure at all n locations
cccacgcgtncgcagctatttccaagcaaagctttcttttcggagttccaggctatgggcgtctgccaatgaagaagcaaaatgagatcttgagtttggagagagagatagagtccctaatctgggaaacagtgaaagagcgggaaagcaaatgcaaagaggcatgttcatcagagaaggatctattgcacttgatactggaaggggcattgaatgaccaaagtcttggtgaggattcatccaagcgcttcatagttgataactgcaagaatatatattttgctggccacgagtctact

SEQ ID NO: 244615 - DNA, 200 bp, Gossypium hirsutum
taattgaatacctattcaataactaaacttcattgcacaagcctgctcagcacattacaactccttatctgcaaaaaccaattccttactcaacttaaattaaaccctgctcataatgcttaacacagatatgctgatcacatactaaactcaccattactgcgcttaaaacagatctacacccatgatgtcaaatcata

SEQ ID NO: 244616 - DNA, 394 bp, Gossypium hirsutum
  unsure (1)..(394): unsure at all n locations
attaacccaatccaatattttggatccagcttacggcaatacatgccttcagcaagtcaggcggaagctgaagtgcagaggttaaaataccaaatggctcanatgcaagtgaccacaattgaggttcaaaagaaatatgaagaactccgctgcaacttaaagcaaaggcagcaacgagggaagcagaggcagccgcgagggaagcaaagcagaacacaaagtacgatgaactccaacagcagctttagaatacgatgaagatgtttcatcaatcgtgacatgcaccgacataatgtactatataaatattattatcattttaacttttaacatttttggtaaaataatatgaatgatattgtatttattgatatgaatattattccattcggtt

SEQ ID NO: 244617 - DNA, 438 bp, Gossypium hirsutum
  unsure (1)..(438): unsure at all n locations
ggccggaannccgggccgacgacgcgtccgtcagagagctggattctttgccgcgggagtgttgtctttcggagactgttgccttgggggtggggaagcctccatttgaaccgtgggttcaggttaactttgatgttgggatctatggtcatctacatgctgcaagcgcaggagttgttgttatatatttagaggggttgttgcttggatcagtctgtttctggagtgagtatgtactggatgtggtggttgcggaggctttggcttgtgtgcatgctattcggtttgccagggatctggggcttcggcgagtggagtttgaaggggactcagcagtggtcatttccaagctcaaatctggcgtgattgatagatcaaacattagtgggtatatctgggatgctcgacagttgttattaggctttaagcatttcaaat

SEQ ID NO: 244618 - DNA, 115 bp, Gossypium hirsutum
  unsure (1)..(115): unsure at all n locations
ctgatctaatgcaagatttcaagaccggtttaccttactctatcatcanccaantctatgtgtgtgagccagttactgggaacagccatgggatgtgtcattgctccactcacat

SEQ ID NO: 244619 - DNA, 346 bp, Gossypium hirsutum
  unsure (1)..(346): unsure at all n locations
tccgcggacccgtgggtggatatccgttcgtgtactagttggtttcttgagtaccatattagccatgaggcatagcaaaagagtcgactntactcttcggacccttgcaggaataccgagggcattgtctgaatatgtgagagcagtcttcatccctcgaacaacaacaaaggcaacgaacgttcgtgagcacccttttactcctaaggtttataagcgtgggcagataattccaggagatacgccaaactgtaattgcgatttttgtatgaagttgtaggctccagagtttgctgtaaaatttttttgattcagtctgtaatataatactactaggatctagtaa

SEQ ID NO: 244620 - DNA, 414 bp, Gossypium hirsutum
  unsure (1)..(414): unsure at all n locations
ggaaaacccgggccggccgcacgcgtccggggaaacagtggcgggattccggagaatgttcattgtgctgagtgtggacctccgggcgcnatgtatttcatgtatcgctgctctcttgagtgagctagacaaagccaaaaaattacttttgggagggaccaagtaaaagactagaaataaaaataacaatcatcatagtttgatgtttgtttagagttatttatgattatcatatctaaagtctacgatgtagtgatgtttgtgcggcttctaataatgtttagggatcttttattagcccacaccggctatcaaagagccttagctgattttatatgattgtgtgttttgtttgtaagattacttttgccaaatatagtgttttccaagtttatggcttggatttatgttttc

SEQ ID NO: 244621 - DNA, 409 bp, Gossypium hirsutum
gccacctgtaacactttttggtcgggcaatgcttaacctccatgatcctaattttcgcgcgtgaggaaaaatgcatatctacaacaaacaaccctctttatgttgtcaatgaaatgaagcaagtagtcataatccaaaacaccaatgaagattctgagaatagattgcaaaatgaactgatggcagaaggctctgcactgcaatgtaagaagttggtgactacggaaactttcgaggaaagattagagaacaagttagatgcagttcaaactgttatgcaaagtgaggagatgagatgggatacttaccatcagtacagatatgaaagcaaacaggctgatgagactacaatgcaatgtgagaatctgacaaggaaggaaattaacaagtgttcttactctatcggata

SEQ ID NO: 244622 - DNA, 309 bp, Gossypium hirsutum
ggaggaaagatttttggttgctctctactgtaaataaggttttgaaggaatttatccccgaggtctctcatgaggcagatggccttatttttcagggctgggatgatccttatgtacctcgtactcatgaaggtcttctgaagtggaaatatgctcggctgaactctgttgactttctatttgagattggtagtgacgatcgtgaacagctttttctgtttgaacgggggagaaagaagttgatggaaaggaataaaagtgaatttagagatgttccagatcccccttcttctttctctgggaaaatta

SEQ ID NO: 244623 - DNA, 344 bp, Gossypium hirsutum
  unsure (1)..(344): unsure at all n locations
cccacgcgtccgcccacgcgtccgtcttaaccttactacattacgccgtatcatggctttggctagcaattttcaggacactttcatggcttccggtttcccctccggcgaaaacgactccttcctcatctattttcctgttgggagctataatggctttcgcgtccggtcttgctaataccagcttaaagtataacagtgttggtttctaccaaatggctaagatcgcggtcactccgaccatcgttcttgcggaattcgttctcttccggaaaaccatatcattcaaaaaggtgcatcggcaaacacccttcggctctctccgattatccggncttatactc

SEQ ID NO: 244624 - DNA, 314 bp, Gossypium hirsutum
cccacgcgtccgcaaaattggaaggatctcctctttatctgccttatttacaaccaaaagagaaagggtggaaaatgaaggaaaacataccatctacctgggttgttcatgtagggtaagtcagttgagaacctagtagtttttcttttttgtttagatttcatttactcttttctccataaggtttggaggaagatttgaaaggagagggaagaaggctttatcctttactctcttagtatttgcatcagggaatgttatatagatttcatgaatttttttttcttttttggaactcaaacatatgtgttgac

SEQ ID NO: 244625 - DNA, 347 bp, Gossypium hirsutum
ggaaatgttcatgctgcggtggaacggttactgggaaatcctggtcagtaacctattaccggcgatctagttaatgtagaaaactgagagtttgaagtttgaacatgagtaggatgttgctgaaagtccaatgtgagggaggaactagcttagattatgaaaaatggtgtaaatgaattgggttgtgaaatgtgtttggtttcataggtccattttccttgaaggaggtaaggcaatgagtcaatgtgtgtatgttttcactatagtccaccctttgctgagtgtgttttgtgagccacaaatctgaatgagcaaaaacaaaatactataaagagatgatatttgcg

SEQ ID NO: 244626 - DNA, 208 bp, Gossypium hirsutum
cccactcattcggactattattgtacctcgggtaatacttagtgaaatgattagtttgggggaggttttgggtgaaagtctgggatttagttgcacctatgtatacaccaacgaaattcgggactcccttctacaatccttctgaccctgcgtcttctgctgtatctgttgaaggagctggcgaacgaacccacattcattcccgttg

SEQ ID NO: 244627 - DNA, 372 bp, Gossypium hirsutum
cggacgcgtgggccatggccggttttcttcaagagagagttcaaccggacctggcccttcgttgttggtttcgctgtaactggaaccatcatcaccaagttctccctgggtctcactgaggaagatgccaagaactcgcctttcgctcagaagcacaagaggtgatcaactgatttcaaatgctcatctggtttgaggcttttgtttgttttcattcttttctttttaatttcaatgaactatacaaataacaataaagaaatcatcagttctgagttctcgaagtgtgaaatatgattcttgggggctaagtggcttctcatgaatttgcccttggacaatttaaagcgcctttacaggttccttggtctt

SEQ ID NO: 244628 - DNA, 217 bp, Gossypium hirsutum
cttacccttaaatcaacccacactttacactttatcatcactcgcctttacctcaatacgcgtcttttattcctacacttatacctatcaacttacatactctaaattcaaaactcactgtcattaataaactttcatcaaatcctattacagctccttacaatactagtaaacacctatatcatcataaaatcacttgtctattctcatgacttgt

SEQ ID NO: 244629 - DNA, 228 bp, Gossypium hirsutum
acatccatatttatatagctctatatacgtcatccaagacttaacatatatcattcacgcaggggacaggtgtaagttcttacatattgagataataacccttttgtcatatatgacgttacatgtatctgccaccacgtgcctgcagtgaggcttcagtcattgagcagaaatccgtataattttttatttggttaaatgaatatgctgctgcttgcaaccattgaa

SEQ ID NO: 244630 - DNA, 384 bp, Gossypium hirsutum
tggaagaagagttgaggaggaccaagaaaactggagatgcaacatccatcatcaatcgcaccaaaaaactatccctcaacggctgcaatcggaagagcgtcgctgtgaagaacccaatagcaagtacatttcctaccgtccctgcaccatagcttttcaacttttttaactagttaagatgtgcgccgggggtttgggggtggggggggggggctctgttattcagctttctgctttaaaaatctaattctatgatgcctgtcttttttttttaaactgcgatggcttattagctgacgaaggagtgaattcgaattagcatttgctgagagatttttaatgtctgaaatagttacaaatgctttggttaacatctgctgtgcc

SEQ ID NO: 244631 - DNA, 320 bp, Gossypium hirsutum
tccttctgcagttagtgttgtttgcatggcgctgggagggagtggccttgctgtgttttggaggaaccgaccaattcccgtggatgataaggatgatttcatggaatgagtgtttttccaatctcatttttaggcaacttttctttttcttttgatttcaaggggaagccccttgttgcgtggatttaatataatatatttttactctcaggtgaattttgaacatggacatatcaacttttctttttcatttagagaatactaagtgaaagttgggaaattaattttcaattggtattttctttttgataattcagctg

SEQ ID NO: 244632 - DNA, 159 bp, Gossypium hirsutum
  unsure (1)..(159): unsure at all n locations
ctatttttcnaaaattcaccatttaaaaggggtcaaacaaaagtcctttgcgtacacactaaataccgcctgtgaggtcgaggctcaaccgccggaaaacctgcgaacaatgcctgcacagagccaaacttaccgatgagaggtgccagggctttcttc

SEQ ID NO: 244633 - DNA, 217 bp, Gossypium hirsutum
gtgaaagaataggaactaggaacacttgttgatttagaaaaaggaagattgtccatgtgaatagctttgctttagtgagtggttcaacgaataatcaatcagactgtaaaaaacatatgtataaatgttttgcatttaatttgaacttaattcattgctggttgggtgggcaaaaaaaaagaatgatttccataaaaggatcattgaaaaacatagg

SEQ ID NO: 244634 - DNA, 366 bp, Gossypium hirsutum
ctctgaacttgtaaatgcgttttcttgcatgctcagcgccaacccaaggaggaaacgcggccgtaaagggtttaaacagcccttcatcatatgagctaagcttatattgaagattctgcaaaggttcctatgaagtattcagctttttgcatgtgttgaaagaaaaccgagtacgaccacagggttgctgttttggcactacctagcaagctatgttcataccttggattatatactatatagtcactatacgtaacatagctgtgttttggcagttaggtctgctgtcagcttgttatatccgctttctagtttaatacatacaaactccaattatatctatattgatatatatttccattgagc

SEQ ID NO: 244635 - DNA, 334 bp, Gossypium hirsutum
gtttaaaatactacctgttcaacttacttttatgatgatttcacagccatatggcgggtgagtgactgccaatattcattttatcacttatatattgtgacttaaaataattgtcagacagaaaacatctttttgcttgcgctgtgtttttcttgtttgaggatccaggcaagaatgcttattccaaaatactatgacatgttatgacaaaaatagatgcacatacattgacagaactattcaaccgatccgactaaaatgaataaccatgtgattatttagcattcacaataaagatgcactaccctaatgtacatgcttaataaaactttat

SEQ ID NO: 244636 - DNA, 329 bp, Gossypium hirsutum
gcaaaaaaaatcactcaaaactgcagtctcgaattcatctaatactttctcggcatctgatcatagggttacagaatcaactgtaaaacccctatacaattagtggaactggattaaaagttactctgttacttgccaatctccataagcggcaaaaataccggaaatattacatgcttctctaccacctgaaagggtaagaacttttcaactgatttctgtactagtcaccaaaactggcgaacagttgagctactaattgttcacgggttactaccattattccttttggtccaagggctgaagttgcacatgccgacaaggtcttt

SEQ ID NO: 244637 - DNA, 307 bp, Gossypium hirsutum
gaactgaggatttagtggtgacagctgatgttaaaaggctggaaagttgggttcgagcggaggcagaaaagtctgccaatgtgattgagaaaagacatcatttggaactggatgcatttgctgaacaaatgagactgaaagatgagaagttagagggttttcgctggcgactgttgagcatggaactagagtcggagcgggcgcaggcccatgttgatggactgaaccaggatgtatctcagctcagacaagacaacatgaaattggaggccatgctattggagagagaggagaattaaattccttg

SEQ ID NO: 244638 - DNA, 235 bp, Gossypium hirsutum
ggtgcttggcgagcttagcctggcagcaagcgtgtccaaggcatagcctggactgtccaatcacagcacatcgcgactactgcgctgcgcgcatgccaaggctatcgaactggtggctcatggacgtacagttggctcttatgagcacgctggagctggcgctgttggaggtcgtgctggtcggtctccaaatagaaacgctagtgcatgtggaggcagatattctagggagcgg

SEQ ID NO: 244639 - DNA, 180 bp, Gossypium hirsutum
gcaaaaaaaatccctcacaactgcattctcaaattcatctaatactttctcctcctccgaccatagggatacaaaatcaactgtaaaactcctatttaattaattaaactggattaaaagttactctttttcttggcagtctccataaacctccaaaattctgcaaattttacatgcttc

SEQ ID NO: 244640 - DNA, 364 bp, Gossypium hirsutum
catataagtaaataataaaaattatagataatgttacttacaagtgtgttatttatactaaggatgtggatggagaggaggaggaggaggaaaaatatatgaacgacttgtgtataaattgataacatgcttgattatagttgataaacgttaaattagaaatgatataatgttttatttgtatttctataatccgaacttaatatttaattgctaaaattattatctaatatgtatggtaagtgcattgggatgattatttgaattggagtgaacattggttgaaattgaaaagtgaatttaattatttgctagaaaaaaaaaagaaaaggaaaaaaaaaaaaaaaaaggcataaaaagggcc

SEQ ID NO: 244641 - DNA, 324 bp, Gossypium hirsutum
aaagagttgggaagtattgactcggcaggagcgaagggagaagggaggaataaggaggtgacaactccactgaggcgatcatgccagaatccaaaatcgtgcagacattgtatccccatgaaggcgagagtgaagagtataatttgaataattgtgggcattatcagaaacagcatctctgctgtttcatgttccagaaaagtaatgtaacgtatgtagaattagaaattgttctactctaatcttgtaggaaatgatcattataaggctgactaattgttggtcacttccaattttatgttaactatcagtttatcaccttta

SEQ ID NO: 244642 - DNA, 153 bp, Gossypium hirsutum
ccgcggacgcgtgggcggacgcgtgggcacaaattcagttactttatatgtattcccactgccgctccatttgatctcttttagagatcaaacattttccaaatgcttaaaccatttttgtgtgtaaaatttggactgctacagttgggtttc

SEQ ID NO: 244643 - DNA, 385 bp, Gossypium hirsutum
  unsure (1)..(385): unsure at all n locations
cccacgcgtccgggccggccacctctgccgtcaccgcgagccactgtcgtcggccgccgtacacggcgaccgaaaaaaggtatggcgaggatcacggagcccgtaggttgcgcgagtaacggcgtacgatacggaggtgggtagcagcgtgtgggagggggctgcttcgggtgtgcagcgctggagagatgttgctgctagggttttttcattaggtttaggtgggttttggggtattgggttattgggtgtattgggcttagagattgngttaggtttaattagttaattgttttgggttttaaatgtattgggccctgggcataaattgggcttaagacgagtaatgttaataagagttattgaaataaacaatgttatgatt

SEQ ID NO: 244644 - DNA, 231 bp, Gossypium hirsutum
atgattaagtttctaaatgtttgcccctttcttttttgttttgttttccatcttttctccattggtggttgtgccacaataagtcataagatggtagagaaatttctaaattatgcactactctcttgtaattttgttatataaaacacaagtcctttaccgattcagtcaactattagcttttaatttatagttaaataaactctttaacatcaattgttatttctcttg

SEQ ID NO: 244645 - DNA, 278 bp, Gossypium hirsutum
cggactcatgggttaacccacgcctcctttttcgcttgttctgaaatcccggggtggtacattcttgtttcaaacacaaaccatcctaagataatagtatacatccatatatcatacaatactattttaatattcaactctttgactcacaacttctataaacttttagacaactataagaagataatccaccgattactcaactaatccacatttaacagaattgctctgaaagagtgaaaaagaagatctccacgcgctagatgatccaagaatgc

SEQ ID NO: 244646 - DNA, 210 bp, Gossypium hirsutum
ctgatgacgatgtcttcattaaacgaatagtagctatggaaggtgatactgctgaggctcatacttgaagacttttcgttacttggattggacctactgtacagatcatgactgaagctccatcaaatgaaagggcaccaattgaagtaccctagaattcctgctttgtggtgggcgacaatcgtactgatagctattattcccacgttt

SEQ ID NO: 244647 - DNA, 246 bp, Gossypium hirsutum
atggtgaggattgtatctataatgaaatctacttttagctttaagggatagtgttaaattttattaatgatgattggtttgaccttcgtggtcaaagagggtaggttagtttgcgaagctttgatgtgtaagctgatagaagaacagatgatccagtaacatttatagctaaatacaatgaccaagaatatgagttgctctatagactgtgcgatttaactattgacatttacaaggattcacgag

SEQ ID NO: 244648 - DNA, 364 bp, Gossypium hirsutum
caatttttctcaaattgtgagcttgcagagtgtgatggatccattaatccgagcttgactatgtgctttgcttcaacagtgataaatgccaagttttctgaaatatatctaaggattccttgttgtagaaaatacgatttaattttctcagtttcctgttgctttagttttctaaagattaggatttatatgggatcaacttttatttttggggtttaaactttaaagtgatgaccaaactgtttaggaagacagcttcagttggaaaaaaaaaaacatcaatggcaacgtgtctggtcacaatgtgatatgtgtttgtactttggcttccacttcccattaatggtaaactagtcttttggtt

SEQ ID NO: 244649 - DNA, 374 bp, Gossypium hirsutum
caaaattcctacctgcaaaccaagatggtcaagaattttggtatcaatgtatctgttgagaggagactgaattctcttcctgatttagatccaaatgtggttcatgaggaagggagtgggagaagtcaagtagatgttcaggcagtgtctagaaaggggaagaagtcgcaaaaccgtttgatgaatggaaaaagagtggggaagaagaaaatctcatggcaagttcaggtggcatttaagatctaatgagtaatgagtattcttttcactcattgttttagcagttaactgaggtaggcacaagaattaaccgtctccctgtaataacttctgattggcattgctacagatctttatatcattgtcttacactt

SEQ ID NO: 244650 - DNA, 392 bp, Gossypium hirsutum
cggacgcgtgggcggaaacacccttagatagtcggtccctcatccacctcctagacagatcacccttcaccttcgagtcatcttatctctcacctcaaccggtgctgttcaggcagaactcactctctccactcgattctcagccggcagccgctacaacccatccctcacagcctctttccgtcactcaactcaacctttgcaatcgacagtcagtcgcgcggctcgcaagcagtgcaatcggtagtcagtcgcgcggctcgcaagcagtgcaatcggtagtcagtcgcgcggatcgcaagcagtgcaatcggtagtcagttgcgcagctcgcaagcagcaagctcgtcgccgccgtctcacaccctgaggtttctgcaaatttattaata

SEQ ID NO: 244651 - DNA, 328 bp, Gossypium hirsutum
cccacgcgtccgcggacgcgtgggtaaacaccttgggggtccattgcttttaggtaattaggtaattttattccagtttcagaaagtatattattcatttgaattgtgaatcattcttgaaagtattatagtgcaagttccctggaaatatcttttgttgatttgactgccaatacatatatatggcaatttatggatcatgatagttgatggattttactcacaaatatatatgttgcttagactcgaatcttaattgtcctttagcttatttatttatttatttattttcattcactatgaaataataatattttgtttgagtggt

SEQ ID NO: 244652 - DNA, 360 bp, Gossypium hirsutum
cccacgcgtccgctcaaaatttttgtatcccttgccccaacttctattttttaacaggccctcatatgcgggcccgcgctattctcacaggcccaacccttcttcataattagaatgctgcttcaccattctcaatattaatcgaaccatttctctttcaacctatcgctactattttgacagaatctcaattacattgccaaaagaaaaactttatttggtagttagcaccaccatcccccttatcagctggtactatacctcacgggttaatccttacattccatcctggattattttgattgacaccgctggcctactatgtgagatcagaactttccaaaattatatattttttgt

SEQ ID NO: 244653 - DNA, 303 bp, Gossypium hirsutum
agatcagttactttttgaaagatttaaaaagttacaagacttccattgataatgataaagactttatattgcaactgctcaaaataatcgactaagagaatagctaatctaaaaaaaaaccaccttaggaatcctaatcatcggggctatatattttcactccatttactgatagcctgcataactgcttgtttcaccatctgagcatttatgccttcagcattactttggttttctcctccaatggcttcaagctggaaattctcttggcaagaaaccctatcgtcgagcacgtcaaggcca

SEQ ID NO: 244654 - DNA, 394 bp, Gossypium hirsutum
aaaattgttttgatgacactatcgatgaagtttcaacagccaatcatcctcctacacccgatgaggagtacagtggaaacgagggttcattatcagcatccgggtgcaccaatagccctctccacggtaccatttccagtgcaaccaatagctacttctttgacagaatctcagctacatggccagaggaaaaacttcttttggcagctcggaccaggagcccccggatcagtttggactatacctcaggggttaatccaaacattccagcctggggtatggtgattgtgactgctggcctacgaggtgagatcagaacttaccaaaattttggattgccggttcgaatttgatgaaccaaaaaaaagaaaatggtaggtagcatcaaagtgtt

SEQ ID NO: 244655 - DNA, 289 bp, Gossypium hirsutum
ggcggtcgcgtaagtaaggttaaggatccatacggatatgtttggctcatctgctccccctccaacaaatgcgccccagtggaagcttaaaactgccatcggctcttttgatgtaatactgctgtttgtgtgtgttgtatggaaatggtttttgtcgttttcttttgacagcagtggttaatcgttggtggctgatgttaaatgataagtctacttgtaatttcttttcttttcttttcttaaagaactacttgggtttacctatttagcattacatcaaggatttaat

SEQ ID NO: 244656 - DNA, 293 bp, Gossypium hirsutum
atgttaagttggattgagcctttctgattagaatttcggaattagatcatgtaatcattttttatatttaataaatttcgagtctggaattgtgaaaaaaaaacaaacaaaagcacaaaaaaaagtaacaaaagaatacgccatgactgaaaaaatatgacagaggattatatcatgcttacaccatctttctttatatttctggtcgcctgatttatttttttatgtaatggggggggccccctttatgggtcccaattttcctccccgggccttgcagttttttatttttt

SEQ ID NO: 244657 - DNA, 227 bp, Gossypium hirsutum
  unsure (1)..(227): unsure at all n locations
cccacgcgtccgactttatcggttggagataatgcgaattcaattgttctctgtatatggtgcccaggcatgtaatttactctctctatcacgaaattgtaagatttgattcataatggtggtgaattggacatacatagttcaaatgaacagaagcagggatgaaaatcttgttttcttctataaagtgattgccttgnaaaaaaaaaaaaaaaacaaaaaattac

SEQ ID NO: 244658 - DNA, 230 bp, Gossypium hirsutum
  unsure (1)..(230): unsure at all n locations
ggcatgtaatgaagggcagagggatgtgttcttcacctattagctagattttacagtaattatgtatgaaataaatgcttatacattttctttatgttacaaaaaaccaaagaaggcagagaagtctagccttcttattcgtgatgtaatttaactctcttgggggtttttatcaaanaaaaaaaaaaaaaaaaaaaaaaaaaaaaaaaaaagaaaaaaaaaaaaaagaa

SEQ ID NO: 244659 - DNA, 404 bp, Gossypium hirsutum
agtatcaggtctcaccctattcatttattcttcttaaatgcaattaatttagtgtctttttctccaaaaaaaaaaaaaaaaaaaaaaaaaaaaaaaaaaaaaaaaaaaaaaaaaaaaaaaaaaaaaaaaaaaaaaaaaaaaaaaaaaaaaaaaaaaaaaaaaaaaaaaaaaaaaaaaaaaaaaaaaaaaaaaaaaaaggggggccccttttaaaaaaccaaagttaacgaacccgggcttgcaaaataaaagttttttaatggggccaccaaaataaaattaactgcccggcttttaaaaacctgggaatggaaaaaaccctggcgttcccaaattaaatcactttgaaaaaaatcccctttttccaaattggcaaaaaaaaaaaaaggcccccacaaaacccc

SEQ ID NO: 244660 - DNA, 392 bp, Gossypium hirsutum
cacaagttggactttctgggtagtcaaaggtatatgattgctgagtgaggcttaagacaggcattgtcaaggctatttgatcgaccatgcttgctttagcttctaattgcctacgcacaacatcacttgtctatcgatctgtctgctgaaactataacctggcttgctactaagttgagatgggtgcttgataacttgcacggtgcgtatgaagatagttgggtaaagcctttaggactctggtgatgtatgtatgaggtaattgttgtgatgggtgcttgatgggatcttttcttttgtaaaaagaaaaagcgaggtaggctagtgggattaattctttcttcttgttctcccctttttgatcggtttgatttacatgtattcttggaaaa

SEQ ID NO: 244661 - DNA, 292 bp, Gossypium hirsutum
cacagtttgactctatggatactcaaattttatcattgctctctgaggcttaagggaggcatttaaaaaggtatttgatcgaccatgcttgctttaacttctaaataccaacgcacagcataacattgctaacgaccagaaagctgaaactactaaccagctctgctactaaatataaatggcatgcttgataattagaacatcccatctgaatataatgggggaaagcctttacgactattgtgacgtaccaatgaagctaactgatcaaattcttgcttgatgaaacaaa

SEQ ID NO: 244662 - DNA, 326 bp, Gossypium hirsutum
agcccaaaaccatccatatgctaacccaaatcagtttattggctaattatttagctttcaaagaggcccctgaagacttgttcaagttgcaaacaagcccctccataattggtggctttatagatttgccccaagcctaaattagcaaagttgaaaccatcaaccttgccacatgtgtggccagccaagggagggctctttggctgataattttagctatttttagcagcactctttagctataaaaaccccctttaggctgggcatctgaaacacatctcaagcattcacatctttttctctcttctctcttctctccactttct

SEQ ID NO: 244663 - DNA, 244 bp, Gossypium hirsutum
gaaaaattcccaagcgaagctgggaatcatacttgtatattaataaatcatacccttcaggctggaaaaggcataacagtaaccgccctatgaaagctgggaagaaaaaaaggaaagtgcgagaataattccctttccctaacatcatgcagacaaatacataaagtctcctgtaatagaattacgaccagtgagggaaagggatgctaaatacccaacaccacatttgttgtctagatcgcga

SEQ ID NO: 244664 - DNA, 257 bp, Gossypium hirsutum
gtggttttcatgacagatatgctggagagaagatgtgtgcgatgactatgcgtggaagcagcagtgtgggaagcgacgtgctgcgatggaggtgcgcgagcagcgcgatctgcggagcgcaaggagaaactgctagggttttccatttttgggctgatttgagtcagaaaatgggctagggttaattttattgggccatacgggttgttgggttttgtatatttatttgggtccgggcatatttgggcttgtacatt

SEQ ID NO: 244665 - DNA, 210 bp, Gossypium hirsutum
cggacgcgtgggtagttctagatcgcgagggccgcccttttttttttttttttcgtcaaggatataataattattattgccttagtgtcaagatacctataagcacacatttaagggctattattaagtttcaatctttcttttttaacactattgagagtaggtggaatatgcaattgtagaaaaacttcggtcacattctttaaatga

SEQ ID NO: 244666 - DNA, 142 bp, Gossypium hirsutum
gacccacgcgtcgcacctcgaggcagagcgagcttctgacactaagtcggtttactacttataatgaagaacacttataggcccccaggcacatgataaacgtctaccttccaagatcaacctcattgacttagagcagctg

SEQ ID NO: 244667 - DNA, 401 bp, Gossypium hirsutum
aatatgtggagattactgatgttacagatgactcatttacaatgagaccttttccgatagataaacctgcttttgaagaaagtacagaacctgcatcgattgccaaaggatcgaagacagataggatacaggaaaactttctggatgagaagggaaaatcaaaatctgatcttgtcaattgggctgtacaccatgatgtgcaagttgcatgcaatggatacgaagatcagaaatcaaggaggcaggtgggtgatgtctcaggatcaagtacacctatcaaccataccttgactgatgaagaggatatatacttgaagaagagttcatcaaggagcaggaaatatcaactaggcttgtctagctctgatgcagagattgactataggagaggaagaagctta

SEQ ID NO: 244668 - DNA, 406 bp, Gossypium hirsutum
cggacgcgtgggcaagagtgaaaagacgaatttgcttgaagatatcatgaagttgtcaatggatagggaaattttgattagattcgttgggggcataggtgacaggatcactgagttattcaggggagaagcacagctaatgggatttagtgcaggcttttgacaataaccattcagattttaaaggcagtgatgaactctttgactcactaaaagcgaacaagactagtcttcttctttcattagaagaagaagagcacaaaacaagagaagtagaagcagttagctgtgcaaatcagaatatacaggagaaactgctatcacaagaaaagttcctgtctgattcaaaacatctagcattgattattgaagatgaaatggaagcaaagcaactggaaatgaagaa

SEQ ID NO: 244669 - DNA, 378 bp, Gossypium hirsutum
  unsure (1)..(378): unsure at all n locations
ttttagtggatttcgaccatagttggagttaccttgcaattgttggctcggatgtgagagcaacttgtgtcaaattcggctcanatgcaaagtacttggcagtaggatcaatggatcgtaacctctgcatgtttggcgttcccgaaggcgatgcttcaatggaatcataaaaaggctccttctgttcaacttatttggcaagttggttgttaaaacattctttaagattgctaattgcgactgtcatgttttgtggtcggcataatcggagatttcgaggattggtcattacacaatccctaaagagatgaatgaagtctgcaattggcttacagcaaggttggagctcgagggataacactaaatatagcgaaaagt

SEQ ID NO: 244670 - DNA, 260 bp, Gossypium hirsutum
gttctagatctcaaccatcttaaatccttttttttttttttgttgggctactgggatcagagggggtaaagaatatcttaatttctgttgcacaccaaattgagatctttactatgtcaccttaccaagctaatctatacttatctgtaaaagttatccctaacaatggcattgctcagaaaaaaaaaaaggatccaaattaatatacacatgcatgcaacgccgtctcttttatatagtgaaacctaaattcaactcac

SEQ ID NO: 244671 - DNA, 372 bp, Gossypium hirsutum
cccacgcgtccggtttcagtaacatcaatgcttgctgaagcttgaatcaccatcttcatggtattctaaatatagtttcttgacagtaaccgtggccgacaaggggatcttatctgagtgaagaacgcaattttcaaagtcgaaaatcctgaaccgtgggcagctaaggaaaacttgctccacgtgttaccacccactatcggaaacgattcaagccgggcggtctcgagacatggaaagcaaacacggacgtcggtcgggattttgtcgactaggacccctttaaacaagtttatagttttgagcttctggcacgtaaagatcgcacgaagtaaattaatggaatagttgagaggtatatcaatatgaaac

SEQ ID NO: 244672 - DNA, 364 bp, Gossypium hirsutum
  unsure (1)..(364): unsure at all n locations
cagcgcgtaccgcgctctgacacactctcgtaagtatttgggtaatcttctagccttatgtacctgctatantgaaatccagtggttcgtgaaatatgaggaggcagtgaattgtggcacccctctaataccacttggtatatgcgtacctgcgtgcactgtatattcacaaggtcggtttagtttctcttccagattggataactgtannggagaagtctttcttttgtgcaatatgcaagtgataccatatatatagtcccatttattaatgagtgagtattgacagagctggtggtacgtattaatgttacactggaagctcgcttgtgattttcggataagtggccatttcgctcgtttc

SEQ ID NO: 244673 - DNA, 420 bp, Gossypium hirsutum
  unsure (1)..(420): unsure at all n locations
gttgcttgcagcatgctttagtgttcgtgtgagaggatcagagtacattccgcttgtagggtccagcgatccaagttctttcttagtgggagtatctgatggggaattatgaaattgttgaccggaggagatgtttcctgctcaagattcaaaggtttgggagtagttgaggaaatgtttgcaccaatattgaaagatctttgaggcatttttggactgcactttgttaaagttgatgtaactaacttgcatgctagactcttcaaattcttcatgggattaaaaatcatctatcgtctctttgagatctttcatatggccattggctatttgctcatttagttgatgggaagttgacaatgaagctgagaaatagaaaacttttgaaaaaaaaaaaannannnnaaaaaaaaaaaaata

SEQ ID NO: 244674 - DNA, 180 bp, Gossypium hirsutum
gcgtcgacccacctctattgggccttgctaggatgcgcaggggtcaccgtctaaacccaaatgggggggacttcgcctcttaaatgccttaagacgtggtttcaacgtattacacccatttaaactggttgcctatcgtttgacctgagtaccgctgtttaagcttttttgtgatttagg

SEQ ID NO: 244675 - DNA, 429 bp, Gossypium hirsutum
cccacgcgtccggtttgttattcacctattggctatggttatgcgaagggtcgtcaaacgtaatgttccgaggagtgaaaaagtagcagagcaagcagctcctcatcccagtgaaagagttgggaatcctcctgttgatcagagagctggaagaaaatctgagagaaaccatggtgtttacaatgaaagagttgatacgcagaggaggaaccggcctaatgaaaaccggcggaatgacaaggaaattgagaggcagcagcggcaggagaggcagccatcacctgagacctggcgtaagcctgcggaacagcctaaaccagtctctcctgaagctgctggtgtgcgctatggaaaagcagcatcagcttttgagcttgctcaagccttttccaaatcattctcagatcaaaaaacagatgatcgatatgc

SEQ ID NO: 244676 - DNA, 425 bp, Gossypium hirsutum
tctaaatcggtttatgtatgccaagccatatactaggagattatggtacagaaaaaaaaggaaagaggaagccaatagatcagaatcattgtgttcacacaatagataaaaattttcaatctagtagaaagcaagtttctaaatcttcatagtaacgattaaaaacaaatattgttcacaaacaagtagagaatacttatatatactcaatttacatgcatgaataagaagacatctacatgagagagagaaagcaagtgagtgcctaattaacttgaagcaccagcagaatctaactagtactgcaaccaaaatccagtggtttgatttgaaattaactaagtcattgcattaacaattcctttcttcatgtagttcactatccatccaatccccgtcccttccttttacctttccacaaatgt

SEQ ID NO: 244677 - DNA, 386 bp, Gossypium hirsutum
cggaatatcccgggctcgagcccacgccgtcaccgcccacgccgtcacgagaaaaaatgctactctcatgatatcttaagtcgtttgacgtatcttgttagtgttgagagtctcttctgatggtttgcattctctatcgttttcatgcttaatgtgttcatgagctttcttgccaattggctgtcaaattcccccaataaatcacaagtttgtattatttgatatgccacaaattcacattgccattttgcttctttttctctcgaactctgagcttaacatattaccgattccgacataagctacgtgttgtggatgcatgatgtaaaaaaggaggagtaaatgatgcagttcacttgaaatgagaatggaatattaattattgc

SEQ ID NO: 244678 - DNA, 412 bp, Gossypium hirsutum
ggcatggaagctcgagatgtgcaccgggaaagccaaatgactgtgcccgagaccccatctgctgaccagccctgtgatggagtaaaagttgatgttggaccaagaaaaagtattgcaagaataggcaatagaaatcctgaacaattgatgaaagttcataatggcggtagtcttttatttggtaatggagattgtggttcaagatcagcttacacagaaatctgctcattagcagcacaacattttgcacggatacgtgaagttcttgtcgagcgcagtgtgacatcaactcttaactctggatttttgaccccatgccgagacaggcttgtggtggaacttgggtggatctgtttgctgaaatgatgagaaattcatgacatgtttgttctcctgccgccattgagtactg

SEQ ID NO: 244679 - DNA, 424 bp, Gossypium hirsutum
gttaaagaacaaattgtctctagttctacaattttggttcttctggattctcaattcatggatgacactgctaataaataaaatgaagatttttggtgatgttgctaaatgacattgtcatccgacatttgtgacatacaaataagattgaaataggatcagattttgggaccaatctcttgaccatgtgatgtgtagtaactgaatgctgcaatttcttcatctcttttcataatctcttctcagaaaaccaaagctttcccctttcaatttcccaaattttacacagtgattttcagatcacaggctcctgagtatgtctggaataaaaaggaagcgacagctaacagcagaggcagctgttttttctccgcctcaaagtactgtaagcaatgaagtttattctcaatatatagtcgcacgt

SEQ ID NO: 244680 - DNA, 361 bp, Gossypium hirsutum
gaaacaaccagaaaacccagaaactgtgacattggaagctaatgggggagtggagaaagagaatgcaaatggagcagtccctgtatctgagggagaagccaaagagacacaaggtttacaggaggtggctggcaagtgtagtgttgaggtcgaggacaaaggcaaggcagtagatgcggaggtgattgaaaatggtaaggttaaagaaggtgggcaagctgataccccacaacctacaggatctgcgcctgcaagcaactaatatgacaaccagtatcctagccaccctgtggtattctagtttattgtatttgcctgtaacctctatgatgattccatggatgacttgaacattaatgat

SEQ ID NO: 244681 - DNA, 298 bp, Gossypium hirsutum
cccacgcgtccgggtggaaaagctcagtaagcaacggcgacaagccggaggaagtcagctcgccccggagaggaaaactaccgttcagccaaacatggctgaagaatagaataccgaaaataccactttgaccgaactccgttcaaggtataggaaatgttaaattaagacgtctaattcaagagtgcggggcgttacagagcggggaagctattggtggctgtttgagaaccaacttggctttcatgccaaggtacatatgctaaaatcactggtcgagattaagagagagactaat

SEQ ID NO: 244682 - DNA, 400 bp, Gossypium hirsutum
cccacccgtccggccttttcaagcgggggtgatggctgtaagaactaaaggcggcaatgaaggtgtgtttgagtcattgtaccgtgctcgtgaagtgtacagaactaagctgcaagagagcacggcagtttatcagctggcttctctgtttgttgagtgtgcaatagctgaagcacagcctttgaaaacagaaccagtaccatgcaaccccaatgatccaacggttgcatcagatgctcacgggacttctatacttgctgaaacaggtagaatgcaaatcgtactggacgcattctcggatggaagcagctttatctgtttacagtgcggtggtctcgttagtaatcatcgtaaagatgagcattatgcatactggtgctgcaatatgtaaatttgctca

SEQ ID NO: 244683 - DNA, 429 bp, Gossypium hirsutum
aaaaccgggcggacccacgcgtccgaggggaacccgtgctgatctcacttttgttcaaggttttgggaggactaggcaaggtgaggtctttttgaaagtcaatcaactccgggataagtttgaatatgatagagagaacagaatgagagagaaagcatttgctccaataaatggacaagatacctcgagcagctacaatacaaactctaagaatcagccgtttgacactcagagatacttttctgatagtgactaacagtaagatgaaagaaagggaagtaggaagtgataacatcagaaatctttagctaactgcaaagaatcagttttactgtttgctttggtcaccgttgttaggcatgctgcttcagattccgactactaccctcaagcagccgttgcctgtcaaataaagatgcaaaggttttt

SEQ ID NO: 244684 - DNA, 373 bp, Gossypium hirsutum
  unsure (1)..(373): unsure at all n locations
cccacgcgtccgggtttatcggcgtagtttggtatgtggtgttggaaatcgttggggacggatggatgctttagtccctaagatctctaaatgtgtttatatatgaatagaaaatgagggaatgcggttttattcatatcccggaactttgatatgttatttttatatattatagagttgatcatggtttaaaaaaaaaaaaaaaaaaaaaaaaaaaaaaaaaaaaaaaaaaaaaaaaaaaaaaaaaattaaaaaaaaaaaaaaaagaaaaaaaaaaaaaaaaagaaaaaaaaaaaaaannaaataaaaataaaaaaaaaaaataatattattaaataaattaattaaaatattaaattgggggggccctttt

SEQ ID NO: 244685 - DNA, 526 bp, Gossypium hirsutum
  unsure (1)..(526): unsure at all n locations
cgagcgcgtccgnnagagcgcgaaaggccanacnnggatcaannnatgaatctgcagtgtaggctttccaactnnntaaaccanngatcaagaggatcgggcgataagaatcccctganngagatagnnnacgccannccgcgcccattaaannaaaaanntggagtnntcgagagaaattgcngnngaacgcngnngaaatnnggaatnntgcagggctttangnntagagganngctgagannaatgaaaanntacgagcttaagaaagggggnntaacgagacgctttcaacgatatctnnntttcgaaccacnncaaaacaccatttacgtcaactacgnnntgaacagannaagaagaaactgggcgtcgaaaggtattctttagaactgcaaagaagaatagnnggaagcagggacccagtcctttactttaaatnnttgatgaatttcctttagtcccattgaagaaaaagctccaaacaatgannaacagcatatacttcggacttggcaattatgat

SEQ ID NO: 244686 - DNA, 290 bp, Gossypium hirsutum
cctcccctctccaaactgggagggcttcatataaaatcttctccaaccccaacctcaatattttctccactacaactgatttaaagatcatctcaaatggaaatcctctcacctctccccactctccaacataaacccttttcaaacatacctttctcgtaccaaacacttctccaaaatttcttcttcttcatcatcaagggataaaacttcaaaatctgattccatgcgtgatgcacgtaaggaatataaagagaagattattcaaaacactgtatatctcagccgtc

SEQ ID NO: 244687 - DNA, 341 bp, Gossypium hirsutum
ggaccctgagagtggtaaagctgctgagctgaaacgtgaagctgcaagaggagctgtgagggctgccttgtaatggcactgacagactagcagcagtgagatatacagtaaacctcgtgctacttctgcttatatgctctttgccttggaaagagtaaaaactgagcttgttatttgtctatccttgtttttgttgcacatatctttttaacttgttctcagagctacattctgtaaagtttttttttttcttattgtggagtttgattagcgaacaaaaatatgatatttcatgtatgaattgataaaatatatggatacagaattgcctcttgtgaatt

SEQ ID NO: 244688 - DNA, 284 bp, Gossypium hirsutum
actggaacaaaatagccagcggtcaacacgattgctcgacgtgtgttgactcacctgaaggcaccttggatatttacgtttgcgttggaactatggacatgtataactttgattatgcacatgagctcgctttggccctcgtagtatcagaggctccaaatattaatgatgtgctgcaaccgaacgacttatatggagaaggtggttcgttaacaaaaagacctgtgaactacttgatgtggaggggactcattatctgaggatgtacgcctccctttatgatt

SEQ ID NO: 244689 - DNA, 409 bp, Gossypium hirsutum
gcaacccgctgctgctgctgcgttgttcgttcaacaacagcaagcgatgggagaagcgtgggcgggtagggtcggcaattatcttcctggtcacctaaacttgttagcctcgttgtcaggtgctccgggaggatcgggtcgaagagacgaggatccgcattaaaatttggtggaccattttacccttcctgttgttgggagtatatatagattctataaatatttgtgtatggttgttgcttttttgtgtgtgcgaggatgtggaagatgattgctagttggaattcttagggttagggaattagggttttgaggcagataatttggagtatggatgatgaatggattcagattagggtttttccgtagcacttctatttgatgattagttaagggtttggagcaattg

SEQ ID NO: 244690 - DNA, 381 bp, Gossypium hirsutum
cccacgcgtccgggcatcttcatatataataaaaaaataaattattttcgtaattaattaggttgttaaggatatttttataaaaaaaaaaccataagaatgacaacaatcatgaaaaagaaaagggcttcaggccagaatttttcagcccggtccgatccgattttattaccctaaattttttttccgtatttcctctcagacccagtccctcattcggtcattcccctttctcttccctatcagttcttatttcttaaaagagaaaaccgatagctctaagtgccgctctccacctccacggctccaccagtggcctccagcgccgctgcccgtccgtctgtctgcccgtctcgctgcagcccatcaacgttgcttttt

SEQ ID NO: 244691 - DNA, 295 bp, Gossypium hirsutum
gttgctgtaagtgagggtaagaaagacgaagacaaagacgcgcacagacactgctgaactcgtcgacgggttgagtgtgtggagaaattgaacgcgatggtaaagaagatacgtgtcgctgcctccagcaccaaggaagccgcctgcgatgaagcagagccctaggaagataagaaagatgaggctgcttcataagcattgacctgaaagagaaagcgacactatactcgcgtaagtttattatatctaattaatatgtagtgggttaaggagaaaattatttatatattcccac

SEQ ID NO: 244692 - DNA, 300 bp, Gossypium hirsutum
cccacgcgtccggggaggaaatcatttatactttctttctttttttttttatctgcaaaagtcatggtgggtaaactctatacattttgcagataaaaaaaaaaagaaagaaagtatacatgggaggaaatcatttatctggagaaattttcatttctgaattgaaggactgcaattattgtttatagtggtattttggcaattagttagaagatgaatggcatgttgatggtaaccaagatgagaacaaacatttgtcaacattaattatttaatattaattaaaatatatttaatatt

SEQ ID NO: 244693 - DNA, 314 bp, Gossypium hirsutum
cccacgcgtccgggaaaacaggaaagccacactaaaggaagtcgttgggtatgttgttaggaacatcaaaacagcaaagcgcaagagaacctgaggcaaaggatgcaaataatcttcaactgtttcggaatctaaccaaatctactgggacagtatgcgtatggagctgaatattattactgggtttgtaaatttcattttcagctaccaaattaatcctgaacttgggagtttattctgttttagtttggaactatcagcggtctagatctgtggtaccttttttttatcctaattataagtgtttggttcag

SEQ ID NO: 244694 - DNA, 331 bp, Gossypium hirsutum
acggattgggaacccataacgtgctatccgttgcagtcggtgcatgccatgccatgtgtttagtgtcgagatcacgttgttaacgatgatgtgataaaacaaattcacatacgaaactttaacaatagggtctgcaattttgttttgaaggacacaatgagttccaaggttgagtccatggcgaagtgattcccaatgagggtaggcaaacagcattaaagaagctaacattaatctccattgttacatatttaagccttctgagatttgctgcctactcgatttaataataaaataacaaaatcaacatcgagccttgaatcttggctgc

SEQ ID NO: 244695 - DNA, 331 bp, Gossypium hirsutum
cccacgcgtccgcgagtttatttcttgagctctatatgatccacaaatcgcaacagagcaggcgacactgttgatgagtactattctgaaagatccagggcattgctggaaaacatgcacacagtcttcttttccattccccgcatcaaggacataaagcactattaatcactcgcttgtattttagatttgcaaaattcgaaatcaagcatttaaattgtggtaacggccgcgttttcgttcgtgttgcgtttatcgcagttgctgacataagggatcggttgtgaatttttttaaaatttgcacaatttaaaaaaatcacttttgaatg

SEQ ID NO: 244696 - DNA, 258 bp, Gossypium hirsutum
gttaaaatgaaaatgaggttttgtattgtaattggcagctttttgggagaacatatcaggttcattgtgtgggtttttggtccgtgtaaagatggttagaatcatgaagtaggtgtatggttttttattatttgtaatgcgccaaacttgattcaggtgtaaagatggtatttttgttctttctgagaaatatcttgttatttttcccgttctcaacttggttaattgtgtaaggctgttagtgaaaattttctggtt

SEQ ID NO: 244697 - DNA, 422 bp, Gossypium hirsutum
cccacgcgtccgttctcttcgcagtttagctccgtatgtcgtacagtggctattagacgcgcatagcacccagatacttcttatggtgttcatgggtgtagtttctctcttgttagcgggtttcttcgcatatcacgctaatctttgtctcacgaacacaacaacaaatgagaccttcaagtggcaagactacataagctggcagaagaaactgatcgaagcacgagcgagtacagcggcactgaaagcgaacatcgccgggatgactactgaaggaaagcctcgagagagcaaatgtaaatccttcttcagacagtcccttctacaggatactgaagccattgtaaagaagaatgtgtatgataaagggttctttcacaatctctacgaggtcgttttcccagtttcaacaagagcatcat

SEQ ID NO: 244698 - DNA, 335 bp, Gossypium hirsutum
tccgcccacgcgttcgaaaagggcttgattactgttcacattttcatacttacagcctatccaaggtgaggggctctcaccagtttcctcctttatggattattcttttgtttaaaggaaaactatagaaatgatatagaggaagtacgaaattgatgtcttaaatctgaaagctgatacaagcctagtagctctgctgaaagccggtttaaccaatgcttagagttgcatgtagtgactagagccttgggacgaaccaaagtaccattcatcacattagatttacatcttgatccaagcgaagaagtagcattcatttgggttgttcactttgg

SEQ ID NO: 244699 - DNA, 431 bp, Gossypium hirsutum
gattgaaccaaaccaagttgactctgaagatggataaagcgtatcatctctcttactttttcttttcatttatccttttctcctcattaaggaattcttacagcttttaccatcttgaactgtaagaatgaaacaattgtttggtacaagcggctgtgattgaaccaaaccaagccgaccctgaaggctcatcaacttgagaggtatggttgtttatatgaaatgatcatgatggatggttttctgggtttgctgttaataatgatttgaaggaattaactgacaattagaacgcaattgagagttagtagtgttagctgttgttacttttctaacaagggaacggttaaaaagcagaactgatgagtggtgccccgcctactgctgtagaccaaaatttcataactacgaagcttcttgtcgggatgatg

SEQ ID NO: 244700 - DNA, 422 bp, Gossypium hirsutum
cccacgcgtccgatcaaatccagacacccttatctctgcatttacagcctaactgggtggagtttcagaccatcaaaaagaaatgttgccttgtgtgggaagtaaagcaacactcctttacagaatccataagaatatttcttttggcaacttttccaatttatctctttttaaacacacaaaaaagccttttgtttttgaagataaatccaatctcctcatcgttagctatcctgtgtgaaggttctttccatttctcagtctgcacataatacaagagatggagaaaccttaaattttaaatacccttttgcctggcagcattacttggtgctctttatagaagaagaaagggcaatctagtactaagcattttcatccttgcattgtttttatgctttgtgtgagcacagtaaattgtg

SEQ ID NO: 244701 - DNA, 141 bp, Gossypium hirsutum
  unsure (1)..(141): unsure at all n locations
gaattacccgggctcggacccacgccgnntccgcttgtcctttcgagtgtcncanctccaggctttgctgtagattncaatggctannctacatnnccccaaagaacacgcatgtgctgtagtnngtcaacaaaatttggg

SEQ ID NO: 244702 - DNA, 425 bp, Gossypium hirsutum
cttgttgaaattcctgaaactgtttaaccagcagcagcagaacctgttaaagaagggggagctgatgaagaatcagagcctttagacagctaaacctttctcgatggcagaatctcgtgttattgaccattcaaagtcgtgtcaaggagctgtcccactgaacacggtattttttgcttaaaaattacgtattccatgatcagtagtttcactgcctaggagatgaaataatcacagataaaacttccgtcaaatgccggccgggcatacaggcgaaaattcgaagcagtagaaggcaattctttcatgagcattagaaaggaaaaagtggacaactatgtggcatgcatgtaaatgctttccctgtgttgtatgtgaaaatataagttgcagatacggggagcatgctatttacagcaatgtga

SEQ ID NO: 244703 - DNA, 383 bp, Gossypium hirsutum
tgaaatataggaagtaggaaccatttatgtgggctttgatatttgggattgattctttggctcgattattaaaaggggaagctatgtaggttggcatggcatctcaaaacattaatctactacaaactacaaatggctgaagaagtttatccttttccctttttgatgcactgagtaccacttcatttggcttcagaggttttacattcttttaaacatttaataatgtctgttttcgtcttcttgaagaatagtgtgaattttagcactgactttagccttgagttgtacatgactcaagcaatggaatgacattaagaatcatactagataaaatagtacaggaatagatgatgaaacttatactatgcaacttcttgaat

SEQ ID NO: 244704 - DNA, 303 bp, Gossypium hirsutum
ttaaaagtataagtgattttggctattggcgcctatatgtttgaaatgtattgagccatgagatttggcttgtttataatgtgaggtttgatatgtagatggccttataattggtatgtaattgtggttatgtggtaagctttagtaaagttattgatgcattagtggaagtgtccaaattgatattcatgattgatgaataatggtatttacgtgtttgtttatattggtattgagaggttaggttgtaattgagatgatgaaaaaggaatggagtattttaggtctaaaagacattgattt

SEQ ID NO: 244705 - DNA, 337 bp, Gossypium hirsutum
cttataatcaaaatcaagaacatatacaaaatatgagcaaaatgggaaggaagcttcatggcttataaagagcagattgaaaaagagtgccaatctgatccatttcaacagttgagaaagtgacctttgcttcaagcacaaccagatgtcttttacctcttgcctcttgggcttaaactccggagtatcagtgaatgaccaagtttgatgctttttggatttaaatgattgtgatatataagcatgttttgttatactgaatactggtaatgagtgctataaatccgaaaaattttgtattttaaatttgaagaacggagtttcattttcttctttt

SEQ ID NO: 244706 - DNA, 385 bp, Gossypium hirsutum
  unsure (1)..(385): unsure at all n locations
gctcagcaacaatcctcaactcatacggtgtaccatcagtttattcctcaaaaaggagtgactgaagatcgtacggtgaacagatcangtgcaaacaaatgtactgcaggatggctttgatcctttctaacccattaccactgcgtagctgcaagacattcttcattataattcttatcatatttggggaaaaatataaattaaattaggatgcatatgtaccttttctacatatatatttatatacattacagtgctatatgtctttaaaagattaatactgtctagacgtaattaataacccatggaatgaagaatccttgtaaactatatatttttggcagtaaatttgttaatattgcaacatttataatctatttttatt

SEQ ID NO: 244707 - DNA, 369 bp, Gossypium hirsutum
  unsure (1)..(369): unsure at all n locations
attgtcttcctanatgtttcctttttcttttccttagttttgctttttggagagcactgcctattttagatttcttcaaccaaactccctgtatttcgtccataagaatgcctttcaagatctttccggaagacttgctgctggtttagcattcatgggagttcggttccctcctcgttgcttaaactattattctccatctgtgatatcttagcaacttcttaggatctttcattccttgggaactgttacatcagatcttttcttagtatggcgtccttatttccattacttttatactctgcgtataatgtttactcctataaataacaaattcatagtatgttcgtttatttttcaacattttta

SEQ ID NO: 244708 - DNA, 290 bp, Gossypium hirsutum
cggacgcgtgggtgaatgcattcattactttgagaaacgtggaagagtttggtttgagtggaacggacaaaagggtgtattaagagccaaaactgattatattgacaccaaatttgagaaacagtgaactgcaacaacatcattgtttgatttaaagaccacacagacactgcattgtgcatatttggacctagcagcagagagaagcaaaaacaagcaagctgagctggtagatgcagccagacccctgctgataacctgttaagctcaatggcgcaagaaggaacctt

SEQ ID NO: 244709 - DNA, 358 bp, Gossypium hirsutum
ccctgatccccatgcatgggagagtcaaccttggggcaaagaacatgctttgggggtatggtaagaaccgaaggaatagagaagaaagcattttgaaagccataaaaaatggagcagagacattgtttgacataaatgctaatgtgtattctggggtagactgcactttgtggactgctgctgcatcaaaagtgaggctatatgtgggtcatatctacccccacaagagactctataaggggtcttctatatggaaaactatattgacagtgtgtcagcattagagagccttgtggttgcttatgaaccgaactttgaagagctttatcattggaccactattctactacctgtcttt

SEQ ID NO: 244710 - DNA, 413 bp, Gossypium hirsutum
gttggtatttgtgtatactttaacttaaaaggctatacttcctctaattagctatcttaggttggaagataaggaagcttgatgactctgagtttcgaaatccatttagccaggcttacatacgggtatgtttagatgcattttaagtcttagatctatgcttctgcgacattacttgatagcgtatctaactgtcttttttttcaggtggagtatgattcaagatatgattctaggcgcagctactttagaagtcctagtcgtagcccatatagtcgaaaccctaatctagaattgaatctatcaatcctttttcaacagttaattctgcccatttgcaaacatattctatcattgtaacatgcttacgcatatctgctggctggtttattttatctcagctgtatttagat

SEQ ID NO: 244711 - DNA, 410 bp, Gossypium hirsutum
  unsure (1)..(410): unsure at all n locations
cttcaccaagacactgacccctctctttcaaattctaaagtgaaccgccaccgagcaacgggttgtatgctttgtttcaacaaggtcctggcccgagatcccaacgacacttacgctagtaatgagttattggaggaatttttgaagttccttttggttgcagctactgcagctaatacaaccgcatgattagagcttgccaaatcatttacgagataagctcttttaaattctggctatattctttaaaatctgttttagcgatttgatttttaggaattatagatagtgctatattgcttgtatttcgattaatgaggtactaatactttcgtttaatggattttaagcagcatattgnctgtatctcgatctcattattggagcagttttatcaactgatgccacta

SEQ ID NO: 244712 - DNA, 432 bp, Gossypium hirsutum
  unsure (1)..(432): unsure at all n locations
cccacgcgtccgttgtcaagcagctaaagcattccaaaaagttgtatgaaggctatgttccaatgaagtacaaaggctacctgaagaagatgaaaaaatccggggaatggggagatcatgtcactttacaagcagctgctgaccgattcggagccaaaatttgtctggtcacctcttttcgtgacacttgctacatcgagatcatgcccaaacaagcaagtcctactagagaaatttggctgagcttctggagtgaagtacattacaattcattgtatgcaagtggagatgttcctaccagagcaccaagaagaaagcattggcttttttaggattgatataatatgacacattcccagnttattatatctattatatgtatatntttactcacctttatgtgccattcagaaatagtttgctattacaaaa

SEQ ID NO: 244713 - DNA, 364 bp, Gossypium hirsutum
catttttgttgaaaccagggggttattttttcggttttactcctgactcatctaccatgggggcgttgtaccagaagaatgttgaagcataccacaacagaagtagcagcatgaagcccaacatcgttcccaattgcattcggtctgagaattacatgatcacctttgaaattgaggaagagaagtttccgttgtttggaaagaaataccagttgaaattctcgagtgatgttgctgctgagacccattgcttggttcattttccaagtttaatcaagttggctagagaagctggtcttgaatatgtggagattcaaaacttaactgaattttacgatgataacaaatcactgtttgcaggcat

SEQ ID NO: 244714 - DNA, 388 bp, Gossypium hirsutum
  unsure (1)..(388): unsure at all n locations
cagcacttcagggtcttgaattcccatcgaaccctgattttgattccgaggagttctaagaagtcgacaatcgggaaattggataaattttcttgtaattatagatacaggaagcactccgacattgcttccttgtttttgtacaggtattccggctctaactgttcgttttcatgtgacatttgtacatgctgactgaaaatatagaagaaaatggttttgtatttcaaatttgcttgaattgtttgtatttgtattaatatcgtttgtttttttttttaataattacattatagattctgatcaannnaaaaaaaaatatatnaccttttttacattactaatcaatttttcctcctcaaataaataaacaaaaaaaggggggggc

SEQ ID NO: 244715 - DNA, 314 bp, Gossypium hirsutum
  unsure (1)..(314): unsure at all n locations
aaaatagggtctttggttgtgtctggattttctaatgagattagtgaaagatggagagattccaagttcttaggcctctacacttgatttcatgctacgtacacatcacttgtatcgtaggggatttaggacaaaactctatcggcatgcctgcatgtgacagcgacatcatatctcattttgcagttgtaatcgttacgaggggaatggcttgtggtttaaacatatgttcttgtacaatgccctttttatcgtcttaannnanaaaanananatnaaaaaaatttaantttttttattatattttttttttt

SEQ ID NO: 244716 - DNA, 237 bp, Gossypium hirsutum
cccacgcgtccgcccaccttaaagatctgcgaaaaagttgtttgaaccgctaaacccagctcctcctttatttgcagatctttaaggtggggtttggtttctcttgtctcaatgttcaattttggttggggacgttaggtggacacgtgaaaatggtttactggtgatgactaatatgattaactttatggaatttgctttccatgtatttactaaagagtgatgtttttcttattt

SEQ ID NO: 244717 - DNA, 375 bp, Gossypium hirsutum
cccacgcgtccgcccacgcgtccgtgaaaacggaactttcaagacaatcgaggagttttgggatggggaaatttgattacattttcattctaaaaaatagccttgagtcattatgttaacttggaatttattcttcatatttgttaaaataataaggatgtttgcttgaattaagattcaaaaatcttttaagatatttaaatatatttattatgtattaattagtatatatttttattaagtgaaactacattcaagatcactttaaaattagatttgtcttatttgtcttattttagttttttttttcaatttagtcacttaattaaaatgattgtcaaactaattagtatgttaaaaattatgttaattcac

SEQ ID NO: 244718 - DNA, 389 bp, Gossypium hirsutum
cggacgcgtccgtttcttattaataatcactcataaattttttaaaggaattgagtatagtttaattaaaaataaattcatttataattatatttactatctttgaaaaaaagtaccaagttaatttaatacgatattaattgttttcttttgagtgttgttgtgatgaagagcaataggttttatttctgactttgaggagaggcctcttgatgcttgaacccataatctctatattccttgtggtaatgggatcgtttgttcaagtataaagaggtacctcttggcagaatcttgagataaaattttgtgctgctctccaatgcaataatattctgaagaaaacgatactttggtcttatcagtatgataacaaaaatagttttaaa

SEQ ID NO: 244719 - DNA, 337 bp, Gossypium hirsutum
tttttattgatttgtacttcctttagtcaacaaagcgttcctgatgatactttgaagatgcagttattttcttattccttgtagggaagagctcgtacatggttttttgggttaaaaaaaaaaaaaaaaaaaaaaaaaaaaaaaaaaaaaaaaaaaaaaaaaaaaaaaaaaaaaaaaaaaaaaaaaaaaaaaaaaaaaaaaaaaaaaaaaaaggggcgggctattgggggggcccattttaaggaaccaggcttaggaacccaaaaatggtaacttaaaagacccctaataggaacccatataaccaattttttaaaccgtttttaattagaaaaac

SEQ ID NO: 244720 - DNA, 215 bp, Gossypium hirsutum
  unsure (1)..(215): unsure at all n locations
caacatgttatgttagctgtcactcgtcttccgttgcagtgttcgttttttttttttctggagtggtttccaaagttctttcatcacagcatggtaatgtaatcgcatctcagtgttgaggatttaaatcaccattagcaatgaggttttatcgtttnacaaaaaataacaacaaaataaaaaacaagcaatttgaatcataaaaagaacctact

SEQ ID NO: 244721 - DNA, 436 bp, Gossypium hirsutum
cccacgcgtccgcccacgcgtccttttttcttccaacaacttaaccttatcctgtgaaaaggcagcaaaactctttacggtacttggaaactcaagtctgcagaagaagaagaaacagctgttgttgaacaagaacgagaagaaacaactgtagccgaacaagagtctgtttctgttcctgtttctccttcagacactctcagaatgtacttccaggcagatggaatgttgaatgaagctgaaattccgaaggtgaccaaggcattagagggagcagaaggcgtttccgatttgaaggttcaagtccttgagggtattggtactgttgagttaacgaaacagactacggttcaagctaccggagtagcatccaatttggtggagctcatacaaggcgcaggattcaagttacaaacattgaatttgaagtttgatg

SEQ ID NO: 244722 - DNA, 423 bp, Gossypium hirsutum
cccacgcgtccggcgatttatatacactggatcagtagatgtttcattggatattgcacaggatctgctcggagctgctgatcaatatcttttggaagggcttaagcgactctgtgagtacaccattgcacaggatgtaaccctggacaacgtttctagcatgtacgaactctccgaagcttttcatgctatatcactgaggcacacttgcattttgtttatcttggagcatttctctcaattgagcgacagacccgggcactcacatctgatccagcgtatagttccagagatccgcaattacttcgcgaaagcgcttacgaatcctaacccacataaccagcggctgtagaaggctggtttttaactcatctctaacaagatacgttgatgtatagaaatgtagtagatgtggagccaatt

SEQ ID NO: 244723 - DNA, 395 bp, Gossypium hirsutum
ctcttattctcttcgatattttctccccccatctgttgctttcttcttctttttcccccgcttcttttacctaattgcttcccaaatatctcttcagattgcttgcccaaaccctggttatttgtgagaaatactagtgggaagtcaaaatgcaggcttgtaatggagcttgcaattagtactcaatttgttttccaaatgtttctgaaaattttccttctcctttaatttattcccttctaaactctaccaggatgagctgttttttgctgaaatagagtatacgcagaaaaagccaataccatctgtttcatcatgcataaaagttcaggcaacaaaactcatcctatgaaaaaaaaagataaactcaccggtggtggagaagaggaacaaag

SEQ ID NO: 244724 - DNA, 407 bp, Gossypium hirsutum
caaaaacagatgacaagaaagaaaaaatatatatatatataaagagagagagagagactcagtcaggatgattaaggataagcatcaataatctttaggtattagtatttagtacattggaaaatgagtaaatttgactagtaatatgaaatctacataaaacaagttcagagtcaagggtataagaaaccgcccgagttcaaatttcacccaaaacaagagatataagatctgtatcaaattcaattctgacaagtcagacagatctaaccacactgaggcagcagtgcatggtaaaatgcataataaatggcatccaaagaaaagatagcaagatatatgagcactgccctaagttttggagttccctttatttgcaaaggttagaacatagaaggcttatgagc

SEQ ID NO: 244725 - DNA, 271 bp, Gossypium hirsutum
gtgagcatggactggaagatgtatttttcggtccgatgctatcacgttcgatggcagtggatactaaatcgaaactgtcgccttatgtaggctgctaaaacttcatcataggtgtaagagctttgggagtgcttttatgatgattgctttacaagattaatttgaatgcctactatatcagtttccatcatttgtttttgaagatataaaggctctattccattgagtaccgagaataagattatatgcaaattctactgtttatacctca

SEQ ID NO: 244726 - DNA, 354 bp, Gossypium hirsutum
  unsure (1)..(354): unsure at all n locations
cggacgcgtgggcggacgcgtggggtccgggagaaattgcttcaatttgagcaggaactgaaagatcggtagcaagggttcgagttctgttccatttaaactttggtttttgttgaaatttattattagactgtaactgtaactgtattctgtcatctgttgttagcgactgcattttattggaattttatgtaacgggacataagattgttgaggagtcaaatggcttcgctcatatatggtttaggtgtgccactaatgtttagatcaaaaaatagtatttgcttgcctgcaaaanaaaaaaaaaaaaaaaaaaaaaaaaaaaaaaaaaaaaaaannnnnnaaaaaanaaaa

SEQ ID NO: 244727 - DNA, 293 bp, Gossypium hirsutum
  unsure (1)..(293): unsure at all n locations
ataaatcctcattattgtagttcagtatccacgaaagattaagatgataccagacctcagtcgctgcagggcactgttgcaaaatatggcgactgctttcttcttcagactcacatctgggacatttagtattcaccaaaacccgctttattttgagattgagaaaagatgggatatagttccatgaaatcctccatatagtcattttgattttcgatggaatttgtaatgtccatagtttcctgtaaaagtttatagtttcggtatgtaaaaataactcattaggatccana

SEQ ID NO: 244728 - DNA, 403 bp, Gossypium hirsutum
cttggaataccatccaacagttcttgaatcacccactatttccaaaacattaaatcccacagaaatccctaatcatgtggcttgtaaccctgcatgtgcctccgccacaaatggagatgcaatatcggagtggataaccgacttagacgccaagatttcgcccctcacatcttgtactaccagtcccgaagcaaatctgaaggcttgttgatcaaaaactgcatcaaagtaaatagccaccctcgttctcctatcaccgtgtttaggacctctctcttcttttaagatgagtgtcttctcatttattcctttcaactcggaaatgtaactggagatttgtttcgagatgtctctactcgccgtatttttgcttttatatattgacctatttctatttgcctag

SEQ ID NO: 244729 - DNA, 285 bp, Gossypium hirsutum
acatgggcaacaatgaattcgtactgggtcgtttttaatcccaaagcttaactaacggggcccctgttggctttaacaataagtccatttccttaatttctttctttgatttacattatttattgtactgcttttatttttcctgctttattcatgctcaaatttgttcgcaaaaaaaaaaaataaaaaaaaaaatataaatgcttgtttatctaaaactgcattaaaataaaaaaacaactctaaatttaatatcaccatatataagactctttttttttttat

SEQ ID NO: 244730 - DNA, 416 bp, Gossypium hirsutum
  unsure (1)..(416): unsure at all n locations
cccacgcgtccggggatcttcttattttgtgaggaagtgtgtgcatccggaatgggagaatggataccaaaataaacgaaagattgatgagaaccctgatgaaattgtgcacaaatcttcacagtgtggtcttgaaagcagtcccgagaaatctactaacaatgacattggcacagcgccatcaaggggacctatcaactctgcacctactaataagaagatgcggtatgcaggttcttctactaaatcgatctatgctaggcaccttggaggcaaagaacgttgtacttttcctggagaagtgaggttcgaaactgagtttgatggtgcaataatggatgaaagtgactntagccctcaccctacatgttataacgggcctttgactcaattcgagaaagcaaatgccattgcaa

SEQ ID NO: 244731 - DNA, 315 bp, Gossypium hirsutum
tgaaatttttgatgatcgagtttgccttgtgaagatgttaagtagatagcagggtcgttgaacgcccctagcccttctaaagtctacaaagatatttaattgcagaaccaagttttgttacccttttaatttaaattcccttttctccttaaattcactgcattctcattactttgattttacactatgaaatgaccaaacgtgcattacaattcatctttgaaaaaaaaaaaaaaaataaaaaaaaaaatataaaaaaaaattattaaaaaaaaaaaaaaaattttttataataataataaaataataataatg

SEQ ID NO: 244732 - DNA, 277 bp, Gossypium hirsutum
caaagagggattttgaaaattcccaaaccccaaaaaaaaggctgcaaaaaaagttttggaaaaaagcgtgaaaaccaagaggctgattcaagttaaaaccccaggggcttttaaaaaagcaaaaaaggttgtgaaaaaggcggtttcgggttcaaaactgaagcgtttgagtcaggttaaaacccctgagggattgaagaggaagacctttaagcagccaaaacaagacatggaagtcaatgttagttgacaggtgaagatggtagggtttcttttt

SEQ ID NO: 244733 - DNA, 419 bp, Gossypium hirsutum
agagaacccaaagctttttccgttaaaaaaaaccctaaaatttttaaatgttctctcaacctccaggcgaatggctaatgtccagacctccaattgctcgcttgtaaccggcgaagcaaggccctccaacgaagcggtaagtctccctctctcccctatactttagtacacaaaataatctaaatgaagagctgaaagtaatagagggaaataaaatatgcaatcaccttcaaaataaaaactaatattcacttgctgttttttgcttgtattcagtatctcgtgtgaatttttgtactcgatttctattctatttctctgaagaaaaaaaaccccatacacttaaaaatcgaaggcttttatagccaaaatacaggcagttccttgctattctccattttgcaagtacgtggagatgt

SEQ ID NO: 244734 - DNA, 418 bp, Gossypium hirsutum
ctagtcttaaagtggtagaggtgatcggcttcagaggttttaaaatcgatgtggatttcgttgcatatctacttgagcatgggaaagtgatggagaagattactattaattgttgccatccaagttgggctgggcaaataattccatgaaattctccatattgtaaccttaattttgtttggtagatttaggagctagagttttttgtagaaattcatgtagccagtttgtaaagcctaagctctaggaatttcctccaaaatttgtaataatttataggtgctgcgaaccgaaaactcgcctcagtacgcgcctctctagaccaagagatcatcgtaaagtgtgcgtgctaaaggaatgtggaggattttcccagcatcatccgctgaaaaggtgtagacttgagacgttctatgat

SEQ ID NO: 244735 - DNA, 379 bp, Gossypium hirsutum
cccacgcgtccgcccacgcgtcctccaaggtcgacactgagtggactcggtggatgttggtcatcttcaagcaacggtagtcctaatggtccttctcaagtaccatctccaccaacaacaccttttggtcctcaaaatgacacttgggatctcatttatgctgctgctggtcaagttgctaggctaaaaatgagcaatgaagtgcctaaatataccaactttaaccatggtagaaccttatccaaaacgctccacaaaatcagtatataagcaatggcatagcagccaggggagggcagggagaagaaaaacaacacatacacacacagcggaattagattaattgagaaaaacgcaatggctcaaaagatgttgatga

SEQ ID NO: 244736 - DNA, 323 bp, Gossypium hirsutum
ctttttttaaatcctattaacagttccattacctatcaacaactgagtcactgaagactggagggatttaacagtgttagagagcactcacggtggaaggtatgggttggatatggactcatagtccaggataagttccttttgggtccttagctaatagctatcctggttctagaagtgggcactttgtgaatttgagggtagaaactagaattgatttaagttgcagtactgcttgtgtatatctattttctggaataaattgcccatcagttttcaagttcaactgatttttcaaccttttaggcgattctttttatctt

SEQ ID NO: 244737 - DNA, 279 bp, Gossypium hirsutum
  unsure (1)..(279): unsure at all n locations
tcgttcccnccccgnccctttcaattttattctcagtcttttaattcaatatgccctaatagtcgggacaggtgtcattctggtatagtggatatatatatatantggctgtaggggtagcatnggggttgtttcgttcgttcgttcgtatgttcaattctttgttttctttctctttgaagtgtgatttgaggtgtgtttaattaacttattagaatgtaccaatgatgaagatgaagtatcaaaggtggaaaaatgttagtagttttatttaatttc

SEQ ID NO: 244738 - DNA, 358 bp, Gossypium hirsutum
ctttcatctgtcaaatacactaggcacgcttcttgtttcgaaccaactattggggtttgagaattacaaatgtttggaggcgttagatgcgctctacattgttggcaaagaataaattgggctttgttgatggagtttgccaaaaggaatcttatgatcccatctttcatcattaattggagcgctgtaatgccattgttctttcttggattttgaatgcagtttataaagaatttttaataagaatcttctttgtatcaaggtgcttctttagtttggcaagatattgaagaaaggcacgataaggttgatggtacttgggtttattttctccatcaagaaatttcttctcatgtgc

SEQ ID NO: 244739 - DNA, 415 bp, Gossypium hirsutum
cccacgcgtccgcgtagcccttctccaattcgtaggcggagccgttctccaattcgcaggcctcttcgttctcgttcaaggtcaatctcaccaccaagaggcagaggacctgcagcacggcgtgggaggtcatcatcctattcccgatcacccagtccccgaaaggcaggacgaagggtttcaaggagtcgcagtcctaggaggccattgagaggaagaagaagcagcagcaacagcagcagcagtagttcgcctcctcggaagccgtagattccctcagctgattctctatttgttgtgtgaatgatgtaataggagagtcagtatcgagttgcttgagaataatacttacacattgcatctgtgatgatactttaactgccttttaacaaagtcttgatgatgagttgtgatt

SEQ ID NO: 244740 - DNA, 427 bp, Gossypium hirsutum
ggcgagtaattaggttcaagtggtaaatcctaaaattaagtggtttatgaaaatgaggtatcaagacctcatttctttaaaccgagcctgtaaatattttattaaatatttacggagtgttattaaggtcatattatagtttcgttagaaagttttatcatttaaatagttaattaattaaaaaagaagaaatcgtaacgatagcaaaagtgagttttattagttaaaaatgtgttaattgataaattattaaagttacaagagtttttgatgcagttagaccataacaatgaattatggctagttagtggatgtaggaattgaaaagaaaagaaaaactaataatttaatatatgtttattaattaaacaaaagttaaagtattaaaataaaaaaaccaaaagcatccatcatcttcgttctttta

SEQ ID NO: 244741 - DNA, 402 bp, Gossypium hirsutum
gtcagaaacatttttagaagatagacatatctctccagctgttctatatattcgagtatgtgcactccaggaaggaataggatccaacatggtgactattgcagaatacagattgccggaggccaaaccaggaacagtaatgtactttgatttccctagacaattacaaacagaaagaatctctttcaaacttctgggagatgttgcagcatttacggacaagccggcggagcaggatgattctagttttagagctcctgctgttgctgcaggcttgtctctgtcaaatagaatcaagttgtattactgcgctgatccttatgatcttggcaagtgggctagcctttctgcagtttgacattactttaacccaggtggaaaaaatgggtttaaaagatgggt

SEQ ID NO: 244742 - DNA, 297 bp, Gossypium hirsutum
  unsure (1)..(297): unsure at all n locations
ccggcccgacccacgcgttcnccagactcatcccaagttatggtttcttttatgccagcaaatgtgtaagttaggggcatggtgggtttctaatcaagcaacgatcaaatgtcatgagtggctggctgatagtaaaccaaggaacttcggtcatcaatccctaaaccggttccgaaaagaaatgtaacgtatggttagagaggtccaaggagtgaaatcgctgaataataataattttatcaacattttgngaaaaaaaaaaaaaaaaaaaaaaataaaaaaaaaaaaaaatattaa

SEQ ID NO: 244743 - DNA, 315 bp, Gossypium hirsutum
  unsure (1)..(315): unsure at all n locations
gcgtccgctaaaacaaaatgggtnnttgggcttaaattgtaatatttatnggtttannggttttaaaatnnttgggtcaatgtgagatttggacgtgatggaaataattnngtaatgaaatttgaaaccntgtaaaatggaacaaattagaaatgggctnnngttaattaannnaaaaaaanannaaaaaaannaaaaaannaaaaaannaaaaaannaaaaaaaaannnaaaaaaannaaaaaannaaaaaaannaaaaaaannaaaaaaannaaaaaacaaaannaaaaaaacaaaaacataaaaaataaaaa

SEQ ID NO: 244744 - DNA, 426 bp, Gossypium hirsutum
ggcgctcagtccgagacgccggctcaaggtgccggatatctcgtcgtcatcggcggagccgaagggttagcggcgcgtgttggtagctcccgagacttggttaccagctggatggtcgatcgaagatagggttcggagctccggtgcaactgctggaactgttgataggtattattttgatccatcctctggccggaaattcagatcgaagaaagaagtgctttactatctagaaactggaatccccccttctaaaaggaagaaaggagcagaggcttctggaagtgaagaagttggtacagggaactctgggggcaacaaacagaagaagcctgataaaaagctgaaaactttgaactttgatttcattaacgtgccgcaaaaagttgattggttgttggcaaatgcctctgaagactcgtggac

SEQ ID NO: 244745 - DNA, 375 bp, Gossypium hirsutum
aaatggcccccttggtggggaactggcagcgaatggatgtcaatgaatctattcctaggaaagagcgtatcgggaaaatgttctaaagagagcagtgtgacatcttacactgttctgtttaatagacaccggttgtccagatttggtgtgtggcaaatgtatgactacatacatacataaatacatacatacatcaaggaacatccactgtaatttttatggccccaaacttatttattttgaagatgggatttaatatttcattttcagatatacaaggatactaagttgaagtgtgggtggtagtctttttcatgtcttatgtaaatactgaaaatcatcaatagaggctctgatgcatctgctctgtctcgt

SEQ ID NO: 244746 - DNA, 390 bp, Gossypium hirsutum
ggatcaagtgagagaggcttctgagttatcatctaggaaaagaagggatagttgggaggttgaccgagtccggggatttggtgttggagaagccagttccatagaacaaccctcaacctcactccattagtccccgacctgcattgcctcaaaaagagaaaacagagaggtctgcaaatgaattatgtcatgtgcaccatggtttattgcttgagactatcatgatatggatgaattgttacaagaatgataaggaagttttgtacataatgggcaatcaaatctatcctagtagacattcctgatttagtcattatccaagtaataagacttggtaacggttggatttgaatcgattttggaataaaattacatttatcctgctttttt

SEQ ID NO: 244747 - DNA, 223 bp, Gossypium hirsutum
gttatttccaatttagaattggtacaagtattcttgttgtattaaaaatttatatataggggaatggtttgatacactagtttcacaagcagtgttgagattttatcacgtgtggcaaaatctcattaacttcccttgtatttacactttaattctttggtttaatattattaagctttatttcaaaaaaaaaaaacaaaaaaataaaaggaaaaaaaaataa

SEQ ID NO: 244748 - DNA, 329 bp, Gossypium hirsutum
gccatggctggccgtacgcttcttgcattatttgtcctataactctgcctaggagagggggtatctgatcagtgggctgaagaagacataacgactgtttgcacggtgggttttaatataaccagaggcggcaacagaggactgatgctagagattgactgcgtacgttcatgcatgcatacatgcattcaagactctacgcctgacagattctacaccgcaactgatacttgctgaatgaggtacaaaatcttgccatctcagacttacaaggacactaaggtctactgtacctggtatactgtcatgagcaccattggaaaccttaa

SEQ ID NO: 244749 - DNA, 195 bp, Gossypium hirsutum
tttgttttgttttttccctaaagggccgggatacctttcatagaattaaaaaaaatcatatgccgtatattgacgcctaatttcaatacactgcccgccgacatgaaacgtctacacacaaaaaaccctggccaactccaatttaataaagtttaaggccacaagccttcttacttcatactataaagccatata

SEQ ID NO: 244750 - DNA, 411 bp, Gossypium hirsutum
ggttactagacctcacggtaatagtggtgtcttccgttctaagttcaagtctaatcttcgggccaggtgtatttgagatagagtccgaatcttgatgtacccgagcaatatataagttgtctaaatgcccggtgttctatcgatgactcgcgtgatactatcttttctatacgactgtcaaaatgttgtgtgttcttgaggccatttttttattcattaggatgatagtggattagactttcgggacatcaaagattctccagtgattaattttcgacgatttaagagttcggtaatcaatcattcatggaattgaatatcaaagattgttctacttgagccacaaatgcaaagatagaacatgtgcagagacttctgtaatgctagaattatcaaaatgaatattcgttt

SEQ ID NO: 244751 - DNA, 337 bp, Gossypium hirsutum
aaaaaacttcatcgactgccgctcaaacttttgccatacaacctctcttgccaccttcaagagaaacacatactaactcaatatggtgttctatcaatttgactccaacaaaaactggcaaatctctattactgatctccctgacctattaataacaattggatccaactactcatatgaataattcaagcgtatcatgaaaaacatccacctggatcaacacaggtacatcaacttttccaaattctccactttttaggcctcttattccctcaccgtttaagccagtttctatttgcaccaaaccttctattcttacaatcaaaacaacaactgt

SEQ ID NO: 244752 - DNA, 172 bp, Gossypium hirsutum
  unsure (1)..(172): unsure at all n locations
cccactcgtncgnggacgcgtgggcggacgcttgggcggacgcgtggggcgccgctcggggtctagatccggacgcgtgggcggactcgtgggattaatcagaccacctttggggactttatgtaaatgtggaaaaaagtgatagaatacagtgaatacagttagggttgcg

SEQ ID NO: 244753 - DNA, 317 bp, Gossypium hirsutum
  unsure (1)..(317): unsure at all n locations
tcaaatcttntttgnacaccaaaattaatatattaccaccctcacggatcacttgggcacgagtactttaaaaagcgtctcttactacatttcaacaatcaaattacctatatttaaatatccaaaaatttctgatttaactctccatttcatcaaaactttttatgcttccaaatataattaaagtgttatatatttaaaaaactatccactttaaccacttaaaaaaatcactcttttaaagtccaatattcatcatccaattaaaactataacatgacatccaagctcctactttcaccaaaccaacaatacat

SEQ ID NO: 244754 - DNA, 346 bp, Gossypium hirsutum
gtaacgcgttgcgaaaaaccctaggattttttgattcttgggcttatccctttagatggagcaagggtgaacacacagtaggaacactacttagctctaataccgattcagcgcatgtagccattaacatagagtagacagaaagcttgttaaacagattctctgtcataagccaccgaaatgaaaaagcgatgtgcacaattcaactctgatctgctatagatttatcctagcgatccaataaactgaccgcatgtgcgaggatgctgtattaccagaagccaaggcgaagtagccacttgttctaataagcgagacaaatgatacacttggtcctcaacgatca

SEQ ID NO: 244755 - DNA, 314 bp, Gossypium hirsutum
  unsure (1)..(314): unsure at all n locations
gcagcctcctcccacacgtccagccagctttcaccgacacaaatgctaggctacaaggggaatgaanaggaaattaatagacccaattgcatatataaggtagctttacccgataataaggtaactcacgatgattcatctagcgcgatatatcacaatggcggcgccatcataataaacacagcttccaaccctaagagtcctcatgatagaaacctcgactcataatatgaatcaaaacaaacaaacaaattctcttccgaaaaagtcaagggattaaaattttgaaacgaaaacatcgcaaaggatctttc

SEQ ID NO: 244756 - DNA, 357 bp, Gossypium hirsutum
gacagctcttaggtcgactcccatttcggtttcaaggggtaatccatgcaagaatgaaatgtgaaagtatccagtcaaggtatctttagcttgatattgttgtcatctaactgtaccaatgtggcatcatcatcaatttaatttgcatgtgaagcatttgatatgaaaagtgacctggttgggaggcttgctgttggggcatctgcctttggcggtaggctatggggttttctgtcttttcaatattcttaattgttctaatgtttttttcttattgctcttttttagcttcagagaaatagcaatgaggaactatatttagtttaaaataagaaacacaaatttattttatgaatt

SEQ ID NO: 244757 - DNA, 203 bp, Gossypium hirsutum
ttcagcttcaattacccttacatttcttttttttatccctatgaaattccaagtggcgaaggccaaatatatgatgtctcttgcagcactaacccaagctccggactggacacctgacctagtattggatctcacaccgtctttagccatcattatcgttattccaaatgccatataatactcaaccttatcgtatctaattt

SEQ ID NO: 244758 - DNA, 303 bp, Gossypium hirsutum
ctgacatagattgcgtattgctatgtgtttttatgagcgaaaacaaaacagataaaaaggggctattgactgtgggctaaccttttgtcaggcttccgagttgccagtgtttgtgcgggtgtataggtagctctcaactcatcccccatccttttatttttccttctatttttgaagttcatatttgtaagatgcagttagtgtgatttgtcttttgagtttgttaatattattgtaaccatatcagatcttgtgtggcttctgttattcattaataataggtgtaagaaacaaaatacactt

SEQ ID NO: 244759 - DNA, 209 bp, Gossypium hirsutum
atcaagttatagcattgcaatttttttatttatcaacaacatggccaattttaggggcggtgacttttaaaactagttcttcacccaagatcttaacaatttccaatctaacgcatactaagagacctatcctccaccttatgtattggcaaaaaatagattttatacataatttactccttatcataaccataagatgttctttttat

SEQ ID NO: 244760 - DNA, 262 bp, Gossypium hirsutum
atgtagcctaaaataaattggacaaatctctcttctatttataccttattttcatgaagcgacttatattttgctgaccataaaccccatacaggacacacaatactttttatctgactgtttgattttttttcaaataaataataacatccagtcctattatacctgattttggtccatgggacatccaattcctaaacttgtctatacaccagctggaaaaaagcacctttgaaatacacattcccttgagtcattacta

SEQ ID NO: 244761 - DNA, 381 bp, Gossypium hirsutum
cccacgcgtgcgacaaagcgatgatgcattctctaacggcaaagatagttagctaggcacagcttgctcaaggatattaaaatcacctattcctactttcttgagcggaacatgctgacgatataacccacccaataattgaataaagcactggatctttactctggagctaccaagatgccaacgtgaacccttatataatccaacagaacgtagtatgaggacatcatggatgaccaagcaacattgagcaaactaaagacggctatgggtgcacagctgatcagtaagaatgatggcgagagaagcttccttgctgctaatgaactgtaaaagagaggcgtgtaggatcctagagtggcctgttagaacattgacatt

SEQ ID NO: 244762 - DNA, 165 bp, Gossypium hirsutum
cccacgcgtacgaccacgcgttctaccacttttgcgacggatttcaaggacaaggggaggtcgtgtgaagaccacattggaaaatctataattgccacataggccatggaagctggtgtgagatctgcagcaaaggcaggttcttccaactcatatgaattccat

SEQ ID NO: 244763 - DNA, 281 bp, Gossypium hirsutum
ccacgcgtccgggatacaggaggctcattgttggtttcatcacctatttcaagggcccagcagaaggctctgtagatgctgtaatgttcttacttgtgctgttgcttgtttaactttaaatattgtgaagatgcaactagtaattccttttatttgaatagacatgtgcgcgtgcgcacacacgctgtagatgctgtaacattcttactagtgttttttgctttcttaactttcaatttaaaaaaaaaaaaaaaaaaaaaaacataaaaaaaaacatcaaa

SEQ ID NO: 244764 - DNA, 234 bp, Gossypium hirsutum
ggtacaggacgtgtgctggcacttggtgtgtggcgtacggaggtgcgcgtggcggcacggagggttctgaaccaggctttgtgcgcacggaagccgtacatggggtgttggctgcggcgcacctaaaaaacctagggtttctgaaactattttgattttgggccacttgggcattaaatttttagactgtaattggactttttattattaggggtatttatttatttatttatt

SEQ ID NO: 244765 - DNA, 412 bp, Gossypium hirsutum
actgatattgtctacccaggcagagcaaagtctttactcgtagcgttaatggcggacccgggtgctggacccaatccgaccctcaccaaagacgataattgtctaaaatacacctgcgatgctgggtttttctctaacccacacccctccgacactccaaacctcgacgaagaagattcgaacagtccacccacttttgattccgacgactgcgactctgattgtgattctacgcacttcactgatctctccgccggtcttcgtgtcttctctgattcgattcttaggatggagctggccgggatggagatggtcaaggcaatggaagcctccagatgtgaggcggagaaacggagggcggaatccgaggccgaattgactcggatgatgttccgaactcagtcccagatcg

SEQ ID NO: 244766 - DNA, 351 bp, Gossypium hirsutum
cccacgcgtccggtcaaaattaatttttatgtactcacttaattgcccatagaccacaacgggatatgtggttctggcttggaataaactgatcaaagatccatggattccgctgatcatgatccatgttaggatccataaaattattgtgaatttataaaggtgtacacagaatcactgtgacaggacatgcacaaaaaatttggtcgattgtttcagctcattcatgcagatagctccatgaaattctgcatatagtaacatttattttagatggtagaatctcgagatatagtttcttggatacattatcgtggctggtaagaaaagcataaacttgatgaatcttat

SEQ ID NO: 244767 - DNA, 266 bp, Gossypium hirsutum
cccacgctttcgcccacacttaatttaaattctacattttagattgccctaatcggggaggggaggttttgtacagtatttccaaaaattgattttttatatgtggatggtggtgctcatgaatccaagtacacgcctcccattgacgctttagttacctgctcagacaacaatgactctcctcccgctttctaatcacacttcttccagtttttttactcttttatccactttacttctttagttgctgggcaccttctcttttc

SEQ ID NO: 244768 - DNA, 196 bp, Gossypium hirsutum
ctcacgcgtcctcagacacgtgtcattactcttggagctgacaggattctcatggctgggagcccctttcaaataatcttaaccgctttcatatggtattgataaaaggcaaacaacagaaaaggtgggcaagaatggatactttattcagatgatcagacagatgacaatataggagctcctacaggattatcac

SEQ ID NO: 244769 - DNA, 413 bp, Gossypium hirsutum
gcaggctatggcttcagcagcaaaagcagacgatacgtcattgtgaatttctgaacaggatgagagaacttttccttccgaatctctggccacaatacctgaagctgaccggccctatctctccttatatgcaccgccaaagttaatcttgatgacctcccactgtggaaaagtcgaccttgacaagtgttgagctgctctatcacccagggcattcccagaataaatgattcatagtttcagcactgtttccacatcgaggacaacttgtacttattgctagcttcctgtgttgcatattacttttgtaggcagatagttctatgacaacctccatattgtaatctttacttttgctggtagattcaggctccagagttgtttatagaatttcctgaggatggtatgtaaag

SEQ ID NO: 244770 - DNA, 406 bp, Gossypium hirsutum
ttcaaaactcagcaacctttcatttttatttttaaaaatagaagctttaaccccggcccgtggtgtttgattcaacatgcagctgcctaaaccatcatttatttgatggctgactgtgcaccaatggcgatcgaaccttgtcaacggaggacacgcccacggagatcaagtgatgggacgatgggatggggttaggtggtggcagcagctttcacagtggcatgtgcatttgagtgtttaaggctggagtaatgactggattggagtaatagagataaagatggggtttgatcttcagaaagtgcgagccatgagactgagaatagggtttttatgttctaatgaaccttttgtttatttgtttgtgatctattattttgggaaatttttcattagttagaagaaa

SEQ ID NO: 244771 - DNA, 295 bp, Gossypium hirsutum
gttaaaatttataatttattgtttagcttatattttaaaaattaaatgaagaccctataggtggtttttatcatgtattcactttatattttatgaattttcttataaggattttgttgagctaatgccgattttagttttacatttaatttttcacctttttaaaacttgtatttttgtcaaatactccaaaatcgatggaaaaaataatgctggttaactttgctgaaaaaaaaaaaaaaaaaaaaaaaaaaaataaaaaaaaaaacataaaatgaaccggagaaggatatgt

SEQ ID NO: 244772 - DNA, 258 bp, Gossypium hirsutum
cccaaactaagaaccctagaaattctttttctccaaattttctgcctcctcggtgccatgggcatcctattctgacgacaactagcagtctcacgctcgtgctatcgctctcaaggccaaagcttatcacctctccaccaagttttaggcgccagaaaaagtactctttctattattgttgtctgttcgtttgctaagaaaagctgtacgaaagggaaatcaaatgctgctatgatctgatttaccacattggtcctt

SEQ ID NO: 244773 - DNA, 297 bp, Gossypium hirsutum
aactttcttttgaaacaagaacaacgaatttatttccgcgtgaataagggggaaaggaggtgttgtctctccctttcctcaaagccacgaatagaaagctaaaagaagcgagcctctcaagggctgctgattccacaatgcctgatgaaattcataaaacagcctactcgggttcaaatcggctgctgcaatggaatcgagaacctcaatcccatggggaaattttgttgacgataaataaccccccggccagcaaacttacaaatctacagatcattactggggtttggagtgaaa

SEQ ID NO: 244774 - DNA, 140 bp, Gossypium hirsutum
gtcattaccaatgtggatgagttttggagggaatgatgccttaacacatgcaacggatgtgcagcgcactcttgaagaattatcgtcaaaaccagagttgctttatctcgataactatggtcacatagacttccttttga

SEQ ID NO: 244775 - DNA, 315 bp, Gossypium hirsutum
cccactcctactggttgttacttatgaattttttaagactcaatgcacttccacattagggcggtgctatctttgagtcatctggtgtatacagcatgggtgggctcatcacacttactggtacttagactttgatgggagccgagaggattcaatctcttcatagctacataagccaaggcttttcacttcttcaaatagaacgtagtttaatgttacatcccatagtgattcatcttagccagaacttgaactatagggtatggaatacaggttttgttaacttccttgtttgccagcgtttttaaccatgat

SEQ ID NO: 244776 - DNA, 399 bp, Gossypium hirsutum
cccacgcgttcgtccacgcgtacgcccacgctttcgattcttggaaccagctagagggaaagtgggcggttgttaataaaggatggtgctgagatgaggcgaataccagaatatacctgaagtctaatacttgcagcacttgcttcagtttgtcagttcaatgttctaacaaacgtaaaccgatgtgatgtggtcttgtggggggcttatatttttctatattttcccctatgtgtagaataaaaagaatcttgattgctccctgaccttcttgagataactgagccaacttttgatatgatgataatatcctctatatttgtattttgatcttcaaactcgatgacgtcatacagatcgttaaagaatgaagccgatgtccatggctaaagatttgag

SEQ ID NO: 244777 - DNA, 405 bp, Gossypium hirsutum
cccacgcgtccgcggacgcgtgggttggttctgttctaagcttcatggtggctataataatgccagcactgtgtttcataaagattgtcgggagaaaagcttcaaggacagatattgttttgagttcaacagtagctgtaatcgccatcatctgtgctagtttggggacatattctgcattgcaagggattgcgagcaattactaataccgagagaatagcttcctgctagtttccgatatgtagattgtcatcatggggttgctcattcttcctgcatctacgactttctgctgggaaaatggatctttcagtagctagctgcctggataaatttggttccagatacattatcataaggcattacagaatattaggattaagacatgctcatgctcatgttaca

SEQ ID NO: 244778 - DNA, 222 bp, Gossypium hirsutum
tttttcattgcaagatccatcattcattttcaccagccccatctaactgaatggggagggcggtttctgcggcctaaattgaactcatttgaaacttgctcctagagattacattttcagagacactcccaataagaactcctaatatatgagtataaataccacaccagaatgggaaggtctgcgaatgaccgccaaatctactttccaaaagcaaaagtc

SEQ ID NO: 244779 - DNA, 164 bp, Gossypium hirsutum
aattaaagggccgacccacaccgtcctaatttctttcttcctcgcatacttcaaaatatttatatccaaaccacaatttgggcgaagaggtatctttacaccaactttgacctcctttcatcctgtttactcactccgaataacaaatctatcggaaccactcc

SEQ ID NO: 244780 - DNA, 284 bp, Gossypium hirsutum
cccacgcgtccgatttcatagaaaaatcataacctacacacaaaattttcgtgttaaaatattttaaattgaattaataattttcttgaaaaggcaattttttttattacctttttatggggctggaatgactaactcgattgttaatagggcttaaagcttaaatgaaattagttaactaagatggcaaagcccttacatccgtctggttaacctttgctataattataagtttaataataaatccaattttaaataatccaaatttaaataatgatgtggaa

SEQ ID NO: 244781 - DNA, 142 bp, Gossypium hirsutum
gttttatgggaacattacatgagaaatgtcatttattgcattggattcttttaaatattggaggttctatttcatgtgctgttagctatggtgcttgcctaattctgatttttgggcaagtatatgtgctgtcgttatgcaa

SEQ ID NO: 244782 - DNA, 127 bp, Gossypium hirsutum
catgatttatctgttaatgtatgtaggttccttttgtgtactttcgtgtaggaaaagacagaagtgtagaacttgataacatcattcgtaaaacaagcatcacccgccttgtttatggcatggatgt

SEQ ID NO: 244783 - DNA, 161 bp, Gossypium hirsutum
gcggccaaacctattatcagtgacccaggtacgtgcatcaaccttggccgagaggcttccatccggatattcttcaattggcaggggccgcaagtacaccggcggctacagcatagctaaggaggggggggaacacctcctcatcaaaaaaaaaaacaaaa

SEQ ID NO: 244784 - DNA, 407 bp, Gossypium hirsutum
ctctttcccaagcaacaaacagaggcacttttttgattaaatcactggacaaacactaccggagccggtagattcgtaacttaacggacttcttcaattgcaaaaaaagatcaacaggctcaaggatttcctccattggtggtccaagtaagaaaatttgcaagttatttcagggctatttgcactgcattttgcagtgttgagtaacaaataaataaaatcaaactttcttgtgaaatgccatgtagatggagattgttaagaaaagcttttgattataaaaattcatggggtttctattactttgcatggtgacttgactttctgtatcatttggaacttacagtttttgtttcggatttaaatgggtattaaatatgaataattttattggttggtgtggtatt

SEQ ID NO: 244785 - DNA, 131 bp, Gossypium hirsutum
ggaggtcgaggaactccagggtatgcagcaccggaactttggatgccatttccaataaccgagaagtgtgatgtttatagctttgggatgctattatttgagatcataggccggcgaaaggaaccttaacg

SEQ ID NO: 244786 - DNA, 274 bp, Gossypium hirsutum
gtaaaataattcattagggtccaataaaaactcatgttataggttataggcgctcctcactggaaactccccgggtggctcccctctccaaacttgaaaggcgtcatggtccggctacgccaggggtatcttcaaaactttctcagcaatcttcggtcggaagatcatcacaaactaaaattttatcacctcttcccaccctccagcgaaaacctttttcaagcagaccttttgcagaccatacactttttcaggagttattctttttcatcat

SEQ ID NO: 244787 - DNA, 244 bp, Gossypium hirsutum
cgctcttgctagaaaaaaaataaccgagattcgggaagtgaaatcagaaccaagaacagacctgacagtaggatagaaattgggagggaatgatcgcatctagttggggagaaaaggacagaggggtttcataacgcttttgattccttgagtgctctttcagctttaatacacctttatttgtattaggctttagcctagcttcatttgactatgcttttggcttaattttcttgttaaacat

SEQ ID NO: 244788 - DNA, 100 bp, Gossypium hirsutum
gagacggataaagagcttgtcatactgaaaagtccaaacgctgcggatccccttgcgagggacgactctccactcctcactatcgatgactgcggagcat

SEQ ID NO: 244789 - DNA, 389 bp, Gossypium hirsutum
cgactcttgagtatcaactcatatttacatttatggcaatcgtctttacactgggggtcggtttaatctatttatatatatgcaacacaccattattctagagggtctatgattagaaacaatgttatatatgtgatgccatcaatgattgacccatataacatactcattgctcatgattgccatctacaatatgactcaatgcagatgatgttttcagattaataatttgaaaagaaggtcgtctgacctacacatgataatgtattgacataccactaaatggtggaatatgaacttctcttttaaaactgtctgtaacatgcagaaatgcaacacacctaaacctggaccttaagctgcaaaacaagattaaaattcaaaacaaa

SEQ ID NO: 244790 - DNA, 143 bp, Gossypium hirsutum
cggacgcgtgggttcaaatgtagtgtatgcagtgggaactttatgttttaggttaggagagatagtatacttttgtttcttatccatgttgggtactaaaagttgtaaatgctttccagaggaaaattgctacattgtaattc

SEQ ID NO: 244791 - DNA, 328 bp, Gossypium hirsutum
ggccggcctgtgtgtttttttttttttttgtggttctcaatgtggacttgctgctgggacagcgtataatacaaattggagaggcctgggaaatctttaactgttaaacttgtcctgctaaaaaatgttatccttagcagtatgaagaacattgatttgctggtttagtgcttcgcacccctttggaaggctaggaaggggcctctactgaatctaatgcttatcttacaattcgaattggtatttacagtaactgacaattactagtattagacatttaaagaacattgaaaagcttgcactcctagactacgcttttcttcaagct

SEQ ID NO: 244792 - DNA, 246 bp, Gossypium hirsutum
gtgaaattagccttgaaattcaaggccaagacggatggaccaaagttgagggtttttgtgggacccgtccagtcggttccttcctttcaaaccgaattcgttaacttccgccaggaagggggggagtccccaaaccagtttccgcctttgggttttgggaaggagccattgaattccaaggcctaaggcggttttctttccccccaatgcagggtttgtcacttttaaaaaccttcctaaacgggt

SEQ ID NO: 244793 - DNA, 172 bp, Gossypium hirsutum
cccatctcctttcattgcatttttttcttactaccacccaacctggggggttctataacatttaatatctaaccctaagtataaatctttccaaaccaaaaaacttcttctttctttaagaggcaccatccaatacctttcattattcatcctaaaaaaaatattactttta

SEQ ID NO: 244794 - DNA, 330 bp, Gossypium hirsutum
gtgttctcaaaagctagaaatgaaatttccatatttgacagctaggttataatttaaatgattagaaatgaacattaagatgccaatatgactttgtcgttgaatagccttaggctgttcagcttaaacactgtacataaatggtcatggaattattgttgtctttactgtgtgcaaaattttcttttctaattaaattttttggtaaatatgcatagcaggagatatcacgggtgatctagtgccctgatgatgacggtggattttgctctttctttacacatacaaagtagtaccagtttggactgtaaggtaataatgttaacatga

SEQ ID NO: 244795 - DNA, 230 bp, Gossypium hirsutum
cttctttgctttctttgtatttgcagcttctgtaggggaaaaaaaagatgaagagggttgctttgttgcctggtgtggggcactgcggggctgtttcggtgaaagtccatgcggagcaggcatgaatccacgagcttcccctgctgcgcatcacgtgtcctccctcatcaccgttgtgcacagctgaagccagaaccatccttgggatacataaactatctttaacagtt

SEQ ID NO: 244796 - DNA, 136 bp, Gossypium hirsutum
ccctcccaaatacattctctttgatattgttattcttagaaggatacaatacacccgaggggttactataacagattctgaagtcccacatataaaacctgctaccactgccaacaggcttcactctcaacacttg

SEQ ID NO: 244797 - DNA, 202 bp, Gossypium hirsutum
gctgacatcaatattcgaaggctctgtttcggttttaataataccccgacctccgatttcttgggggtccttggggcttatttgaaggaaaaataatggggttttatatttgaacctgcttgccggttattcctgggttttttcttttttcaatgggtgggttttgggcctgcctttttgtttaaggactatttttttgggg

SEQ ID NO: 244798 - DNA, 127 bp, Gossypium hirsutum
cgaatcccggtcgccacgcgtcgccaccgtcgattgttaaatgccttacacatggtcttcttccatcatcgccgtaaggagtgaagtctccctttcaccctgaatccgggactggcgtgtttcatga

SEQ ID NO: 244799 - DNA, 251 bp, Gossypium hirsutum
cccacgcgtccggacgagccattgcatgcactttttggtgttgaatccattgacatgtttcaaatgaacaaagccctgtcaaagcacatcttgcccttggattcagacgaagtcaagtcaatggagagggaaaaaccaagaaagcatgagagagaagaagtcaagtcaacggagaaggaaaagccaagaaagcatgagagagaagaagatccagatgaagcaaaaggaaaggaaaagcgacagaagggatt

SEQ ID NO: 244800 - DNA, 302 bp, Gossypium hirsutum
cggacgcgtgggcggacgcgtgggttcatatggttgtgtttgtttctcaacgatggagcatgagttgatgccaataactcgtgaaccgaaaatttccaaaggtggtccttcaaatccaagggtggagttgaagattggctctacttttatatactgtctatggtgttgtatgctattctttcttcttctacctttgctctaaggtcttctttttcttgttctattgttcttgttggttctgtacgtttggagacaatagtatggttaatgatataaaactgaaatgagattcatttcatttt

SEQ ID NO: 244801 - DNA, 120 bp, Gossypium hirsutum
gccaaagctaaaatatatgcataattaaatgaataatgcagtgcaccaaaattggcaacaggaaatagtctacgaaaggaactttgtgaaagagataattaaagaggttcacctttatgc

SEQ ID NO: 244802 - DNA, 375 bp, Gossypium hirsutum
tagaaatgtgttgccaagaagtgccactcctagtcctcagagatcgcgttcacggattaacgtagaggccctctttacaactccaaggaagctcatccactcacttcaagatcctaatgaattgaactcagattactccgagaaacaattcaggaggttcagaagtccatgctcagagaaatttggaggtagtccaaccacaaaccgtaacagttttcgtcgtggtattatcaatgaggtcaaacgcaaagcacgttcgtataccgatggtgaagatcatggtgtctctgaatctgtatcatcaactgatgacagtcctgctgagcttgatgtcctaaggtctactgatgcagcccctaagaacaagaaagaaac

SEQ ID NO: 244803 - DNA, 408 bp, Gossypium hirsutum
ccaaacctgtgtagaacaaaaccaaatgattttaatggagaaaaggctgtccttggggaccgtgaatcattctttttccctcctcccctgtttcctccgaacccctttcagcctcctccgttgcttcctcccatactgccaccaccagctccactagttccagacccattgcagcctcctccagaacctgcagcaccatccttgccgccggttccaggactagctcctccaccatcgtgcccgtctccaccgccagacttcccattttcacttccaccattccctttccttctctgtaccccccttcccaagtgtgcccccatcgaactcttctccttgatttaatacatatagtaacatttcttcatgtataattctctcaataatataataatgtaatttgttttt

SEQ ID NO: 244804 - DNA, 278 bp, Gossypium hirsutum
cccacgcgtccgaaggatacgttttggtgttgggagatcatcataacagaagttccgatcgccatgattgtggcccgcttcccatagattacaatatggcgagatcagtatgccggtatagactttcattcaaagtgtgagataccatacattatacacatgtcgagaaagatgctgtggccctttcttgacatctgagataacttaaaaaagactcggatcttactaggctcatatcgagcatattcgaatacccatcagaccggaataggccatat

SEQ ID NO: 244805 - DNA, 137 bp, Gossypium hirsutum
cccacgcgtgcgcccacgcgtgcgatcctgtttaatttgggcacggatatgcctgaggcgggggctgctacacctcacacgttggtgcggatattgctgaactgttggccaaaattgacagacggtctggtactgat

SEQ ID NO: 244806 - DNA, 273 bp, Gossypium hirsutum
  unsure (1)..(273): unsure at all n locations
ttgactctgatcttcggatccagcagcgtgagcttttagagtccatagtgcaactgctacccggccgaaaaaagctgnctttcccgatccacttttttgtgttgcctttctccgctgtgcaattttttctgaaaagccttcagtgctttgcaagaacgaggtggagaaaacggatctcgctcatnattggagcatgttacggttgatgatctttttggtcctgtcttttcacatatgaatggggagagggctcttcgatctgggacaagcgtg

SEQ ID NO: 244807 - DNA, 204 bp, Gossypium hirsutum
cccacgcgtcggtccacgcgtccgctcactctttcgtaggagcactgggaggagggggcaggggaacttgttggccggaatcataccaaacattgtgcttgaccactccgggtccgctcagggataggcgttgctttcatggccgattcacaccccaagtttggtcaaaatagatagggaaatgagcctaatgcttatcgaaag

SEQ ID NO: 244808 - DNA, 196 bp, Gossypium hirsutum
gcccacgcgtcggtccgaggaaagaaaaaggtagcaaacagtctcaagccactttggaaatacagaatacttatctggagcttctttcagcaatcatctcttagaattttcgccgtaacatagacccacgcatctgctgaagagatgagctatagaagcataccctggccgctgttgttaggagaacaagagcttt

SEQ ID NO: 244809 - DNA, 294 bp, Gossypium hirsutum
tcggagagctgatgaagctcgagtataaaaggaaggtagcttggttaaacaagcagaagaaacgtggtgctagtgctgaatcattggagaaaacaaaagcagctggtagtcatttgcatacaaggacataggtgacatgcagtcccatggttcaacaatgtcagaaagtaatcgattacgtgatgagcaagtatatccgaaaacttgtatgctttgtgatgggatggctaacatgtgggcaagcatgtgcatacatcatgataggcaactcaaggtttgtgaaaagcttaagtc

SEQ ID NO: 244810 - DNA, 181 bp, Gossypium hirsutum
  unsure (1)..(181): unsure at all n locations
cccacgcgtccggtatctgtatttggtgggttaaggagtgcacattttgtaaggttgatcaatatatttgtaagtggtggcaaggaatttgagatgcctagaaaatattcatcatcaatatcaaaatatttttagcgtctctnanaaaaaaaaaaaaaaaaaaaaaaaaaaaaaaataaaa

SEQ ID NO: 244811 - DNA, 357 bp, Gossypium hirsutum
  unsure (1)..(357): unsure at all n locations
ccacgctacgggtttccaaagacaactacattttgcttcatcatcaagcaatggttcaaacccttcaagtccatcaagccattcctgcatagctcctgaacttttctccctgaggggctaaggatcaagctcaaaccaatcaaaacccgtgcagatattgaaatttgatgagtctcgaagctgctgcttattaaatttacacgtatcgaatgtaacagtgcangaataggatttgacattttttgttcattctatcaagttgagaataccttttgaggttggcagatatattcttgattggtggggggaggtctttaatgagttaatgagataacatgattgatatttgtcttaaaa

SEQ ID NO: 244812 - DNA, 166 bp, Gossypium hirsutum
gtttttcattctcatgtggtgtggtacgtgactagcaaaaaaaaagaaaatggaagaggaaagtcaaaaactttgtaatttacatcttctcctgctggtagagagggttggcagtatacaaagatgaaatccagaccagctaatgaatctttgccttttttcttat

SEQ ID NO: 244813 - DNA, 347 bp, Gossypium hirsutum
ctcacgcgaacattatatataagatcaaatgtatgcagattggcatgcttagtgaaaacacgcgttagactaagcctgaaactactactggagctactcgcggactagctagcatactcgatgctattagcagagactctatgtttaactataagcggatttattgtcggttgtaaagacttgtgtgaagacttggtttaaacgactattagaatgactatggaagagtgaatgtaacacacactaaaatacacactaagagtgctgagcgacgtgttgtgctttatgttttaaaaaaaaaaaaaaaaaaaaaaaaaaaaaaaaaaaaaaaaaaggggcggccgttc

SEQ ID NO: 244814 - DNA, 298 bp, Gossypium hirsutum
cacaacctttagttggagttacaatttgttgaaatcattggctttttactaaattgtacttgagaataagtgagtttccttccctccccccaagtattttagtgacgttataagttaataagatacacttcgaactttatgctagagaaaaaaaaaaaaaaaaaaaaaaaaaaaaaaaaaaaaaaaaaaaaaaaaaaaaaaaaaaaaaaaaaaaaaaaaaaaaaaaaaggggggcaaaaagaaagaatacatattatttaggcggagacactaacacagaggcgactgtttgtagcaa

SEQ ID NO: 244815 - DNA, 383 bp, Gossypium hirsutum
cggacgcgtgggttaagcttatttttgattttttgaacaccctgggggccaagggtaatgtggcaaatgcaaaccgtggtataaaatatcacaggttcaagatgttgtttggacatctatggcaccgattcagtgatgcaagggctctcccagctgaccacgatgctacgttgtatgttctagcagacgggtgatttaaactgaatcctgggatacgaccaatctactgctgcacagcgaacgttacgactgtattaatcgctgaagctggaagtttcgaatccgactgtggtactgactccatactggggagccattagtgaggaaatcagataaatgatgaatatttaacaccagatatcgactacattgaataagaacct

SEQ ID NO: 244816 - DNA, 353 bp, Gossypium hirsutum
ggatgataatttggataacagcaccacaccttattaatcaatgtgcatgcatggcatttaggcctatattgttgccacaatttgaggttagaagttgtattttattactaacgataatgtttatgctatgtttgtattataatgttaatggtgaatgatatttgaatgttcttattttctagactcacattaagctagttagttcaccccatagttttaaccatttcagttaatgctcaaggctaggatcagacatgatatgcagacatatggccgacttttgacttataaattattttgcttacattttttttaaattcatttagtttttggacaataaagttatttagtct

SEQ ID NO: 244817 - DNA, 232 bp, Gossypium hirsutum
gtttctcttcttgtaatattgttataatctttgttttcagtagtcaagtttggaccacagtaaaaaagccaacatagaagtaaaaaaaacagaaggatcatactgtcaaaatatgttgtaaaaactgtaattttctgcccgcatgcataatcccatttttgtacagcttcaatgtataagcagggaaaaacacccagaggcagaaatgttaaatgcaagtcagccattagtg

SEQ ID NO: 244818 - DNA, 311 bp, Gossypium hirsutum
cccacgcgtccggcagaggacttcagattttcatgatccttgctggcagaaaagagaaagacattacttccccagttaagtatgcttgaaaattcttttgctgttaacaaccttaatcagcagccatttttatcctttttgtaagctctccattgagcccctttttagcatttcttatgacagacttagtatttattagatctttgtcctttaaatctttaggttctccataaattaatcaaaaagaacctttcgtgtaatctgtaaaaaaaaaaaaaaaattacaaatataaaaaaaaattacaaactat

SEQ ID NO: 244819 - DNA, 413 bp, Gossypium hirsutum
cccacgcgtccgggttgaactgttgatggtaaacccagaaggtgaaaagcaagaaagtgatttgggtggacatagatatgaagcgatagttgatgctgaggaagatggagatgaagacgaagatgaagacattgataatgatggacccggagaagacaatgaagaaggagacccttctgatggtgaagatcatgggaacaattccaatgaccaaaatggcaactccaacaaggaaattggtggtggagaggctgatggagcaggggaagaagagaacggagaggaagaagaaggtgaaaatgtggatgatgagccggaagacgaggatgaggacgatggtgatggtgacgacaatgaaggcaatgatgatgaggaagaaaaagaaactgtagaagatgaagagcctgaaaatg

SEQ ID NO: 244820 - DNA, 178 bp, Gossypium hirsutum
ccacgcgtccgtcagcatcgttttatttatatataaatgcacaactaaccgggattggtatcttgtatgggttatatatgcatgatcccgctgttttgtcaacataaggttatatactttctgacagtacagatattttgttatttacagcaatatatttaacagctagaggaattta

SEQ ID NO: 244821 - DNA, 342 bp, Gossypium hirsutum
cccacgcgtccgatgatacccctgaattaagtgaagaaactcaacgaataatagccacaattgttacacaagttgagcacaacaattatcatgaagaggaagaacaagtgttaagcagtgtattggtacaccatgaaacttatttcactatgcaaccgtgtatggattcaaattatacatgtcaaatgtgggtggacgaagtattaaatgggcatgatgatcgatgcatgaatagttttaggatgccaaaatatatatttcacagctagttgcatgatttgcttacaaattatggcataaagcatgactaggtttttgcgagggacaagctagcataataac

SEQ ID NO: 244822 - DNA, 412 bp, Gossypium hirsutum
cccacgcgtccgcccacgcgtccggtgaaagggagaggaaggaacaagaaagcaagaagaaccaaaaggtcgaatttgtacctggtggaaatcaacctggagcggttcttcctgctccaaaagttagcatgcctactgcagttgcggctgggagtggtttgccttcaggtccaactgcagtggataacaacattgtgcgggatggtagacaaaacaagaaatcaaaatgggataaggtggatagtgatagaaggaatcctcttcctgctggagcacagcattctttatctgctgctggagcacatacagttatattatcagctgctaatgctggaaccgggtacacagcttttgcacagcagaaacggcgagaaacagaagagaaaaaatccagtgaaaagaggttggatag

SEQ ID NO: 244823 - DNA, 410 bp, Gossypium hirsutum
ggagaagctgctgggcctcgaagacagtcggaaaatgaaaacataagccagaacggaaacccgatgcagattccagcacaacccgatctacagcaagctgaagctggacctaatcccggaactatgagttcattcagttcattattattatggatattgggaggtgcttcgtctgaaggtcttagttcgtttctttccatgtttagagatgtgagagagcaaggacaggtttatactgacccaccgcacgaaaaccgcgcaatgcagaacgtgcagtagccccaggtgccgttacaaaagagatgaaagttggtagagtttagtgttttagatgaatgttgtatagctaatgttctaatcatatataaagaagaacttgcattaatacatggcacaaaaccaatgaacaa

SEQ ID NO: 244824 - DNA, 407 bp, Gossypium hirsutum
cttaaagttagtaggagtagttttttatttatgtttaatgttatagctggtatgtcagctacattttgtgtgtaattttagctaagctttagtcatgtattagtgggagcagttatacattaggtaactgtcatattttattgtaacataaattcttctaagtcaatgaaaaatatctggtttttggagataaaaaaaaaaaaaaaaaaaaaaaaaaaaaaaaaaaaaaaaaaaaaaaaaaaaaaaaaaaaaaaaaaaaaaaaaaaaaaaaaaaaaaaaaaaaaataaaaaaaaaaaaaaaaaaaaaaaaaaaggggggggcctatttaaagggccaatgtttaaaaaccgtgatttccaggaaataactttttttatggggccccaaaaattattcccttgggccg

SEQ ID NO: 244825 - DNA, 409 bp, Gossypium hirsutum
ctttcaaatataaaaatgataaacccaaatgttacgaaaaccaggaaaaaaaatagagtatccagatatttaaatcgaaaatcacctttgaattttggtggccttttggtgtatttcagtatgcgtaaatatttgcaggtacactcggtggcttttatagccggaaaaataaaaatttaaaaatctattttttctttttgctatttttccattatattttgctgcttctcgtgtattccttttgctgtgtttgtttttccttctcgtagtttctgttgacgtggaggcgtacggagaagaaatcactcgtggggaggccgttcgtgagaggagcaatctggtgacctggtgtttccagaggcttcccctgcacgggccatttggaccaattctgggattgggcttagtg

SEQ ID NO: 244826 - DNA, 320 bp, Gossypium hirsutum
gatatatcttggaaagaaaacgctcgatgttttattgcctattcactgctgatgtgtgtggatacattgcaggaacggattgcgacccaatgcttaggaggcgcagcaggaggccacgacggctagccactagacctgtacgtggcagtgtatgcacactgatgtgagaaaagggcgataggggggcctgctgaacagggagaccatagacttatactctgcatatagtgacatgtgggtccggacgctatgggcccatggcttatgacaacatgtggatgctcttgtgatgtggatggtggatcatgcgtggagggggc

SEQ ID NO: 244827 - DNA, 406 bp, Gossypium hirsutum
tggagatcaaatattgtaccgaaaagttccttcaggattccggcttaccccacatcacgatccggctatgcggtttcatgcaagtaaatgtcatctataactcaatctttgcagatatgtatacgtacatatgtgtgtgtatatgtgtatgatgtatatatgtatgtgtgtgtgtgtgtaaagttccttcaggatttcggcttaccccacatcacaatccggtatgcggtttcatgcaagtaaatgtcatctataactcaatctttgcagaaatgtatacgtacatatggatgtgtgtgcaatgtatgtatgtctgtgtgtgagtgcgcgtgcgtatgtatgtattaattaaaagcatagaaacatgatttcttggaagaaccagtttgtcagtatgatggaatta

SEQ ID NO: 244828 - DNA, 348 bp, Gossypium hirsutum
ttaaggaacgacccacgcgtgcggaataaaatttgactgagaggactttcaatttttttttataagcagttaaacttgacttggggtatggatttattaaaaattaggatcttagatcgttcttgcttaagatcctaattttgaaacacattaaaagtcactgttggataaatattcctgttccccttttaaggtaagataagaaaaccatttgcaatccaaaagatagaatatgattgctcataactttgaattaaaaataaatgtgtaccaaaccaagttcaaagcattaaatctgtcctattttttatcttctttaacctaacaaaaaaaactttttaaaatttt

SEQ ID NO: 244829 - DNA, 147 bp, Gossypium hirsutum
cgacccacgcggccgggattcttttttattgttactcttccgtttacatttgtggggtcaataacatgctctgggacgggttttttttcttcaatcctacatttgattctcaacagagactcccaatggtaatgattcttgatcaca

SEQ ID NO: 244830 - DNA, 432 bp, Gossypium hirsutum
cgcccacgccgtccggtaagatttaaggctccaaaagtttttttggtaaaaatttcctattaaattgggcttgggaaagcattaagttctaaagaacttttaggtcaatattttgtaataggttgataggccctttttgaccggggaattaacccgacccgttcgccaccccaaataaaaaagttttattccggggttggggccaaaggaattttagggatttggggggattaattttccaaaaagagagatttcttagccataattgagaacatggcccaacctatcacacaccaaaggagaaagtgggcggcttttcatacttaaaaaggggatccaaaaatgtgtctcctattctcttttgacacaaatatacctgtgcaaaggggtctgtgcacataaaagtgctctgtgacgacacagctctcctct

SEQ ID NO: 244831 - DNA, 300 bp, Gossypium hirsutum
cccacgcgtccggaaagttatagttactaacaaattgtctagtgaaagtaaatataggatgccactttccattaataaaacatcatccatctttgaggattccttaaaaaaaaaaaaaaaaaaaaaaaaaaaaaaaaaaaaaaaaaaaaaaaaaaaaaaaaaaaaaaaaaaaaaaaaaaaaaaaaaaaaaaaaaaaaaaaaataaaaaaaaaaaaaaaaagaagaaataaaaaataaaaaaaaggatttaaacccaaaaaaaaaaaaaatcttcgccctttataataccccggcttgcct

SEQ ID NO: 244832 - DNA, 381 bp, Gossypium hirsutum
ggaagacggcggtgatagtgaaacaagaattggagacaccgaagacggaagaagaaaaagccaaagatgccaacaaggacgagaaaaaaagtgaagaatgtggcgaaaaagacaagaaagaagccggtggagaagaaaaagacgacggcaaagacaagaaacaagagggtaacaacaaagaagcccccgccgccgacgcagctccggcgactgaaggcgctacggaagagaccaaagtggcggtggagctgaagaaaaatgaatattattattacccgccaaggtatgccactgagttttacgcataccctccacaaatgttcagcgatgagaaccctaatgcttgcacttgaatgtaaaaaactccaattgttaggggca

SEQ ID NO: 244833 - DNA, 309 bp, Gossypium hirsutum
gggcgacccacgcgtacggaaaataggtactctcgtttgaatcacagattccatttttgtatgatcaccattgccccctgtggggtggaactattgaaaaaaaatatcggtggagaacgatcatgtgtggttgtacccaagattttcacatagttcacatatctcgctaggggtaaaaatcgaatcctctataccactgagaaatatgggatgcacgatgctgatgatatctacttccaaagatggactgtcaatattgtgggccctaacaaatattggccacggaggatacatatatcacgggaaact

SEQ ID NO: 244834 - DNA, 407 bp, Gossypium hirsutum
gtctgattccattatcacaaagaatatccttttctcgtgttcttaaagttcattgaagtgttttatttttaaattctaagatagcagctttatgaaatgtataaaatgtcgcatagttgcatcatggatgaaatattagagaaagaaagctacattttttcaaagatcaaattattaaagctggtctactatcctcaatacaccctgttgtggagtcaaatgtggaattggaggaattagaggtgcatactaacattcaattattgaaagaaaaattgctcctttgagtggactcattttacacctcttcttttcatttacgtcacatttaatctcttattttatttccctctcttagcagctcctagcttaaccggcagtctctaggaagctattgtcgtcagatc

SEQ ID NO: 244835 - DNA, 426 bp, Gossypium hirsutum
gccctttcacatacccgtgcctttgacaagctagcgtcgctcacattcgaaaacagataagtttctgccccaactatttcaccttccgaatctctggcaataactactgtaacagcgagttgtaaatcatgctgaaaagccgcatcaaaattaagctttaaaactccaacatcggggggtttctagaccactctatccatagatctaagagaaggactagaaatctcttgattcaggctcaaatcacgactataaccttgaataaaccctaacaattccatcaaggatggtttaaccccttcatgaacaagtttatttcttctaaaccagagactccatatagagattaccagttattgcttctgctgatcactcgcaatagaaaattcttgaataaaacgatgcttataatttgacaactcactg

SEQ ID NO: 244836 - DNA, 407 bp, Gossypium hirsutum
tggacttctacattgatgatgacatgattcatgttgttgaatccatgccagtgaaaagatatggtgattatttccttcgacagattgtcaagcttgaaggagtgatcaatgacatggatcggataaagctggaatagatgacctacttgattattttattacttgtactactttagcgaaggatttattttatttaaatggcattttgatgcccattttgtcttggaatgggtagaatctcacgttaagatatataaatggttcctttttgagagcactgtgagaggggatttatgcatttgcgggcttgccagaaaatttttgttgcgactgttgctttgtttgttattctttaactttgggttagccctatattcaaaatattgatgtgatggatcatagtcatc

SEQ ID NO: 244837 - DNA, 326 bp, Gossypium hirsutum
ggaaaacttacaatatccatcatcattagtttaagggtaactagattgctgtaggttctttggagtttaaacccaatacccactttgtactgcatattcgcccgagccttggcatttccaaactaacaaatccttcgaattacacccatgaagaggaatagaaaagataccagttgctgtggataaaattctatttaaatggcatattgatacccatttagtcttgaaatgggtagaatctaacgataagaatatataaatggtaccttttatatagcactgggagaggggattaatgcattttcagacattgggggaggcttttt

SEQ ID NO: 244838 - DNA, 334 bp, Gossypium hirsutum
cccacgcgtccgggaagacgcagctagttacgcaagctccgaacttttcgaattggataatctttcagctataggtattgaaaggtatcggcaagagttgcctgtgtatgagactacccacctcgatactaatcgagccattgcaaatggtttgattgtgtgattacccctaaatgcatgcatacagcaacaaaactattagtactagttaactagctagttttattaattaaattagttaaatggtttggggggtttacatctagaagtaatacaaatttctgttttggtagagccgtactgaagttaatttaccctcttttttgttggtttt

SEQ ID NO: 244839 - DNA, 406 bp, Gossypium hirsutum
cccacgcgtccggctggataaacggaggagttctgacaggaatcaatcagtttctcccgagattataagttgcaagcttggcagcacttgcacaggttgttctacatcagatctagatgaaatgaatagatttgctgaagtcaatacatcatcgaattccagtggtatcagctcctgctcacatgaggatattgggaatgaatctacagcaggtagtagtgaagggagcaatgtaggtgatgataacccatcgtcttctcagagtgattcaagtgacgatctaaaatcttctgtggaggatgaccatgctgatcagaacaaagtgttccaagatggattgctgaaagatttagaggttttggattgaagttccataaatttcgttaatgaaaattatgttttttct

SEQ ID NO: 244840 - DNA, 305 bp, Gossypium hirsutum
cccacgcgtccggcaaaataatcaagataatggaacaacctttttactattttttgtattttgatttctatgggaccttttttgtattgattttttgaatattcaagaatcccctcattcacaatcggttcccccctttttgaattcgaaaaaaccgcttttttaaattcggaaaaaaaacccccttaatacattcgtttcttctcggctttatagccggttacaatattacgaaaatcttatttatttttgtcattttcgtttgtctgcttctgtcttggtgtctgcttcatttttcaggtgtc

SEQ ID NO: 244841 - DNA, 298 bp, Gossypium hirsutum
aaaaaaaaaaaaaaaaaagcaaacaattttttttattaaaaaaaaaagggcgattgcttttgactctttgtctgttatgcttgtgaaattttcatctgggcgtttttaatttgcttgattttaccaagtttatgtaatgatgattttgattatgatttgggtatatctaatttcatagcatttattacttggagtagtgtttaatacaaaaaattcttttttgatgaactttatattcgatatgacctcatgcttgactacattgaagaactaggacctcagttgatccatgtcggtc

SEQ ID NO: 244842 - DNA, 385 bp, Gossypium hirsutum
  unsure (1)..(385): unsure at all n locations
taccggtatattaccgggtccgacccacgcccgtccgcaataatacgaaggatggcggaaggcggatccaatggtcatggttcggttaggccaatcctattagttggaagggataaggaaacttttttcaaaanngtgtaatttaaaatttgcttagaaattgancctcttccactccannatttataatttctaagaaggtatgtatttatttaatttggtaaaatctttatttctaggagattatantttggtatgtattccatgagctaattacaaggtaattacaatttcaaataagtatgtatatttaatttgttaaatctgtttttaacttattttttaatggatcattaatgaatcatgtttttaatctagatcgcga

SEQ ID NO: 244843 - DNA, 405 bp, Gossypium hirsutum
gaaaaggctcatttttgtgtaactccagccatcgaagacgaccgatggccatggcgcgcttccaacggctctatggccagaccttagggcgtgtttcagagaaaaaatgggaaagaatttttttaaaaaaacacagtagaaatgtttttttttttgaaaattttaacttatatagggccttggtacaacgtcattttggcttgactttagaaaccccaaaacgacgtcgttttgaagctgaaccctattacttgactcgaatcgcacaagatccgcgtgtttttatatgggggatttatttatttacttagtccttcccatttttaaattacttttcaatccaaatcttgctttttttttcttttttaaatttataccatgggatttttgattttttttggtttg

SEQ ID NO: 244844 - DNA, 372 bp, Gossypium hirsutum
  unsure (1)..(372): unsure at all n locations
cttccgaaaccactaactttttcttctacgttctcgagaacatccgggaactttttgagacctagggtttcatttcccgtcattaaggcaagtcttgatgttggaagcgacgcgattaggcctggaggtacggtcgagactgataagttaccctctgacgtcagaaaacgagcaatggaggccgttgactcgtttggcgggagggttactgttggagatgtttcgagtaaaagctgggcttaacttgaatcaagctaaaaaggctcttcaagcacttgcttccgatactaacggtttcttggaggtactttgaatttttataacttccataaatntgatctgtgttagggttctcgttgagtggaattacta

SEQ ID NO: 244845 - DNA, 406 bp, Gossypium hirsutum
cccacgcgtccgcccacgcgtccgcccactcgtccgcccacgcgtccgggcacatggcccattcattgctggggaaaagataagtgcagttgatttagctttgggacccaaactttaccatcttgaggttgctctgggccatttcaagaaatggactgttccggaaagcttgactaatgtccgcaattacatgaagtcgatattcactcgtgaatcgttcgtgaaaacgcgggctgctaaggaatacgtgatcgccgggtgggcacctaaggtgaatgcatgaacaaactggaaacaatgaggtgtttgaagcgtatgagttatgtaataaaatgtgagggatggtgatgtaataaaatgtttgaatgtatgagtgtcaatgctactaagttggtaagtatttaat

SEQ ID NO: 244846 - DNA, 361 bp, Gossypium hirsutum
ggtaaattcctttttatttattttaatagtttttgcatgaaataaataaataaataaataaaggtatatcacctttaagaaactgcttggacttctttctttcttctgtatatgcgtgtgtatattattgtctttgtaaaaatccggctcctttacattgttttgatttgggccttttatagccactggaaatttgaaagtaaatgttacaaaatctgattttattccttgccatattagttcctattctgtgcccttttccttccttttgcatgtttacggtgtgaatcacagcgatgatgagggaactgatagcggctcgatacgaggtctgtggatgcttacggcgctgaaaggtgca

SEQ ID NO: 244847 - DNA, 236 bp, Gossypium hirsutum
gcagttggtagctagaattatacatctatgtaatggaagagttaagaccaatgctatgtagggtttttgtttcgcttcaagtattgagtaggatgaatgaatgcgttttaacttttgacaagttttgctttgatttagagtggaaagtttctagcacttcattatataaaatatattaatatataatttaaaataataaatttaattatttattacactatctataattttataaa

SEQ ID NO: 244848 - DNA, 214 bp, Gossypium hirsutum
ccacccgtccgcaaagggaggtaatgccttaacccctaagagctctttatccgtatcccttttataacgtcgccgggaccccagcatggtgccacccggtaccgccttggtccgcgaccttcaccataaactcgaacccggggccctatttttcatacttgacccctttcatagacaactatgttggggtccaaatgaatccgcctgccaaaac

SEQ ID NO: 244849 - DNA, 248 bp, Gossypium hirsutum
  unsure (1)..(248): unsure at all n locations
taattggggcgacgacacgactcgtccggtttgtncaaacaattgttttgatgatagtatttgtacatctgtatatgtatccattggtagcatagcaataaactgggattaaaaaaaaattgtaagacaaccactattgttctatattttttgccttgcctggtgaatatgtggaaatacaggaaattaaccaggttcacttgttctgttcctatttatggcagagcttcaaaaataataatgcaatt

SEQ ID NO: 244850 - DNA, 231 bp, Gossypium hirsutum
gatcatagcttccgttctagttctactcaccgagatacacagttgtcaagctgttcggttttcaggggcaattcgagcaccaaatcacgtctcatgagactgccaaaaccgacccctcttcccctttctcatgtgtattaaaagttagacctgaaaatgttatttccatgtatgtttatatatatacataggaatggagttgttaactgggtgtgtaattgcagaagaact

SEQ ID NO: 244851 - DNA, 313 bp, Gossypium hirsutum
  unsure (1)..(313): unsure at all n locations
cccactcgttcgtccacgcgttcggccacgcgttcgtccacgcgtccgatctctttttatggtggggatggcaatgcaaatttgagttttttacataatgttttgttaacgtactctttctataactttgatcttggttactgtcaggtgattactccagatattctttacttctcttttttttggttgtcattaataagttgattgcattcacaatatgctacggtttttatgttggntattttatttgatttaatgaaaaatctttgtgttattaaatgcaacaagaatagggggttaaaatgggatattt

SEQ ID NO: 244852 - DNA, 138 bp, Gossypium hirsutum
tcggccaagccttccgccaacccttccggttggattgtttttccggagggaaccattcttttttggccttgacacccatgatcatttggttaaaatggccaaggccctaggtcctggtgagtttaaatgccttatctc

SEQ ID NO: 244853 - DNA, 337 bp, Gossypium hirsutum
ctcaaactttctaacgaggctacttttttattcgatgctaaactgggacaacgacgggagtgcatgtactgccacttcaagatttaccggatgtatgcttaatcaaaaaccctagactgcatgcatgcctgcatgactgcatgtatatatatgatgtgtatgattgcatgcaataaaccctttaagtctgtctccttagtctggcaacctgccctgaaaactaatataaaatgcttgttctttatatcaaactgtttcatctattacataaaaattacacataacacttaaatgttccataccttggtcctatatctatttccataaaatgctaaat

SEQ ID NO: 244854 - DNA, 281 bp, Gossypium hirsutum
  unsure (1)..(281): unsure at all n locations
cccacgcgtccgcccacgcgtccgcaaaaacccagtgattctcggaatagatgatcaatggtttcagccctcccctcacaccgaggacaatttgtattgattgctagattcctactcagcatattagtttttgtaggcagatagttccatgaaagtttccagattgtaaactttatttttgctggtagatttagtagccagatttttttttgtaaaaattgctataaatggtcagtaaagcataagctctagtaattctatcaaaaacttattttnnnnaa

SEQ ID NO: 244855 - DNA, 250 bp, Gossypium hirsutum
atgtaatctacaactcacctatctctctgaggatgaaatcatatcaatcattaatcacgccgctgctaaacgattcactttgttcgacacggttgatgtttactgcgcgcataccaatgaactttcggttggctaggccttgaaacaattaccaagagaaataattcatctatccaccaagttcagcattgcaaggatggcacctactggtatgatcgtgaaaggtagaactgagtatgtccagtcgtgc

SEQ ID NO: 244856 - DNA, 105 bp, Gossypium hirsutum
ttcttatctacaaaactcaatccacttttcttttcacatcatcgtcatgattattctcgggggctcttcacgaaattccatcaccatcaccacttatctataaaa

SEQ ID NO: 244857 - DNA, 178 bp, Gossypium hirsutum
aaattatctaaataactgaatccactttttttatgactgcctgctccacattatacgggggggtactttaccataaatgagcatcaacacctcagagctatcaaactcacctcgaaggatacccattggagactctggccctgtaccagcccacaccacgaacaatgcttacaagatc

SEQ ID NO: 244858 - DNA, 405 bp, Gossypium hirsutum
ttcccgttccgccccacccttccgaaaaaaaaaaaaaaaaaaaaaaaaaaaaaatttttttaaaaaacaataaaaaaaataaaaaaggggggaatttttaaaagcattatttttatctactctttagtggacctacatgtccaattcttttgccgtggcgtgccccctttaaagggggcgccccctctaggggtcccaatttttcttccccttgcttacaactacttttttttttttttggccccccaactttaattccccttcccgttttttacaaccgccggtttgggaaaacccttggctttcccaactttattttcttgtacaaatatcccctttttgcaggtgggcttaatagcaaaaatggcccccccgtttcccccttcccaaacgtttccccccctt

SEQ ID NO: 244859 - DNA, 234 bp, Gossypium hirsutum
cgttgcttgcttgccatggatgcatcacatttttatcttctatcgcgtttagaataaattgcagtgatgttatgtttcacaatgttgttatgagtaaataatccgttgtattattgtctgttttcggcctaatgacaaattaagttcttttaaaaaaatctacattgcttttatatcacactgatgtatactacatagaattataaaatctacactgcctctgtattcttctaa

SEQ ID NO: 244860 - DNA, 369 bp, Gossypium hirsutum
cccacgcgtccgcctcagtctaggttcttcttccatcgtccttctagagcagatcgatggtgattcgacactactgttatcaggtgcgagtcctctcccttttctaaggcgtcttgtgcaagtttatgggtataaacatttcctgatatatcaataaactgaaaatcaatttcttgaaagcgagattttttatttgaatatctctaataattgccccaataattgatttatctggttttgttgtttggcatttcttgatgactgttcgtgaattccccatgattgtcactgagagtatacccattgagattcctagcttaatggcctgtaatcctgcatatgcttctgctgcaaacggggatgaaacgt

SEQ ID NO: 244861 - DNA, 414 bp, Gossypium hirsutum
  unsure (1)..(414): unsure at all n locations
accctccggtgtgttctcaaaccggggaggggcccgcgaaaattaaggtttggttgcgccccccctgcttagaggaaaaagggaccaatccttatgggatatgtaatagtccatggggttggaagaatcgaaggatgcctccaccgggattagcattctacaaaggttttgccttgaactgattcctgtctttcccaactggctaaccttgaaaaatactgactattaactgttatttgttttcgtgatcgaattcaaagcacgggagttgggatacaaatcggntgcgcatctgctgatggatgagcttcagcgtanaaatccttcaagattgatgatatgctgcaagtgattacactcaattttcaaggttctttccatgcggcagttgacgatgtgtaccataatgacttt

SEQ ID NO: 244862 - DNA, 311 bp, Gossypium hirsutum
caagtgtcgatttttaatacggggtattgagtctgggaaagaagcataatgtgattttatggtttgggagcatttttgcttttcttttatgggtaaatgcctgaggttttagggttgtcatttgtagcagttttggtgtcaaatgcgttttcggtttcagtttgcagaaaatattttgctcgattgtgattattacagagttgtggaccgaaattttgaatggttaaaaaaaaatctaaaaagaagaactttataataaaataaatggctgagtcttttataacaaaaagtttttttcacgagagtgtggt

SEQ ID NO: 244863 - DNA, 232 bp, Gossypium hirsutum
cccacgcctacaccgatttcaccgcatcgatcacccttttttttttttttttgccgagcgggctgtttaccatctgtcactgtctccaaccccctactgcattgtcatttaatgttgttcatgcattgcatctacggatccacttggcctgtataggtcaagatattctaaatattgcgctcataatcacggtccttcaaattgttctcctaccaaatcataaggttggaac

SEQ ID NO: 244864 - DNA, 272 bp, Gossypium hirsutum
ggccgagcaagatcgctttcctttttctaactcattaaccaagtacaatcacagttagatagaattacatgtttgtgtattcattcctaagaggctaaatctattttttttaaaaactgttaagaaattctagaattacatgccttaattacaaacagtgttaaaaatctcaggaagttagcttgaatgagttatttgcagcttgcatttgtgcccagcagatcctttctcaatgaattatcaacctctgttgaaaccgtatcagagttttt

SEQ ID NO: 244865 - DNA, 474 bp, Gossypium hirsutum
  unsure (1)..(474): unsure at all n locations
tcgtctcgtcccatcgcccgtccggtagagtttcaaccgnncttttcagtatatcttttaannntaaagtgcnnctttcnntttggagctnnngtttcccnnatcttanctacttggctgtttntngtcccttctgcnnattgcattcnngctgttgtttggggccagtgtattcgacccgtatctnncctttgccttggaaataggtcaagaatattcnnttggtattgcgcccttataatnncacggtccttcagaaattgttcgtataccccaaatctcaagggttggaacccggttctnntttgggttgtgcctttcttagtatagaatattnnttctgggtcttcgctttccannaatggttgtttcaatgagagttngtgatgatagtggtaagctttcgtggcgatccggagtgggagaaggatggcatttaccaatgctactaaaaaattccgcggatgtttgatc

SEQ ID NO: 244866 - DNA, 405 bp, Gossypium hirsutum
gggaggaccatctcaaaaaaatcactggattcagctattaggcaaatggacataataaatggcacaacaaacattcggtccctttcaagcacgactctgtttcctcagagcattcgatctgccactgctaagacccaatctcttcgttccttaagtgcttcagactctgataatagcaacggaagccctggtaggttgaaaaacagagacttgcccgagaacggaaatagtattagcagagctgcagagtgtggaagtgatttccatgatggaagatattatgccaaattaagtgaggtggacatctacgagagttcccggtatgatgttatattgctaaaagaagacttgaagaataccaactggttgcatagtattgatgataaatccgatttagtatccatc

SEQ ID NO: 244867 - DNA, 271 bp, Gossypium hirsutum
gcaagattaagtgtgatagagaatgtaatgatatccacttaagttcaataatgaccgatgggtatttctttcagggcggtgttcgcacgttcatccttaccgcttttgattccatttttaagctagttcatcggttttacttatcagttgccttgtggtattttattacatttgcattgcattgcattgtaatgaccttgaagtggtagtagccattgtagcattgaatttttgggacaggaaatgagaaaacttggatttgttagtgggt

SEQ ID NO: 244868 - DNA, 296 bp, Gossypium hirsutum
ctttcgttccctatcgcaggatttactgggagaaatatgtacgctgaaaggagtcaataaggcgttagtgatactaacatatatcatcatcctttaaatcttggaagaagtgtttctaccagaaagctgactaggctaccatcaattactcagaacgatgcaaagttcagggggtatgatgggattcacaggtcaggattcagctactgtctgctgaaactggaactgatctgatctatatgggattttgcttatgaacatcctttccgaagcaaaggtttaaactcatgtctaat

SEQ ID NO: 244869 - DNA, 169 bp, Gossypium hirsutum
agagctcaaagaactacgggtacgatgctgccacatgagcctcaaatatgcacgaagtagaagatcaaccagagccactcatgatgcaacttaaaactgccagaggtcgaaagcccttgatttgaacaatccaatagtataaattcaggcgtattggttattcagcttc

SEQ ID NO: 244870 - DNA, 120 bp, Gossypium hirsutum
ggaacaggaagaacgatataggcagcccagttatgggagatccgaggaagaagcagtaagagatctgaagccacgatatgggagatcccatgaaaaaaggtatggcctcaagaaacatgg

SEQ ID NO: 244871 - DNA, 396 bp, Gossypium hirsutum
cccacgcgtccgtatgaaatgaatgcacataggttttggaggggttaaggttgaattcatcttcagttcagttttcacctttgtccctgccttatgcctcagcatcatgttaatgttagtcggtttacaacataatctagtcttaatctaagttgtgtcatgcaatgcagagtttaacatgccctgtctgggatatacttatatatacaagagaatcatattctataaaaaaaaaaaaaaaaaaaaaaaaaaaagaacaaaaaaaaaaaaaaaagagaaaaaaaaaaaaagaaaaaaacaaaataaacttgagcaggaaaatcaataccaatttaaaagtgtggactaaaaaaaaagggggggcccttttaagggtcccaagtttacttacccttg

SEQ ID NO: 244872 - DNA, 229 bp, Gossypium hirsutum
accacgcgtacgaccaagcgttcgaaacacttctgcaatcacccaaagaagctgaatcgcgtcttctattgaacactcaatggctggacttaaactctatagggctatagtgttgagcatgttgacgatgtcgcagattgcctcaaccatactgaaaggctgctgatttgacaagaacagttcatgcttgcctataagactttcaaaaacgacggaacgttatcaaggt

SEQ ID NO: 244873 - DNA, 379 bp, Gossypium hirsutum
gccacgcattcgtcaacgctggctgtagagctctgactaacggattgctccagatagaccatagtgcgcgcaccgtcactgcttgcacagatagatgccaggcttgaaactctatgctcgatggagcgagcccatgtcgacagtatccgatcgagacgacgcatttccattgctcgctgaggacaatctaccatgaaagacagcccatacgtgttaatacgactgggacaatgcaaatcatcgaggactcaatgtatccacggcaatagctaatgacgctggcatcataggcgacagccataatgtactgttagcttaaaaacctccaggactactgaaatcccgtaaccattcttttgatcttgttatcactgttaat

SEQ ID NO: 244874 - DNA, 251 bp, Gossypium hirsutum
accacgcgtacggaaaaaccttctattgatctctgacaaaagcgttgctccaagattcacctagtccacagaaccagcactgggaagaccataaccctataggttcaaagtccccactcggttgaccgtgtccaagattacatccaacactcggtaaggctcccatgtgtaccacataatctcaaattttccggtaagaactttgtggactgtcggaacttaacttacttcaaccatcccatggaaaacac

SEQ ID NO: 244875 - DNA, 310 bp, Gossypium hirsutum
gaatagaacaacaaatagtacactagttaaaagaaagccttttgtggtgattaatttaaatgctagcacatctagtgtctattttctctttaatgcttggcccgccacgaacatgagcaggatttatgttgaagattaagataatatcaatttagtttttactgcatgaaaaacagaaaggaataaaaaaataaaatacaaaccaaaaagaaatgcccttgacttaatcaaaggatctaatactaaaaacaatattgattaaaagttacattgaaaatgaattccctgattatgctgttctttcgaaggg

SEQ ID NO: 244876 - DNA, 415 bp, Gossypium hirsutum
gtcaatgagactggatacgggagcacatttgactaggatgctttgatcaatgatatgtcatggttaaaggcatctatgctggtccttttgctggagaacttatgaatgctatctgctaagagagttacttttacaataagaatgtggagatcacagacttgaaccaccatgactttgtcttgaccgagcatataacgtttacagctgctactgatgatgcatgctctaatatatacttggtatctcggatgcgactacagatgcttcctagacacagtatgaaactgggaaaaatgctttgaagctgcaaacccatttgtataccaattgcagtgctctgatacagacatcaaatgcaacatgttcgtagtgtgaaatatgtatctatattttctggatcagactgtaacagtgt

SEQ ID NO: 244877 - DNA, 161 bp, Gossypium hirsutum
cctttactgccttactgtctgattagatcttatcaagtcgttacattttcattgttcattgatgcgtgaattagagtatcttgggttacattgggctcttatgatagttaggagaagccatttattaggatgggtcgaccatactatgagtatgtgctggg

SEQ ID NO: 244878 - DNA, 278 bp, Gossypium hirsutum
cccacgcgtgcgacagggatatgggtacatacagatattgtgcgccgtgttatgctatgacggctcagctggcatgcatgtaggatatttacagcttgtgaggggacctacaggatctaaatactgatgagcaaggtagatgatagacaagagatcgactctagcataatctacatcatgcgcacgtaccatgctcaaagaccgaacaaacttgtgacgtatgggcgttcctctactactaggtcgatatccgggacgacgtgcaatacgaagcactt

SEQ ID NO: 244879 - DNA, 440 bp, Gossypium hirsutum
tccacgcgtccggagcaagaagacctcattgtttggatgctaactgctgcgctgccaacatttagaaaattgtatgggaagattgaacaggatctgcaaccaaatgatcaaatacatgtgacattggataataactacaatacttacagtttcaatggcaagaaaaaactagggctttaaatactagctgcttgggtggaaaaaatgactcccttgcaattgctaatttaattgtggccgggttagctttcttttgggcttggccttcaattgttgcttacctggcaaagccaaggcaattgggagacccatcgtatttgtcatggaacagaaatccaggaggacattaagcaattcaagaacctggaacctctcatgaccaatggttacagttgggttgatgggttgatggattaaaatggcctatatatatatataat

SEQ ID NO: 244880 - DNA, 176 bp, Gossypium hirsutum
tcggatcttggttactttagtttcattccccatcctctatcatgatcatcattcatggcagatgttgattacaattgcctgccctgaaaaaatagtatatgagtgactcactgtaagtcctttttattatattattcaaaaccaggatcacggcttgaaaagttacttttcatttt

SEQ ID NO: 244881 - DNA, 275 bp, Gossypium hirsutum
ctgactcgtgggcggacgcgtgggcggacgcgtggggttttttttgtgcgtgggaattgttgggacaaggagagggtgggcagagacatggcggaagggtgattttgtctgtctagtgcttgcacatctcttctggcaattgtccaatgatggtgcttgaatgtaaccttcattatcattctcatatggatctttcacaggatgctcctgaatatcactctaatacgatatctaccatgtcttttgaattccactccaccttatggttggcaatc

SEQ ID NO: 244882 - DNA, 273 bp, Gossypium hirsutum
gcaagagtaagtgtgatagagaatgtaatgatttgcacttaagttcagtaatgaccgatggtgggttctttcagggccgtgtgcgcacgtacatgcttaccgcttttgattccatttttaagctggttcatcgggtgtacttatcagtggccttgtggtattttattacatttgcattgcgttgcattgtaatgaccttgaagtggtaacagccattgttgcattgactttttgtgaccggaaatgagagcaacttggattgggcagtgggtt

SEQ ID NO: 244883 - DNA, 237 bp, Gossypium hirsutum
ctttcgttccatatagcagggcttactgggatatacatgtacgctgaaaggagccaataacgcgttagcgatcctaagatatatcaccaatctttaatgatggatgaagtgtttctaccagaaggctgactaggctgacttacattactcataacgatgcaaagttcagggggtatgatggcatttacaggacgagattcagctactgtctgctgaaacaggagctgatctgatcta

SEQ ID NO: 244884 - DNA, 367 bp, Gossypium hirsutum
accatgcttcctgcgactcatgctgctactcttaaaattatacgcgccagttcatcattcggatgctggtgtaactcaattacttcttatgcttactgtcatctaccaactatcttcataacgaccgatcactaggactcagtactccttctaatagctagtgaacctgacttgactgcccatacactgcatattcttcattggaaaatgcttacacttaaaaaagcggtataacaaatcttacttcttgagttcatgaccatgctctgtatgacacattgccttaactgaactactctccatatcaacattctgtctcatatgctgtctctctagccgatacacacttacctacacgtacttacaa

SEQ ID NO: 244885 - DNA, 447 bp, Gossypium hirsutum
agagctaaaagaactacgggaacgatactcccacatgagcctcaaatatgctgaagtagaagatcagcgagagcaactcatgatgcagcttagagctgccagtggtcgaaggcgctggttttgatgattctaatagtataaatccggtcgtattgtttctccagctccggcatccacactgagcttctgttttttcaccatctaatttttttttcctatggtgtttgtgtagattctttacgaagcagaatagggaaacaaatttatggctcctacatcaggagccagccttgcctgcctggggactgagatagggatttatttacaggctaattgtaatacaagaaacaacatataacaaagttgtatactaatagtattttcatttcttgtaggtatgctgagcaatgaaaacacgagtataaggctatgataagccttgatttc

SEQ ID NO: 244886 - DNA, 349 bp, Gossypium hirsutum
cccacgcgtccgtatgaaatgaatgcacataggttttggaggggttaaggttgaattcatcttcagttcagttttcacctttgtccctgccttatgcctcagcatcatgttaatgttagtcggtttacaacataatctagtcttaatctaagttgtgtcatgcaatgcagagtttaacatgccctgtctgggatatacttatatatacaagagaatcatattctataaaaaaaaaaaaaaaaagatcaaactaatgacctagaaaggaaaagaaagatcaacgattactgactaaagatggaagacccatggattaacctaagcttagaagactaaaattattgaacgc

SEQ ID NO: 244887 - DNA, 175 bp, Gossypium hirsutum
atttagtcttgtagatagtgggaaaaaacatactagtgattttggttggactttttatacatgcttacatttttttttcttagtttttgccaggttgtgctaatggtttatggaatttttaaatttttttgtgaaaagaagagactttaaggcttaaaatattgatttggtttct

SEQ ID NO: 244888 - DNA, 352 bp, Gossypium hirsutum
cccacgcgtccgagataaacagcaaagatgttttagaagaggggcaagtcagcaatttccctcgcgatttgtgaggatgattgatccagagatgctgaagatattcgtgtaccacctttcctttttcttttaactctcagaaacttcatctcacaatttgtagtgatatagactggtaatgcaatctttttgtttcaaatcttgtaaccgtgggggaacataagattttgttggggtttgtgttgtgttgtgttgattcttcaaaatttttctcatcttaggtgattttatgtatattatcatcttcattattatttcactcgtcatccaaatattagtgtgaaaaaaataa

SEQ ID NO: 244889 - DNA, 178 bp, Gossypium hirsutum
gaatagaacatcggatagttcactagttaaaactaagcctcttgtggtgattaatttaaattctagcacagtatagtagtctattaccctcttgaatgcttggcccgccacgaacatgagcaggatgtatgtttaagattaagattatgtcaattgagtttttactgcatgatgaact

SEQ ID NO: 244890 - DNA, 326 bp, Gossypium hirsutum
ggctatgggataggatacgtatgcagaatgaactcgaatgctttcgtctatgacaaatcttcagtagatgcatctaaactggaccttgaggtggagacctcatgaaagctatgggctaatatagttagttttacaataagaatgtgtacatcacagactctaaccaaggtgactatgccttgaccgatcatattacgtgtacaggtgctactgatgattgatgctctcaaatatgctctgggtatcggatgccgctagggatgcttcctagacacgatttgtcactgggaaaaatgctttgaagttacaaacccatctgtatacca

SEQ ID NO: 244891 - DNA, 407 bp, Gossypium hirsutum
cccacgcgtccgtgaagataaagcaactatctctttatatttatagaaagcaaagtgttaatccatgggaagttgggaaaatacatcatcatcaccatcaccatcaccatagccattaattcacattaaaataaagcatagcattataataacatcaataaaaatacttcttcaatccattcccactgcatttcaatgtatgatgatgaatgaccatgattgatgattgatgattgatgattgatgaaccatatgctccattgctcctcctccttcacctttagaatctcatttaaaaaaaaaaaagaaaagaaggaaactatatagaaaatatatgtttatatttgcctggcttcatcctgtctgcctttttgcaagcccatagagaaagaagtgaatttttttta

SEQ ID NO: 244892 - DNA, 336 bp, Gossypium hirsutum
gaaaatgtggtatttgctgcaactccatgcacgagcatgcaaagaatctcaatgccacgtaccacgttgcagagaccttaaggaacatttgaggaggcttcaacaacagtctgattcacgacgtatggctgctgtgatggagatgatgagacagagagctgcagaggttgctggtagttctgggtaaaagaccaaagtgttaatatgcattttggtgctttgatgaaaaaatgcgcccttctataaagggatgtctaagattgttcactgcttggaactaggcggtgatgagaaaatctggctgatctataaaaggtcacagggggatatgcatat

SEQ ID NO: 244893 - DNA, 275 bp, Gossypium hirsutum
gtcaatgagactggatacggaagcacattggactaggatgctttcatctatgatatgtcatcagcagatgcatctatgctggtcctttagctggagaactcatgaaagctatctgctaagagagctactattacaagaagaatgtgtagatcacagacttgaaccaccatgactgtgtcttgaccgatcatatgacgtgttacagctgctactgatgatgcatgctctaatatatacttggtatatcggatgcgactacagatgctacctagaca

SEQ ID NO: 244894 - DNA, 215 bp, Gossypium hirsutum
ttcccgaatcgaccgatgcgtccagcacgttcggccatgcatgcgatgcttctcaactgacttagtgtctgtgtagatcttgatcgagtcagtctcgttcaaacaactcatttatacgttaattagactataacgggtgacattgagctattttcatagttaagagaatccattttttaggactatattgacaatatgatgagtatgttctttga

SEQ ID NO: 244895 - DNA, 140 bp, Gossypium hirsutum
tccgaatgaccgcatcgacccacgcatgcgtccacaccatcgagaactccttgtttggatgcttacttgtgcgctgccaacattgagaaaattgaatcagaagactgaacaccatcttcaatcaaatgatgcatgtacat

SEQ ID NO: 244896 - DNA, 290 bp, Gossypium hirsutum
  unsure (1)..(290): unsure at all n locations
cgcacgcgtacatgtacataaagggacaatctagctagattgatagcttgcagtgtgacaatccatgggacgatcagaccttacatcatgattacgatatgcatcaccgctatcattaattcacattcatatcatcgtatcatgatcttaacatcaataaaaatacttcttcaatccattcccactgcatttcaatgtatgatgatgaatgaccatgattgatgattgatgattgatgattgatgaaccatatgctccattgctcctnctacttcacctttagaatctca

SEQ ID NO: 244897 - DNA, 297 bp, Gossypium hirsutum
caaaggttcaaaagccactagatcaaatagattctattgactattgtgagccacgtgtttgttaatctgtagatatctgatctagttatatgatgaggtttagcagattcagatttgtggtagggactctcaagagggaatttaatccaaccaactctaagacaggatttgaacttctaggaggtaataccagatggttgaaagcatctgtgcaagttctgggtcatgccagtacctaatgatccgttttttttttcctgagtttctaatggtctatataaacttgaaataatgaag

SEQ ID NO: 244898 - DNA, 204 bp, Gossypium hirsutum
gcgtccacacgtaggagacgtacttgtctggctgcgaactgctgcgctgccaacgtttagtaaactgtatggggagactgcacaagatcttcagccaaatgatcaaattcctgtgacattggataattacttccattcttacaggttcaatggccagaaaaaaactagtgctttcaactactagctggcttggtgggaaaaatg

SEQ ID NO: 244899 - DNA, 404 bp, Gossypium hirsutum
  unsure (1)..(404): unsure at all n locations
aatttattcggaccgggggtctattgaaaccttaagtgggacttggacaatggtggccggaaggtgaacccttaaccccttctgggaaatttcaagttttcgaggcattaagtcctaagaggaagctcctgatcaggtacaggggaacccaacgaagcctatatataaaatcacggcgtttgacggtaacatgtattcttggtaccatggaacagggaaagccctgagattntgatttgcttctgttataattattattattattttattcctctggctgtaacttgaagccctgggttgttagatttcagatattgttttataattcagaaactagctaaagtataagacttgtgtcatttttacttggtatagatgtgtccttgacccctctgcttatggat

SEQ ID NO: 244900 - DNA, 208 bp, Gossypium hirsutum
gatattggttaccttaggatcaatccacatcctgtatcatgatcatgattcattgcagaagatgagaaccattgcctgccctggaaaaatagtatttgagggactcactggaagtcctaattactatattattcaaaaccagcatcagggctgtaaatgagacttttctctttaaaaaatgatagttgcacgtattctaaagtaccat

SEQ ID NO: 244901 - DNA, 373 bp, Gossypium hirsutum
cgactttgtaggaaaatgtggatcacgtgaatgcaaccgacacattccaaaacgaaacttttgcagttcggtgtccgacctgaataggcgaagaaatatagttacatggacagaagaataacatgaattttgacatagggcacatgtaaaattggtgataaatcttcagtacatgtaaggttttgttaccctacttttagattcttttgcttttatggcaaattcttttgtaagaaaggaagttgaaacatgaaacaggaatttaggtacaaattaagggcaaggtagaaaattgattccttttcctttagtcactaattttcatgaggatggtactttgagctgatgttaattgaagtaaatgtttaactaa

SEQ ID NO: 244902 - DNA, 450 bp, Gossypium hirsutum
  unsure (1)..(450): unsure at all n locations
gggatttagcacaagcctttatgaaacaatacagtcatgtagctgatatggtccttgacagaattacccttcaaaatatggagaaaaagcctaatgaaagttttaggcaatacgcacaaaggtggagggaggtcgctatccaagttcagccgccactcctagagaaagaaatgacgatgctcttcatcaacacattgaaagccccgttcatcacccacatgttaggaagtgcttcgaagagtttttcagacatagtcatgagcggtgaaatgattgaaagtgccgtgagaagtggaaagattgatgctggagaaaataataggaggtcagacttaaagaagaaggaaaatgangtgagcaatgtgaacacctacaacaaatcgattacacagccaagaaaggtgattacaagtcagcaaagttcatctagacaagaatcgtatgtgaagc

SEQ ID NO: 244903 - DNA, 349 bp, Gossypium hirsutum
gtaaaatctgcagatttagacaagtgaacatatggacaactgattgcaatacataacaggtgatgctgtaagaagcagattatatggaaaaaggtacacttttagaagcttttgtttgtttgtttagctgactatacaggcaacttgaacaggggaaaaaaggattgtgatattaacatataaccatgttttccaattttaacttgttgaagtggattttctgtgatgaaagctaatattcatacctttgaatacacttattaatggaattacctacaattttagtcaaaaaaaagatcttgtgtacccacacgtttgtgtgtgcggacacaacaaggttctaacatgt

SEQ ID NO: 244904 - DNA, 269 bp, Gossypium hirsutum
cccacgcgtccggatttatccaaggcttttgtatggttatttatgagaaagcctttccatgacagcttgtaataaaataccactgactaggtttacagtctcttgttggtcctagttgggaatccttattaactaaaatccttaaagaacatatgctttagactttaaaaagaaaaaatataacatactaggacgtaaaaactggaaacagattagaaattaaactgagaaggaattgtccaaactgggatgttaataataacttaatt

SEQ ID NO: 244905 - DNA, 464 bp, Gossypium hirsutum
  unsure (1)..(464): unsure at all n locations
aaaatgaggatgctattgaggctattgctgttgttgatggtgcaattgatgtagggagtgatgaaattgaaaagaagaagaagaagagcaatgaaaatgaggatgctattgaggctattgctgttgttgatggtgcaattgatgtagggagtgatgaaattgaaaagaagaaaaagaagaagagcaatgaaaatgaggatgctattgaggctattgctgttgttgatggtgcaattggtgtagggagtgatgaaattgaaaagaagaagaagaacaaagagaatgacgaggctattgaggctattgctgttgctgttgttgatagtgcaattgatgcanggagtgatgaaattgaaaagaagaaaaagaagaagaagaagaagaacaaagagaatgaggaggctattgccgttgttgatggtgcaattgatgtanggagtgatgaanatgaaaagaggaaaaag

SEQ ID NO: 244906 - DNA, 398 bp, Gossypium hirsutum
tcgcccacgcgtccgctttctagaaaacggatctcccccacctaaacggaagaagggaactgagcttcctggcagtgaagtaccttctacaggaaactctcctggccaaaaacagaagaagtctgctaaaaaacagaagccgttgaactttgatttcattaacgttccggagaaagtcgattggtttttaactgatgcctgttcggactcctggactcccttcctcgggaacgatttagtgtctgaatctactaaacaagattgggcagctgcatttacgtccctaacagtcaagaaaagtagtcaagcaatgttttgaagacattttctacgtcgttttagatttgactacatcgattaaacgcctggtttcatactgaccagcaatatctatattc

SEQ ID NO: 244907 - DNA, 377 bp, Gossypium hirsutum
cccacgcgtccgattcaggccgatcaattgtacgtggaacattagactatctccaaggtctcaagatgcttggagtcaagagaatagagcgtgtgcttcccattggttcttccttgactgttgttggtgaggctgtcaaggatgacgttggaacaattcggattcagaaaccccataaaggaccattttatgtgtcccccaaatctattgatcaactcatttccaaccttggaaagtgggctagattgtacaagtatgcttcgtttggactgaccatctttggcgccttccttaaaaatcaccaagcatgcaatcctttatttcttggagagaagacaccgacgggaattgcagcgaagggttcttgctgctgcagc

SEQ ID NO: 244908 - DNA, 459 bp, Gossypium hirsutum
gcgcccacgcgtacgcttctactttatatgacactcttgtgttcaaatatgatccaccgagcaacaccgcgtttcctcacggtgtctcattgctacccaacctcaggagcttccttaactgcgacttgaagaaagctaagctgatcgccaaccaaactcaaggtggcggaaatgggtttgagtttgttttgaagaagaagaataagaagaagccctactacttcgtttgtggtgagcgtaatggctttcactgcaaggttgggattatgaaattcgctgtggcgccgctcctccgtcctcggcccttctgatggaacaccaccagaatccaaggaagacgcagtgcctgactttattatgttctgtatcattttattcacaataatattagagattggaattcagtaatgccgtcatgtttcttctttctacctaatatgtcagaatttgctttatgcg

SEQ ID NO: 244909 - DNA, 230 bp, Gossypium hirsutum
gaggaataggtgatgaggttttaaaacattttcttttagtaggaaatcaaattgttttgcagtttggtgcctacattaacctttttaagaagtgttttgcagtttctcaatgtactttttggcataaacaattttatgatttacttttatgtcaaaaaaaaagtgtacattaaaactaaacacctatataaaaaaagaaaatgatcttaaccttggggcggtcgttttta

SEQ ID NO: 244910 - DNA, 371 bp, Gossypium hirsutum
cccacgcgtccgatttggaaaggacaacgcatgtgcattctatggctatatctgagcaagctccaatggcaaggcacaatactgcttcggagaatggaagcttgtcccggaaactctatactgctagcagcctaggaagtatggaggaaagcgaaccatatgcatgcatctgaaggactcaacggatggtgggtctgatgagagtaatgttgaagaggcatcattgaaaacgatctacatgaagagcatgacacccatagcgtgtgaatctgcccttcgtcagaaggagggtgaacttgcatcctacatgtctcgtttgtcttccatggaagctatccgtgactccttagcttaggaagtggtgaaaatga

SEQ ID NO: 244911 - DNA, 228 bp, Gossypium hirsutum
  unsure (1)..(228): unsure at all n locations
tgatgaatctgtcaaatccttttcccttgtgtttgatgtatgccaatactgtagagagaatctttgttttccatatgactacaaatattgcggctggatttttggattgancaaaaaaaaaaaaaaaaaaaaaaaaaaaaaaaaaaaaaaaaaaaaaaaaaaaaaaaaaaaaaaaaggggggncggggtggaggatctaaaagttcctacccttccttgccacgaaat

SEQ ID NO: 244912 - DNA, 184 bp, Gossypium hirsutum
  unsure (1)..(184): unsure at all n locations
ggcgagccaagcgtacgggtgttttttgtggatgaccgtgtctcctcttttaatgaaggangacaaagcgggctcaaatgggctgggggggccttaattctcgctgagaaatcatggctttttgtttgctttatgttaaaacaatattctcagcatatacaactgagtgtgctttgcacttttt

SEQ ID NO: 244913 - DNA, 432 bp, Gossypium hirsutum
gaaacaagcaacagagaagtcctcatatagcgctatgggctagttgacacaacacacaaacatcttagcactgtattgtataacaaggggtattgatgatgaaagcgaaaaaaaaggacgtgtgaccttgaaaaaagctggacttgtcagctaccattattggcactaggacaaatttttgttttgctacacatactatgggcaatcataatggggtgtggagctacaatccattggaactatttgctcaaatccagcctgctttcttgcaataacttcaatcatgaaatatgaactgaacctttctactacaaagactgccatgactgaagataatgtgtttaggagtccatactagaaacacttctttcgatgcctttgacgcgtgatccgacaaaaagatgcacatatgtttaaaagttgttctttact

SEQ ID NO: 244914 - DNA, 167 bp, Gossypium hirsutum
gctgtttttgggggttgtccgtttcttctcatggaatttaggttgtgaaatcagactcaaataagcttggggggccttagttctcgctgagtgttcatggttttttgtttgcttcagtttaaaacaatattctcagcatatacaactgagtgtgctttgcacttttt

SEQ ID NO: 244915 - DNA, 274 bp, Gossypium hirsutum
cccacgcgtccggataaaactaaaaaaaacatttaaaacaaaaaaaaaaactgcgaaaaaaaggggcaaaaaaaaaaacaaggggggccggtcgtaacgatccaacaaacttacgcaagcctgcggccagcttggtttttttttacgtgacctaaactcaatcaaatgccctccctatgccaaccaaccgactgggaaaaaactggctctacccaacttaatagaagattgataacaaacccgtttctcctgctggggcaattaataaaagact

SEQ ID NO: 244916 - DNA, 439 bp, Gossypium hirsutum
caaaatttaaaagaaaagtgcattcccgggactctgttctcgtaaatcaaactcgtaaatatttattataaatatttacgaagctatttggtgtagttaattaggtttcgattaagtgaatttgcttgaattaaaagtaattaggtataaggactaaattgtatatagggtgaaagttaaattatagattaaagaaaaatttaagggactaaataagcaattatgccattgacattaaatgaggcggcgtaaggatgaagatatttataaaatttaaagttaaaatatatattaattttaatattataatattatatcttaattattatattatattatattatattatattatattatattatattatattatattatattatattatattatattatattatattatattatattatattatattatattatattat

SEQ ID NO: 244917 - DNA, 423 bp, Gossypium hirsutum
cggacgcgtgggaaagaaaggaataaaaggatgtttacgtgtagacagttgagcagaaattgggggaaatagaaaaactggattaataatttagattttatattggagaggaagatgacgacgaattttagatatagacattggaaaagttattatgtatgaccatattatggtttgattaagttgtgaattgttctttttaaagagggatagtattactagaaacgcttttggatttatttttataataggtactatgtatattgataacattgctttacaggattacatcatgtagttacactttggaaaaatattacatgttttgcgtattaacaaaatgctttgatgtattgtatcataataggtttaaaatttgtattgaaaattccttggggcgtgcgttttaggaattttttggtt

SEQ ID NO: 244918 - DNA, 327 bp, Gossypium hirsutum
atcggatgcctagtgttcagtttttgcactttcaaataaatttttattcacttcggatttcctctcttctttgtttcacccctatgaatatattcaaagtttttttccacttgtgaacttggttacatgttcatacaggttggctctttcttgatggggtggtggggtgttgttttcaaaggtgacatatctcaagtatctgatattttggcaattggattgactaccggatacttgggtagcgtcacaacattcagtggttggaatcagaaaatgcttgatctcagtgtagatggccactgggtgcaagctatacttgggtttctc

SEQ ID NO: 244919 - DNA, 216 bp, Gossypium hirsutum
cccacgcgtccgtgaacttgtcaaactctttttcccttagacattggttttcagagaagactattccggatttgttgttatggtgtttgtaatttggagcagtatatacctcagtttatattagctccatttatgtcagttttctgttttcttttttaagcaacaataataaaaaaatatttatttttgtgataaaaaaaaaaaaataaaatcaaa

SEQ ID NO: 244920 - DNA, 305 bp, Gossypium hirsutum
gtgggtctaaagcatccgcatttcttaattttaaccagcggatgaaaataacgtgcagatgtaggcagcatgttcaagcttgaaatcagattttggtgggaataatggaagaggatgagtcatttgcaattacattattactaggttttgtgagatttaattgaacttgttcatttattttgtcctacggaactaaacaaacagataacgataccaatgtgattgtgtcgctaatattttgttagttttaaagaaacaaaagaggcaattttctttgatttttcaaaaaaaacaacaacaaaaat

SEQ ID NO: 244921 - DNA, 448 bp, Gossypium hirsutum
acgcccacgcgtccgcttcctctttttttttgctatttttacatcgtattctgttattgctacttctcgtgtattctgttgctgctacttctcgtgtattctgctgcaagtgtggccgaacggaggaataggccctggtgacgtggaggtcatacgtgggaaaccactcatgggagcccgatcctggctagctgcagcgctagtgtattccagaaacctctaaggtttctggtgctttcacaatattgggctcatttgcgccatgtgcaaattgagctaagaattaaattaggggttttggttgcaggcttattaggtttaatgtttgggctattatttttgggttaaatgaattgtaaatggactttggacccataaataatgcggcttattatttattatttgtggattgttatgggcccgggcaaattgagcctattacaataat

SEQ ID NO: 244922 - DNA, 350 bp, Gossypium hirsutum
cccacgcgtccgcccacgcgttcgattaacttttcgattgttataacttacgtgggtcaaattataacaagttaaagtagagggattaattttttaatttttgtaaatgatgatgctcttaattagagatatgtaagtcttggaattttgacgggtgcaaaaacaaaggaaaaggtttatgaatgtttttcggtacttccgtttgattttaatatcgaattttgtatttgagtttttctttttaaatttcaatttggtaaaaaaaaaaaaaaaaaaaaaaaataaaaaaaaaaagaaaaaaacaaaataaataaaatgatgggacagttaatacttaaagaaaaataaaa

SEQ ID NO: 244923 - DNA, 428 bp, Gossypium hirsutum
  unsure (1)..(428): unsure at all n locations
cccacgcgtccgagttgccgtacccaaggatcgatgggcttcacatttacacctaccgcgccttcctcgacgccgttaacttttatctcgagatgtgcgatatttctgaactcttccacattcggggtatgccgcttcaccggagcaatgaccggagccggaaatggcgatgcatggaggaagacgatggtgtgtttgtatacagggaaggaacattggaacaaacaacgtacaaaatgtaccatttcaacaagctaaactccaacagctgcaatgggtataatggtgccattttttgtcattcgtgacaaagggaacaattacaagaacaatacccctgttagctgntttgttccattgaaggatattatagtatgagggctagaaaacatggaataatatgtccgtaaggatcaaatttttgttac

SEQ ID NO: 244924 - DNA, 304 bp, Gossypium hirsutum
cgcatgcgtttgacttgaaaaataaacaatatattggtttcatttgctgtgtgcacgcgctatagaaatacaaggaactactgctgacgaaacagaacctattcggcgcgtctaatgcggtggcatatttcaaacatgatggttataggtacacggtcggtggatgtgacaacgactgcgcttcaaacgacaagctggtcagaaagagatagatgcaccgaatctacggactatatataacatttacataagaatgaggctagggctaaacttgaaatgtgcggctggaataagatatcctgac

SEQ ID NO: 244925 - DNA, 307 bp, Gossypium hirsutum
ggtagcagttttatgtatcgtgtgcagcaatgtcttagccgatcagattttcccatctcatgtagctagcacacttggtcgaagctcccgtgaaccaaaatacaagattgagttccattctgaagactctccctaccatcccgatgatgatcaggagtctgtttttatgcctaataaagatggaaagaattttttatgtttcttgcctaaggtggagaaaaccaagactctaaagccagttactcagcagaacgttagtaccatgattgtggaatctgagaaacaggttaaaacccctgaagacgcc

SEQ ID NO: 244926 - DNA, 465 bp, Gossypium hirsutum
cccacgcgtccggctttaaaaaaaatcactttctttctttcattttctctgtgcaggcgctcttggttcggtcggggctccggcgagctgccaccgctctccgtcgcgtctccgccgttggcgacctccgtgcacggcggtcagaggtacacgggcggtggatgtgacatgggcggtgctgcaagcgtcggctggtcaaaagtccctaggtgcaccgcacctacggtttatttattatttttttctaattttgggtattgggcttaacttgggatttgggccttgatttgtttgggttggggctttgatttgttgggctaaacgggctagtacagtaggattttcaatgcagccgctgatttacacttagtaccaagtagcaaaccatcaacactctacttgacaggatggatccacaagtagcacttccctttgtaaacgaaaacgaatatgcacgatgaaaca

SEQ ID NO: 244927 - DNA, 345 bp, Gossypium hirsutum
cccacgcgttcgcctacgcgttcgaaaaaattattaaaaaatttaaaaaaaaaaaaaaaaaagggaaataaataaaaaaaaaaaaggtatttaaaaaaagtataagaaatgttataggtatatagaataaaataaaggtggttttgaaaaaataaatattatatttgttgggctatatttaataaattgggcgttggtttaaaatttggttattggaaaaactatggttttacgtatttataattttttttttgattattgattttttaatagatgggggattttttgattgtttaaaatctattgggcttttaatttttttggatatacgcttttttattggga

SEQ ID NO: 244928 - DNA, 348 bp, Gossypium hirsutum
attgttttttgtttactttttttttttttattttttaacaataaacaaaatatggaaagatcggaataattgttgtattgtgtcacctaaaattaatgacggtgctgttcgtataactgtgtcctgctgtgaagattcagatacctgccaagaacaaggtcgtggagtacatgaacatgtaaaccagtggagctatagctatcagtcacgctattatctactttggtaacattaccatattctgaatggccaatggtgctcatatcttatgctgccaataatctctagctgttgcttgcttcacttctaactgactgattataaatgcattgcattatctatcgatat

SEQ ID NO: 244929 - DNA, 290 bp, Gossypium hirsutum
cccacgcgtccggaaaagactagtaacttttgataaagtttttgcagcatatcatgaagctaggagctgtatccggagtgacttggccagtgcaggtagtgctgaaaatgtgaaagatgacttaaatggtctggataaggctgttagtgctgttctaggtcaacgaacaattgagcgcaatcagttgttggttagcattgcaaagagcaaacttacaagacgtcgtgatgacaaaaacgagaaagtcaccaagcctgaggagttggtccgcttatatgatcttttattac

SEQ ID NO: 244930 - DNA, 394 bp, Gossypium hirsutum
cccacgcgtccgcccacgcgtccgcctcaccgtatgtgtccttacatctgcacccaagggatacaagggacctgagcagaatgcactggggaatttgcttgttttgtttctcctaggaggtatctttgcaggggtcacacttgactggttatggctcataggcaagggatggtaaagtttaggttcaaagctggttttaggaatgaaaaatcaggtttattgagttgaaattggaaataatgatcccttgcattttgatttgaacacagtaaatgatgaaattgttccatagtcgtaggctacacgcaccaatgctgagatttcatattcattaaaattcctttgtattcatcaacaccatgctttaaaattactgaatgtgtcattgtcttct

SEQ ID NO: 244931 - DNA, 331 bp, Gossypium hirsutum
cccacgcgtccgcccacacgtgctattttgatcacaaattaaatactgttgtatgtgaggttgtattatatatatatatcatatttataatgccctcttttaacatcatacttagcacagatcatatagaaaaaataagtttgctatcaaatctaatgacagacatataaccattctgtctttttgagattcaaacaatatttaatgaatcaaatttcttgctttcttgaatattaaaaaaaaaatatttattaaaataaaaaaaaaaaaaaatataatatataaaaaaggatctccctctttaaaagttccaagtttacttaccctttct

SEQ ID NO: 244932 - DNA, 460 bp, Gossypium hirsutum
attcaaaacaaaaatggcttccatctactgctgcaaagaatgcggaaccaaccttaacctacgatcaacttatttatcccctccagatttctatttcgaagcgggaaacaaaggtaccctttctttcgccacgatcgatgataccaagttcaatttcgagaaagaagataagtttaggccttttttttgagactcttgattattgggggattcaacggaataggaccaagatgaagtgtaaaagctgtgggaaacttgtgggttatatttatgatgatggtcctccattaacggatagtcctggtcaatttcatatgggacctagtcaagtggtacccagatgtcctagatatcggttcaagatcaaagcacttacgatctcatctgaaacttgaggaaattaaagaaattgaataatttcttttctgggtttttgtgttgatggcttgaattttgggtt

SEQ ID NO: 244933 - DNA, 184 bp, Gossypium hirsutum
gaggctacgacgtacgcgttcgcatatatgtataatctaagcttaccttttgtttacaaatgagaacttgcattggtgtatgtatgattaatataaatattgatagattgggatgaaaaaaacaaaaaaaaataaaaaaaaaaaataactaaaaaataaaagcattatgagaattatacaataa

SEQ ID NO: 244934 - DNA, 376 bp, Gossypium hirsutum
cccacgcgtccgctaacacgtgctgttaaatttgctgtaatcctaacgagataccagcgcgtgtgtccttgatgtgattttgcttatcatgagctgagatgcttgtacagtaacagccaggtttggtcaagttgtaaaattccgaaaccatacccataaaacttgtaattgatcccataatatggtccggtgcagcaggggaccatctagtatctggtttcatgtttctgcaaaaaacagagcacatttcatgactttagtttgatgcttgtttgttttgctctgacattccccccattgttcctctaaaaggtgggaagatgtgctagttttaagttctgtatacttaagcttcattatgattgtaaatttcttg

SEQ ID NO: 244935 - DNA, 455 bp, Gossypium hirsutum
tcgcttgtaagattctttaaatggtgtacttactctcgtagaatgccttctcatatacagtttcggtacgtataaaaataacatcaaccgatcccgattctgagatagatgtgaccagacgagagacatacctgtcattcgaggagttcaaggagaaattcggtatgaaaaaagacgcattctataaatagccgatatgtaaacaaaacaatctaataatggctcttcaactgttctaagttccccctttgattcatctgtgctatttattcaaaacccgctttcaaatgatatttcattgggaagaactttaaccctttttctcaggatcaaactttatgtacatcattattgcatatttagctgcttctgcttttttaaaaagctgttatattttatatattctgtgtcattaatagtcttatatagattttaacccctatttctgttttttt

SEQ ID NO: 244936 - DNA, 291 bp, Gossypium hirsutum
cgacggcgtgttgcctctaccagagaactgtagggtttaagaatgatccgaagcttggtgttttgtacgactgacttcccttctcttcgtgattctggttatttcggtttgctgtcgtgtttgagacggatcggacatgcggactttgttatgtaaggctgaacttttgtaatttagttgcttctgggtttgttaggttccaatttttgtgtaaattttggtgtcttaaagaacttgattgaaataaaataagaacccaccttcttggtttctaaaaaaaatagctttact

SEQ ID NO: 244937 - DNA, 293 bp, Gossypium hirsutum
cccacgcgtccggtgagatgcaaataaaggtagtaaaataactgaaaatttcccgttaataggggactcctagttttccttcagtttaggtttttaggacaggccttgcctgtctgtcaataaacaaaattacttcaagaaatttagctttttttttttctcattgacctaatggggatatttcgattggcggactttgtcgatttgtattactgattagacattaaattattggactttgttgaattatagtacacaataaagcaccttgagaattcaaggttatcttttct

SEQ ID NO: 244938 - DNA, 260 bp, Gossypium hirsutum
ctttaccttacgcgaccggaatgccatcgtactgactgtcgtatacttcagcattgccacggacgccatacttgggagctgaactacacctgaacgtgctggcggccagccatcaagctggacgcattggcagcgagtcatcctacggggtgataaatactgaccaacacgtggtcggaagactctcagcaccgactacctcacaggctgtctcttacgacggtaggggcaacccatacggctgaacatatgagaacaaa

SEQ ID NO: 244939 - DNA, 321 bp, Gossypium hirsutum
gatccccacaaccctcccaagagcaacaggtaaaatttaacacgaattctgttgcatgcatgttggcatcgatttcacagctcttacctgttccatgtctaatagtggaggggacaccgttaggaggggatttttttttcagtcggatggtggggtggcatgctgaaagtctttgtacaataatctcaaaatgtgctcattgtaggccatttattcggcatgcaatacaacttgctatcattttatgcttccacctagactgtatcacaagtgctattcagaggccttgttgtatatatatagagatgattgtttctgttt

SEQ ID NO: 244940 - DNA, 274 bp, Gossypium hirsutum
tcaaatacttgttcacactttgcgtgtcggatgctgagaaagcttaccagcttaaacaatccctttcttcaagttttagtggtcaagacctgttaaaatattgcaatctcaaggttgtcacccgatttatatgtgatgaaagctatattttaattttgggcttaatggatttcttggcattctgcaacaatgaaactcaaatttctgtaattggatctatgtttttttgttgattaatgattttaatgatatatgcaccttttaatttccatga

SEQ ID NO: 244941 - DNA, 366 bp, Gossypium hirsutum
cccactccttcgaaatctttcaatgtattattcactggtggactgaaaaggaagctggaaggtttgcttggagtacctaaaagtgatgatgattgacaggatgaaattgatggtggtgctagaaatccaccatgtgtacaatgttgcttgaaatctcattccattaaacggctccgctggatatttgataccaagcttgttggttaacaagtttgactgtacttgctttgtatgtaactaggtttgttcaagctaaggactaacaaggaattaagttaagattgattaggcctttacttttgcacttgctggctatgagaataatctgtatgacattagtgactccattatgtgtatatatttaaa

SEQ ID NO: 244942 - DNA, 434 bp, Gossypium hirsutum
caggcgtcctctgaacaagatgcttcagttttaacaaacgatgttcatgaatattgagcgtattttaccctaaatccctgagtcttactcttccttcattactgtcgtatggatcatccatgagctatagaatcatggtacaaggttacatgcacaggacataatcaagactttaaggcaagctggagtgacatttactgaatcttctgcatagattgtagtatcaatgcatgatgtattcaatcttaaaggccttctgaattaacacccttattttcttcctataaaaaggaaaacttttttttctgaataaatttaatttggacatttttcatataattccattgcttttcttttgtacaaaactctttttaaactaaataacgaatgaaatttcttacacattattcaattatacctgatttgttatatac

SEQ ID NO: 244943 - DNA, 199 bp, Gossypium hirsutum
ccttgaaccaactgctacatgctagccttttgaggagtacatattatagaaagaactaaggaaaggaaaagaaaggccttataaagagcgtcaaaaaggaaaaagaaaaacagttcatgaattgaaatttaaataataatttaatttttttattgttttcaattcagtattttcttctaattcgattagttgaatttct

SEQ ID NO: 244944 - DNA, 383 bp, Gossypium hirsutum
accacgcgttcgtgagcactatcatgagctcttcatgtatgcttcagagactgggtatacgcctcgggaaatattcggctgctgtgctgcctacatagtgactgatatcggcatctgacggattatatcacgcaatggtacatgatatacatgacatgatgctgtttatggttttgtttcaattgaggcagcccttttgactcatctccaggctcagctcatctctatatgttgtggactccattctacacacgacactgaacacgcagatgaccactgagacaccctggcaacatggaacgttacataaatttttatgcaggattggctgcgctctctttggcgtacgctccaggacacccaacgcgatcaaacatgctatc

SEQ ID NO: 244945 - DNA, 442 bp, Gossypium hirsutum
ggagaatatcacaaggaaggaagaaccctctcctcaaacagtgtcaactattttacatgatgagagaaaaaaagaagtaaataaagttattggtgaacaacattgtggcgacattgaatcgaagacttcagtaaaggcttcaaccccgcaaatgcaaactaagctgcctgcaattccatctttctctcagtttgtaaacagcagaaagtcaaaagagatgcagcaaccgaaggcatcagaggaaaaggagcatcaccattcacccaatatacatacgaagaagagaatgaagttgcagtaggggtgagtgtcccaagccttgtgtgttattttcagttcaattggttcggtaggactgcaaaatcccaatggttccagtttgcttataatatgtgcttttgacttttccctgtctcagaatgcatcttttttttggtttctt

SEQ ID NO: 244946 - DNA, 395 bp, Gossypium hirsutum
cccacgcgtccgcccacgcgttcgcccacgcgtccgcgtgacccacctcagcgcttcattagacgcacggatgatatgccaaagcctgttcagcctggtcaggctcctcgtcctggggttgccgctcctgctcgtgcataaggctcttgaagtttaagatgaatttgtatttcgtgtcttgctttgagatatcgttgcttgaattttgagaacttggatcatgtaaggagttcttttttattgctttaaagttcgatacttagttaaatctggaaggtattgagtggctgagaatacatgttggaactcgaaacttcataatttctgtgttagctgcatatgattatccaaaacgaaaaccgtgcaaggagaatggtattatataattgtatgtc

SEQ ID NO: 244947 - DNA, 390 bp, Gossypium hirsutum
ggctaatcctggtttgggaatttgaattagagtacttcaatgctactgaatttgagtcaaattttagaaaagataaaaacagattgccagtatgtatgatattgtgtgttattatgcttagaacttttgcattttattttcagcattacatcatcatcagagtctttctagaggtaactgaagctttacatactataggaataaaatccttgtataaagggaaatttttaggatggttgaaaaataaaaatatggttaaaaatttcctggggaacatttgttttgcctagaaggctattacattaaaaaaaaaaagggcgggcggtttttatggttccagcttaacttcccctgcattccaaggcataacttttttattggggcccctaa

SEQ ID NO: 244948 - DNA, 136 bp, Gossypium hirsutum
gaagtccggaattgaccgacgcatccacgcgtacggccagacgtacggaaaaagtgggccctaccttatttgatgatactactggcccggacttatttgagaaccttatggatgctgctgaggagggaccaagcct

SEQ ID NO: 244949 - DNA, 356 bp, Gossypium hirsutum
  unsure (1)..(356): unsure at all n locations
gctaaattatctatgcgctccctaaatcttgattcgccctctcttcgatcaaagagcatcagtgtaggaaaagagaattctaacagaaaggagatatctgcaagcaggaggagcttataagtggagcttacagtccctgttgctgtaaaaaaaatggatgctgtttcaacctctcataccacttcatgttcggaggacatagcattatcttttaagtctttgggatgacgttttccaccattaaactatgaattgtagctgtaaaaaaaatggatgctgtttcaacctactgaggaggatgctactcattaaatatgtttatgaactgaacatttaccgaatttattgtctntctt

SEQ ID NO: 244950 - DNA, 390 bp, Gossypium hirsutum
  unsure (1)..(390): unsure at all n locations
cccacgcgtccggttcttcatcatcatctaccctttcttgaattatatatagcagaactcatagcaacatttccaaatatatacatatcaaccacagttcaatacatcgatctatcgaccaatcaatcagctatcaacgttcaatcaatcatggtgtttgagaaagatcttaacctttatgccacggagctccgattaggcctaccaggctcatcggaggagtctattaggatcagtaacanaagagccttgcctgatatgaatgatgattctggtgttgcagctgctaaaaaaggggaccaaaaaactgttccacccaccaaggacaaagtggtaggggggccaccgttccgtccttccgaaaaaaccagccttcaaccaaagaaaact

SEQ ID NO: 244951 - DNA, 219 bp, Gossypium hirsutum
  unsure (1)..(219): unsure at all n locations
gcggattttgaagttgggaagggaatgtttatttgtagcatgctttatctgcgaaacaacacaactgaaagttaatgagcatgagaatgtaagattagcagaacaaattggtgttggtattcaccatgagaattgcatgcttaacatcaagaagacacttcaaattatcaaagtnnaaaaaaaaaaaaaaaaaaaaaaaaaaaaaaaaaggggcggccg

SEQ ID NO: 244952 - DNA, 153 bp, Gossypium hirsutum
agtatttctgcaaatcttaccgttttttaaccgttcatcgaataatcgtagctcatacgggggtggtggacaaacggatcctgtagtccattgagcacctacagagccaaacgatatcaatggctgatgttgaaagaggcgacttctctgagc

SEQ ID NO: 244953 - DNA, 429 bp, Gossypium hirsutum
cccacgcgtccgcagcatgcacagggttagttattggcggaaaggtgcatgtgttgcacaagggattatctaaagtgcaagtcctggacaacgtgtgctctgggtggacagtggaggattacggttggctccagggtccaatggcagttgtacagggagccctatatgtgatgagccatggacttattttcaagcaagaaaaggaagtgagaaaggtcgtaacctcttcttcagagtttcgcaggagaatcgggtttgcaatgacaggagtgagagatgaaatttacgtgatcggaggcgtaattggcccggatcgatttaattgggatatcaaacccatgtctgttgttgatatcttgacagttgggggtgatagacctacatggcgtcaggctgctccaatgacaatgtgccgaggaacaatttttg

SEQ ID NO: 244954 - DNA, 454 bp, Gossypium hirsutum
accttgccccaaacaattatcatttcgtttgctgttcaggatgtgcagcaaattactgagcagtggagcttcatccctcgtgtggtcaaggagcttgccttcttagatgccagtaaccatggctcactcaccaaggaagatcttttgagagaggccaaggtatgcaagcaaatatacgaggatgaattaagccggataaacagtggttctttgaaaagaaaaaggccaaagactgatggaggtgaagaaggcaacaagggtgaaaccaaagccatttttgcatcaggttatgacagtgatgaaacaatcaagatgacggaggaagaaatcgagcttgcttataaaaatttcaattctggaactttgtaacttgagctttatgacgatgggctgaaaacaccggttttatgatataagctagtctgacttttggcctatgcattacagtacaaag

SEQ ID NO: 244955 - DNA, 343 bp, Gossypium hirsutum
gattcttgttgctgtcaaaacatactggactggtgaagcaactcaaaaacagctctaactgggatttcaatcatctctcttttctgcacttcatttgtcacaatttttcgtcttgggaacagtcaaaatcactgaaatttcacccaagataagggtaaaagggtgggtttgattaaaattattgatggtataatttcattgatgcactgtaatactaagcagattctctttgtactacaaatctagcggatactgccattgtcttaagctaataaatatgtacactgtctgcagtattggaaaagaaggcttttttagccctccccctccagttttggatttt

SEQ ID NO: 244956 - DNA, 310 bp, Gossypium hirsutum
cccacgcgtccggctgaaacttgggcggtatttatttttgatagattattgatatatgagatgcaattggcaaatttcgcaatgtgcatgtttggatcttttttggttctaggcttcaaacattatctagatttgatgaattaatcctcagagactgaagcatttgttgaagtccattgttaattgtgtatttcttattgtttttcttttttggcatttttatttttttaaattatcattcaattcgagagtgtcttgaatactcgacttgtatgaatatacatcatatttcagaagtttttttgattta

SEQ ID NO: 244957 - DNA, 245 bp, Gossypium hirsutum
attttctcctttttatctttaaaacacgcacccaaaaaaataaaaccctttgaaaaccaaagaaggaagaagaagatggtcgggcaaagcttaacgtaaaataataacttggttgggggaaatcgaaggaaaccttttttttgccgccgttttattggccaacgacggcagcgttgggccccaaagcgccattttccttaagttcaggcccgagaaaattaaggccttcttgattgactttattg

SEQ ID NO: 244958 - DNA, 199 bp, Gossypium hirsutum
  unsure (1)..(199): unsure at all n locations
cggcgcgtgggccaaaatgaacctcgctcttgaatggggtttttcaaaaaaaaaaaaaaaaaaaaaaaaaaaaaaaaaaaaaaaaaaaaaagggcggncaatataaaagatccaaaggggggggcccttttataggaaccaaattttcttcccctggcgtgccccaaattaatttttttgtggggcaacttaaatcaat

SEQ ID NO: 244959 - DNA, 227 bp, Gossypium hirsutum
ggacatgtatgtatagcataggtattctatttctaagttcagtttagtattttaattgtttgccaaaagtaaataattgtgcctgctgggtcagacaagggatatacacttgtggttctcttttgtggttggatttgtacagcactggatttgatcactttgcactttggatggacattgtgtgtaaacttttatacaaattaccaaatgatactcattttctaatt

SEQ ID NO: 244960 - DNA, 341 bp, Gossypium hirsutum
tcaaaatcccgctcactcttacccgctcgttactccctccttttctcatctatgtcgcttgccctaaatctcccaaataaaatttagctacttttcttttctcgatctggaataaaagaaaaaaagaaactgaaaaaggcacaaagggtttttggaagcaaagcagagcgaagaactgtgtgaagccagagctatcgagcatgttcgagttttagcacatgaaatcgatggtcgtcaagaaaaggctactgaacaagatgctgttgaaatcttgatgtatgaaagtttacgttttgcttacggcttgcttgaggggtggacctttgtgacttctttcccct

SEQ ID NO: 244961 - DNA, 368 bp, Gossypium hirsutum
  unsure (1)..(368): unsure at all n locations
cccacgcgtccgcaaaaccatggcaggttagaagcaatagcatgggtggaccacctagtcttactaaaatccctcaactcgatttgcatcatcgtcatcccatgcctgttgattgcagtaattcgcagacaaatgtggcgcctgatttggagcttacacttgccgccccaaggccggctttagaagaaaacaagtcatccccaacaacaacaactctccttattagacccattagtgttacttgacaacttttcagttcatgctgataaagatgaacacagtactatagtaatcagtagtaattatttaattaattaatccttgtaatcataattagtagtatncctttcatcaatcgcccttgatgg

SEQ ID NO: 244962 - DNA, 350 bp, Gossypium hirsutum
cccacgcgtccgggtcttgatgcctagagaattgttcaaggcagcccctactcctgccccggcaccagccccagaggaggcagcggatgcaccaaaagcatccaaatcaaaatctaagtcaaaatcgaagtcgaagtcagccccaacacctgaatctgatgcaccagcggattcgccggacgatgatccagctgatcagacagcagacgataatgctgcattgagttttaaaggtggaaggtttgttgctgttggattgaacttcttgctagtgtttttgttgctctaaggtttctagtttcattttttgttgtttcattttcattttcattttaaattatatagatact

SEQ ID NO: 244963 - DNA, 193 bp, Gossypium hirsutum
  unsure (1)..(193): unsure at all n locations
atcatgntttgaccttgcatggatgaaccggcagtcttactcatctttgcagactaatctactcttgtgaaaagattgtggttggtgcattcacttgtccgctctttattgaaacttcctttgggaatcggatgcttgatgtattagcacatgagttgcgattgctatcatgattaaaacgagctctgtgatt

SEQ ID NO: 244964 - DNA, 275 bp, Gossypium hirsutum
cccacgcgtccggaaaaagcctcgaaatgtggctagctaatagtggcaatgttcctttttcctctattgctgaagctgttctaaaattctgcaattatccaaaaggggggaaaaagggccttaaaaaacattgaggctttgctgtggcattgttattctgaaaaaaactttttattgcaggcaaggaccctcatttccaagctaactgaggagaaaaactctgccattcagcaaaatagcaagcttcagcaagaactggaactgttgagacgcga

SEQ ID NO: 244965 - DNA, 374 bp, Gossypium hirsutum
gaattgtctatctggggaatgtgtcataaccttcaaagggcatgaacatgctatccagtctctctctgtatcttccaatctggaatttctcgtttctgtttccatggacagcactgcacgtgtattcgaaatcaggaacttccattgataaaagtaagcctccaagatcctcacttcttgattaattagtgatttctttttttttacggtgaggaatttgcttacaagtatgtatactgaaatactttgtattctttttttcttttcaaatctttataagttgcgggcaacagtgaacatttaaaagaatatctcctaattgtaagcttttatgagtgcgtcttttgcatcagattaaagaaaatttaattttt

SEQ ID NO: 244966 - DNA, 360 bp, Gossypium hirsutum
gcgcataaatactccttatagttagtgtaatattaaacgacttttcattttgcttagcttttactctgtctttttacaggtgatggatgaatttgatcagaatgtacattttatcgaaattgatattgaggaagatccggagatagctgaagctgctggaattatgggtaccgcatgtgtgcgaggtttcaaaattaaaaaaatgctaaggactgtttctggggccaaattgaaaaaggattccctggaattattggagccaataaaagaataatggggggggttcttgggcatcattaatttgaaaatcaaatttggttcttatgaaaaggtaattgaattataaagctttccattatt

SEQ ID NO: 244967 - DNA, 158 bp, Gossypium hirsutum
ttccggaattcccccatccacccacgcagtccgtgtcaagtgctgtcttccaacgcaattggattcattgaagtgtgtggggtccgggatgagaagagttcctccacctcctcattttcagtgtttccattgtgtgataaaaatctgctatcttcttc

SEQ ID NO: 244968 - DNA, 434 bp, Gossypium hirsutum
  unsure (1)..(434): unsure at all n locations
gcgaatccagaagaatgcttgcagccatcatatagtcgattagatctttctgttgggggattgtgacatttaccagtactggtatacggctaggataatacctgaaagtaaaatgtagttttcttccaaggaggctactgcggagatgattgggggacagagaactcaaagaaagcccaagggtcctgtgaagcagctggagggcaaaaaatatataatatatgcaaataatcagaagcatatgtagaagagctgccctgcctttataggctactaccagatcaaaatgtgttgtacaaaagagggatgcaagtttaaattcggattaacgatactggacatggaaggttaatccctctcccttcttgcactatntctttttggtttccttttagaatgctaatgatctcagtttctagcatatatcactgtct

SEQ ID NO: 244969 - DNA, 214 bp, Gossypium hirsutum
  unsure (1)..(214): unsure at all n locations
gacgcacacgcgtcgcaggtatgcagtagcgcataacctatatacccaacgactttatgaggttgaaatcacttgtgcctgcaaataacaaggctgacagggttctatactagatgtcacgatagaatacttacaaaccctncaaagaaaggttgcggaattggaatcttgcagaagtcagaagcagaacgaaaatgagcgaacatcaatacta

SEQ ID NO: 244970 - DNA, 201 bp, Gossypium hirsutum
  unsure (1)..(201): unsure at all n locations
gaattccggtcaccacgcgtccgtgagtgataatggtgaaattacatcccgggtatatggaatggtcaaaatggaaactaaccttaaagggatctaattttggagcaataataatagtccccaanaaaaaacaaaaaaaaaaaaacaaaaaaaaaaaagaaagagagcagaaaaaaaaaaaaaaaaaaaaattgggaaggg

SEQ ID NO: 244971 - DNA, 343 bp, Gossypium hirsutum
  unsure (1)..(343): unsure at all n locations
cccacgcgtccgcccacgcgtccggctttcgtcctttttgcaggtacggagtatgcgtggtggtcgtacggtgctggaggcgcatggaggctggggcttggctgcggcgcaaagtgggagaagccctagggtttctattagggttttaattttttgggcttgctgggctgtgaattcttgggtctagacttgtttgggcttgtattgggtttgtattgggtctgggacttgggttatgtaattggacattttaatggactgttaacgtttgatttanaaaaaaaaagactaaactttttatttcctcataaatataataaaagaaaatagggggggggcgttt

SEQ ID NO: 244972 - DNA, 392 bp, Gossypium hirsutum
actacgccttctacttgactcatacatttttctaaccttattcactcaaactgtgcaaagggataaaagatcgggggacttttcccttcttctcctcattgacttagcctaccaatgggcacttctcccaactgatgcaagggttttcctgtcacaaatccatatattccatcagtcatgagttattatccacatctgttcgatggtgtgcacggacgaatgtttttcctgccccttatttttagtatttcttccccgttgcttttgcactaatctttgctaatacaatcttgcccttagctcatattttaaggttttttcttgaaaaaaaagacctttatctttttttcagcatgcatgtcaaatttttaataatgtttctactaattact

SEQ ID NO: 244973 - DNA, 335 bp, Gossypium hirsutum
acccacgcgtacgcctttgcttattacaacaaacctttttcttctttatttttcacctttcagttcaaagcatcaaacccagaaagcgtggctacaacaaactgcaaaaaaaaggaaacaattagagaaagaagctatgggagttggcttaaagatgacgatgaaaggaggcggaggagatcatgttggaagttgcgacaaagagaagatggggtttgaaagatacttgggagggttaaatttggagaatattgatgaatgacatgatgatgaagggttttgtacgataaaatatgtaacattttcagcatatgtattagaataaagttactggt

SEQ ID NO: 244974 - DNA, 283 bp, Gossypium hirsutum
cccacgcgtacaacctgaatctggtacctgtagtgcatataacattcagagagctttaggacatcgctagtgtggttattaaaagcatgcttagatgatccatatggcttattaattttcaccttccaaattttttgtttcagcaaatatccattgattgaggagtttcctgagctcatgacataccacacttatgaggattaagaacataactttgtcatgcgctgcttaaacttgttttaaactcttttacccacaatcccttaaacgaagatgtgttttt

SEQ ID NO: 244975 - DNA, 374 bp, Gossypium hirsutum
  unsure (1)..(374): unsure at all n locations
cccacgcgtncgcccacgcctnccggcgaagataaggtcaagaaagtcacactaaaaggtggtgaaaccggcatctcctttgctttgcagggagttcggttggttaaggaatggcttcaataatactggcttacttggaataaggtgatatgtgggcttgttccaatcttcagctttcctgctcaattcatgacttaaaggcatggcattcctgggcggtgggcaggtttagtctgcttcagtattgcaacaccttgaggatgggaatgggaaagtggaactattggctattcggccactatttcttccagcagaacttgcaattgttaacaatttgataccaattgtaaatttcaaatatatttatttatttt

SEQ ID NO: 244976 - DNA, 347 bp, Gossypium hirsutum
cgcgagcgccgcccttttttttttttttttttttttttttttttttttttttagaaagagggggagatggaaaggaatgttttaaaaaaaacaaacaaggagggtaaagggccaaaagcaattaacaaaatgcgaacagcagcaaagaagacaaaaaccagaaagctaaagaaatgagggggcggcccatgaccaacgacttaacaggtgccgagaaagagaggcgaatgacacgcgccttcgagcgatgcacaaaggacggcgggagcacaaggacacgcagaggaaacggacaatggccagcgccatgatgcccgtagagagaatgcctgccctctctttctcgt

SEQ ID NO: 244977 - DNA, 230 bp, Gossypium hirsutum
  unsure (1)..(230): unsure at all n locations
gatccctctatctgttataatttttattgtctcagtatcattaattttattgttctttttcccattttatgattcagaagaataattgacctcgaatcaatttcttaaagttatcagccgattgtgttgatccctctattgtaagcattaacctcaaactaagtaatgactggttccatttatcttgtactttggcattgaattcatttctcgtaattgcttttaanana

SEQ ID NO: 244978 - DNA, 455 bp, Gossypium hirsutum
  unsure (1)..(455): unsure at all n locations
cccacgcgtccggagaagcaattcgacaatgttgtagagagagttttgcaggaaacaaagagcggaaaagacgggctgcagaagacaacagagctaatcaggagtttcttcgagaaacatggaaaggatttcggcttgccaccatcagaatctaatgacgctgtgattcttctctacgatgcagtcttttctgaagtagaaaatgaagagagtgttgtgaaagcggacaatgaattcagggaatacatgaaagacgtcctcaagaagtttgcagaacagctngaagataatcccatctattgtgaccttgatgattaagggagtganttaacaatggatccggttcttcgggtgatggaggctgttcatatttatccggcatttgcttctccccacagggattcttatgtttataattatatgcttaaatatattggatgtatacctgatgatga

SEQ ID NO: 244979 - DNA, 448 bp, Gossypium hirsutum
  unsure (1)..(448): unsure at all n locations
gtggcactcggagttcatttcacggtctccggagtttcaatcaccggcctttacgttgccatcaagaacaacgttgacgttgaatctttgttcgacaaattacatctcccaggcttttccaatgatcaaaagaaccaaaatccaccatcacaatcgacggaatcagataggtttttgattgaagaaccgatcggggagaaatcaacggcggtggtcggtgagaagcagagaaatcggacggctgagcttgctgcttctaccggtggagcccttgcattggctgtgctttgtaacaaggcattgatccctgttagggttccgatcaccgtcgcgcttacgcctccgatcgcaaggtttttggctaagaggaggataattaagaatagtgtatgattntttacaacgaatttgcagtaattatttacttggaaatcattagaatagtact

SEQ ID NO: 244980 - DNA, 106 bp, Gossypium hirsutum
gttgacaatgcttggttgtgacaatctcgtatgcttggttttagaaccatgtatggggagacagattagttggtcgtaatattgattatactcaactttttggttt

SEQ ID NO: 244981 - DNA, 348 bp, Gossypium hirsutum
agctaataaaggagcttgaagatgaccaacctccgaatgttcagaatcagaaccagacccagaaccatggtcatggtgtatattctgaaccggaagtctcataggaaatcatttcccctctcttgatgcaagcaaattattttcgaaatcctttatttttatatgttaaacgttttttctttttgttattttctcatattaacgattcctccccttctgaatcccacagcacagttttatgttggtatatttatgttttgtattcaagggagggacttatttacacctgtgtaaaatcaaagagttctacagtttctttaacccttgaatcaagattcaatctactgt

SEQ ID NO: 244982 - DNA, 233 bp, Gossypium hirsutum
tcgcccacgcgttcgtgcacgcctttgctatatttccaagcttaaggcccttattttgttagacaagatttcttcagaatggctttaacccacaactcatttcaagtgaagattatggtgggtttcttagccatcatgcttctcatgttctcagccgcagctgctctacccatacccctcttaaccttgggggtcggaagcttcttcaatattataacattttcgactcatat

SEQ ID NO: 244983 - DNA, 452 bp, Gossypium hirsutum
  unsure (1)..(452): unsure at all n locations
cccacgcgtccgtatgaagccttacaacatgacaatgaagctcttctcaaagaggtaataattaataattaataacccaaagtgttcaattttcctacatctagtttgaacatgaaatgatttgttgcagataagagagttgcaggcaaagcatagtggagaaagcactgagacagagagcaatgtttcagtgaaagaagaagtgattgtatctgaaaatactgataacaaaacacttgaacaaagtgaaccagctgcagatctcaactacggatcagttgttcttggtgcaaccctttttccagacatgaaagatggatcatcggacagtgattccagtgctatcttaaatgaagacatcatcctcaacaccaacaccaacaagggcaatagccctaacaacgcggctttttcatcatctggnngtgtagagctagacagccaacaccacc

SEQ ID NO: 244984 - DNA, 311 bp, Gossypium hirsutum
aaaaaaatgtaccatatgtaccccacgcgtgtgctgaagctcaaccaaaaaaccctagcacaagtgtactaattccccatttatcacatcctttacctcaaataccctttcttttaaaaccatatgatttgactaattaaatgtcaccttcttcatgaatctgcttattgctttcaaattatcttcagtcccattatctgacattggcacagacccacgtccacttttgcatttattgataaagcggtgaataacgaaaattccgttttcaaaggaaaaaaacggtatcagagattgaattgatcaccgag

SEQ ID NO: 244985 - DNA, 332 bp, Gossypium hirsutum
  unsure (1)..(332): unsure at all n locations
gccaccaaaaagggtcttacaaaactttctttatgctccagtgaatcatcaggaggggaagtctgtacttgtaaagcgtttcaaatgtcccgcagaatagcacacgtccacaagagatgagtagaagattccagttcagtcttgcacaaagggcatactacttcttcacacaatgttcgtcgtgccagatttccgtagtgaggcgccagattatggatcaaccgccatacatgtattttatttttgcaggaatatctaaagtccatagccccttatagaaatttttttactcctcggattcagaggataagttagatntattttgtaacaaa

SEQ ID NO: 244986 - DNA, 229 bp, Gossypium hirsutum
  unsure (1)..(229): unsure at all n locations
cctatggtaggaaaattactaatgaacaaaattcctgngttacatgatgctcatcatatccacatggaccccaaagccaaaaacctgcctaaaacttcaagtttcatacgcgcgtgcagtgagtccttgggtaatgagagagggccatttgcaaggatggaaaaggtggagaacgttggtggagaatggaagctgagaaaggattaccctgtcagagtaaaaattgatg

SEQ ID NO: 244987 - DNA, 166 bp, Gossypium hirsutum
agttaaccatcaaagatattcttggctgaggactcttagcgtgagttacagcttattgctgggttttaatttttcataattgaaaaggtaatgctgtcatatattaagaaaaatattatatacttgctgaaatagataatggaaagtaaacaatattgatttgcct

SEQ ID NO: 244988 - DNA, 388 bp, Gossypium hirsutum
accaacgcgacctatcgctacctgctaacataacgtcaacaagagacactacgggtcgtgacccttctaatgtaatatagatgaggcatatacaaccttgtccaccactaatgatgtctgactcgccctttacacctatgcaacagctgatggagtgacctaaatatgtgagagggatcacaccccaccgttacttaaaacgagcgtacactgagaacacatgtgtggacattactgccactacagctacatgaatcttgctgaacaacggacgacggacctatagcccggaatacagcgatgggaacaactgatcgatacatctaactgtgggcaagaggacatggtttactcttgttgcggctatacacaacagcaaatgcgatgg

SEQ ID NO: 244989 - DNA, 171 bp, Gossypium hirsutum
aaatttttcagggctaatctgcaggtttgggttcgagttatgtgagattgttatctttaattttagtatttttgttgatgatgtttgtaactgatagttcatggatgtattgtgatcagtgtagagacaattgttatgtcggttagaaaaaactaatattttgcaagcatc

SEQ ID NO: 244990 - DNA, 377 bp, Gossypium hirsutum
gccaaccggacgacaaactcgattactggctgcatttatgccagtcaagctatcacttatgctgagactgctctcgaacatgggcttatgcacggaaaccaggacgaacgacgtcgggatctatgcacctacatgtaaacctacaggatgcccgagtgaatgctcgagtgacgactggaatggctatgagattggctaatacaattgcaccatctgggtgactacttgaccgactaatgatataactctcgatgaggccatcaggactggcactattaatgtatttgactacatttaaggctacatccaatgcaagcaccaaatcgagatgacagctgcggtgatcactgcagttataactggcgatggacccttct

SEQ ID NO: 244991 - DNA, 340 bp, Gossypium hirsutum
ggatgagggatgaagtaatggaattcggtgggggcagggtctgtaattcctcgcttgagtccggccctttacaattgtaatgatctgaaatagcgacttctgattattctcgagtcttcattggacagactcgattgaaggatttcagctggagatgtatagagcctgagaagttatgataataaggcttgtgtgcactattaaatattgaccctttttgcaaaattgtgattttgtatatctttaaattaggaactatctaaatgcggtcacaaacttagtaatttatatagaaggtaacaatttcttatgaattctatatagatgtatcttgtttaaa

SEQ ID NO: 244992 - DNA, 264 bp, Gossypium hirsutum
  unsure (1)..(264): unsure at all n locations
cccacgcgtncgcaagctgtggtgggtggtaagtccaggtggggaaaaagtaggaaatggccttagccacatatgaataaatgcgttcatgtcatgtgaaagatgcattggaaaacttttgcattaatatgctatgaattaaaatcctatcagatatatttgcaagatgtcaaaaggaaatggcaacgacgtgtaatggtcaagtccccaacaaanaanaaagagcttgatgatgggcttatattaaatatttgaccctttatt

SEQ ID NO: 244993 - DNA, 444 bp, Gossypium hirsutum
cccacgcgtccgcttggctaactttttgttctactactaaacctttgtatcaggttttggaattaatcaagaaataataatacttaacctcttaaacaaaaaaaaaaaaaaaaaaaaaaaaaaaaaaaaaaaaaaaaaaaaaaaaaaaaaaaaaaaaaaaaaaaaaaaaaaaaaaaaaaaaaaaaaaaaaaaaaaaaaaaaaaaaaaaaaaaaaaaaaaaaaaaaaggggggggcccttttaaaagaaccaaatttaattccccggggttggaaagaaaaaatttttttaatggggccccaaaaataaaatcaagggcccgggtttaaaaaagggggaaagggaaaaaccctggggttaccaaaataaaaggctttgaaaaaaaacccctttttcaaaaggggggaaaaaaaaaaaaaggccccaacaaatcccttttcaaaaa

SEQ ID NO: 244994 - DNA, 385 bp, Gossypium hirsutum
  unsure (1)..(385): unsure at all n locations
ccgttttgttcaagatagagaatgccattaaaaacttattcttcataagctctatgaatatttgttgttgtactagagaagggtcattgttcttaataagcagacataaacttcttcacgggatcatattcaaaatgcccaaannaaaaaaaaaaaaaaaaaaaaaaaaaaaaaaaaaaaaaaaaaaaaaaaaaattaaaaaaaaaaaaaaaaataaataaaaatntttaaaaaaattaaaaaaaaaaaaaaaaataaaaaaaataaaataaaaaaaaaaaaaatttaaaaaaaaataaaaaaaggggggggcccttttaaagaaacaaaattaaaatccgggggtttggaaaaaaaatctttttttttggggccccaaaataaa

SEQ ID NO: 244995 - DNA, 342 bp, Gossypium hirsutum
cccacgcgtccgcgtacgcctcctttgccaccgcttgtcagccttgcaccaaaatggccaaggttatccctccaatgctcgttgactttgccgaaacttgcaaacaggacaacaaggagacagacacagaagcaagatagtagaaaatagtattgaaatcggctataagagccgaatgaaatgtaatgaaaaagggggccaaatcactgtaatcggggggttttctttctttttttttcttttggcttttcctgtaaagaagaactgcttcttctttttatccacattagaaatcaaaaaccgaatttaaatttgaaaaggttgaatccttgtgatttccaa

SEQ ID NO: 244996 - DNA, 136 bp, Gossypium hirsutum
agctagtaaacaggactataatagcagcgcagtaaatttctgtaatcttttgttagaagccactgcggctgtaaactgctgattgcttttgaacttgtgtagctgattaaatgaatgtctgcacctgttttctttt

SEQ ID NO: 244997 - DNA, 437 bp, Gossypium hirsutum
ataaaatttcaacagccactatacgctgtgagactaaattagtgcatttatattataatattgtgttaatgtcaattttgtaggtaggtttgtgtaaaacagtcatgtcaaacaaaattaagttctgcctaaagcctgaaactggtaaaactgtttttaagttgtattattagttgcaaagagatcaatagcagtgatagacccagtgctagaagtggcaaaatctggaaggagaaatatatcggcattcaataaaaggtcttgattacaaagaagcatccaagtaataatcggcttgggtttaatctatagatcaagtcgagtgtggccaatctgcccttaaagtacctttggatttcatgtcacagtttccagaactgggctggacagggaacctgcttgggtattgtcttgaatatgtggttggattatttgat

SEQ ID NO: 244998 - DNA, 246 bp, Gossypium hirsutum
cccacgcgtccgattttgtaagatgttcatctatgttttccggattccagatgattaatcagtgtataaatactcaatccaatcaaattatacgttgaacttcattcaactttggttttgtaaatttctattcaatcatttatatgtttactcgatataaaaaaatattattaattgcaaagagatcaataaaaaaagatagacccaatgctaaaagtaggtaaaatctggaaagagaaatatatt

SEQ ID NO: 244999 - DNA, 382 bp, Gossypium hirsutum
  unsure (1)..(382): unsure at all n locations
gttaaaacagaacctttaaagctgggtattacgtttgtaattctgttttcgattttgttaagttttagagttctccaatacttgaaggaaaagcttaaatatttttggaaattagtcannnnaaaaaaaaannnnnaaaaaaaaaaaaaaaaaaaaaaaaaaaaaaaaaaaaaaaaaaaaaaaaaaaaaaaaaaaaaaaaaaaaaaaaaaaaaaaaaaaaaaaaaaaataaaaaaaaaaaaaaataaaaaaaataaattttggggggggcctttttaaaaaaaaaaattttatttccggttgtttgaaaggtaaaaatttttttttagggcaacaaaaaaaaaattaacgggccgttttttaaaaaagtgtgaattgaaaaa

SEQ ID NO: 245000 - DNA, 317 bp, Gossypium hirsutum
gccacgcgtccgccaacgcgtacgggttgacattagtcttgatgatctcactcgttctttagaagcgattgctatttaatgaccgactaaacttgcgctgaattccacggctactgcagatgttgagtcacctgagactgctctccgtgatgagaaacctgaagaactggtgctagatggataaactgcaacctatgaagctccctgtgttgcatactgcagcaaaacgctgtgctgaagaaccaaaggaagcagtgcactgtgcagccatcggagaaacacatgctccagacactgaaaccacaggtggaactgaa

SEQ ID NO: 245001 - DNA, 270 bp, Gossypium hirsutum
cccacgcgtccggccacccaccatctgaacgccatgctggtgccaataaattcttcttcaaacattaaagagctatattactgtgattcgaacatgaatgtcaaatacgaatatgttcttaatctacatggaaagacaagaaaaaggtggaagaaagtccatctcaagcacattgcatattgcagaatttgaaactgaattgcttatgtgattgaattcagatgtctttataaattctgggttcttggtccatacaaaagtttactttcc

SEQ ID NO: 245002 - DNA, 218 bp, Gossypium hirsutum
  unsure (1)..(218): unsure at all n locations
agccttcggccacgccttcggtttggtagtgaaggtatattttaaagagcagngtgttaaaatgttgcgagaatgttagttgcaatattgaatgagttgagttaaatgagggaatcaccaacaaactgaccgacaagactcttgaaactgcaacgtacaaagaatgttgtcttccatgttgctgcttgtagaaatataaccctatgatgttcactttt

SEQ ID NO: 245003 - DNA, 325 bp, Gossypium hirsutum
  unsure (1)..(325): unsure at all n locations
ggcggttgtctctaaatgctaatcaacatggcaacagatctgcaggaaaagacgggaagagagacagtatgaagttggcagctccagccaacatcgttacggtttcaaaagaagacgctgcctcccacgtttcgagaacggattcggttccggcatcaccatgagagatttaacaaccccttttgtcttgttattaccagattgtttatttagtgtattggtttgaatccaagagctgttgtttgtaagggatatagttagtgactggattgtatactatatactgttatatttgcttaataatgtgatataaatatttagcnna

SEQ ID NO: 245004 - DNA, 391 bp, Gossypium hirsutum
ctttttttttttttttttttttttgaattcatattacaaatgattcaaaatacaaaggtatacaatcaacaaaaaagaatatgttttaacccttccaacatgatatatcaaacaaagataaattacattacgaatctctctctttttttcaccaattttatttataagttcatgaatccttgaatggcagcaacatcaaaggccttattggtacgttccacccgaaaaaattgaaaacccgaagcataagcaatatggaaagacaagcatacactaagcagtagcagtttttgccttttcttccatccaaattttatttcttggtttatgtgaattatcttgtagtcctaggaaagtataataataatatggatgtcaagcctttctggcc

SEQ ID NO: 245005 - DNA, 368 bp, Gossypium hirsutum
  unsure (1)..(368): unsure at all n locations
ctttatcgccctggttcaattcccgcatttcacatggctaggtaacattagtgttaattggcttttctaaaactgcaaccactgtctaaattgtgtttataccagctttttcttaactttgattttaggcaatttttacattagagaatttcttctccgtctagaattctttttgttccccaaattcataaaaaccaatttccatgtactgagaaatctaaaaatattagttccttnnnaaaaaaaaaaaaaaaaaaaaaaaaaaaaaaaaaaaaaaaaaaaaaaaaaaaaaaaaaaaaaaaaaaaaaaaaaaaannnnnnaaaaaaaaaaaaaaaaaaaaaaaaaaaaagggggggggcccttttaa

SEQ ID NO: 245006 - DNA, 432 bp, Gossypium hirsutum
  unsure (1)..(432): unsure at all n locations
gtatccacgcattcaaagtttgtaaagtaaagcactcaactttgtaccagtaggcatcactcaatgcaattagggtgcgtttgtttgcaggaaaacatttttcagaaaatattttcttaattttacagtgtttggaagcctgaaaacattttacaagtgtaaattgttttccaagacacgggtaaaatggcctcagtttagggaaaatgtcttaccaatttcatttccgtaagacattcttcggaaaatccctccctccttccgtccttctctttcttcaatctgtcttcccctcacgaatttgcaggatctaaacgtcccaaagttggcccgtcgtcgatattggagcttgtgntcaatacttgggttacacacctggcctctttattgtaggactgttcaacattttggtattttggataataagaacac

SEQ ID NO: 245007 - DNA, 379 bp, Gossypium hirsutum
aatggatcggagcttgggaagtcgagattttagcaggtaagtaacaaagctttgatcatgctgtattagcagcagacattatacgttttgatgttgcattgaacttaaaaatgagttgaatatatttaatatatttatgatatgtagatggttgacgatggctcggctcatatcgtcgagtttcggagaaaccagtttgtcaaaggaacattgggaaatggccaaagaaatggagaggctaaggagggagagactgaaatagaatccgaaagtccacaagattttgaagctctggtatttggtaaatgattgttgtcccaaagggtgatgaaaaaagcaaaaaccagaatagcatacatggggattgtgatgtatgaat

SEQ ID NO: 245008 - DNA, 274 bp, Gossypium hirsutum
agcatgactgcactgagagacttggcttttgagagtgggttattcctgaaaaagctggacctaaaattgcaaagaactctcttgcattcatatcgcaaggattcgacttctcaagtatctgctgaaactgacccagatgctctgctgacgaaagacgattcgcctactttatatacaggtacacagtagaactcttcaagctcctggaccgacaatttctgttgctgtaactcgatagaagaatgaactagatgattcagcatacatcatcttg

SEQ ID NO: 245009 - DNA, 291 bp, Gossypium hirsutum
cccacgcgtccgaaaaaacaaaaaaaattcataatatctaagaaaaaaaaaaaaaaaaatattaaatggcgttttacatagaaaaaaaaaagtcaaaaaacaaaaaatttcatggctcgaaaattctttgccggaggcaactgaaaatacaagtgggaccgcttttgaggttacaaagatcattaccccattgactgaagctgaagttctttctgaggatgccgaacatctttttgtgagccctccattttcaaaccttacctttgggaaaactctgtgtctccctgattt

SEQ ID NO: 245010 - DNA, 318 bp, Gossypium hirsutum
aaaaagattcgaaagccaaaaccatggttacatcctcagccgataacaaagtctgaacgcgagcagatgcgtgatgagttttgggacactgcgcctcattacggtggccaaaaaggtggatttctctgtaacttattgccatttaggttaacatgcctaagattatgaacaccttcgcatgtagataaacatgcctaagattatgaacatcttcgcatgtagatattctcgatttccgcaagtgtgaaggaatgctgttgatcttgagttgaccaaatatagaaaatcttcttttctgtatgagctgaaaaacttagt

SEQ ID NO: 245011 - DNA, 123 bp, Gossypium hirsutum
  unsure (1)..(123): unsure at all n locations
cagcggccaaaacaagcagannnncncggggnnnnggagnnnacaaggcggagaaacaagcncagcgcaaaggagcccacnaaggccccncagnnccaccagcncccgcgaannaccgcagcc

SEQ ID NO: 245012 - DNA, 357 bp, Gossypium hirsutum
cccacgcgtccgcccacgcgtccgcgagtaaaaagctccgccgtcgacggctccgatcggcggcaacctagtcgacttcaacggtgtgctccggcttctatacggattagtccggtttcgaactggaacgttgcgatccctctcttatcaccggtccctccttcgcctccctcgattgatctggggatgactgagaaaagagaagagctaccgcgaaaagagcagcagcggcaaaagcagacaacggagcgtcagaagcgtgtttttgcgatgtggcaacatccagcggccccgttttgttacgaaccggcgccgtttgtgccggtttagatgtaaacaaaaaaatgttgttagatg

SEQ ID NO: 245013 - DNA, 306 bp, Gossypium hirsutum
atcttggatgagcctcagagaaattgttgagagcaacgaggacaaccgcttctaattctacaataccattcttggtttaatgatacataccggaccgaatcgatcaccgattgtggtacgatcgaccggtttgattttattattattaatatttagtagtagaatcacggacaactgattatgcaaacggctgatgccccttgtgcataattaaagcaatcttatttgatacgaaggtactccattgtcatttaaaaaaaaaaaaaaaaaaaaaaaaaaaaaaaaataaataaaaaaggatagaaa

SEQ ID NO: 245014 - DNA, 346 bp, Gossypium hirsutum
cccacgcgtccgtcttgatgctctgggcagggacgatttccggcgttcggaccaccgtccgtccgtcatcggcgaccgctgtatacggcggctggaagcgcaaaatcgacccctttttaacccttttgttccccttaccctagatccatagttgaagcgcccaaaaacctcacgaaaaccgacgaaaatcaagagaaacttctcggttctactctccgatcgccccaaacaaggtggtggttgaacggtggagcagaggctggttgggggttgacagagatgatgggacagaagcggcggctaggggtcttttttctggtaatgttttgggctgatgttagtggct

SEQ ID NO: 245015 - DNA, 375 bp, Gossypium hirsutum
gttgtctataattcaagaggctagagaacctggtgagagtccaaaaattgggagtcaattacttggtggtagtatggagcttgatgacttatatactgatgcagatatagatgatatagagacgagtggtgattttgtctgtgcattgcaagtgtgaataataattaaaaacaaaatagcatcaacttttcaaaccaatatggctggaaattcaataaatagaaaaagggaaagcaaatttgaaggtaaagaaatgtggaagaagttgctttgcatagtatatgggatatggaattaaaagaaaaatgttgcatctcaggcttaaaaacttcacgactttccatatttgctcacgtttagataagaaatgacagc

SEQ ID NO: 245016 - DNA, 244 bp, Gossypium hirsutum
atttcatccttggttaacacttagtggtataaatcattaaatgaccaggcatttggtctttagcgttgtttaccaaaaaaaaaaaaaaaaaaaaaaaaaaaaaaaaaaaaaaaaaaaaaaaaaaaaaaaaggcagataaaataaaaaaaaaaaaaaaaacgtacattaataagaaaaaaaaaaggggtcgtctagtaaaacctaaagagaatttcatgcccgtgggaacacaaatgcttatttg

SEQ ID NO: 245017 - DNA, 319 bp, Gossypium hirsutum
catagatagtactttttgaagtgttgtgatactttatttctggcttaaatgttgacgtggttaagagttggtgagcaaagtcatatggatttaattgcggatatatactaaagaggaaatctcattatgatactttatcatttggtatgatctcatagaggagaaaaagatgggatggccagctcttcctgctgtaatccttaaaacttatattcaaaaactggcttaagttcctgctgtatgacacatactgtgcatatgtacaataaaacataaatctgggattttcaatgtatatatgagcttcaactgcttcctg

SEQ ID NO: 245018 - DNA, 319 bp, Gossypium hirsutum
gggagtgcttcatttggtacgtgtggcaatggaagccattagccattaaggagaagggaaaaaaagaaaaaagaaaaagaaaatccggttggtaaggatggttttatactaggaggaaatctcattatgatactttatcatttggtatgatctcatagaggagaaaaagatgggatggccagctcttcctgctgtaatccttaaaacttatattcaaaaactggcttaagttcctgctgtatgacacatactgtgcatatgtacaataaaacataaatctgggattttcaatgtatatatgagcttcaactgcttcctg

SEQ ID NO: 245019 - DNA, 392 bp, Gossypium hirsutum
ccagaaacagaaaaaaaaaacacaatcaaatcggttgttggaaacaaatcgattcgtcgtcttttaatcatcacttaagttcaagtttaggaagttagatcattagaacttaaaaagggatttaattgattatcacaagcaattgttgggagaaaaaaaattaaagtagaaaattttgcttgcttcaatagaaatttgctccaaatctcgattctactacaacatcgataaacccaattcattatcggagcaaagaagctttgtttttgaatcttgaagacgtttatcatcttttcagttgatatgattgcatgagcatattgacggcgaatttggacggaaaatggtgaattttgatggaaaatacgaattttgacggaaaatacttcaaa

SEQ ID NO: 245020 - DNA, 323 bp, Gossypium hirsutum
cccgcgcgtgcggatgtttaggttaagcccagagtttatggaagcgtctgggtattcgtgtggaagatgctttgcaacatgatttcaagagatattatgtaatccccttcattttgctgtatctatcttgtaatgaaagggtagaatttgagatcagaaatttgctttttgtcattgcttatgtcattatttattcatgcatgacttggcgatggtaaatgcaattatatctgcaaattaaaatggaatctgtataataatatcatttcaatcacatgtgtgatatgtagtctatagcatctttcacaaagcatgccccttat

SEQ ID NO: 245021 - DNA, 395 bp, Gossypium hirsutum
  unsure (1)..(395): unsure at all n locations
cccacgcgtccgtaccaattcaaatggttcaaatgttttcggtgcggtgccttacaacccatctccgccgtcagccgccgctatcagattaagaccacccgggcagccctttttcaccactttgacatgcctgggcatatactatcaacgtagcagatgaagacctttttttctttttcttaaaatctcttggttgccacaaggttttaaaatttttaatggaaactaaggagaaccatataaattgcttagtgaatgatgagcagataaaatgtactagaaaaatgaaagaatgagagagaaccacattttattttcctttttctttttcttttaactttaggttgaaaatgcgttgtagtagagggatggctnatccatgtaatttttttttt

SEQ ID NO: 245022 - DNA, 222 bp, Gossypium hirsutum
ggaaatgaacactaagaaggtgagtgtgcaaacaatgcatagtgactatttaaatggagtgagcatagctacatctactgagtcacttatcatcctaaactgatgcttttaattaggacgatgcgactgtatcaacttaacatgtggaacatcgagggggggattggcttcttgcacagtgttattctacatctctgctgcctacagattggctatccgaac

SEQ ID NO: 245023 - DNA, 285 bp, Gossypium hirsutum
gacctgtctcggctactctgtacttggggtattctctcttcatgggtctcacaatcatgttcgcaactggcacggttggattcctttcttctttctggtttgtgcattatttattctcttcggtaaagctggattgaagatggtttctccaggtatgcacacaaaaaatggcacactgaagaggtaggtggacaatgaagaggatcttgagaaaagaattcaacccttatattagtcagtcttctctttacaagtattttgttatcttgagctttactttagtgg

SEQ ID NO: 245024 - DNA, 368 bp, Gossypium hirsutum
caggtacgggtggtggacacaagttttaccattaagacaacaatgtggtagatcccgaagatattaatagcttttatcttggagaaaaaagaaaaagaggggcattacttctacggaaactgcattaatcaacgggtcccggctttccatgttttaacaaaatttgacacacaaagctctttcccaacttgttgtcaaggcgtgttttggacagcacaatgatttggaaccatacacgtgactcacaacgtggggtgttaaatctctaagctccttgctgtcttatatattaaagggatactgctttattgtgtactccaattttattaaaaatatattctaatcttcttatttaaaattttatgtgt

SEQ ID NO: 245025 - DNA, 268 bp, Gossypium hirsutum
ccgagatccttggcggtgaaatctccgggaccgaagcggctattgacgacgcttatcaacaaggcgatcaagtttgtgaaccggaaaaaggccggtgagaaaaccgggaacgaagaggaggagatcggagacggcggcgtatggcaaagagcgatcctgatgggagataaatgtcagccgctagatctttcaggtgtgatctattacgatcgcaaacgaaatcaagtggaggagttgccgtttcgttccccacgtgctagtacgatgc

SEQ ID NO: 245026 - DNA, 393 bp, Gossypium hirsutum
cccacgcgtccggcagtgctaaagcatttagcaatgaaccgtaaagcccttaaaacttgtgccagctaattaatttatgtgtttctttctggggagtgatgcaaaaagcttcttttcatacagctgggatccctttccatgaagggtagcataaactttaatagttaagtttgattgattttagatgtctcgttgcaaaggcaaggcaaatatcaagaagccattaaataccactcaatggttttagcaatatctgatcgagaaggagaagactctagaaatacagaagcctatggagcaattgctgactgctacaccgagctaggagaccttgagaaagcagggattttatatgataaatatatttctaggttggaaacagactaatgaagc

SEQ ID NO: 245027 - DNA, 300 bp, Gossypium hirsutum
ccgaaccaccccctacggacaaagcgtattttgataacttgccagctccctctaaagatgtcaaaattaaaagcaacctggctgagaccctacaatccaaatgcagtgtcaacatcccttacaagatcagcacttacactaactgcctaaatctccatcgagatcgatgaagagagtgttacgcatcagcttgcacgagataaattatatgcttaaaaagaagaagaataagattgaataaccattttcggatggaatttttcaaatccaaaattagtctccactctaatgtacagaggc

SEQ ID NO: 245028 - DNA, 272 bp, Gossypium hirsutum
ccacgcgacccacgcgtgcgatgggcccctttatggtcttcttaagtttttgcttaaggacaaactgaatggcaattgcggggtgggtgagagatgcattcgtaatctgattcgaaactgtagacttgatgcaaagattggctcgaagactgaaaaccccatggggggggcctaataaagcgtctgagtacgagccgctgatcgaccacactaacgctcttcaaggtcggacctacaacctactcggccggcttcttgagcacgcacaagca

SEQ ID NO: 245029 - DNA, 265 bp, Gossypium hirsutum
aaaaaaaataaaaaaataataaaacatattaagattgaacctttaaaacattaaaacttgggcaagctaacttgcctatgtgtaactttcttatgaatgatccaaaattcttttttttgtccgtctgttatcactttccatgatgggaaacatatgccctaatcgataagattggttgattagaaaattctcgttgcaaacgctagggaaatatcaagaaggcattcactacctctcaatggttttagcagtatatgatcgataa

SEQ ID NO: 245030 - DNA, 317 bp, Gossypium hirsutum
ggaacacccggcccgacccacgcgtccgaaatttttcagggcttatctttatgtctgtgttcgagttatgtgagattggggtctttgattttagtatttttgttgatgatgtttgtaactgatagttcaaggatgtattgtgatcagtgaagagacaattgttatgttggtttaaacaaaaaaaattaagtttaaatgaatttaaaatagaatagaaacaaaatgcaaagcaaatataaagaagccatttaataccactcaatggttttagcaatctctgatctagaaggagaagactttataaatacagaagccta

SEQ ID NO: 245031 - DNA, 263 bp, Gossypium hirsutum
cccacgcgttcgaaaaagcagtctctgtttcttccctacctctctaccattcgcttcagtaagctaatctattagttgctcgctcactaaacatggcaaaagaagccgagaacagcatccctacatgccagagcttatgtacacccaaccaagcgccattgatagaacttgaatgctcactggacgtcgaggaccgagaaacatggataagaatttggtcagaactaatcaaacaatgtccaacgcgaacgtatacaggactc

SEQ ID NO: 245032 - DNA, 425 bp, Gossypium hirsutum
  unsure (1)..(425): unsure at all n locations
gctaatctcatctgcattactcaataccaatggcgtcttctgctacctttaggacttgggttctctcttcttctttcgccactcaatgcaacgtttcaaatcgtcaccaccaaagttgttttctttcttctcctcccaaaattcccattttctctatccctaaacccgtttctttgaagctcacttctctcctctccaaaacacccacattttttacaatccccaaatcttctgaatccgacgctgccgttgtcgatgttgaacctgataacgtcgagcccgaaccagaacccgaagcagcaccagaaccggaaccggtaccggaaccagcttcggttgttgaggcttccaaggaagaacccaaaagggaagagatttttgctggtgttatgaatggnggtcgccaatacattgttttccctgga

SEQ ID NO: 245033 - DNA, 265 bp, Gossypium hirsutum
cccacgcgtccgatttctagaagcccatttaaacttgtgcacaaatatggacatatgcagaagaggagaaaacattcattgatcaaggagctcgaagatgcactgaaagtagaagcaattaagatagatatcgagatatgagacgttatcgagaagatgcatgaatggaaagcagcgcactatagagctgccgatattaatgtgcacgatgaatcaaaaatgtctgaacaaacattaccgcatgaggaaaagacgcataagaaca

SEQ ID NO: 245034 - DNA, 249 bp, Gossypium hirsutum
ggctgatcaagatggaagtggttttattgatgataaagagttgcaaagggcgctttcgtgcgtataaccaaagcttcagtttgagaactgttcgtttgctcatgtatctcttcactaatactaacaccagaaagatcggtcagttcccttttccttctacttttattgtaactctttcgatgcttttcggccccaattgcaattgaattattaggtcaattgattttgaaaaaaaaagcgaacatttgt

SEQ ID NO: 245035 - DNA, 366 bp, Gossypium hirsutum
gcctcccaccactcttgcaccgtcgttttaggccccaactccagcacccgcaaccaagggcactccaccatataaaccaccagctcctgcgccaccaaccaaggctgctactccaccatataagcccccagctgctgcgccaccaaccaatgctcctactgcaccatataagcccccagcaccagaaccaccaaccaaggctcctactcccccatataaacccactactcccgcaccggcaccttcagtcaaggtccctacacccccatataagcccccgacatctgctccatgacccccaaccaaagtaccaactccagcaccagcaccaccaactaaagcaccaacttccccatataaaccccc

SEQ ID NO: 245036 - DNA, 337 bp, Gossypium hirsutum
gccgctcttcttctatagaactctctctatataaatatgtaatgagactgcggtcgggtccttatcacaaaacggatggtgcttgcatgtaatgcaaaggaaaagttataatctgcacagtctactggacggtgcatgtctaatatatatatatatctgtattgtcaagccagaagaaagaatgttttgtagaaatcgtatcttgataagatgccgaggatagtgtatgaaagaagattccgtcttttcttcgaagtgcaatgaaaaaaaactgtacgttggttatcattgaaactgctggtgaatctacaaaaagaagtacaggaaagaaatgaaa

SEQ ID NO: 245037 - DNA, 427 bp, Gossypium hirsutum
aaaaaacaccttgagaatgctcaatttttaacgctattttttgtattttgatgtcttcgtgtgctctgtaatacaaccctgtttttcgaaaaatcccacttacaaaaatcaaaagaatggctttatagccgaacaataataaaaaaaattcctttcttgccatcctttgtttttatttctatttgctgctgttttcttgtctgtttgcaggtacgtggcagcgtggaggtgtacggcgtacggaggcgctgaaggccagtacagcgttggaggctagagctgctgcactccctgctgttagggtttgctgtttggctaatcctatgtttaggttttgcgccattgggccacatgggtatttgggtttgtcattgggcttgtttgggtctttggttatgtaagtgggttttggtttaaattttaatta

SEQ ID NO: 245038 - DNA, 286 bp, Gossypium hirsutum
gaatcccggccgaccagcgtccggttaaagttgtttggcattatttatattgattggagtcccctataatgggccgagtgcattccatgagatccctatcttgggcttctaaacatgcatacgcttctgctgcaaagacgaggaaacattgctgtgtaaggtcgactacaagatcagaagctcccccattagatccaaaccaccagtatactcggtgatatgaaatgctactgccatcgctcatttaactgaatttattatctgtatatcctcctgaatttctata

SEQ ID NO: 245039 - DNA, 321 bp, Gossypium hirsutum
gcgtccacgcgttcgaacactcttttgacttttctgggtgaaccctcagacttaggtatcgggggagaaactatatcctaatgccggccatcctgccatgagcgccgcagagtgaatcttctataccatatcatagcgatctctggatggcaccaacccgcagagaagacaaagcttcatgctgctcatataatcatgggcatcttaattatatgaatgtcgggatcattcgagtaatgatgtattttgacatgacctgagatttcatgttaatgggcattgagttatttatcatacatactgatggctatctacaagttg

SEQ ID NO: 245040 - DNA, 406 bp, Gossypium hirsutum
  unsure (1)..(406): unsure at all n locations
cgatcttctttcttaatatgtttcaacttattttttgcttgcaagagtttttcttttttaaaatggcaatgcaccttcatatttttagttctttaataaataaataaaaaaaactaaattctctgccaaatgtattgttaacaagatatcaggaattggaaactgcgctagctgaagcaagtcctcaaatagttgcaaaagccaagtgctctcttgagctgccatcatcgttgcatggtactttgcttttgtggttgacatagacactacaagtttttgctacacgaagaaattgttccagaccaaagcataaatacgtatccagtggggtatcacgtgcacctacaatagttagtatcacaataaccaactaacttgcactcttcactggnttttgtacataata

SEQ ID NO: 245041 - DNA, 419 bp, Gossypium hirsutum
ctttagaaaagcaatttcctactgtccatacgtaaataaggaaaacatgttaaactgctacaattcgataatcgatatgggttggaggtctaacaaggccgaagatatggtttctcagcaattttcaagttcagaaagagacatgttgaagagaagaaaaaccaatgattatgggaagaagcacacggtccacctctctcaggtccaacactgttgatgatagtgggtgagaggtttgaatcaatgggctgttttgagagtgagcctagctacctctttaccttcaaataagaaatgagatgaaaaccaaagagaattttgtttgctttgattattttcctttcctttctatttggtaccaaataaaaacgaggacaaaattgacacttcgaattatatggttggatttttgtcatctt

SEQ ID NO: 245042 - DNA, 199 bp, Gossypium hirsutum
cccacgcgtccgttaaaaagtttgatcttataatttgcgatacagaagttttatttgtgggaaatggtaaagcaccatcatatcgtcccttcttaaagaaaccaggaaagataacgtctactctctaccaaatgtgtcgagacaaacataccatgaattggaaactttgctagctgtgactagtacacaaatagtagca

SEQ ID NO: 245043 - DNA, 337 bp, Gossypium hirsutum
cccacgcgtccgcccacgcgtccgtcattagattcaactggcaacatcccttgatcaagaaggtgtcaaaaaggctttacagcgagtactggaacgtgttccttgattctaattttcactgcgactgctgtttatcatttcaggttatttatccagtttttataaattttttttaaaacttgtaatcttgttttccactttaatgtttattttgtacaaaaagttataggagtggagcacatactctaatctatatgtgctaatagtttatatcataaacattgatccacattcttggtgtttattttggttaaaaattaaaagattagtttaccca

SEQ ID NO: 245044 - DNA, 299 bp, Gossypium hirsutum
ttttctcgcacgagcactcctacataagaacgacaattttcaaccatatctttacctctctaataaacaacctaaaaaaacttaattctatacccaatgaattgtacacactatatcaataataggaaactaccctatcttaatcctgacacacaatcgtttcaactaccatatgctctcttaagctcacaacatcaatacactgctcttctcttttgtgattgacatacacactacaccatttttcctctcaatgaaattcttacagaccaatgcatacatacttatccacatgcgta

SEQ ID NO: 245045 - DNA, 316 bp, Gossypium hirsutum
ggacggacccactcgtgcgcacacacaaccaacgattcctttaggtttatattcactatggccacatgatctgagcaagagaagttcatacctgatttctataaatatcttgaacatggacctggataataatgaggaataccacggctgtggaataacagatggggttgatgcagatatcatacatgccttgtaaaacaagtgatcaccttattgagattacagcatatttcttacaaaaagggatcttagtggagcacatactctaatgtatatgaactcttcgataatctcttacacatgggacaacactctt

SEQ ID NO: 245046 - DNA, 337 bp, Gossypium hirsutum
cccacgcgtccgtccacacgttcggaattaaacacccaaagtctcatatcacgccgtgggttaaatcaagatgcagtcaaccaacggatctcatctgagctcatagcaccaaaaacaggagcccccaccgccgtcgcagacacagcaccctaaaaggatgccgaaccagtggatggtagctatgcaatacccgcctgctgctatggcaatgatacaacaccagcctatgatgatgatgtatcctccgcatcattacatggcttataataaccatcattctcattatgaacgacactatcatcaacacctgttgcatgaacaacaacaaggatctaat

SEQ ID NO: 245047 - DNA, 273 bp, Gossypium hirsutum
cccacgcgtccgaatataactagcttttttttgttctatggattactggtccgctttgggtttgcaataattttgactgtctcttctttattcttgagttggaaagttttaattgcaacattcaaattctagcttttaatcgcatattacacttgccttagttgccccttctcaatcaacacaaaccaccagacacttaatccaaatggcactgcttcaagtgcttatggccccttcgaatccgtaaatcatggccttcttctccgtaaccag

SEQ ID NO: 245048 - DNA, 374 bp, Gossypium hirsutum
  unsure (1)..(374): unsure at all n locations
cttaattttcagattaagaaagtaaaagatcatatttcttttgtcttttatttggatagggaaagaagacgataataagttgttcatttacacttgtgataggccggccgttcttgtatgtagaacattaggcccaccttcctaatttttttttccttgcagcaacgagaggctgttgtttattagtatcatgtaatttacaacgtgaattattattattatttttttgtgatcgattaatgtggtgaatacaaaatggtgtgtttaacgcatatcgatacaatggtttaaaaaaaaaattttaataattaaattaaaaaattacacttccatatatatttttttttaaaaaataattaaaaaatnttaataat

SEQ ID NO: 245049 - DNA, 247 bp, Gossypium hirsutum
gcgtgcgatcaacatactcttcgctttttggattgtaatcaacaaacacaagttccggttgctgctcatctcataacttcacactaagaaaatgttatcactgctacatactacttattcgacaataatcttccaagatacagctcgatttcttggaatgagtgacgaagattcctcttactatgttctaagacaacgtcgaacatccaatcctactcctcaactgataacccgaatgaatctcgct

SEQ ID NO: 245050 - DNA, 364 bp, Gossypium hirsutum
acccacgcacccacgcgtgcgcccacccatgcgtttcctattttttattttccatcaccagacacaagtccatgggcgcggagaaatcaaaagtttacactgataaaattgacaaaccagcttcttatacttattcggacaattatcacaatatatgcacgtcaatttttcagaaccagagaggaaaatgcctcaaataatctactaatacatgtttcgacatggaatcctacatatcgaatgctaaccgtgatgattcatgctataccgacggaccgatatttatacccagccaaactgcagtgactaactgtatacttcttcccactacaacattgaatgatgcttttgcattctgtgattt

SEQ ID NO: 245051 - DNA, 265 bp, Gossypium hirsutum
aattaaaagctgaaataatatttactttactgatccttcgaaccaaaacccacaccagaaattgatttgcaggtcaacaccatgttaatctctgtagcaaactcagttactgagcgagtcccttgctaatgtatgtgaatacaatagttgatgctatttatttatccacacattcaatacattacaagtgcataaccccgaggtagtgtcaaggcagttctgtacataaatctggtgtgtatgccctacagcggatagttaaaag

SEQ ID NO: 245052 - DNA, 268 bp, Gossypium hirsutum
cggaagtcgaggcacgagccacgcgtaccggtaaaactttggcatatgaatctatttttacgaactctatacatggacgaggcagggatctctactaggaagaggagtttgagatgcaaatggcacagtgggaggaaagggatgacgaacgtggctggaacatgaacatgaccgtgatgtgcgatgtatgaaataatctaccaacagaagaatatcaaggatatgcagcgccgaggtataaagaaattcctgatcatagatatcgagt

SEQ ID NO: 245053 - DNA, 236 bp, Gossypium hirsutum
acacttctgaatttacttttactgtactgatccccaaaaccaaaacccgcaccagggatctatttgccgggcaacaccttgtctaataacaggagcaaactcagttactgagcgagtcccttgctaatgtttgagaatacaatatcagacgctctttatttattcacacattgcattcattacatgtgcatggccctcgtcaagggcacacatcatagaataatgaacaattcgaa

SEQ ID NO: 245054 - DNA, 190 bp, Gossypium hirsutum
cttaaaatccgaaaatggctacacgtttaagccgcccaaagcagtacatcgccgactcgggatcgtgcgactcggggatcgttcggtcgtttggcagtactgggtgcgttaatgacattcggtagctcgaccagatgggatcgtcgatctttacggaaggcttatgcaaggaaaatatggaagacgttga

SEQ ID NO: 245055 - DNA, 205 bp, Gossypium hirsutum
  unsure (1)..(205): unsure at all n locations
cggacgcgtggacgcgtgaatanatatgatggatttttatggactttttctgcataaagcgcaacgattaagaatcatcccgatttcaaattaacaatatagtgttggttattttatctataactattgacgtgtaataagtgaaacttagctaacgacaagttattgtgtcgaaaatttcatgttttctatcattctgccaatc

SEQ ID NO: 245056 - DNA, 240 bp, Gossypium hirsutum
cggacgcgtgggcagaggggaaggggttctctgctagggttgcgaccctagcaccctcatgccgccgacgtcgtgcccaccgtgaagccatcgcgagtggcgcccgaaaccaggtaaatcgcttttttgcttcttattatgattttttaaaaaagtgtgatacaaagagaggacaaacaaaggacgacaactctgagaaaaaaggacaacaaagaccttcaaatcgctctttgattctct

SEQ ID NO: 245057 - DNA, 170 bp, Gossypium hirsutum
ccgggattcgacgccacgcagtccggccacgcgtagcgcccacgcgtcacgccctctgcttgctggggaggattagtctcaccgtagctcttgtgttgcgcgtagctatatgcactaaaagccgttcgctcgtcaatagatgaacatatgtcaagtctaattcgccgatg

SEQ ID NO: 245058 - DNA, 234 bp, Gossypium hirsutum
aaagagcatatccactaggcctttctttatctgagcccaatcttacacgctcgagccggggaaaccacgccgaacgtgaatcctgcaacaatgaagacctataccaggccaacctatgttatcatggggatcattatgaactactataccgtgacaccatccgattaatgtcacagtaggaaaacctatatacttgatgagaaatccacattctactaccgaatacgttcttta

SEQ ID NO: 245059 - DNA, 274 bp, Gossypium hirsutum
cccacgcgtccgcccacgcgtccgaccatgtgtctgtccactcgtacacatttattactttagagaacatgggagcaatcactatcacggggcttattagaggtgtgaccatccacgttctcaatggtgctattgcctcacccaaggaagacgataagacacgctgcacttgcttcttatcctacaagagatggaacttcaattgaccaacgcatagcttacgttctaacgcttgtggcactggcgcttacatacctgatctagactctagaca

SEQ ID NO: 245060 - DNA, 317 bp, Gossypium hirsutum
acgaggccaacgatgaagctgctggggaggtactgaaggtcattaaaggcgagaaccagacgagctcaggcaagaaagttcccgacgcaggcattggactacattcagatatgcgctgttggacgcacacaatatgctatgacaatgtaagagtagccgaacctgatggctctaaagcaaaggaagcagattacgagactgacaagaaataactaatatctgaactacagggccaagctcttataatcgatgctgcgctgatgcaaactgacaaacctgatgactgtcaccgtaacctactgcatcaatacgcactg

SEQ ID NO: 245061 - DNA, 111 bp, Gossypium hirsutum
actccttacggtaattgcgaattttgtgctgcccctgtaaaacataaggtattgaccagcggtgcggtatcaaggctctcaatgatttatttcggtggaccaccattgagt

SEQ ID NO: 245062 - DNA, 466 bp, Gossypium hirsutum
  unsure (1)..(466): unsure at all n locations
gaataccacagagtgaggaatgtgctgctgctgaaccgaccaaatttgcatcagctcgtgttgagtcgtcatcgaggcaagattcatactctgcttcaagtcttcatgcttcatccggtggaatcgacgatactgctcaaaagttgtatggtagccattttgatgagaatggcagagaaatgctcagagaagaagaatttcctgaagtgagtgttgagtttcaggagacatttttgggccacacaagtccaattactcggtgccggttttctgcatctgggaacaatatagctagtgcatctgtggatggcactgtcaggatatggacatatgactcatcgattccagcatctagaaacgcgaccatctattgtggagccgagataatgtcacttgactgggaatgcanatctgaccgtttgcttctcataggcactgctgatggangcataaaagcatggaatgt

SEQ ID NO: 245063 - DNA, 395 bp, Gossypium hirsutum
gggaaaggcctttctgatctccaaatcgagttcaataaaagacatgctgcaaccggaatggtcgcgcagatgactctggcgaggctcaaggagatgtggagaataatacacggggtaatgtggatgcctgataagaacagattgccaagaattgttcttgtatgctgcttgttgcacaatattgttattgatatggaggacgaggttttcagatgatatgtgattatcccatcaccacgatactggctatcgtcaacaaaattgggaatatattgaccagtccgccatgatcatgagagataaactctctctctacataaatggaaagttgctatcttgaaacaatactttggcttgtccttcgcattggattcttgatttctacactcagaaaa

SEQ ID NO: 245064 - DNA, 213 bp, Gossypium hirsutum
  unsure (1)..(213): unsure at all n locations
gcgngggcggacgcgngggcggacgcgngggncnnaancnncanancngcaacagagggcngnnnncannncagcacaaagaaacccggnnncaccccagaannncnaggacgngnaaaacnngncacttcggnngcancannggncggagnngganggganaanggannnnnaaaaagagnnccanngcggaagaaaanncnggccacaaca

SEQ ID NO: 245065 - DNA, 270 bp, Gossypium hirsutum
  unsure (1)..(270): unsure at all n locations
cgggccgncccacgcgnccgccatggnccacgggccaccgcagcnccgnttttcggcgnncagacgcngccggcgacgcgcgaagaagaggccgcgaagaaggccgacncgccaacgancgangccgncnnncacaacgcggncancgncaccanggaggangcgnnccgcgnccnccaggacggcgcggncgccgncgccggcgaccgcancgccgcggggggccccnccgcggangnccccgccgccccccccggcgccgagcagacc

SEQ ID NO: 245066 - DNA, 275 bp, Gossypium hirsutum
tcatctccaaaacaacaagaaagacccaagtagctggcctccccaactttaatttcttggaaatttattaatttattcttcttcacaaatccaaggtcagagctcaaacagctcccagggtgatttagaaatggacgctgattcatggagtacccgcctttcttcagtttctaagagataccaatttactcttcaatcacggtcagatatgtttatggggtttgaagaaatagatggagaagatgatataagagaggaatttccatctccttttt

SEQ ID NO: 245067 - DNA, 306 bp, Gossypium hirsutum
aattcccgtcgaccacgcgtccgaaaaaaaaaaaaaaaaaaaaaaaaaaaaatttaaaaatttaaaaaaaaaaaaaaaaaaaaaagaaaaaggggaaaaaaaaataacaaaagaagacaaaatctagaggttccccacaaaaaaacccgggcaatctatgtttaaaccgctgcttttttgcaacttaattggcattcttgcccttcttttttccctgtaatcctttgattgccccgccttttcctatctatatgccctgctgacccccgccttttttggcaaatgctgcgcttccttaattttttt

SEQ ID NO: 245068 - DNA, 452 bp, Gossypium hirsutum
cgtggctccagcctaagtcctttcaggaaatagagggctcgccctgacaatatgcaaggcgctagccgcagtccttataggaaagagaagcgtcctgctgaaaacgatcgtagccccagtcgcagcccatatagaagagagaggcccacttttgacaatggtcgcgcacccagccatagcccatatagaagagagagaattaccccacagaatggccagcgtatcagccctggttctatgccataaagaacggcctgcccttatggaggtgaagctgaaagcccagtcaatgcacgatatggaacccaatctcctgccacagaggtatgattaggatctatagaaagcatttataggaggaaccttcgtcttcatggcagaactcagttggaagtgattctattcgcttttctcttgtgacgaaaactggttttgcgattacatttacagct

SEQ ID NO: 245069 - DNA, 475 bp, Gossypium hirsutum
  unsure (1)..(475): unsure at all n locations
tgtaagcaaaaagtgaaagaaaatgagggttgttaataagagagatagaggtttaatctctctatcattgttatttgtaatggcaatattactcatcttcaacgccaaaaatttcagagttgctgtgttagcggagaagatcaatgacaccgctttcaggggtggccacggtggcggtgacagtgcagggctcgacgatgatgactacagcagcttcatcggtgacgatatggagttggagatgttgacggattcctacatccgccgagtgctcgccggtagcaacggaaaatcaaagactgcattcactaacaacgctaaaaaaactccaagttgtggcacgggtaaacaatatggtccgtgcatgggtgacaagaaggttgctaacaattgcagtacattcaatcgtacttgccagaaatagtnataatataaaaaggaaagaaaagtaagttggtcagtcttttttattatt

SEQ ID NO: 245070 - DNA, 301 bp, Gossypium hirsutum
cccacgcgtccggttgttcaatattatgcattttacacatgtgcgtccagcttttaatgtgtatcttccaaacagctagtttagaaagtcttctccaggtgatccaagttttgttctatacataagtaggtgcagtccaccatccatagtataaattgaggcccttgaaagaaagcatggtgccatcccttttaagttttgtcatgtagaaaacgggcgtgtcagtttcttctgcttggctaatactgagcttcctgtcttacctcaagacctttttatatccgttggctccgatgatact

SEQ ID NO: 245071 - DNA, 210 bp, Gossypium hirsutum
acacgtgcgtccaacttgggatggtgagctgttctacaccaaaattataaaaacttctccatgttttccaagtgtcgttacttacataattatgtgcattcccacattcagagtataaattgatgcccctcaaagaaagcatggtgccatcccttttaagtctcttcttgtcaaaaaccggctcgtttgcttactcttctttgctaaata

SEQ ID NO: 245072 - DNA, 394 bp, Gossypium hirsutum
  unsure (1)..(394): unsure at all n locations
ggccgaccacgcgnccgcccacgcgttcgcccacgcgaacggcgggttttggcatgaaatacactcagacgggggcgcgtgtttctcttaaagtgcatagatgattggctaatcatgcaaggaacttgtcccatgtgtagagagcatgttcttgacgatgatggtgaagaagtgtaaatcaggaaatgttgatttacaaaatactgagttctccttttttgccctgaaatccggtgtatatatagagtcatagaccattgcacaagggttttgtagcaactttttgatatttcaaagcagttaagaagcggcgatcttatatattgttccaaacttacatactcgttctttcaatgttttatttttttttttcattgcctccttaaatttaatt

SEQ ID NO: 245073 - DNA, 292 bp, Gossypium hirsutum
gcgtgcggcggtgttcgatgtctgatcctaccacatataactggtgatgcacttaggggtcacgaatgcgtgctagggaagctgacaaagcagctaaacgagcctattaagagaaggagcatgttatcaaacttttattcaaacaagcctgacaactctttgtctacaaacagtggttccaaatattgcagctcgaagctcttattgtccataccaaagataatgggcagacacactcccctctatatcctgtaaatcttgcacctacgttctacaacagaaggaaactgct

SEQ ID NO: 245074 - DNA, 228 bp, Gossypium hirsutum
ggacctttgcacgggggttaagttggcattgtgggaggtgtcgaaacccctttgtgaaaagcaaaaatttagtggtcggcttaaaaatgaaacaaaaattggagtcgccaccgatcctttattgaggtgtgatcggtacaccttaaaatgattttagatctacgaattttgagaaaaaaaaaaaaaaaaaaaaaaaatgaaaaaaaaaaaagaaaaaaaaaaatgaag

SEQ ID NO: 245075 - DNA, 259 bp, Gossypium hirsutum
  unsure (1)..(259): unsure at all n locations
tagcaaacgggcaaccagaagaggaagcaagnngagacaaacaactagannacaaagngnctcaacccaatcgacttcacaagaaaaggaattatggtggtcgactgaattgtcgatcagaatcagccacttccaagactttcaatggtgcgtcttcaacccagaacgaatcctcatcagttctcaaaccttcaacagccattgcatgcgctaccccatttccttctcgcgttacgaattaaaatcgacaataagaaaa

SEQ ID NO: 245076 - DNA, 445 bp, Gossypium hirsutum
  unsure (1)..(445): unsure at all n locations
gatgattttaactggttccatcgtcttgaattgcctaccagtttatggagccattggcttaaggaatgatgcagggaaaatgccaacccaaattactattatctcaacatttgtgtcggtggctctctattatgcctcttcactttgtttgtgaagtattaatgagtgttttaaatactaaaaataaggccttttctagtgaaatattggaaactaggatctttgtcttccttatttatttatttatggtttttttggtatgttgatatttgttttattgttgaatactgccttgcttcttttatcatgttcttttggggtttgtaagattagaaaatttgaagccattgngctcgttttagctgaggttcaatgagaagagaaagaaatggacaaggagtggcgcccaaagctgtccgtttggttggtcttgggcctattgcgc

SEQ ID NO: 245077 - DNA, 283 bp, Gossypium hirsutum
tttcttttgttttaaaactttcttcagcataagtgcataacagtatctttgaatactctattatgaaattatccatagtgtactacacccagatttgtatatgtttacttttggctcataaccctacattgaccacgactacgggaacccaatggtcaaagaaaaatgttgatcgattggtcgaagaaaaaatgccaaagagtatcaagaagccatctgactttctcaaggatttaccccctcttcccttctttaattttcaacatcacccaatgattggcaa

SEQ ID NO: 245078 - DNA, 369 bp, Gossypium hirsutum
gtccttagcgaaatatcagatgcatgatgaaaatagccagatgagctctattgatgcagcaatagacagaaggatcctggaaagcagacttgctggtcgaatggcattttagttgggaggagaggaatgcgtcttgagaacttctcttgggataaatgtgcatgcttttgtgattgcactacttacatgaattggaaatggatttgggtcaatcaatttttaggtgggtatggcaaccaaggcagatgtatttgtgttgtattcttttgcgaagtgatgcagaagagagaagataagtcattgttttttaatcttaaattttagtttctccaaaaaaaaaaaaaaactggtagggatataaaattttga

SEQ ID NO: 245079 - DNA, 274 bp, Gossypium hirsutum
gcaaaatcttgtttggaaaaagggatcacataggttgcctttgacagaggtggatatcccgatcatggacgcgtacaagcccttgctgattctgctagggagcatgggcttcaattttaaaagttgtgcagttagcattcttttgaactttgtcacttttccttgtttcgttttgtaactttccttttactgtttttccaaatccttttactaaacagcatgaagaacgctctttcgtatcatctagcagtgtatttgatgacttttttgcttc

SEQ ID NO: 245080 - DNA, 264 bp, Gossypium hirsutum
cgtacgtagagctgcatatattaaatctttaaacactgaagagcactctgcgcttgtagagcatggagggatatcaaacatctgtctttttgtttatcaatatcctcatgaggctctagcagtcgctgatggtccataacttgggaaataatgctccatcagtacaaactcataccgacccacgcaaagatatcaatgggtatcaagaagcctattaactctatcgcctgatgaagatgacgagttcttcacaagccctgatct

SEQ ID NO: 245081 - DNA, 237 bp, Gossypium hirsutum
cccacgcgtcctgataccgaatcctttagtttgcacccgaatgagccattccgaacattgggtgactgcttcaacgacttcttagcaaaaatgaacgatgaaaacatgaagcaaagcgacaaaaacactaatcaaactaacgacatcccccctccaaagtcaataaacaaagccttcgccctcacataaacatgctcttgacgttaacactatcgacaccaaactatccttctcttt

SEQ ID NO: 245082 - DNA, 294 bp, Gossypium hirsutum
  unsure (1)..(294): unsure at all n locations
cccacgcgtccgcaaaancgaagacaagctcgaggacaagcattaactcgaagattcccgcaaaccgggtcgtgcttctccctcaaccgccaacgccacctcttcttcctcccttcttcacctactagatcgctcccaccctaacccctcttccaaacttcaacgcatcggcctttccccctaatggaagtcgaaatcaaactccgccttcaggacgcctccgaccaccgtcaattaacctcttattcgacaccccagccaataccctttcctctcaactttccgttcttagcc

SEQ ID NO: 245083 - DNA, 241 bp, Gossypium hirsutum
accacgcatacgaaatagaagaaagatgagaatagtgttttcaaaaaaataatggaaaaaacgatggtgtattcaactgtaatgaagacaataaatttgggatcgactagtggaaatattaaacctaatttcagccatgttagcagccaaatgggtaattggattcaggaatggatgcaggattctagtatggaatctattattgaactgctcaatgaaagggcttaaagcacggttgaag

SEQ ID NO: 245084 - DNA, 259 bp, Gossypium hirsutum
tccagtcgtccacacacctattaaatctaattactatgaccaaaagaacgacaatgccctgcgttgatttaaaatgccatgagcaaccagttacctttactattgaaacacattactaatattgagctcaatcgagacattcctatctgttactagatgccactaaagcctacactgctgacaatactatatataattgcgaatatgcatgcagagccatacatacaactctacctgactaaatttaatacacttcttg

SEQ ID NO: 245085 - DNA, 335 bp, Gossypium hirsutum
ggaagaagcggaaatgaacttctcatttgaagaacctgtggaattccttcatagattgtatttcaagttatattctatggttcgactatcaataaattcccttttgtatctctgaactttcccagtccctagtcctctgaactgaaaacactgaaataagtatctctgaactttgaagtagttaaactcatattatgcctgttaagaacatatgttagaaattctgagttttaccctgttgaggacatatgtttatgcaagggttaatataacatttggtatctgagtttgatttcaatgttcaatttggtttttgaaatttttttgtctcaaaa

SEQ ID NO: 245086 - DNA, 361 bp, Gossypium hirsutum
acggcgtgcggtcttattcaacgtctgacatgatgctctatatcgaatatcatccaaaagagaagcgccagagatcatttgaataactgcgtgctggaagtacctgttaggcgcattatacgcccccatttgctgccaactgtgtgccttttcttctttggttattctccctctacatattaggcctttaccggaatatatgcctgacctttacatacgttggaaaggccgaaattttcgaggtgctcttcaaatgagcctaacgaaaatgtcagtactggctgtggctgaggctgacgctggtgaccgactatattaacctatttctttttttacaccctgtttttatgtttttattacc

SEQ ID NO: 245087 - DNA, 395 bp, Gossypium hirsutum
attccctatagtactatcacgtcttgaaacattctgggtttcatatgctccgcacttgaacttagaaatattcggcgagacgaatcagttgtttgcacgagcccttcgcatggttgatgtgaggagagtttggaccaaactaagactatgcaaaacccggaattttcatcagggtgcagaaagggcccgtgtttgggcttcttcactggcttcggtctctttaggcaaatcttcttcaggtagatcctcatcctcaccttaggttgttggaattttatctaactgagcttaaatgtagagaagggattcagggatcggagagggtgttacaaaccgttgcaatcctttgggttgattagtcaaaccaaggaaaagcccaaggaaggattccccaa

SEQ ID NO: 245088 - DNA, 284 bp, Gossypium hirsutum
cggggtcgagccacgcgccacgcgtccggtcatctccaacgtcttacattaatactctatatcgactatcttccataggaagagcgacagagatcatttgaataacagcgggttggatgtccctgttatgcgcactatacgcccttttttgatgcctgttgagtgcctttggtttttgggctattccccctctaaatacttaagcctataccggaacctatgccctatctctacttactttgaaatgcccagagccctagagatgctcttaaactagccgtatg

SEQ ID NO: 245089 - DNA, 407 bp, Gossypium hirsutum
cgcacgacgccacgcgttctggtatcatgtagaacggccctagaatatggcttaccacttcctaagagactgagaggcagaggatttatttactaaagatctgcttacctagccaaatgttcgcgaactcgacttacacctctccttccttgtgctggctcttggctccaagccttatccccttccctaaacctaaacctaaaccaaagccaaaccctactctctctccatcttgatctgaccagtgccctacacttacacttactctcctcacacatgctaagttgcacgcagactagatcatctgtaccattgatactcctcccggtcaacactggactgcatttattctatgccgtgctgaaatgaacactaacgaaagcctttacccgatgttgaatgctcat

SEQ ID NO: 245090 - DNA, 409 bp, Gossypium hirsutum
ctctcgcgtacgaagatttggtttttgttgttcaggaaaatgaagaatttcaggggtgaggggttctttcttagggacatgaaccaacccctaatgaaactcttattttgccccttggctatctcgctgtgcgccatctctttcttattgtgaatgcttgcacatctatgcgattcgtagatcaaaatgatcctctattatgaagggatattcacataaatctgccactgaatgagaaaattaccgatgatgttcttttacaaataactgaaagaggccaacgtagctcgcaatgctcagacctggttgattgccaaaagattactgatgaaagttttaagcgtgtcactgaaaataatccaaagctaatcaaagtaatttatttgcccatacccttatgcttaaatat

SEQ ID NO: 245091 - DNA, 219 bp, Gossypium hirsutum
caaatgcaacccatcccaccttctttaatatttaatggtactagttcccactgctgagtgtgggataactgtatatcaaagcatcgaaccaagaacctgcattcggttccacactccctaaaacaacaaattatagattgctcaataatgaggtctactttctatcagaacccacgaacaggaaaactatacatgcgtgcaacacaagtcatgcacatt

SEQ ID NO: 245092 - DNA, 222 bp, Gossypium hirsutum
gcagacccaattcttagggtttcaactcaacttattatggggttttcccatcccgggattggaccattcgactgccgcattccaccattgaaattgatggacggtggctccccatggagtcaacctattctgatatcctaagcctaacctattaaggctaggttgcatgcccaagcacctacgtcaagcttattactcaacgctgaagatagggaatactat

SEQ ID NO: 245093 - DNA, 164 bp, Gossypium hirsutum
acgacgcgtatgacatcactttctgcacactttgcctatacactcccaactgctctattgggaaccggtggatttgtgcatcaaagcctgaactcacatgctgcttccaacaacatggacagctcaactccgatctgaggaaacatgccgacaatctcatatcc

SEQ ID NO: 245094 - DNA, 266 bp, Gossypium hirsutum
gcatttttaaattttaattttatggatcacatgtaaatatcaaatccaaacaaataaagcggatgcgcttggactgactctgcactgcaaggaacactcaattcactggtaataaaaacaaatgtgaatcaaagtacgcttggaaaaataagtaaaaaggaactaaagagttgaagtctggacgtacttggcaacctacccagagcatgcgacttatgaaatcttctatgagttgcaatgaaagccatatctgatcatcggaaact

SEQ ID NO: 245095 - DNA, 263 bp, Gossypium hirsutum
aactaaacccaacgaagggctcctaccaagctcgctgataagacggactatcgcctcataagccagggaaaccctaggcaatgacaagtcttccaccacaggcttcccacccagcatatacttaatcaaaatctaacactgcaaatcaacaaaaaagtgaaacggaatcgccttcccaagctaaacaaggccctcaatgcagcaagccaaacaaaatgtcaccggatatatctataaacatcaactccaaaccccttttcatg

SEQ ID NO: 245096 - DNA, 244 bp, Gossypium hirsutum
ctcacgctatttcccacgcgtcctcttagactgatgctctacacggccccttctgactgcgagctttattaacataaacttgaatacctcctattcatttccaaatatgatgaaccaaaaccaatatatccatacgcaactgcatctaactacacaaacccctaaaaactgcaaacattactgtgatcatctgctactagaaatgacagaccaaaacagtcagcatggaccataccagtatttt

SEQ ID NO: 245097 - DNA, 422 bp, Gossypium hirsutum
  unsure (1)..(422): unsure at all n locations
ggaagnccggggccgacccacgcgtacgcccacgcgtccgattgcagataagttttgttcttactaatttctcattccctctaggcgaggcagtatttcgaccatgtgctcttaggcagcagattttgttgtaccataacagttgttggcataccataatctgcatgcctttgcttacgagatcattctttttattgaaacatacccctaccagaaccacttgaataaaaaaaaagaagacataagtatagaaaaaactcactaaaaggaactaaaaaaataatgaactccattagaagaatagtgatatgggataaacaacatatttaacatgtttaggactgccactttataggaacaggaggggggcccccctttaaaaaaacggtataaactgcgatctttgcctaaccaagttttgt

SEQ ID NO: 245098 - DNA, 311 bp, Gossypium hirsutum
aagagatgtttagaggaagacatacaagattcgtatacaacagtgatgatgagattgaaagggaggaggatatgatacgcttgaagggattgccaacacctaaagggaagcacctgcgctttcctatagaggaagaagaaggtgcatgactgaaatttttttaaaaaacatttctgggtttttttggtagatatccatcagttgtctttcttgacacccatctttgagctgctttttgtttcccaaaaagatacttggaaacttgaaattgattgaataataaagaattatcttttctctccttcatggtt

SEQ ID NO: 245099 - DNA, 277 bp, Gossypium hirsutum
aagcaaaaactttgcaacatggttttggatctctaattcctgttccttggcaattttgtcagttcaaacttgcaagttttcatcaggttgaggcccttgtgatcttgttctttcttgactaaaatggcaagtaagatccttaagcaatagttataggtagaattatggaaaataactctgtactttccatttctcttcacattgctatacacttattagacaaagtcgtgtaattttttctattaatatggcatggcaaatgaatcttaatttggtt

SEQ ID NO: 245100 - DNA, 320 bp, Gossypium hirsutum
actcgggcggccactcgtgcatatatgcctttaaaacgttttcgcattcttccattcaaggggcgattgaaagggttgccaaaaaatatcccttgcacgggaatgaaaaaccagggagctaacagtgtggactacctacctgaaataaaccaggcttatctaacagaaaaagctatatatgagctagactgtgcagagaaaaaaaaaagaagtgttatagactaatttgtctaccataagaactgtaccttttcactgacctctctaatcctgtggaagctgtgcctgaaggagccccttattaatgcctgttaccggct

SEQ ID NO: 245101 - DNA, 301 bp, Gossypium hirsutum
gtcacacttatcggttctgtaaaaatctggttgaatgatgagaacttggctactgaggggagggaccattttcatttgcgctgtggcttacctcatgacaaaggggcttaaggtagagtctacttccggtttgatgcaatataagggcatccttgcttgcgaaacttcagccgtcctactctatttctccacctgtatcataaacacaatcctgaaatcctctgccgtgggggctacatgaagttgctgagtgatatcatggaccacaagaaaccgggtgacctcaccctgtacaggatca

SEQ ID NO: 245102 - DNA, 284 bp, Gossypium hirsutum
ctctggcggtgattcgggtatatatgccttcaaaacgttgtcaaattcttccattcaagtccgcattgaaaggcttacaaataaatctggttcccccagtatggaagacattgaagctttttctgtaagctacagagcaaaattggatgaagctgaacttgctcgatcagtagcagagaatataaccttggaggtttcatctcctggtgttgaaagagtagttcgaataccacaggatctagaccggttcaaggaccgctctctttatgtgaaatatgtgactg

SEQ ID NO: 245103 - DNA, 260 bp, Gossypium hirsutum
gctactcctccgcacacgctttcgtttacgctttcagttgagaactagccttctagcgtgggggtcacatatgtcgtccagtgatggaaattccttgaggtcttggctcgatgtaatagtgcatagactcatcccaatgatgataaggatgatgatgctaccttctacatgtgtagcactcagagatgcgttgactgtagacctaccggactaaaatggggtcatatctatcactcaccatatccttgacatgacatata

SEQ ID NO: 245104 - DNA, 328 bp, Gossypium hirsutum
ttattatcttacttggcgtcgaattactggaaatctcaggggtggctatgtagttattatcgatagctgtgttatagaaatgtgaagcggctcattgatgaggtaatgatgactcatctatttcaggaccaaatttcatcatatgtagaaacggggccgcgcaacataactggaaaaacctgagtaccttctgtttgcttcgagtttgagacaataattttctgttgaaaatttttgtcccaaacttgaaaattattgattcaggacctgccgaccacattggggttattgcccctgcctggccttgggcctccaatgatgaacaagg

SEQ ID NO: 245105 - DNA, 170 bp, Gossypium hirsutum
  unsure (1)..(170): unsure at all n locations
cggaangaccggnngcgacggtttagcttgacggcgaagagtgcgcaggttaagtgaatctgcttagtattgggcgtagggggttatgaggggcgtaatcaagaaccaaaaagaaaaaaaaaaccagtaaaaagaaaattttatttcttacaaaggaaagaggggaatcg

SEQ ID NO: 245106 - DNA, 366 bp, Gossypium hirsutum
cgggacgacccacgcgaccgacgcactcctacgacaccttttgcagatgttattctaatctccaacttatctggaggcctcgggaatagggcggctagaaaacatgatgagttactaaaccaacactgccctgacgatcaagctgttggagaaatgcatttggagaggatgtgtaacacacaaagtgaaagcccacttctgaagatcgtgcccgccaactccatgaatctgtaagatagctttttttccgtggtaagagacggaaaagctatatatcattctaaggttacgtgacacgcccaaatattttttcaatacatcttttaaaaagaatcccggactgccaaataaaatcccttttttgcg

SEQ ID NO: 245107 - DNA, 271 bp, Gossypium hirsutum
gcgttgacgcgtaggcgcactgcgactgctatacttgcatctcagacaaaaccctactgaggcgggactccacgatatctgcagagaatgagagacctgtagaaatgaaaccgttgattcctctgtattccttaacctaatggcaaggagagatgattgtgactggttgcaaggaacaactcatggaggctttgacggtgattgacagggaccagagtggttgcatatcatggtgctgatcttcgccatacgatgacaaatctgcggtaga

SEQ ID NO: 245108 - DNA, 213 bp, Gossypium hirsutum
cccacgcatccgcgatttcttcgtataagtttctatggacagctatgtcggccggagaattggccactcttgcccattatgtgtatactgggtataaatacaagccagaggcgcattacccatatttagccatctatgatgcaccggaagaggctgctgcagagcagttgaagctctatgatgattacgtattgctaaacctatcatcgcgaa

SEQ ID NO: 245109 - DNA, 296 bp, Gossypium hirsutum
  unsure (1)..(296): unsure at all n locations
cctcactccacccttcactatccttttattttttttcctaccttaaaaccacagggcctctgtganatttctgtttctactttcacttaaccttctacttcattccttcctatcctacctctaactataggaatgtttgtaacaaaaagctctcgtcacaactgctgatttacatgatgccaatccccagctaattctttagcatgaacttaggacccttcaactctatattccaaatatatagtcctcgcccagtattatccggacctatattcacacttaaagacgttgatgac

SEQ ID NO: 245110 - DNA, 410 bp, Gossypium hirsutum
tactctcactagccgtggccgacaacctctccttaagtctcataggagccatggagcgtcggtggtttcaccaaattatccttttcccagaacccatttcactattttcccttaaacccctacaaccactgcagccctactcggaatctatcgctacgcctacaagcccgtctgcaacatctcttgcagaagacaatatctcaacgcctgtttgccctctctttgatcatcagccattagctccagcggacgattctaaaaatgaggaagaagaagaggaaatgaagaaacgagcaaggagagggagtgttactctaaaagtcgttaacattcttaatttcattcaaccgaaaagcgtttaaggaataccaggccctcaacttcacgttcactagggggtaaactgaaaa

SEQ ID NO: 245111 - DNA, 401 bp, Gossypium hirsutum
  unsure (1)..(401): unsure at all n locations
cacacggagggtttggagtgggattggagcgtgtggtgattctcttctgtgctctgggtaacattcgtaaaacttggagtttaccctcgtgaccctcaaagaattgctccatgatcatgatagagcagaatttctgccaatgcaactcttggattttctccgaagttcgatgtgctatttggatagagaatcaaaggaatcttatntctgcttttatctttaaaaaattggctagtttttttttcccagcacaactctccctttgttaactaatggtattgtttgacttttggaaccgtgttaagaataacccgagcctaaaccaattcttggattttaaaagaaaggacctttcgcaaatgaaaaattaaaaaactattaaaaatttaaaaagggcgggc

SEQ ID NO: 245112 - DNA, 271 bp, Gossypium hirsutum
aataagcccactattaacctgctaactggagttcttataatgaatatactgcataagacgggggagctgctagacgccttacagccaactcaaaccctaatgagatgttaacacagctggaagctctataagatcacgatgagcgttaacatcactatctagagttacggaattcatatgctggcgatgattttcctaagcacgatggctctcgcgatttcagaacgcatggagcgagaaacgccattgctaatcatcactcacttactgt

SEQ ID NO: 245113 - DNA, 100 bp, Gossypium hirsutum
tgaaaacaaaacagtagccatttatgtcctgccttcccattatccaaacatccttgctttgtctgtctaaaatggtccagccagcttttaccattgtact

SEQ ID NO: 245114 - DNA, 365 bp, Gossypium hirsutum
gttttgaccaattttgataggaatctgggaattcgttttagcactgctttgaattatattgtccgggtcggctacattcttcatttggttctggttttccctgttattcacttttccctacggcaaactgtggataacttggtgtttgagggatcagctcctctcacggagagtaaaaaaaggtctttgacattaacagtagtattgttagtgctgatatatattggatctactatgatcccaaatatatggacagctttcaaatttactggagcaacaacagcttgttccttaggttttacgttccctgctctaattgcattgaggataagtcagcaagaagagagcatgagcttgaacagagt

SEQ ID NO: 245115 - DNA, 256 bp, Gossypium hirsutum
ccgggagtcgagggacgcgtcacgcgtaccgcgaaagcacacccgttggcacccatgtgcttgctaagcgacgccttgcactccttggtttgactaatgaacagaggggcccagcccttaccgtattgtggttgacgatgcctactatgccctataatatgacacggttgttgtacaagactgttctagagtctgtaataggagaattaacatgcaaaatgcaatactaggcgaatcacgatttatcatattcaat

SEQ ID NO: 245116 - DNA, 146 bp, Gossypium hirsutum
  unsure (1)..(146): unsure at all n locations
tttattctttttttaacaaaaaaaacggacttccctttttcttccacataagaaccngagggcaacggcttttaacaaaggcccacaaacaattattcaaagttccatttctgcactatacacaaaatgacacacataggagccag

SEQ ID NO: 245117 - DNA, 374 bp, Gossypium hirsutum
cccacgcgtacgggtatctgggatgggctattcacaaagagtagtgcattcaaagagggagatatagcacatgtggtggtgatgcctaatgtgacaatcgaaaaactggatttcttcttgaatgaattatttgaaaaacggtcgacttggtatcaagggaatgttcaacctccttgtattgcagcagagatagggaaagcgaattgcgtttgtgctctgcacaagtgaaaaaaaatatcagtctatgattcaggaattcctctattttcatgcagcttgtcatttggttataatgaaatatcgatgagattcataattttttcgtttacattctcaatagtactggaaatagtcgggctattcaacttgttatt

SEQ ID NO: 245118 - DNA, 352 bp, Gossypium hirsutum
aattactctttcttattacattttctacaactttttcaacatcttccattgactgtttaactcatatactgcatttttcatatcaccaatatttattaaaatcacattttctgctttctgaacatataacataaaataatatccattgttatcaatgttattcgctttacttatcaatacaaacatgtttattactcactaacatttagatttattatcttcattcatcaatcctatcccctatatattaaattaaaaaaaaaaaaaatgccttccctttctaaatatccaaccttacttactccttcactcaactacataatttttttattaattaactctaaattaattc

SEQ ID NO: 245119 - DNA, 408 bp, Gossypium hirsutum
atgttatttagcattttaattttaattttattatttagttatattaataaaatattactggtattttatagcttatcatgtttgagcaacattgcaatattgaaaatcttggtcgagttaacaaagttaaggtcaaatggcaaatcacagtagagagtttgcaattagaaccactttgtaatcagagcatggagaagttcttcaagttctccactatgaagttggacagaaatatgaaccacaccatgattacttctgcttatcgtttctgctcttacagaggacacaaaagctcttaatcagcttaacacacttatccaggatgggaaggagatggcatcagtgctttatacttatcgcagctgtgtcaaattcacttctccgactgtatgttggaattcacagttt

SEQ ID NO: 245120 - DNA, 262 bp, Gossypium hirsutum
acgcaagacgtctgatgctttgacacaaaaccttgcatttctactcacccatactccattggggattagaggatctgttatggctgtatttagagtcttgattatcacacttgaagttacatacaaaaatccattcgatgaggcatgcaacaactgctctagtactggtggcggtcaaagacattatataagagtgctaaactggaatatcactatcccacaaatgattgtataacttaataacggaccgattgatgatgca

SEQ ID NO: 245121 - DNA, 358 bp, Gossypium hirsutum
  unsure (1)..(358): unsure at all n locations
caataacgaaagccgacatgtgggctttcatcgatgatcaatggagtacgctcttgaatagggaaaactaatgaaccttgtgaaatgcattgcttggaatctcaacgaggcctgtttaaagttccccagctttatgcctatttaatataatttaactggttttcagtgcatgagaaatatgaagtcttaggtctgtgaccaagatcttacatggagagatgaaatttgttagtagagcacctgcacttaataataggcataataaactgtttgaaaattttctaagggaaaaaaatgaaaaaaaaccaaagggaaatgaaaataaaaataggggtaaagatatttatatnntgtatat

SEQ ID NO: 245122 - DNA, 341 bp, Gossypium hirsutum
ggccgacgcacgcgtgcgcccagcgcgtccgcccacgcgtccgcccacgtgtccgttgaacttccattgtgcgacagacaaatcggggtgcaatcctggttatcgaaatttttttacttcaacttaacgggaaccaaatcgttactgatgtagaattttgcattatattttcagtttaccattttcttcagggctttttatgcaatttcatgtttccatctgataaataaagatgatgtatgatgggaaaatgcaaatactgaaatttctaatgacatttctcatgtatacaattccttttcttggtggttttaattgagattctgcctactgaattgacc

SEQ ID NO: 245123 - DNA, 348 bp, Gossypium hirsutum
cccacgcgtccgatttttctcattgatgagcatcaactggataaaaccctacgctctgccgaaccatgccatggtggggatgacatttccagcaattgtgggaaatagaccgggccaaaattttaaaaatggatcagctgcaaggagcatgggaagaagctggaaaggaagatgttacaggtttgagattaaccgatgatccaatgagtcttgacttaattctgcggagactaggatgtatatgatatattaattgtatcccgtatggtatgaataaaatatgtcttcttactgctaaaaaaaaaaaaaaaggaacggaaatggatacaaataattgcttacaacaaa

SEQ ID NO: 245124 - DNA, 420 bp, Gossypium hirsutum
  unsure (1)..(420): unsure at all n locations
gccgaccacgcgtacgcccacgcatccgattataatctgccacctattttggttacaacataattttcatgngctcgggtgagggtatgtcattcagactcttcattattctctcaagtacatataattgacgcttatgttcaacatgtcatcgatcatacccttgtaagagtcacgccctagcactctagaccaagttacatgcaaacaaattttactgagatgaagagtgtcaaaactgaagttgccgatcgctgaaggtggtgggctatggcatcatacacagtaatcatatgcgtcatatgattgtttcgatatagttagggcgttttccttctgctgagctatgccctacacgttatatgtcgaattgatgattgttcatccatttagctcactttgatttattttcacataaat

SEQ ID NO: 245125 - DNA, 443 bp, Gossypium hirsutum
aaagaaaaaaaaaaatataaaaaaaaaattttttttattaaaaaaaaaaaaaaaaaaaaaagaaaagggttgattggcctttatggtttccccatttttacgtcccacgctttccaacgcaatcatcttttatattgggccctctaaagaaattccacaagcccaattttttacaacgtcgtttttcaaaaaaacccttgtgaaacccatttaagtccccttttaaaacacccctctttacacatctccttttacagcaaaaagaccatctaatagcccctccccaaacacccttcccaacaaaatcgaaaatgaaacgccccctgtaaccctccttaaaccgccgcgtttaatggtggatacactcatggttaccttcacatttaccagacctattaccccccgccctattgaattttactttttttttttttccctacttt

SEQ ID NO: 245126 - DNA, 311 bp, Gossypium hirsutum
gtcatattatatacagacgcgcaatttcatttgactaccaggcttttcttgcatgggccgggctaatcaggaatctctggcaagactttcttctttgctagagcaaaagacacctcttcatgaaagcttggtttatgatgaacgaaaccaactttagcgcgtcttatctgtaatagagaaccctggaacccatcagccattgtgttgttttcaatattggatctagcatgagggctaaacctattttattggaaattttagagtgccacactggctaaatatacctgtgcacaagcatatctgaatgacag

SEQ ID NO: 245127 - DNA, 211 bp, Gossypium hirsutum
ctagctccgtgaagggtccgaacatatcggttagagggggcggaataaacttcccttctaatacattagctccttgtactacaccgaccgagactactggataacaaaaccgagagcctgcaatttaactgcaaactatgtatatcttgtagtgaaacttgttcttttttaacacttctgcaattaggtatcgaaattgtaagtacaaaaa

SEQ ID NO: 245128 - DNA, 361 bp, Gossypium hirsutum
gtttgtatctagtaaatttgtattgccttttgtaatccattttaatttcctgggaagcgggtctcaggttggctcattcctaaattcttgtaagaatagattgagaagattataaaatcagagttatttcaaaaaaaaaaaaaaaaaaaaaaaaaaaaaaacaaaaaaaaaaaaaaaaaaaaaaaaaaaaaaaaaaaaaaaaaaaaaaaaaaaataaaaataaggggtagggcgctggtttaccaaaaaaaaaaatcaaactaatcctggggggggggccttttaaggggacccaattttatccccggggggggggggggttattttttttaataagggcgaaaaaataaaaaattggggg

SEQ ID NO: 245129 - DNA, 203 bp, Gossypium hirsutum
aatgctaaaagaacttttttttgtggaagaagaaacgctataaaggggccggttatggaatctgttgattcttccggttaaaaaaaacttgctatacaaaggcttgagatcacaaagaatgatcttcaacatcttattgcaaaagaggctttatgaaatgccaatttgcaagcttgcttggaaaggagaaaacaagctctact

SEQ ID NO: 245130 - DNA, 402 bp, Gossypium hirsutum
gattttgttcatatcttttcattatgtagcatataatttttcctttggatgagtacaatatttcattacacgccaaactaatgtttggcaagttgaataaataatacgccacttcttactcaaaatgtatatttgcttgccttaagttcatgcatgaaaattttgttggcctcttttgtgatgttttactctttaatttattataaacattcacatgcaatttgtatgtttaaaggtctaattgtgcaggttgctggaagagaaaaaattaactgctctcatgttaaaaatcagctgattctaatcattatttgcgattatatttttaatacacacttatcttttctttttttatagtaatttgaatttttttataaatttttaattttttttaaatgaatt

SEQ ID NO: 245131 - DNA, 256 bp, Gossypium hirsutum
tgtttttattgttctaaaaacatacattgattaaacaataggtacaactctattcgtccaggcaaacacgatacaaaatatgacgcaacaccatcatcaacactgaacccttcattaatgacaatccaaaacgatagtatgtttattgggaaatccattcataccaacacccatgacactttgcttgtaaacctaagcgctattctgtggaggggtaatgccatagatacaagagaagcgatttaaatcatcaagg

SEQ ID NO: 245132 - DNA, 204 bp, Gossypium hirsutum
  unsure (1)..(204): unsure at all n locations
taacttttcccacccctatcccttcacccnattcttcttacccaaaaaaaatatactttccttttaccccaccctaacccaattatataaatagcaattcaacaagccgccgatggaactttcaacttcgtgaatcgggctccattcaacgtcatatccctcgagttcagacttcagaccgactcagtcttcttataaagcaaa

SEQ ID NO: 245133 - DNA, 366 bp, Gossypium hirsutum
  unsure (1)..(366): unsure at all n locations
ctgctattggctcttatcactgaacatcctttttaangcaaaaccttaaacaaaaggggcgtatcatttataagagcctattgcaacacactccttataccacaatgtaatttaatacaaatcaaatcctacataccttctttatctatatttatacatctacgcccccattcatacaatatgcttataacatcataacaaatctaaactttatctaaatacatacctacccttttgcttatcatcactatctatacaaattaataataaatatatatcacttacataccatatatttattattactgcacacaaccaaattacatatatttatacaaattttcatctatacctaattatatatat

SEQ ID NO: 245134 - DNA, 227 bp, Gossypium hirsutum
gctttataccataagcatttggacaaagaatacaatggagaaagtgtcttatacatatgggcgggtcttttacttaacagatatgtttaacattattccttgaattattattctcaaaagtaccttgggaccatttacacaataatctttatattgttaccattaaaacaattattacatatttcttaatacctttctaatttgcttattttctaaaacaaatttac

SEQ ID NO: 245135 - DNA, 435 bp, Gossypium hirsutum
gcagaggagaagagggccataatcgttttaaagacacggttgcagctgcagaagcagcagaagaatctgcaaaaaaagcaattactgccgcacaagctgctgcatatttggccaaccgagagagtaatctatttagtgaagcatctggttgtgtaggcaacgctgctcgaggatctgttccaacttctcctcctggaactaggagaatgtatgaatctcggagttttgggacgttcaaccctccaagtactgaggatgtaagacccggcaacaatggaggtggaaagacctgtaggagacacagctacaatcatgcccctgctgcacattcagatataaagtttgatgaatcagattgtgatgaagaaatagaaattgaagattatcctgttggcagcactgatctgccaccaccagtaccttctcttgagaaac

SEQ ID NO: 245136 - DNA, 426 bp, Gossypium hirsutum
ggatttagaaatcccccctccctctcaggcctgaaaaaaatacaagaaatatgttgttcttttctttaagaattacttatttttgtttgttgttaactggttgtgcatttctgtactctctacagcaattctattggtaatttgcattacattattgctgctgctgctactactaatatcaccattgctatttctctctcactcttcaaaattggaaagctgtcatggctcatgatatttctttgttttaacagattacgaccttcaacatttctattgttgtgcatggaactgttgcagagagtaattctttgttgcctgtaagttttcagaccctctttggatttaattcatcgttatgaccccttgtgtctatggatttggaagaattgctgattttgctttgtacagggtgaaactgatcca

SEQ ID NO: 245137 - DNA, 358 bp, Gossypium hirsutum
gccgtacggtgctgaaggctgggggctgcggcgctccttgctgctagggcttactagcggagtcaaacctaggtttagattttgggccattgggccctattgtaaatgggtatttgggtttgttattgggcttgtattggttgtaatcggacttggactgctggtttggttttattattatttggtttatgtttgtatgggcccgggctaaattggcccattacataaagaatatttaaaaaaattgaaaaacttctacttaaaaaaaaaaaaaaaaaaaaaaaaaaaaaaaaatataaaaaaaaaaataaaaaaaaaaaaaaaaaaaaaaaaaaaataaaaaaaaaaaaaataattg

SEQ ID NO: 245138 - DNA, 140 bp, Gossypium hirsutum
atattttcatgtcaaaacaaagtttagcatatacttatgttactcacgtgttaagcttcatcagcattgtaagctatccagatgtcaaattttgcatcaaactgtacactctctgcaatgaaaagctcttttgggggccc

SEQ ID NO: 245139 - DNA, 396 bp, Gossypium hirsutum
cccacgcgtccgcgtgctttcatcttcttcaaattaggagcttgttgaaggaaacgaaaagcttttgcttgaacttgatgctggtgattaggcttttttgaggggtaagttcttaaagaattgcagcatttaatttatgctataacttgtgtttggtaaataaaaatatctactatttgcatcaaaaaaaaaaaaaaaaaaaaaaaaaaaaaaaaaaaaaaaaaaaaaaaaaaaaaaaaaaaaaaaaaaaaaaaaaaaaaaaaaaaaaaaaaaaaaaaaaaaaaaaaaaaaaaaaaaataaaaaaaaaaaatatataatagggggggcccttttaaaaaattcaaatttttttccccggttttggcaaataaatatttttttttaggcccccaaaa

SEQ ID NO: 245140 - DNA, 431 bp, Gossypium hirsutum
gtcaatgcttttctttaatctatccttcagactttagaaggcggctttcttgcctctccccaccaaattcggtaatcctaaatacctttctgggttatttgagctatgaacaccaagcaccctaacaattacccttttctcttcctcctgcgtattggtactgaaaaagattgtgggtttagagttagtttttcattgtttttgggaagtgtttttcaaaagtgttgttgagaagtgttttttagaagtgtttttgaaaaatttgagtgtttggcattgttgttaaaaaatatttttgaagaataaaatgtttattttagatatgagattataaagtaacaaatatgtatttaaataatgtttaaattagttaatattatgatattttatcaataatataaaaattaatttattataacttatagttaata

SEQ ID NO: 245141 - DNA, 164 bp, Gossypium hirsutum
cccacgcgtccgtatcccttaaaatcagtcctttacataccacttcagatcaaagtgttatgcctatttcacacaccattcatttacaaatattaagggacaaatgccaagtggattgtagagaggcaaaatatgttcttataaatataattgtgtttcttgcc

SEQ ID NO: 245142 - DNA, 372 bp, Gossypium hirsutum
gttattttatatatatgtgagagacaagatttagaagttagctaaatgacttctcatacagagtgcaaggagtcttgttttttttatatgtacttcagagcagctgatttcctttgttttttatttttatttttattttttattatcctttttggagttataatgttgctagcttttgtagcattttgtatttccaatataaatatagtttgtacaacaatgttttgtttcacttctactgttcaagtttcaattgagttgtgacaagaattacatggctatgctaccatgaaagagagaaataaaaaacagttatcatttaagcaaacaatataattttactaaaaataaaacgtatttttaaataatatt

SEQ ID NO: 245143 - DNA, 435 bp, Gossypium hirsutum
gaaagattccatcaggattggatctcccaagtgatgttgtcgatgagaaggctgactaagggacctgatacaaattgtcctctgaacattatgtttcatgcttgtgatttagcgctgcctaaactcataattaggtatggcttatggtactatatattcatatggtgattttggcatgtggatgaggaaattcaacatggtaattgatatacaaatagattgtaagaactttgtaaagaaccggttgttggaattcctttggtttgcaaagactgaagaagttacaggtgcctcaaatctcaactatctatatgttttactgtaaaaaaaaaaaaaaaaaaaaaaaaaaaaaaaaaaaaaaaaaaaaaaaaaaaatagggaaataatattaaataattaaaaaaatttaattttttattttttatttattaatta

SEQ ID NO: 245144 - DNA, 436 bp, Gossypium hirsutum
atagtataaatatataaatatgtgcatgtaagagtttggagatggattaaatataatggggggtggggtggctggctttgcagattcccaagggagtgggggtgttggtttgttacataaatatattggtgagagaaagttagggaaaagaaaagcatgtttaatatttagaggaagtcataaggtgtgaaaggctagaagaattgattgttgaacgaacatatgaaagggtggggaggagatggcgggtcccttaaccacagccgaaagcaaagcagaggaaattttctgagatgggtttggcggatttacaggttcaacgttgaagcttgagctgttttttgtggtcattgagatcatgagattgattaaagtcaagcttcccatctgatgatataaattaaatattaaaaccaaaggaacaatttatttgggg

SEQ ID NO: 245145 - DNA, 432 bp, Gossypium hirsutum
  unsure (1)..(432): unsure at all n locations
cccacgcgtccgaagagttgaaaggctttttaaaataacaagaatcggctaaaaagaaaaaagaacaattgcatacctttataaagaaatcgacttcctttgactccttcgggatttggcttgttgctattcggttagcaataaaaagaatgataggttcggcttttactataaatgaaagagaggaagaatgagaggtagagagtttgtggaagaaataatggaagagaaaagagagggattagcttaagaacaatcggcaagaggagaaagaaaagagaagaggggaagagatgagagaaggaaagaaaataataaaaaaaatgagagaattgtttagcttttgggaaaaaaatagaaaagaatatgagcaaaaggagattcgattnatcaaaaaaaatccaaaatttataaatttctattaaataataa

SEQ ID NO: 245146 - DNA, 279 bp, Gossypium hirsutum
atggaagttaaaattcgagaaatatttttctttttctcttttcttattcgcaaatttgtttcatttttcccccatccaagtattgtcatctaagattgcctttatggagggagctattgctttgggtctttcacaattcgtagtatatatttttcgaatttgttacgtaatttgctaacatatggaattggattgcattttcctgtcaggccatatagacaaaatgaatatgaaagattcatacctgctgcttacccttattatggagctgcattttct

SEQ ID NO: 245147 - DNA, 393 bp, Gossypium hirsutum
tgccactgttgataacgggtttcctgcccatttccagagtaataatcagctgtccccgctccaggacatgttcatgtacctgcagaagccattttagacggggaaaaaataaaataaaaaggggttatattgttggaagtcaaaacggtgatggtgaactgcgtttcaaggttacacgagactgaaagtctatgagtgtaactgagaaaggttgcgcatagattaaataacgaattgaaaaattgaaattgataatattgcactaaggtagggggagctgttggatttttgcagatgggaatggatggacggtggaagttggatcttatgcaatctagaaaagtagagattagaataggcatgtgtacagataatctgtgatcacgtgtttag

SEQ ID NO: 245148 - DNA, 309 bp, Gossypium hirsutum
caacaatccggttctcgaggttgctggccaatggaatgggaaagagcaataagcatccattattgaaatccaagcctggttttaaatcttcaaccccctcaacaacaaaggttcaaccaggtgacactttgtggagcatctcgtctcgtattcacggtaccggggctaaatggaaagaattggcagcccttaatcctcatattcgaaaccctaacgttatattacccaatgaaactatcagatatcgataagtagtatatgcattggaatctgctttgagattattacagtgttgatgagttctgcttg

SEQ ID NO: 245149 - DNA, 407 bp, Gossypium hirsutum
gtcattttacccattttgagcagcaacgttgttttcgatactttttcatccttgtttcgcggttgtagcttgttggtgtattttataactagattttgaaacaaaaaaaagtgagaatcatggtggtttcgagtttcgtttttcggactataatatcctaagcttgataattctgccctttaatttgctatctgactttgtcgagatcattaagctacgtttgttacttaccattcggattattttgcagatacgcgcacttagcttatgccgacgaagcccttgaaactgaatacaagagctatcttaaacccaagccccgacctggacgattcgaacctgcacctgctttttgtgactatggaaagaaacctgaatatgagcaattcgaatctggtcattgacgc

SEQ ID NO: 245150 - DNA, 420 bp, Gossypium hirsutum
tgtgggtgcatttccttgttggtgcaccacctttgatagtattctcctctgcttgtgcaggggtggcatgtggtgctgttccagccctaactcaactagcttcatcgtcataccatgctgcattctcgtcttcttctttattgcctccatcttcacaggatgataagatgcacaagtctaggaccaactccactttataattatacaaatatatatagaatctctttccacatgttttgcatttcttctataagagcctactgccttgaaattttgtaatcttggaggacacttttttgtgtttgtaaattgtaatataggtttatgttgatgtttaattcttttcttttcctgttataagtattttttatgttatatgataaaaaggtttttatgcactttttcttttactattatgtt

SEQ ID NO: 245151 - DNA, 308 bp, Gossypium hirsutum
gtgaggtacaagctggttgaatgtttctataaagaaccacgggattttgagtttgggggtgtcttacgagctttagacatgcccattctgtaacttcttaaaatgatatatttttgaattgtagtgcttcattttgaagaagtgaagcaataatgtctctaaaaattgtttttctagacactacttgtttcattttcaagaaattatttaaatcctctccgggagagaggacagtcttgagattaaaaaaaaaaaaaaaaaatataatcaaaaaaaaaaaaaaaaaaattaaataaaaaaatggggcg

SEQ ID NO: 245152 - DNA, 290 bp, Gossypium hirsutum
acgcgtacgggctgatcgacaagaaagagttatctctccttcaagagctcattgaatccatcatagggccttgctaaatatataagggtttaattcaattccccttaaaaatctccgtttttcttatgattttacatttttatcacatattttttattgaagccctgacaggccggcagcccccttgtgtcatcccggcttgatgcttgcatctgttggacttaaatcttcaatattcttttatttaaattaatcaaggaaatccaatatggacatatcacataatatgc

SEQ ID NO: 245153 - DNA, 384 bp, Gossypium hirsutum
atttttgcagttaaattgtagtggaaatcaatattatgagacgagtaaggaaaattgagaaggtattttcaattgaaaatttccaatttttacttcaaaaaaaaaaaaaaaaaaaaaaaaaaaaaaaaaaaaaaaaaaaaaaaaaaaaaaaaaaaaaaaaaaaaaaattaaaaaaaaaaaaaaaacaaaaaaaaaaaaaaaaaaaaaaaaaaaaaaaaataaaaataaaaaaaaaatataataaaaaaaatttggggggggcacctctttgaagaaacaaaacttaattccccgtgcaacaaaaacttttttttttatattggggaacaaacaaaaaaatccactcccatcgctttcaaaaccagttgctcaaaaaaccttggg

SEQ ID NO: 245154 - DNA, 164 bp, Gossypium hirsutum
cccacgcgtccgattgactctaactctgattcttgatagaaaacatgaaatcaatgcgaagatctcaaccaagaggaagaagactgcactaaaaagttatgctctattgacatcaaggtcaaggataagaaaaagaagaaaagtttagcagcttaatgtttttt

SEQ ID NO: 245155 - DNA, 435 bp, Gossypium hirsutum
  unsure (1)..(435): unsure at all n locations
ctttgctgtttcagaccctcccctttgtcgttcaagtcctttcccatttccgactggggtccgacgaatcggggacgccgtccgacgacccacaacggtaagtcctcccttccttcccctcctcgttttttgttttgttttgagaaacaaaaggaaaataaaataaaataaaaacagtaaaaaaagaacagaggaaaaaaaagaaccaaaatccgtcaccttcaaaaaaaactttgttctctcttgtattttcttttttaaattttcaatacaaaaaaatttgctaacccccctttttacagattcgatttcccttttatctagcccccctaaatcttttttacaacttgctaccccccctattttgcttgctgctcgtggntcttttattgcaggtacatgcgtgtatgggaattgctgcgacgtggggtatgc

SEQ ID NO: 245156 - DNA, 367 bp, Gossypium hirsutum
gacccacgcgtgcgcggacgcattttttatctcgtgatcattttcaagctcaggccccagctcacgcggcggcatctagagatttgcgtggggcatactaaactgcgtttacacatgccaccatcaattgcttttgctactagaggacgcttacaaggactaagactccaacttgcacttcttgaccgtgaatttgacgatctggattatgaaaccctcagagcattggattctgataatatttccacaactccttcaatgagtgaggaagagataaatgctttacccgttcacaagtacaaggttcctggaacagagagtgctggatcattaccaaagcaggcatcatcttcgtctgctccagttg

SEQ ID NO: 245157 - DNA, 195 bp, Gossypium hirsutum
ccaagccttccccaacccttccgtctatccttccgttttccttccgttaagttttcctttttttgggaaggcaccgatccatgagggggaactgattatcataattttcatttgtaatatttttgggtttttttaaaccctaactgtataaacaatgcaccggttccttttataatgcagaaattaaacgaccaa

SEQ ID NO: 245158 - DNA, 149 bp, Gossypium hirsutum
  unsure (1)..(149): unsure at all n locations
cggacgcgtgggtctttattgttttttgtgttgaaatggtgaaatgaaaatgaatgctgtcccatcaaaacaaactgctgctcttactattagagaatttatatgattcattggagagtttttattaaaccaaagtttgggtttggntt

SEQ ID NO: 245159 - DNA, 255 bp, Gossypium hirsutum
ctagttctagatcgcgagcggccgcttttttttttttttttggaactctaatgaaaggaataagtaaccaatctgatggcacacacagtagagatagacaagcaatacagtacactaccaagaaacatagtgggatttaccaaacaaaaatgaagactttaaaagaacagattaattgctatctttaaacttggaaaggccaaggccagttcttcaaatcctcatctgcaactttcccattcccctgtttcaatg

SEQ ID NO: 245160 - DNA, 280 bp, Gossypium hirsutum
  unsure (1)..(280): unsure at all n locations
gacccacacgtccgtaaaaaaaatttttataaacaaaaataataaaaaccaaaaaaaaaacaaccgccgggcgctttttaaaaaaccttccgcgccctcacatacatccnacttaataactcttctatacacctaaataaatttaattcaccgcccctcaccaaacaactaactaactaaaacaaccctcaccatacccaaatcaatttccttcccatacatccccctttcaccagctgacctactattaaacatgcccctatcgatctaccttcccaac

SEQ ID NO: 245161 - DNA, 250 bp, Gossypium hirsutum
  unsure (1)..(250): unsure at all n locations
ctccattgattttaatgatggggacaagcangaaggggcgcggtgttctaatatggacgagaccatatttgaagttattgatttggagtgggatgaatggccattttctgcttcacagtccggcgatgaagcctgttctgcaatagaatccgatacgagcatcgaggattcatcggaaaccgttaggaatgacatgacagaggagggtgtgaccgacaataatgaatgtacaaacgacattgatacatgt

SEQ ID NO: 245162 - DNA, 357 bp, Gossypium hirsutum
  unsure (1)..(357): unsure at all n locations
tccacgcgtcctgtaagatcagttcttggggaatcgtatgatggacagtctgtgtgagctgatcgtgtttctcgacggcttctgaaggatcacgcagcaatgagcccatccctggatctaagtcccagctctcctttaccttaccggagtgttattatctaaactcagctttgaagattcaccgatcagaatgtcttttgggtcttacgggatcaatttgtattcatcacttttaacttcttctaaggcagcatatgggtcaaatatggaacctgaacagaaattcgaggaataaggttgagagcaaggaatgacgtgcangtagtcattgccaagatcgggttagcgtcataatca

SEQ ID NO: 245163 - DNA, 383 bp, Gossypium hirsutum
cccacgcgttcgtaaagggctgttgttcatatgactggcaaatccactgccggggaggggccaaagtctaggactaccgtcgtctccgttgagcatgtcggggacaccgacggctgtagatccaacgctttcgagagggcattagcaaccgaccggcgagggcatcgtttaactcgatcgacatcaccatgtgcgagccgtcaaggccaaatagcgacggtgtgccgccgtgcgcagtgaccttgctggagtgttcaaaacaaaagccgagaaaactgaaactagtccagcggtagtaaaagaggaagaacccttggggggaagtaagccgccgcctttttccgaatacctttttcccctgtaataaaaaaattcaaattaca

SEQ ID NO: 245164 - DNA, 369 bp, Gossypium hirsutum
  unsure (1)..(369): unsure at all n locations
gaaacccgcggcgacccacgcgtccgtccacgcgtccggtgcaaatatgttttatccaggtgttccagatgcccttaaattggctagctcaagtatatatatagtcactacaaaacaggtgctgtgagtttctttcactctgattgtcccttcctcctctctcacacaacgcacacatgcacaagaacaagatgaaaagtttgctatcagttcgaagaggcaaacattgtggatatatcggtagtttgatccagtctccggaatttgaaatgaaaaccaaggcaaaaggaaagaataagggggtaaaaggaacttgaatgtaggaaagtatcatagttgagatcagtcatagnctttcctggttctcct

SEQ ID NO: 245165 - DNA, 294 bp, Gossypium hirsutum
aataaatttcctgtaagaggcggcatttgtgatcaaaattactattctagctttcacaagacacgtaaccgaaagaaattgacgaaacaagaatggaaagatttcactcgcgagtctacccggcacgccattgcagatttggcggcaaccccagagttcactgattggatgattgaacatgctgacaggattaaactccttccttgtgatagttcagaagaatcagttggaagcaaatcaaattcatccgattatgatgaagaaggaagctccagccgattcagattatttaac

SEQ ID NO: 245166 - DNA, 393 bp, Gossypium hirsutum
  unsure (1)..(393): unsure at all n locations
gtccgggatgatcaatcttgttcagaagttttttttatgaaggaaatgctgaaaaacaaagcggcttcagttctgcgatcatgtggctggtacattgatgtttacaatttcatgtattcgaggaagcagtcatatgcactggagactggaagcactctgagtgacaatgatttggagaagaagctgattgcagatgcgaagccaacctttattccacaaattcctgagtcactgaaagaggaatttattaaacttctccagtctttcagccaaacgaaacaagaatctccggatccttgatcggcatcgctgtcctgttgcgcgaaanacctgtgtataatctgtcctagtaatcagtattgtaacgaaagaccattatcaggcgaatgtcag

SEQ ID NO: 245167 - DNA, 387 bp, Gossypium hirsutum
gctagtcgctacttcactttatgtttttaccactcaaactctcgacaaggagcggggtataactatcctgagtggagcaattgcagcttgcactgaagcaataaagcatcacatgggtaaacttgatgtcaaggagcagactatagccgtgagcgaacgggatgataaactgctggctgaccacatggctaaattgcggaatgataatgaagaggtgagtggagatgaagatagcgaataagacgaagacacaggcctgggtgaagacgatgttgagaatgcaggtcatgggataatggaatagcggcgcttcttcatacaaggagaaggataattatcaattttgttttgaccaacacttatttcaattggcctcatctcatggat

SEQ ID NO: 245168 - DNA, 245 bp, Gossypium hirsutum
  unsure (1)..(245): unsure at all n locations
cccacgcgtccgataatagtagttttcttctctccccttttgcgccgntctcgggggagaaccattcatggttcttgcggtggccgcaacaccacccagaacgacggctgggtcatcgaggcaggtactgtgtgcagaggttgcggatgtggcatgtacggaggcgaaggcacgcgtacgaggctcgtgcgagcggtgctacgtgcgaggggatgtctgttgcggcgctggttggggctaacgct

SEQ ID NO: 245169 - DNA, 334 bp, Gossypium hirsutum
  unsure (1)..(334): unsure at all n locations
aaatgctgtagtttgtggagcttgaagaaggtgccaggctcnagactcattactctgagagtggaaccttcactgttttagttaaccctgaggagtctttcttcgaatggaatggaagcctaatcatgtgtttacaaaccggagtaaataatggacatattcaatttagaaatggtgcctataagattaggggtaactaggacagtgcatattcatgatccccgaaggttataaatattctaattatacatggagctgcctaccattgactttctttgtactttgtgatgatatgacgtatagtagaaaaggatatgatggttttcaccctana

SEQ ID NO: 245170 - DNA, 143 bp, Gossypium hirsutum
  unsure (1)..(143): unsure at all n locations
atatgaactttcattttggtaatttnttgnttttgtaatatttgaatggtataatgaggtgataaaatgtcattacggtgttgtaacctttttatgttgtggattatgacatataaactaatgaaatcatgtaactttttgtt

SEQ ID NO: 245171 - DNA, 221 bp, Gossypium hirsutum
  unsure (1)..(221): unsure at all n locations
cccaaaaaaattttcntttccgcctattttatttaaggaggcgcggcataaaataattttgtattgtaagaattttccaatataattgttgttatggtggatctttggtggtgttttccacttttgcttattgatgtctatggattttgctgcctttagtaaaatccttgtgtgatagttaattctatatgtttttgaatatgaaattcttgacaagaata

SEQ ID NO: 245172 - DNA, 198 bp, Gossypium hirsutum
ctctctaacacaaagcatggctaatttgatcatccgccattgagtctgaatccgttattggaaattactgttttgttctgtgatgttaaaaagtacttaaactatgaattttgtgcattttgatccttgtatttatcaaacttcctttttaaggaaataatcttaaatgtgtgctcgcgttcgtgattacatcgcaat

SEQ ID NO: 245173 - DNA, 353 bp, Gossypium hirsutum
gcagaaaccgatgggaaacgccatttttaaaaactccacagcgcatttacaaaccggcatattcaactcgcttgaagttggactctggaacatggaaagtgctgcctccgaactcctcagatcctatggggatgctggaccctgtctggacggagagcaattggaatacgattggtctccgggtatacaccgtccaggaagctgcatatgaccgattggttctgcttggacgataagtgtcacaatcttggcttatttaacaatagtactaacaagaaccctcttaacaaaagcctttaaatcaaaattttacaaataaaaattataccttcaatgtctttaccaaaattttt

SEQ ID NO: 245174 - DNA, 327 bp, Gossypium hirsutum
  unsure (1)..(327): unsure at all n locations
acgcgtccggccacgcctccgccattatcatganagtgcagagttnctgccaatgcaactctcggatcgtcttctaagttcgatgtgggatttggatagaatcaaaagaatcttatttctgctttttatctttaaaaatcggctagtttgttttcccagcacactcttcctttgtttactaattgttatgttttgacttttgagacgtgtttagaataagccgagcctaaaacagtttattgaattttaaagaaaggactttgcaaatggagggatggatttttggatgcatgatggtggcatgcataaagtagtaatgatttgttt

SEQ ID NO: 245175 - DNA, 226 bp, Gossypium hirsutum
  unsure (1)..(226): unsure at all n locations
cgaccaaacnccgaaaaaaaaaatattaccccctggttatttcaccccacaacgnaaanaacccccgcccttttttaaacacctggcgccccctaaaaccnaananggaaaacaaaaacagccttgcctcttcagaggaaacggtccttatcaaacgaaaagcttcactgttagcaacacttcattactacaccgctatgcatacccacaccccagcctccccctc

SEQ ID NO: 245176 - DNA, 264 bp, Gossypium hirsutum
  unsure (1)..(264): unsure at all n locations
tggagcgaagaaagggaatagtcanaaaacaacatgatacaaaaattattacaaatggccagtaacgcaaaagaggccgcattacactggtttatctataaactcccaccaacccatcagcaataaattactgacatctaaacaatcaggtagatagcacagacacatgtatcaatataccaggcggacaacacctataaggtctctagtgctctctcctgctataaaactggcagctaacgtatacatgcactcctttatcaa

SEQ ID NO: 245177 - DNA, 323 bp, Gossypium hirsutum
gcaaaagccctgtcagactcaacgggaaatgacaaagaagcctattatgagcccttaagagaccttgtcaaaatggtcttcggctcgatattggcatctctcttgctattgacaccaaaagtactgctcgcatttaagaataacctcttttagatagaaaattaatggaaaaaaataaaaaagcttactatgttcataaagtaaatacgggtctatgattctgataaaaattacaggaacttgtttgaatgccactattttggctttgcataaaaaaaaaagagatttttgaagactaagtatccaattttttgaatttaagg

SEQ ID NO: 245178 - DNA, 250 bp, Gossypium hirsutum
accacgcgtccggttggctcatggaatcaaagttcttttttttttccttaagttgaaaaaggtttgatttgcatttccatctctacaattacaagaatgaccccaaagagaaggttcatagtgttgaaagatgggtggcaaattgggcaaaagaacaaaaaggaaaggaaaaaaaatgcgcattgaacgatgagttgctgtatgtttgtttccctacggagatattgagattccttaaattttccatcta

SEQ ID NO: 245179 - DNA, 386 bp, Gossypium hirsutum
tgtgtctgtcgtgtcgacggcaaagatttttcagattttggtcagacatggtggacaacggttcatgggattccctttctgaattcaccttagctgaggttctggaaatggagaacaagtacaaggcaataggagatgaaacgcttaatgaggaattctgcaacaatctagctaccagattcagttgctcttcaaaccgtcttggaaaatctactataacatggcaacaggtccaactttttttccaagaaaaacaaatggaggtacaaactcagcaagagtcatcagcaatggccttaaagctatttgttgatctttctggtgaagattcaagcaaaccgcttgagggtcatgcaaaagcgaaaaggtacagttgaagaccttaa

SEQ ID NO: 245180 - DNA, 322 bp, Gossypium hirsutum
cgcgtacgattccgtcttcacttaacacgttacccgcctccaaacaaacctctctcaccgccactctggcactgtctactaacccctatcttgcctttcaagtttccggcgaaattaattcataatgaatgcaaaaaggaaacgcccggatacggcttctgcttctgtgacagaacacgaacgaattgttcatgaagtaatccgaagcaagcaagacatgggaatatcgcaacaagacatgaaacgtgaaattaatcttgacagcaacctaatcgccaaatgtattaagtcactggtatctaagaatctcataaaagaagtg

SEQ ID NO: 245181 - DNA, 296 bp, Gossypium hirsutum
aaataccggcccgaagcacattaccaaagtaaacacacctatgtaccacgtttttatccccgatcacctatatccgtctatccgcgggccaaaatccaatattcgacccatcccgcatacaaacatcacaatctcttatgaatcacaacaatattaccaagattattttctcttaaccgcgcctgcgcttctcctactaatctatcacaaacatctactctcttacctactatactacacactctttattggctgatatgactgttcatacaccattttactaaatctgttccctg

SEQ ID NO: 245182 - DNA, 333 bp, Gossypium hirsutum
tgcagacatacagaagggtttacgggagtcaatctctgaaattttcaagggatcatttcatggttattgtctccgatacttaactgaacagctcattagagacttgaaagggcagttttcccatgagatgaaacggctcatgattgatgacctttataatgcagctttggcacctagacctgaagccttccattcgtatatcaacagcatcaaaaaaatttcactggaagcttacaattggatcattcagagtgagccccaatattgggcaaattcatatttccagggtgctagatataaccatatggcatcaaactttttgggaaactcttt

SEQ ID NO: 245183 - DNA, 187 bp, Gossypium hirsutum
aacagggatcggcgggatgacgacaaactgtaatacgactttctatggggagatttgatacccctgcaagtacaggcccttaagtgcggtttataccaacgcggtgccctcataccatgtcttacaccctcacgctgtctactatcataccgcctcccaaatggagaaccacgccagcaacgcttct

SEQ ID NO: 245184 - DNA, 463 bp, Gossypium hirsutum
  unsure (1)..(463): unsure at all n locations
ccgggaaggaannnccgggcgcaggccacgcgtccgttacaagaaacaatccttactctcacacaaacttttgttttctgcacaccagatttgggagcgcttattaaataagtaatgccacccaaatatccctccaagaacacaacagacaagtgtctatgatcatataaacacacattcactcatgcaggacatgcagtcataagttttataggggtcacatacaccaagactgtactgaagatcgactatatcattatgatctacctatccaaactgcttcaacaaaaaagttatgttttgtgacgaacaaaacaaacagaggacaggcttactaatccacaacaacactcgcctgcaagcttccctcaacatatatcatatgtgcaaccgaactcaattattttagctgacgtttacatccatctctgagatgaaatccatgtttttcgcatccaaatta

SEQ ID NO: 245185 - DNA, 294 bp, Gossypium hirsutum
aacaaatcacatgtcctctcccatgtgcatcatgtcctctcgtcatgctgtgaaagtgtaaagtcccatctccggtttctatgaaagcactgcccgttgatggtatctaaattaccttaaaaaaattatgcaagtttaagaatgcttggatttttcgaacaagcttgaaagcagcaatttggttttcgaactgatcattgtgtatccacccaaaatgtaatacattggttctttataaataaattaggatttgacaaaaaaaaaaaaaggcgccgtctaagatcaacttactcc

SEQ ID NO: 245186 - DNA, 268 bp, Gossypium hirsutum
  unsure (1)..(268): unsure at all n locations
ctcacaaatttttctcttctttntctctaattgttcttgttcttctctgcaactttgtcaacgctcaactccctgcagctttccaaaaagagtacgctagatgggtaagtgatgatctttttattaatctgtagataggcttttatttctgtagggtgagcttttggtgtgcttgtattaattcatgctatgcatgtacttgtcttagatgcgaaaatcatagcatcattgtaaaacattattcagtcaacaaatcaggtttggtncc

SEQ ID NO: 245187 - DNA, 228 bp, Gossypium hirsutum
ccgagttgttgtatgaactaagatacgagtatttttatctatttttaaagagattaggtggtctttttgggttagaattcggtccatttccggtacacattcttcattgtcattcacatggtgaagaatccatccattaaattatatttgtgagtgaatagtgaaaatatgtattggagggttgggaggggagatcaaaaaaataaactatagacttgtttttatttg

SEQ ID NO: 245188 - DNA, 212 bp, Gossypium hirsutum
cccacgcgttcgtccaaacatacaagatttgccaaatcacaccatccttgcattaccagggtggtgctgaccccaagatgcatcttcctgctaactatgcctcgccaatattgcacccctaccattggtctgatgaatactcattacttccaccgtggaactgctgctcttcctcaatccagtcagcatctatcaagatgactgctcttctt

SEQ ID NO: 245189 - DNA, 292 bp, Gossypium hirsutum
gcgaaaaatggctagtctttaatcattagtattggttttggttaatgtcttatgggttcttggtggagtgtttaactttataaatacagttatggcttatatacatgtaaaatactgcaagctatgttttgttgattatatggtgaatgagatgatatataagatgagatgaatgtatgcaatggattttcaaagggaaaaaaaagtggtcataattgtacaagtttttaggcatttgagtcttcaatctattttgtttttgtttcttaaataaaagaacaaatattgattg

SEQ ID NO: 245190 - DNA, 508 bp, Gossypium hirsutum
cgggtcggccgacgcgtacgcccacgcgtccgggcaacctaaggctcatcggtgctacgatcgagctgaagatgttatccgaggttgttttgaggggaacccatttaagaccgttccaggaccttttaagctcttttggcagtgcatgcgttctaaacctggggaggaaccaacagagccatacacctatttgcagctggatcccccaaagagggaggtggagcttgaatgaaatgcccttttttgcactttcttttagattttgattgttgctgttactggaggacacttttcatatcagtcatctacgagaaaggtagatgttctgaatgtcactgatataaggctctcttggcaataagtaggagtgtgtgaacaaagaattttagaagtattgcagtgactattatctattcaaatgctggttttctctcatttgcaatacacagttatttattctttgttgaatggtattgtccttttactggaaaatcgatttgttccattt

SEQ ID NO: 245191 - DNA, 327 bp, Gossypium hirsutum
  unsure (1)..(327): unsure at all n locations
ggcttctgaactggctgcctttccagtttgccactccctttttatcatttttctaattttcagctctctttctgtttaggttaaaatttttttcttggggaaatctttttgtattttcagggtgaatcactaaaagggttaatgtatttattataaatatgttatatagcgttgctgaaaaataaaaaagacattgcagaggggtttagttgaaaacccaacattttcttctctaaataataaaaattggactgaaatatccccanngaaaaaaaaacaaaaaaaaaaaataacaagaacataaataaaaaaaaaagtgataaaaac

SEQ ID NO: 245192 - DNA, 419 bp, Gossypium hirsutum
aaaaaaaaaaaaaaaaaaaaaaaaaacaaaaaaatttaacaataaaaaaaaaaaaaaaaaagaaaaatttaatataaaataaaaaccactttacaaaacaaattcttgcttgcctttttaatgtttccaacttactttcccttacttatctcgggaattccttttttttattctcccttaaaccaatcccactgccccatcttaaccaccccctatctacaaaaaccctttccaaacccaaattaatttccttcccttactatccctttttccctactttccttatcattaaaaagccccactcctttctcctttcccaataattcccctcactaattcccaatttacaccccccttaatgggacaaattaacccctaccttttttattttactttcaaattattccccttccttcccc

SEQ ID NO: 245193 - DNA, 394 bp, Gossypium hirsutum
gaaacttggaagttgatacagttcaagcatttggcatcccttgtttcaactgtgtaacaatcttattaaaattaatgtaagaagagccatcagggcttgtagcttaaaaaaaaaaaaaaaaaaaaaaaaaaaaaaaaaaaaaaaaaaaaaaaaaaaaaaaaaaaaaaaaaaaaaaaaagaaaaaaaaataataaaaaaaaaaataaaaaaaaaacaaatgtcccttaataaaatagaacaaaccaaaattaaagatataaaaactacatggggggctcttttaaattgaccaagactctccaatttatggccgattaataatggtatcagatggaacactaattgaatttgcttgattaataagttaaacgcttcgactttgataaatatgggc

SEQ ID NO: 245194 - DNA, 265 bp, Gossypium hirsutum
gataaaaggaactcattgctggaagccatgaaggtgtgcttggaaggtggcttacacgggagggtttcaaatataagaggggtatgtcaagatcccatatcagggcctaatatcaaatactgcaacctctctgtactaacatataataaactcaccaatgtgcctcttgctgtgcacatgctatacttactgtgaatactttgggtgatagctgctttcgttctagagatctaactaaccgtgcctcatataataaatccagcca

SEQ ID NO: 245195 - DNA, 112 bp, Gossypium hirsutum
aacgttaacatcattgatattgatcctaaaggtggtatgataatcacatcgaacggccaaggggagctggaccaggtggccggaaggtttgcagttgccttctgagtgactt

SEQ ID NO: 245196 - DNA, 402 bp, Gossypium hirsutum
  unsure (1)..(402): unsure at all n locations
cccacgcgtccgaattccactaaatcctctatattttaatttttactttcgagggcatgttgagaactccataatttcttgtaaaaatttttggtatcggtttgtataaaattactagggatcagtgtagattcttgtaatagtttataggcacccctcactaagaagttccctgatggctcccctcttcacacttgaaaatcgtcatagatcgatttcgccaacgggatttgtaggattttcctagcaatattcgcgtcaaaggtattgacaatcaacttattattccaagttcaaaaaaaaaaatnaaaacaagaagacgtttttacaacatgtattttagaaaaaaaaatgctcgtggttgctataacaaacaatattttctttttaaggggggggggg

SEQ ID NO: 245197 - DNA, 292 bp, Gossypium hirsutum
aaataaggggtttttttatgtatgatgtcgtcaatcttatattccctttataatattctccaaaaaaaaaaacattttttttccttaatctctgacaaataaaatatcgacctgtttttaatggaactaaatatcataagcacccacccatttttattttataatataagtcacgcacattcaatttatttctgggaattttattcatacaaccgctaacaattacgattttaccaaatttattaccattgctaaaaattgaagttttgcctgctatttttattattaaaaa

SEQ ID NO: 245198 - DNA, 277 bp, Gossypium hirsutum
atcttgtggaaaccattgcaaaagatataaaaatgttcaacaagctttcatctaaaggggggggatttttctaagggtatcactcatgtctcttgtacgatgataacatatgtccagcagatattcgctatgatcggtgcgtgcaatcttatttctaaacagaacctgattatcattaagacgcttgaagcaaacaaacgtaatgacttcatcaaaacttataagggcgacttataaaacacaacaaaactttatgaacctttagagcctggaatat

SEQ ID NO: 245199 - DNA, 415 bp, Gossypium hirsutum
  unsure (1)..(415): unsure at all n locations
cccacgcgtccgcccacgcgtccgcccacgcgtccgcccacgcgtccgcccacgcgtccgcggacgcgtgggctaaaacaaacatcttcgatggttgctgccactgaaaaaagattgatactgttaagtgtttagtgaaatgagataatactgtactaattttggtagaattttaaatgggagaaaaaaaacttcgcccatcattcgctttttttatttgggggcgaatatatacattttgaagtatcttttgttgtcattagaacaacacttcgattcacgccnnanaaaaaaaaaaaaaaaaaaaaaaaaaaaaaaaaaaaaaaaaaaaaaaaaaaaaaaaaggggcgcccgttcgcgcccacgcgtncgagcaaagtccacaggagtgctgggttaggagatgacatcagtc

SEQ ID NO: 245200 - DNA, 248 bp, Gossypium hirsutum
cacacgcgtccgcagactcatgcccagtctttatcgctgtttcttaaacactaaagatgggttcaattgaggctaatatccggtcctatatgtgatccaagaacgacaacgtaccagctgacctgctaccttgaactaacaatgggcctgtaacgacttgattagacagcattaaaaagctgatggaacacagctgttgtatagcaacagttgattcatacacctactcgctaacagacaattcataa

SEQ ID NO: 245201 - DNA, 264 bp, Gossypium hirsutum
gaaggtaacagattgcatgataccatggagttgaagaacgcaatggataatatgttgcatagcatttgaagcgctaccttgagccatgcaatgacatggtattttacctactcagtctgagcactatattattctactcctttgatattatcagcctatctttagatgtcactatgtgggcatgacaaagcctgcgaaaactcattactgcggttcgctttgtataacgcctccataacaatccaacggtttattttatcacct

SEQ ID NO: 245202 - DNA, 355 bp, Gossypium hirsutum
cagcttttgtgtcttctttcaatgacgcaagttggcatgttgaagccatttttgttggccttggtaatggctatcttaaccgttgcctcggcgcaggttagtgaggcgccgtcgccatcgccagacgctggagctggattctccgccggcgtttccaccgccaccgtcggcttatctttgattgtttctcttattgctttcttcaaacattaaattcacgggctttgactcaatgtgtggttttctttttttctctttgtatatgataccattcatttgattattgtaaggaagtcgattctttgaatcgaatgcttccactgtggtttattaataaaattaaaatttttttaat

SEQ ID NO: 245203 - DNA, 178 bp, Gossypium hirsutum
attccaagaccctactgttttgccagaatccatacactgtattcggtatgaggaacatatgggaagaagcatgtggtgagagcgacacatgatacatatgatagaccaactgaagtgtatacatatcaatacatgccaactgcccactcgatcgatgtgtccactacagtgattctat

SEQ ID NO: 245204 - DNA, 442 bp, Gossypium hirsutum
gcgtggacgcgtgggaaagggcgcaaggaggctggcgcctaccatcaattgattgatgaaagaatggttaaaacgctgcatgggagagagaagaaggtatatctgcctgcacagtcggtgacgtcaattccatgatgaggatgctgcatatgcgtgcagatgccattgttactagcagccccactttactccaacggactatgcaagacaaacgaacacagtgctcttggagaaggtttttctttaacacgatgacgatgcttgatttttatcgaattcaagacctgattagtgatatgatattgttgaacagtcgcatgttttcagtgcacctgtctttatttgttgatttgcgttttttatcttttgaaatttcgatcttataatttatctattcaagaatatacttaacctcgaaagaaacagggagcacttagttggg

SEQ ID NO: 245205 - DNA, 373 bp, Gossypium hirsutum
ctttatctgggcctaaatatttgtaaattgtcattggtatgtagattttttttatttggagcgtttttttttattttttatttatttttgatttttaatttctattttttaatgggcccaggtgaatgggcctctttcagaataaaaaaaaaaaaaaaaaaaaatttttaaaaaaaattttaaaaaaataaaaaaaaaatatgggctgcggctttctctgaataaaacttacgttcgcgtgcgtgcgaagtcataatttttattttttgttacctaaaataaatttactgtccttggaatgacaacgacatgtgctgggaaaaaaaaaacgttaactatctacattaaacttgtggcataaacaccttttttt

SEQ ID NO: 245206 - DNA, 301 bp, Gossypium hirsutum
tgcaatcttaccatcatttcatggcatagtttttgcttcttgagaatgtagacacgatggcggccattcggaaagatgcgcgttacgtaccagtgagcatgtgatgaaagaccagccgatccctcgagcactggaggagcatttgcggattgatgatagcgaagacgaccctattaagaaacaccaagctccatacattaggacacattgagctcaaggacgagaagatgattgataatgaggagttcaagccatggacaaacatttcatcttacggcgatgactctaatgtacaacgaca

SEQ ID NO: 245207 - DNA, 293 bp, Gossypium hirsutum
acggcttttaaggtcctcaatatgagtctgaaacaatagatcaagtgctgacgatgcctaaaaaaatctttcccaatcattgggaacttaaattattaatcttgtcctggaaaacactggggagcataattttaattttttaataacctaaggggttttcttgggtttcttacttaattggaaaccttccaattttggtagggacggtgttttggttggctaattaataatcccttctagaagggtggggccttccttatggttgggtgagggggtgagaatatattatatcg

SEQ ID NO: 245208 - DNA, 397 bp, Gossypium hirsutum
cacgcgtccgcgcaagcgttcctttatttctttgcatttttttgacttgttttgtctgtagacaccattggggcaattcggaaagatgctggtgagtactggggagctgtaacgaaagatcagcctatgcgccgaggcacatacagcagcattgctcggattgatgctgccgttgccgacaactaggagaaaacctagtgccatacatcatgtaacattgatcttaaggaagagaatattattgtttatgaagaattccaaccaaggccaaacatttcaacttacggtgatgactctaatctaaaaagagatggatcatcatctttagcagacgattttgaacacgacacctaacatttcggcttacgggggcaatgatgctggtcttaaatgacag

SEQ ID NO: 245209 - DNA, 282 bp, Gossypium hirsutum
tggagtcattcttggaaagcgttattaatttagggcttttttagcattcctttacgtgtatgattgtactacgcagctgatttttgttgtgtttgcattttccttctttaagctatgaagcagaatagataagctttatttgctcggttttgaggttcttgtggggaacttgttttcattttttaccttgaccgctttgtcaaaaacagtcagctttatgcatatcgatattgaagtctgtatgcatgaaaattgaattggattgatacatgtctctggttt

SEQ ID NO: 245210 - DNA, 354 bp, Gossypium hirsutum
  unsure (1)..(354): unsure at all n locations
cggacgcgtgggcggactcgtgggaaaaatatggactggatttcatttctccatcttttgcactggtaaaagggaaggttaaaattgtattctgaaaattcggatttttctacatatgtatgtatgtatgtatgtaatgtatgtattagtttaccatctcagcttatctcaatcatgttgccaatcactgtttgtattaacttgggagtttgtacaaaagtggaacggatacaggtattattttctcacaggaaaatgttgtaaaacaaattcttgaaatgatatttgtnagaatataatatatatgtattatccatcttgtggttnanaaataaaacaaaatgggatttaaaa

SEQ ID NO: 245211 - DNA, 315 bp, Gossypium hirsutum
cccacgcgtccgggaacttctgtcatggtgttggttgaagtttttggggtttctacaatgcggactttgcacaagtgatgattgcttttagagtcgattttcacttgtttccttacaatcttaattttcattaccccattgtttttagtcattgttggagaaaatgttgtgccttctgttggtaaacattacgcaggcattgtctgaatctaatcaaattgaactcccaacttagcagagttaaaaaaaaaaaaaaaaaaaaaaaataaactaaacaaaaaaaaacattcaaaaataaaaaaaacataaaaattg

SEQ ID NO: 245212 - DNA, 386 bp, Gossypium hirsutum
gtcatattggcaggcaaatccaaagatactttccaggtagagagagctaaatcacggaacatggaatctgaacctcaaatggatgccacagccgatgcttcttgattcaggatctgagttctaagtacagagagggtgccagtgcctgcaaatgagggtctcacgactcaagtatgcacgacttaagtatgataatgctgcgactatatttcagctcatgcggttggtcatttacagaatcttagatacggcgagtcatagatctgacataatatgtcgtacctaggcatatattcgtcggacctcatactctaaggtgtctatgtataaaaaaaattataccgactgtatgctttgtgtaaagatcgcattaggaatatactacg

SEQ ID NO: 245213 - DNA, 297 bp, Gossypium hirsutum
ggcattcttaccatcagatcagccaatagtttttgcgtctagagaatcgacaaacacaaggggccatacaacgcgattcgtttacaatgcagcgtgcctcttaactctgccagcgcctctgcagtaaaaatgcgctgcccctgccgcctgatgcaaggctagcaccgcccatgaggcgaccttaacacaatcatgggcgacttattgctgtccacgtacggctaataattgatggtatcgaattaaagccgagtagaaggatggccctactacggctaaaattgactgaccatcgcc

SEQ ID NO: 245214 - DNA, 212 bp, Gossypium hirsutum
cttactcttatatctaattttatgcgatgataatagaaaaaaagagaatcggaatctaccagcaatcaccacctttgaatatcttgcgtttgccttctatagattctgatactgtattatagatactacatgtgtcctatctttaggagcaaaatgaaaactagaagaaaaaccacccctcttacaattaaaaaaaaaacatgggctgtcat

SEQ ID NO: 245215 - DNA, 420 bp, Gossypium hirsutum
ctggctatggctgtatctctgtctgaagctaaagctatgacaagtaaccctggagttccatggcaatagttttatgtccaagctatcagcgatcgtctttctcgaacagataatgctgaccatggctgttagcttgtggagtctcgagctgtgatgaagtgcaccaagtagctccaatgcaaccggtttaaaggtcaaggtagtgatgatccctttctcttcctcacacgattatcattccatacatagatattaaaattggaaactgattattctaccaaatccaaggttgcttgttttaaccaattcataaatgtttttggggtcccttttgctacattcagtttcatttgttagcatgttcatatcccacaaacaaaaccacttatgatggctttcattagtaccatagcatgcacg

SEQ ID NO: 245216 - DNA, 212 bp, Gossypium hirsutum
gccaggcgtacgaggccagagatcctagccttgatacatgtgcactaagacgacaccgagagcgatactgctagatacgagacctggtgctacggcgttcccgttgttggtgagctaacatgcgctgtgacatactctgatcattagaactacccgagtccatcacgcggccatatacagctacaatgtgtgcatctacatcagagctgctg

SEQ ID NO: 245217 - DNA, 316 bp, Gossypium hirsutum
cgcgtcggcggacgcgtccgaaaaaaaacacagaaagattcctctgaagttgattcctggttctctgagggccgccattgagccgatgcgctatggtcatcggacctccacactgagatccacgctccgccaccgactccatcacacattatggtcggaacttgaagagtttaacttttgaagggacttgcgaaaaatcctgctctggcactggcttgatgatggtgctccgttggcgtctgtctcggcgtgacttgggaccggtaataatggactcgacggtttagctggaacaacatgagctaaagggtcatga

SEQ ID NO: 245218 - DNA, 324 bp, Gossypium hirsutum
gacccacgcgtcgacccatgcgttctgacacgcatccgcccactctttccgagggtggaaacgatgcagctatgcgggaaatcgctgacggtcaagacaattactttcgcggtcaaaaggacgagagtagtcacatcaaaagagcgtatactctatactttgacagaatacaagctgtccaataaccaatgatttgtggcgcaaaacatctagaatgatgccatacatcgcctgacttcttttttagaatgaatcaacacttcatctctttatgatgttgataggcgtaattattgaaccgattgggatggcttttgcttgtaa

SEQ ID NO: 245219 - DNA, 286 bp, Gossypium hirsutum
cccacgcgtgcgagcaaagaccttgcgtttgtgagcaacgttagctctgaacgaacagtggagaacaaggagcgatggttgttcaatttcatggggaaaaaaggactggagaagcctcatgacgaggtgatcgtctccgattttgaacaggttaatactggaacatacatgcgcaaaggaaaagtgcgacgagaacaagaagcttcgtctcatggaaaagcttcaccgataagatagcattagttgcagctctttaagcgactatgaagaaggtgaacgataagag

SEQ ID NO: 245220 - DNA, 366 bp, Gossypium hirsutum
  unsure (1)..(366): unsure at all n locations
gccacgcgntcgaaacatgaagtcacatttactgggatgcgacagtgagaaccacgaggcagcataggagcttttcttttacgcacgatcatagtccaagactctgctgaagacatgacatggacgtccacatattgctgaagcaagcacacaaggctcttttggtgcagtgcagtagcgaactctctggctcaactcgaaacatactatgcctggggtgaaagtgaagaatccacacagggcacgtttgttaagggctatacctatcaatgcgtaagacactgaaatatctggtttttgtgcatctatggctttttgagcgaggattattacttgctgtcagataagctttttacatattattgt

SEQ ID NO: 245221 - DNA, 391 bp, Gossypium hirsutum
gactcattcgttctgctacaacttccactcatattgaagctatctactgctcaattcatattctccacggcatctgctgttcctaaagacgactcagatgaggaaagaacctatcctgcttattatgaaaattcctcacatcatcaacgtcgataaatagacttattctaatagtaatgctagagatgctatcttactctcatatactgataacgcattgctattaccacacagtattagacatcatcaccacgttttcccctcgaaatttacgttcaagaaaacaagatctaaatagatttatgaggtagatgattctttgcaggatacaccaggctcacctgtccacagtcccaaggttagtgatgagtctaaaccaaatgatatgaat

SEQ ID NO: 245222 - DNA, 395 bp, Gossypium hirsutum
ctcttctcttctgcttaatttgactgatatggaagattactctatcaattcatctatacacaaatctgctatttctaaggacgactcagttgaagaaagtggctggactgcttattttgaagatttctcaaatcatcagcagcaaaaagatagttattcttatagttttgattgtgattcttccttgatctcagatgctgctactgcatggaaatcaccccacaatattgaccatcatcaccatgttttccccaagaaattaaggttcaagaaaacaagaactaaagagatttatgaggaggatgattctttggaggatacagcaagctcacctgtcaacagtcccaaggttagtgatgagttgaaaccaaatgatatgaatcctagaaagagag

SEQ ID NO: 245223 - DNA, 428 bp, Gossypium hirsutum
gcgagcagagctgttgcaaagatgtctttttgaaaaaaaggtctggacggttacacattaggggtttgtgcattctaaatggacaccttgtgagaatgggagttcaagttcatgagcaagtacgtgaaggttggaaccatcaagaagacaacagtttcagtaaccgaaggggatgccagtggtgaagcctcaggagctgcagaaactgatactaagccaactgaagatggtgcatcacaaactacagttactgggtcagaggaaaaatcttctcctgcagatactaaggaggagtaacatgttcgagctttagctgtgtctgattcgaacaggtgatcactctttgtactggacatgccggaagagacagcattggtgtgttcgaatgaatgtgaatcgacttctatatataaactcagagtagtgca

SEQ ID NO: 245224 - DNA, 350 bp, Gossypium hirsutum
cgtccgggaggaaaactcttgcatttatgtctttcttttaaaaagatttgacaggtgacatttcagggtgtgtttcggtcgaattgtactcattgcacgaatgggagttcaagtttcatgaacaagaacgtgaatgttggaaccatcaagaagacaacagttgcacttaccgaatggaatgccagtggagaaacctcaggagccgcatatactgattctaattcaactgaagaatggccatcacaaactacagttactgggtcaagaaaaaaatcttctcttgcatatactaaggaagaataacatgttcgaactttagctgtgtttgtttttaacaagttatcactctt

SEQ ID NO: 245225 - DNA, 424 bp, Gossypium hirsutum
  unsure (1)..(424): unsure at all n locations
ggctgccgacggagcaaggaaccagttgtttctcaacgaaatatagagatgggaagctcaagcaaagatcttctacggtttgaacaccataaatcctcttcttcacccttagaatccgctctacttgtttgtaagaaaaaggactcggaatctcaaactcatgaacctgatccttccaagaaaccccccttcactccttttcctaaaagccaagttttggggaaagtgaaagatttcttgggagtcatggcagaagctaataaaaggctggagcttgatgcaaagaataattctcaagcatatgatattgaagtactcaatgggaatgattctgaagtcattgaaatggatttgatgttaggtgtagctgatcttcacacancctaagctctggctgctgctgaatctgcaattgctggcaatc

SEQ ID NO: 245226 - DNA, 427 bp, Gossypium hirsutum
  unsure (1)..(427): unsure at all n locations
gccgctcattcagtanccggagattattgccgatgcaatgtatatggagatacctgttctcaatcttcaataactggatcaacgcgcggaatcctcctcgtacaacacggtttcttgtagaatgttttctactagtagaccctatactcgatttgcgttagaggagacaggttatgtttacgattcgtactcatctatgcaacccgagtttaggtttcatgagaacctggaacaggttagtgattcgttgtcggaattttctttagctagtgactatggcttgtttgtaaaatatgggaacaacccgaaaaatagtcttgatagaactgctaattatgaaccctactagttcatggaaattcctactgataatngttttactccatttttgggtttcaatgcttntgttgatcacatcaaaaggatg

SEQ ID NO: 245227 - DNA, 247 bp, Gossypium hirsutum
actaaatatttaaaccataatctctaaacttcattcaacgacacttcaatgagtggaatttgttaactttttctacgaccgagacccctacaaaatctatccattctcattcatctagatcgattatgaacactattgaatctacaaacaatccacttaaaacgatttctgtggtgttgaatttttatagagatatgaacatattgttgaaattttttcaaagtcgaaaaaagctttttaatgcatt

SEQ ID NO: 245228 - DNA, 391 bp, Gossypium hirsutum
gttcaattgaattagtttagtttaagctttgcctactctaaatctaggtgttggagttggcttgagggatgaaactaggaaggcattgacagtgaaacttctggaaccaaagaggacaaaattggtttgagagataaaaccataattaaaggtgaacttgggaaggtaaaaaaacaaagagaaaggaaagagatttggttaatggtaaaactgagatagaagggaggcagggctgcagaatatgcagaagggaaaagaaaaggttgtgttggatggaggagaaggaaaaaaaatactgaaaagtaatgcataaaatgatgcttttgtgggggataaggataaaatggaaagaaattataatgaaaatatgttttaaggattgggatgatgt

SEQ ID NO: 245229 - DNA, 407 bp, Gossypium hirsutum
cccacgcgtccgcccacgcgtccggccccggtttaaagcgcccgaaggccgtgttctcttggcccgagctcgagagaagagcccattttcttcccctttgggaatcgatttcaacgacggagcaggggctccgacgacactactctgaggttcaggtaagtcctcttttctcttcccttttttattttttattttaaaaactaatttaagaacaaaaaataaaaataaaaaaacgagagaatgaaattcaaccttttttttttgcttaatcgtgtgtctttttttacaatatttcgcctttttggcttcttatagccgaaaacaaaaaatttaaatctattggttgctattggtttggctttggtttctctacctttttggcggtttcccttttctggcattgttgc

SEQ ID NO: 245230 - DNA, 406 bp, Gossypium hirsutum
cccacgcgtccgtccagcgtatccttcatctgcattccctcctccaccttcggcttatcctccaccacattcggcttaccctccaccaccttccgcataccctccgccaccttcatcgtatcccccatctacgtatccacaacaatcaccctattatccgccaggtcctttcccgggtcattatcccccaccaccgtactaaaacctccaaggaggagacaattcctcatcggccaagggtttcacgtgtcaaccgaaagcaaaaatgagaagtatttaaaatattgtgtggaaacagaaaacttagaactctgtaatagccattgtatagttttgaccttttaataatgatataccattcaagttggggatttctttttaggtcatttctacttctgttttggtc

SEQ ID NO: 245231 - DNA, 417 bp, Gossypium hirsutum
ggaccacccacgcgtccggcgcgcccttttttttttttttttttcatatatttatcctttttcaccaacaaaaaaaacaaaccgcattctttttacccttcaccaccttccacataccctccaacacacttatcatatcccccatctacgtatccacaacaatcaccctattatacgccaaatcctttccctgatcattattccccaccaccgtactaaaacctacaattatgaaacaattccttatctttcaattatttcacttcttaatcaaaagcataaatgataagtatttataatattttctttaaacatataacttacaacttttgtataacccattcttttttttgactttttattattattatacatttcacttctcaattaattataaaacattctactctctttttc

SEQ ID NO: 245232 - DNA, 407 bp, Gossypium hirsutum
cccacgcgtccgcccacgcgttcggaattaaagtttacataaggaaataagttactatcaaaacatgcaggaaaaaagtttcatctggcaatatagtaatttgtagacccaaaataatattcgacctcttcaatagctttccctttttttggtaaattggcctatttaccacctttttccaggatgatcttctcctgtgtatataatgtatacaccaataggtcgggtaaagaactgaagcagcttggcaatgtgacccaaaatcttttagcctttggggaaagcaaaatgtgagcaatagatgcaggtttttctatcttgcaactgtaaaaagtatttggattttttttcaatatttttcataattaatttttatttaataatatgataaaaggctttatggttta

SEQ ID NO: 245233 - DNA, 301 bp, Gossypium hirsutum
cgggcgggagcttacttatttctaacttctttgtcatttataggcgcgctttatatacttgtgattgtggtgtttggtgtcagacccttaacacatattatattgcattcttcgcaaaggctatgctctactttagctccgagattctaccctgccacccagaagagccgctcatgtacacctttgtttgtggttcacatgatgatgccaagagctgacgggttcacaagaccaagctaagagccatccatgtcgcaaatatttcctttatatgttaaaagcatgggttcgaaccccacct

SEQ ID NO: 245234 - DNA, 206 bp, Gossypium hirsutum
ggaacgcaatcttaacataggagaacccatcattgatttctaaaacttcctgttgttgtaatgtaaatatatagagaaagtttccaaagagattgatcctaagccaaccggtcaccagatttttatgtttggtgatgattcgagttgtttcactgtggggagaaaagcccatatttaagcaatgaatagcatttgagttgttcaac

SEQ ID NO: 245235 - DNA, 220 bp, Gossypium hirsutum
agcacgatccattgggttgattgggcacactttccatccgtataaaccgaagcacccgcggatattctcggccaagggaaaaaaggtctctacacttaatgagacaacacttccagccgccggtgccatctcctctagcattgttgttacacagagtcctcgtgtgtgtctgcatatttatatgggatgtcggggtgaggctcatattatattttgtgac

SEQ ID NO: 245236 - DNA, 254 bp, Gossypium hirsutum
agtgattgtgtggttgtataggtagtttcctttttttccccggaatttctgccgttgtcccattttccgtgttttgcatttcatatttgtaatctgcaattagtgtgatttgtctttcaagtttgttaatattcttgtattgagatctgtttggttgtgttattcattaatagttgcttatagatctggaatgattgtttttgttttttcttcggatgttggatgctgtttttaagggtgaggttttgtttggt

SEQ ID NO: 245237 - DNA, 259 bp, Gossypium hirsutum
atggtatgaacgtggatgaggctggagactggagcacgtacatgacgcaccaggcatagcttgcctatcggataaactatcatgcaattggcatatgggccggagagagagattagagcacgttcaagctcgcgagacggggggggggggcattaaagatgaacaacccgtacgtgtaatgaggggtctctaggtgccaatcaggctcgttaaatttgagctcatgtgcatcggtgtttttattacaagacgcagattg

SEQ ID NO: 245238 - DNA, 396 bp, Gossypium hirsutum
  unsure (1)..(396): unsure at all n locations
cgggatgacccgtttgcttgaggctgctaaatccgatatgttagtaggattgaagcaaagagaancttttgtttgcaagttgaggttagaggaaacatcggatgaattgactgatttcagaatctggtttgacatcctctgtaaaaattcaaatgatgtttctcttagggaccccaaaggaaccaaaaagggaatgttgggagatgaggatattggttcaaagtctgttaatttgaagacattggaaggcaatttaagaaggctaaagctcaaatacgaaaatcttgcttcaaaaaagagttgtcaaattgctgcacttatggcagagaataagttcgcatggaaccagctcaacattatggaaactcagtttacagataagtaaacagcaagaat

SEQ ID NO: 245239 - DNA, 419 bp, Gossypium hirsutum
gttccagcttaaggccaatgaagcaaaacttgaggctgagaggcttcaaaggattgcacgggggaaatttgatgaattgggagaacagtatgctatcaaatacctgtaactacagctgagtgaggcaaaagctgagaagcaatatttgcttgaaaaactaaagctgcaggagttctaacagacattgcagaggagtagtggaggtgacccttaacttatgtattccaaaatacgtgatcacgctccatgggtacaatatgattgccgctgaaacagagtctcagccaaatgagcgccatcgctttagagcaaatccgtgactgtatgatgtgcgagttataatatgtcgctctgatgctaaaatagtgggttaagggttgctgttgcattttaatgtatgaaaccttcaatgaattgtc

SEQ ID NO: 245240 - DNA, 307 bp, Gossypium hirsutum
  unsure (1)..(307): unsure at all n locations
ccgggntcgacccgcacgccgtccgtgattggtctnncatgacctnnagctactcgagaaagttagttgaagcgacttattgagaagggaaataagagggaagaggtaggagtgacgcaattggctcagccttagggaaaaatcaatgcgcttgattcttttgagcctttttacacaatgtgtaccgccaaagcggttgggtgttgagtcatattggagcacgataggagaagaagtaagagctatactcttcataaatatgggactcttggtggaaaccgcttcattcttnttctttaagntttac

SEQ ID NO: 245241 - DNA, 206 bp, Gossypium hirsutum
  unsure (1)..(206): unsure at all n locations
tttatttaggcattgaggagggtgctgtttagggttaatgtttttacgcagtatatatcggcacacttcatttgccttttgcataattagagtactgttagaaatatttgaacagcggcaaaaaagattctattgaaaaaaaaatgaatgattccggccgcttcatattagtgttaatggatatgatagttttgcttttnnaaaaa

SEQ ID NO: 245242 - DNA, 387 bp, Gossypium hirsutum
gaaaaaagagagataagcttagacgaaatcgaccaaggatttttattagttttatggttcttgcagacatcgaattaagctctttttaaggattggttggtattttttggtgagacctagagctgtttgatatttctttgaagtcaaggattagttcatgtagaccatgactgaattttagcttggcagtagtggagttaagtatcttaaggatttggggtttatttttgaatggatcccttgtttacaagagaaagagatattgaagtagatcttgaaagtggtgggattaacagtgaggatgaaagaacaaaagatcgtgttccatcgaatttacaaacaaagagaactctcagtggagtttggagcgatctttttgagtttgat

SEQ ID NO: 245243 - DNA, 381 bp, Gossypium hirsutum
gtcaccagactatgagaggaatcctcgtcctaactttttggaagttaaagaaaacagatcagtagtatatggtgatggaattccgtcagctcgatcagatggcaaatttggtggtcctaagttgcagccatcaccgtcagaagcatctgagcggcccaagttgaagttacttcctcgcaccaagccattggataatttagaaccaccttttgttgatgctaagcaggagcagcagcagttgagtgaatctgttcttactcatggtggaattggtaatgattcatatggatatgtgaatattgtgaaacctggttcagctggtagtgagaatgggaaccaggcggtggagcgtcctaagctgaatttaaagcctcgatcaca

SEQ ID NO: 245244 - DNA, 344 bp, Gossypium hirsutum
  unsure (1)..(344): unsure at all n locations
cccacgcgtccgagggctcaataatcaaagtgtattgtgtgagagtgggtggttcancggtgagaggagttgggagatgcttgtttgtaagttgttacccactcctccaatgttttgggttggatgattgtaggcatcgccaccatcatcacacccatttccattgatcccaaatttcccacaatgggtgggggtaggggttgtacaaaattgattccgagaccaggatcatcggaaacttgaacataagtcttttaccgatcgatctgtgattcagtatattgtgtatcttttgaattgtatgaaaggaaataaagttttagattttcattttttttttcaaa

SEQ ID NO: 245245 - DNA, 374 bp, Gossypium hirsutum
atcaaactctatatgatctacaatgtgttggagtgtttcttgctgcaacttataagttcaggacaaactgaaaaatcaacgagcttcagctcttccatgatgagaatttttcagcgtggtcttttgcgtcagagagattaactgagagtggtttccaattcttggtgtgcatcatgaaactcatggcccttttgcctcttttctggttgtctatcacctaaaattacttctcatctgtgtaatttacagttgatggatacaaatgctcagctttggtatattatcagagagtatatctccaattcagaagtatatttgatgagataattattgtgttctgcttggaacttgtttgttagagctattgtgtttac

SEQ ID NO: 245246 - DNA, 284 bp, Gossypium hirsutum
  unsure (1)..(284): unsure at all n locations
aaaaaaaaaaaaaaaaaaaaaaaaaaaaaatttaaaaaaaaattaaaaaaaaaataaatagcggaaattttgaggagggtaaaaccaacctaccctcccatccaaacntaataactcaaattatctttcttcttaactccacttaaatgcacctcccttttacaaccaattacactacctaaaccatcccaaacccttaactaaatnaaagttttttaccattttaaatttctttaccttttcatccctttttaccaaaaccgaaaangatcccctcttcctaa

SEQ ID NO: 245247 - DNA, 433 bp, Gossypium hirsutum
cccacgcgtccggtggttcagccccaattgtctactccacttatttagctttccaccctgaaggattttcccaaattcactaatttgatcaaggtttaaccttataattccactaagatttctatctcaaaagagtaaacaaataagcaaacagtgaaaaatctttacaagattagaatgtttgtaagttaatcacacccaatgaaaaacacttggacttagaaaattcaatgaatgctcacagtgtttacaagaaaagatgaagaatttaagcacaaaaggttggtaaaagaattttttgatctttcttgataacttttgatctctagttattgtagaagctttggaaactggtatttatagttcttaattgattttcctaattgatttctaactgttttggttggtgaaaaattgaatagagtcattggat

SEQ ID NO: 245248 - DNA, 477 bp, Gossypium hirsutum
  unsure (1)..(477): unsure at all n locations
accggnccggaangccgggcccactgacccagagagtgttcccattaatgccttggttgcggtgaaaggcacacctcttcaagagcaaaaggtgcggctctgtcatttggttctttcctccctttgttttagtccacattcaccactacagcttgaagctttgttctttttaataaagaatatctgatatgtatatagttttaggcaccatcaccagtttttacattcttactttcaaaaggcatcatttgcttatggttttggatatgctagcactttgcattaactggacatgaaagtgtatcgaattagggtgtgtgttcgactcatgtatatccaaatttctaaagtgctttttcataaatttggatggttggacctgcatacccttatcaatctgacgtgtggngcaacttaatggataatgaagagctggagcagcataagccagcagtctagttgtaaagatgagtggaa

SEQ ID NO: 245249 - DNA, 323 bp, Gossypium hirsutum
  unsure (1)..(323): unsure at all n locations
gcgtccgcgctttcatccattcaaacccaaagaagacaaacccaagccaccatgtagccaccgcaaacggtggccgacggaaggtggtccattcggattctaactccgttcagacttgcaatcaagaatctaacctctctttgctttgaaaatttttgattaatattctgcaaccctttttttctttgtatttcagatttcttttttgtctaccaaaaataaaacaaaaaaaccccctgttcaaatatgagattgtggcttttaaagccatttacaagattatttactcctattttttggtcgttttctttctcngttttact

SEQ ID NO: 245250 - DNA, 242 bp, Gossypium hirsutum
  unsure (1)..(242): unsure at all n locations
ggtagcgttgggggctgctgcggcgcaaagcagatgcggctagggttagggtttccaaaatgtttcaaaggattgggcctatcgggctctattttgttgggttttggtaattataggattgggcttgtaactgggttttaactttaggctgggtttgtgaaatcgggtagtgcattgggccagtcatattttgggccgttcttgtaattggactgaactttagacacttttattgtatnngt

SEQ ID NO: 245251 - DNA, 292 bp, Gossypium hirsutum
gaaaacccggggcggccgacgcgtccgatttatgggataaacggtgatagctcgacttttccgcctccggcgaccatatgggtcgcgggaagaatactgggggctgggtgatttttttctcttttatttttgtttaattacattttcttagtgttcgtttatttatttatttttgatgttaaggatttttggatctttatttataaattttattaacgctttatttttatttaaaaaaaaaaaaaaaaaaaaaatataaacaaacaaaaattaaaaaaccataaataaaaat

SEQ ID NO: 245252 - DNA, 358 bp, Gossypium hirsutum
tttgcatctttacgcgcaacatgcacaggaagcgctaataataaccggtgaggagaaacctgggtggaagaggggaacatatattactgtgctagataaaggacatgagctatctaatcaactatcagcagaccttgtattcgtaatctaactactctcgatggcggtggccgtgatcgacaccattttttaattaactgtatgagttctatgttcggacagtcttcgtacatacgagctatatgtgtgaaagcgaaccatatatacatggtgggcagatgaaacctcatacaatccatgctgatgtatgtgaactttattcgctcctgccatgaacactaccatgaatttattgtag

SEQ ID NO: 245253 - DNA, 441 bp, Gossypium hirsutum
  unsure (1)..(441): unsure at all n locations
ccggggcggcgacgcgtacgcccacgcgtccggaaccttatgttggaagatgaaacgggtggggtaatgtccggcccggagagggatctcagatcggctggcgttaggtccatcnaaatgtgtantantggtcaccgataacaccggagattttattttattttatttttatttttagcatgtaattttatattccaatttttttctaaaataatgtgagaatgaggtaagcaatgacataggagtagttttgactaaaaactttaaggctcatcattaactttggttagcctagttgtaggggatgtggggaccacctgttcttttgtataataattatatatatacatatcaattccaatggaagatcaactaaccaccttttgtctaaaaaaaaaanaaattataatcttttaatttttattaataattattataatt

SEQ ID NO: 245254 - DNA, 312 bp, Gossypium hirsutum
  unsure (1)..(312): unsure at all n locations
cgactttagtctgtggaatcagacaaattactatataaggtttgggagcctttgtgctcgtcgantatttttggtgtggctggtgatttcagtttaaaacaaaattctctgcttagttgagtgtaagcccgcattgtgggacaaaaatgaccaagtataagcccttattctgttggttaaaaaaaaaaaaaaacacctaaatacaaaaaaaaaacaaaaaaaatcaaaagaaacataaagataaataaaaagaaaatgattccactgaaaagaagagtaaaaagaagcgtaaagccttatagctccaaatgg

SEQ ID NO: 245255 - DNA, 115 bp, Gossypium hirsutum
ggaaaaaccggggcgaccgacgcgtacgctatcttgggtgacattgtgctcttttcctatttaggagaagccatttttcacgataaaggggacaatattaggagtatgggggttg

SEQ ID NO: 245256 - DNA, 323 bp, Gossypium hirsutum
gctactcctacttttactcctactatgatgccaccaactccaggagcaacacctccagggcgtgattcaaatggggatcgggccgctatttatgccactccatatacgataccgcatacgaccccaccttctgtcatgagctatcccttgactgaaaccactgcttatactcctaattatactcagatgcaacctcatgaagtcccagatcaatccgcacaaccggcctgccaatacttgctcaaaaccttggtctgtactgtcaaatgaaagtgcaaatctcatcgtccatatcatcgatctgcaaagcctgtcccatatgc

SEQ ID NO: 245257 - DNA, 196 bp, Gossypium hirsutum
  unsure (1)..(196): unsure at all n locations
tgaaaagctgaaggaactgttttcggagtatggcaaaattatttcgtgcaaggtcatgcgtgacgctantggagttagtggaggctctgggtttgttgcattttctaacactggaaaaacattaagaagccttggttaaaataattattaaatgggtggtaaccaaacaatttattgtggacctggttaaaagcca

SEQ ID NO: 245258 - DNA, 388 bp, Gossypium hirsutum
ttcttccttcaagaagcggtggccaaaaacactcgtactcctaattacccctcctccgatggaggaagatggacgcggtgagacgaggcttatgttgagaacccatcgggtttgcccgagaggaaaatgaagctgccggctcttttgccaaggcatgtgttgaaacagctgaagaatgtgggatcgctgtggtggatctgtggaccaggatgcagcaatatactgactggcgcaaagcttatcttagcgatggtttgcacctcacaaaggaaggcaacaaggttgtatttgaggaagtgatgaaaaagctggaagagagaggtttaagccttgaaaagctaaaagctgatctcccacttattgctgatattgaccatgatgacccact

SEQ ID NO: 245259 - DNA, 372 bp, Gossypium hirsutum
  unsure (1)..(372): unsure at all n locations
cggacgcgtggggcaaatctcattcctcttcgatgggttttggcttaagattcatcttctgggtgcggttctgcaagagtctgttgttgtttcagaatgggtaagggcaacaaagaaaggacctccaatcaatttacgtggacaaaaccgatggaacatctttttcttgaaattctagcagagaaggcccagaaaggaaataagccttttaatactttcaaagcaatttctattaatcgatttgtcaaagctatttctgaaagatttcaagtccaatacaatgcgaagtatgtggaaaattatttgaggactgtaaaaaaccagtgacaaagtggacaatgagaagaatgaagatgatgaannattatactc

SEQ ID NO: 245260 - DNA, 304 bp, Gossypium hirsutum
cccacgcgtccgctatcacttctcttttttccttcttttttgttggctgaaattccttgaggggaccaattgggaatgaggggctgctagttaaattgttctgtttctgcatggccatgtcattatttgtagaacctaatcattaattaattaacatgcaaactgaaagttgtttcatcaaaaaaaaaaaaaaaaaaaaaaaaaaaaaaaaaaaaaaaaaaaaaaaaaaaaaaaaaaaaaaaaaaaaaaaaaaaaaaaaaaaaaaaaaaaaaaaaaaaaaaaaaaaaaagggcgcccgttttaa

SEQ ID NO: 245261 - DNA, 388 bp, Gossypium hirsutum
gcgtccgctttccgtacaccttgagaatctgaaaccgcgattccgcctttttagggttaggttctgatgtgaatttttgaagcgggggcggcggattcctatatttatcagtctccagctgagtctacgatggagaagatcatctagacgattcacggcaaagatgcatcgtcatcttcagattctcatcatgacaaaccgacttcccttcctccgttaacgctaaccatatatcggtatgattggaaaagacagaccatttcatcatgtgctcggtcttggaaaacctgctgatccgttcttgaggagcaacactatcatttcaacctgtgtcctttatgaaacaactgcaacatgagtccttatacagttgattgcataccaccta

SEQ ID NO: 245262 - DNA, 229 bp, Gossypium hirsutum
ccttagtttgctgtccaccgctgtcactttgtttctctgctagtgattcaccacaccagctggggcgattggtgacggagggcgcgtggctccatggtgctatgtttcgcaggatggggtttgaatgtaattatgctaaagcctttcgggtgaatagaaaagttgaaagcatttttcattctttacagtttgtcgaatactactttaattaaaaaaactattttctgac

SEQ ID NO: 245263 - DNA, 396 bp, Gossypium hirsutum
  unsure (1)..(396): unsure at all n locations
ttcatgctgctattctttcanatccgaattatataaatccaagaaggaacctccaaagcgcgcatattttatacaagctggcggcctctcttatnaataaannaangctaaattaatctataattttaaaactcttaattcatctgctggagttgacaatgattcctattacgttgatgattacgttgctaaactacataaatttaacactcaacattacatatttcccaattatcttacccacttacctttcttttttcgtgctaaaattttcattcaaaaccacaattgttctttctttattatctaaaatgctccttccaattcaaaaactaaccttaaccttctgttgtttgtacgattcatcccaaatttaaatttcttttattttttaaa

SEQ ID NO: 245264 - DNA, 436 bp, Gossypium hirsutum
  unsure (1)..(436): unsure at all n locations
ggaaaacccggggcggccgacgcgtacgggacccaatancttttgttaatagtcttagttattagagcacattaattacggaactcgcgcgttttatttaagggacgggaggtactggctttttcaagaaagttaagtagattatgtgacctcttattctcttctttaaggagttccaagttcagtttggtttgaatgtttagcattggtgaaaaagaacctcttgttgcctctgttctcccttgtctcaacctgcacgaggaggcttcccatggagatgataagtgggatttgaattttgtaattccttatttaattaactatgttcgagagggttgaagaattatgtcagatatcaaccattttcacggtggtattcaacaatgaagacagtatatttggactaacgtttcaataatgaacgttgatagttttc

SEQ ID NO: 245265 - DNA, 227 bp, Gossypium hirsutum
  unsure (1)..(227): unsure at all n locations
cggaannncccggggcgagccgcacgcgataccgctttttnngtcccttgtttaatttgatacctccttttctcatgagctgcncnngctgatgtcnagtggcggcggtgctttcttctggaggggctgcgcgatgggctcaccgactaaccgggccccttgaaagaagctcttcaagtgccgtttggtgaaaatcgtccaaatcgaaagatcaattaatgatcgtg

SEQ ID NO: 245266 - DNA, 324 bp, Gossypium hirsutum
ggttcggtggcttgttattgacgccccagattttttatcggacttgacaccctcgagttctcagcttctttttgcggagctccgcgagtatcatatgttgttcaataacttgtaattatacaaagattacaaagtctgtagagttggaatgactgtgtgtttattatggcatcatccatacttttttgtgctctttggttgtctcagtactaattgctaaatcgatatgttttccgatcttgtcctgtatgaaatattgtctataatataatagaatcacactaaaaaactaagcaaaaaaagaaaattattgtaaaaaattta

SEQ ID NO: 245267 - DNA, 356 bp, Gossypium hirsutum
cccacgcgtccgagcactctgacaataggcctaaaagagcttatgcaattaatcagagcgcgcacacttttgagaggccagtgaaaatctacaattagggagcattttagattaccttccttgataagacatagcacaaaaatcaggctctgggcctgggttatatagagtgggaagaacacttctagcaaatgacaatgtgaggcaactagttagcgtgcgatttgttggatatgtaattcttttggtagtggtgattggaaagtatcttttgtcctaatcaaagtgtgccatctagaaatgtcagattatgatctgctgatgcttttgttacttgcgtgtctttaatggaggtc

SEQ ID NO: 245268 - DNA, 415 bp, Gossypium hirsutum
cctacgcgtccgaaatttttgcctagaaatgtttgtacttactaaggttaagccgtctaagggactgccgtgcttaaatgtgcactcggatcaggatctgggtttatgcatggaactgacccgatatcggaccgcaaaaaaatggatgatcccaggaagagcgggtaatgatttttagactgcaggagctggcttaagcgcatagatatgatatatgctgcgattggatcatggcagcgtggtggaacgcggcattgatacataagccaggagtgcagtctgttgcttggagaaggctgaaaaagtgtggtggaaaaaattattgcgcggggatggcaaagccccccattacgtcaaagtggactgggacaaatgggtggatgaagatgaagacaagggtcttggtgatcttgac

SEQ ID NO: 245269 - DNA, 441 bp, Gossypium hirsutum
  unsure (1)..(441): unsure at all n locations
gtccgccaagccgtccgtcaatctttccggaaaacttaactgttttgcctaatcacgaacctaacgggggaccggtaaatttatttgaccaatttcaccaccaaaccaatatagaacatgctttgttggggtcagaggaacaaagtgatgaggttgttgaacatgttgaaaacccaaagtggatctctttcagagcagtactgatgctcctagtatgcaccttgattgcagctgcatatgctgatccactcgtacatgctgtcgataacttttcaaccgcaacaagtattccatcgttcttcatctcatttatntgcattgccatggctacgaactctagtgaagccgtatcagccattatcttcgctacccgccaaaagcagagaactgcatcattaacattttccgagctttacggagcaataaccatgaataacgttc

SEQ ID NO: 245270 - DNA, 442 bp, Gossypium hirsutum
  unsure (1)..(442): unsure at all n locations
ccaaaacttcagggtgctagaataatagtttctgagtggacagatcttgactttgaggctagaaaattcactgccaaaatattaggtgatgaactggaaaaccctgatccactaccatcaccattatcatcatcacctgagacttcttctaatgaccaatcaacggacgatctagaatcaaaggcagagttgtgaaacttttggattaggaaaaaactagtttttgatactcaattttgccaaaaaaccatgataacatttcctgagctgaaactaaagctttttaccatagggaagagaacttccaagctttgctaactttgggcattttaatggcaattattatatatgtagactgatacttttaagatctangaagggaaagaagaaaaaaaaaataatgatattttgatagaatagttcatacatggaatttggtnnt

SEQ ID NO: 245271 - DNA, 354 bp, Gossypium hirsutum
gcggctctgtgcaagtagacacttattttaagttgttcaggtaatttccaacatttgaagacatgttttatggcgcatgacaaggcataaaccacaaactgaatgttgaacctattcttgaaatgccaagagcactttggaatcaattggatgtacatttttatgaaactggtacattttgtagtctccagctatatgttagctagagtcgggggtggctgtaggatataaacatgcatcaatgcatgttcatttttcctttaaaaaagggtttttatatttgatgtcctcactcatgtcaaataagtatactaaataataataaagaacccggataacatgggtctccttttt

SEQ ID NO: 245272 - DNA, 355 bp, Gossypium hirsutum
  unsure (1)..(355): unsure at all n locations
cccacgcgttctcnatgataaattttgttgttataactactaaatttaatgctagggaagtgtttgtgttttaaaaaaaaaaaaaaaaaaaaaaaaaaaaaaaaaaaaaaaaaaaaaaaaataaaaaataataaaaaaaaaaaaaaaaaaaaaataaataatattaaaaaaaaaaaaaaaaaatactataaaaaaaaatattgggcggactacaaaaaatataaaagaatatatgattattttatcactactattaattttttaaagaggcaaaaaaatttaaataatattcctatgttttaaacttttataactaggaaaacaacgataatacccaaatttaaatcttttaaaa

SEQ ID NO: 245273 - DNA, 191 bp, Gossypium hirsutum
  unsure (1)..(191): unsure at all n locations
cccacgcnttttannactcttggtcttacgtatacagcaaanatntaacgcaccgcggtccgcaatatttattttcgcctatcatcaaatcttgtatttatagatattcaaggctcgtattatgatagaactctgatttatgtttatggaaaatcttgattttcttaatctaaaccaactactattttcaa

SEQ ID NO: 245274 - DNA, 314 bp, Gossypium hirsutum
  unsure (1)..(314): unsure at all n locations
ctagtttctatatcgcgagcggttgtccttttttttttcnaanntaanagacaccgccaacgcgaaattttaaaccgctaattcctcctacaaaaaataccctaatacttaaaacaacacacccccccaaaaacaacacactacttattaaaaaacaaatctaatccatccacattacatctcaatataaaaactccaatctatcaatatcaccattaatattcccatcctgacttatccacttatatccaccccaatcctttgcttttataaaacaaaagtatctcacacaccaaaaaattaactaccaattc

SEQ ID NO: 245275 - DNA, 426 bp, Gossypium hirsutum
aacaaccgggccgacccacgcgttcgttactcatttgtttcaatagtatgtcgatttcttacgaccaaaatcacctttcgcgttctgtccctgtcttcttattctctcttacatacttttgggggcaaacgaaaaaaaaagggtattatctcttcttcttgattgattgatttttcattgataatctcatcaacaagaacaagaatctgctaaaaagaataataacaagaaacagatgacagaagagaagataggataattttctttttacttttattttttgagaggcaaaaaaaccccaacaatattcccatggatttgacttcaacaacgacgacgactactataaccgtcgtgtcctgagctgttaaccacaaagagataactgacgaccctttcttgcttgacgcttctttaaaatccttg

SEQ ID NO: 245276 - DNA, 411 bp, Gossypium hirsutum
atccggacttcgatggaaaaatggctatcatagggtaagaaaatgcagttgctactgaatgtgggtggaccagacagggtttcccgtgttcaaatggctgaagctgtggcacaaattagaggatatgattcctcattaattaaaccagtgtctgcatcatctgttgaccgtggtgttaagtccccagctgatatatctatggatatcaccaagctggttcagaagctaaatatttgtcctactccatttaaagatggtgttaaactgacacttgcagctgaagcaagtttgtgagtttagtaagatcgatagtttccccttttcttgaactactcggcatctaaaagtagtataaaaatgtgtcatgctggtatttgttggtgataattaaaggaacaccagtatagctgt

SEQ ID NO: 245277 - DNA, 481 bp, Gossypium hirsutum
ttgaactgtcctttttgcccaactgatatttttgaattccttcaaaatcttcaggtcaatggagaacgagtggatgtgattgaatcattgaaacaaaagagtgaggagaatcaggaacctgctgaagagttgagtgaagaacagataaatggatcggttgaaaatgcatacttggattctggtgatggtgaaactggtaagaaaaatgagaatgccgatccagaaggtgactctcagaatcctccacttgattgcgaaacagaaagaagtagcaagaggaggaaagtggatactgctcaagtgacaaatgatgaaaatgactctccatcaagcatcctccaggtgcaatcatctgaaggtgatatcgaatgacatgttttctttaacaggaatttttatcacaaaagtaaaggttctttttcccaatttctcttttaagttgtttataggtgtgggttaatttcacagttttatttttttt

SEQ ID NO: 245278 - DNA, 165 bp, Gossypium hirsutum
tgattttattacagacaccgacctcgaggaggggcgtgctgatcaatctctcgcagatatccaacaacgatttcatcagcatgcatttgctggatctgcatacctacaagcactctataccgctgatgataaaaaaatcccttcctgaaaccatccacatcctaa

SEQ ID NO: 245279 - DNA, 280 bp, Gossypium hirsutum
  unsure (1)..(280): unsure at all n locations
ccgaaaagctcccttaacaatgaggaccgagttcagtcttgcaagcgtgtacttctaaaatggtgagtgaggaaggccaagctttttatacagtanaatgtattctcagtaaaactagcaacaatgtgaaatccagtagggaatttaactccatagagaaatgatgtatgtatgtgatgggaatgaattcaacaaatgattgatgcataatagatatgttttcagttnanaaaaaaaaaaaaaattaaaaaataaaaaaaaaaaaaacataaaaaaaata

SEQ ID NO: 245280 - DNA, 151 bp, Gossypium hirsutum
gtccgtttggcaaacaaatcgaaccgacaaaggccttaatctcattggatcgtggcaccaaggggggaaatagtgcctgctctgtaaaggtgcttttgactttccttttcttctagttttgttttaatgtaatgttgatcattggaactcc

SEQ ID NO: 245281 - DNA, 479 bp, Gossypium hirsutum
  unsure (1)..(479): unsure at all n locations
aaaaccgggccgangacgcgtgcgaagggttgtctgctttatccattgttggattttgattgggaagtggacttgcgtagcttggtgctaagttttactggggtttgtatttggttgaagattacagaggaaaaaatggctgccgaagaaggcaaagttagtcaatatatgcctgattattgaaaccttaatctgggtttaacttgttattcaacatcattcaactcaaatgcttccaaaaaaaaaaaaactcgaaaaattccagccttccaggtatgtcttatttagggaagttttcttttttttttcttcctatttttgtttcctttttggagagctttctgtgttccttttttagaatttttttgggtttttttttcattaggatattctctataatttttactttcaacaatcattccacaatgtataaagcaattcaaacattgatccgtatagtgcagttatttatttaatgt

SEQ ID NO: 245282 - DNA, 241 bp, Gossypium hirsutum
tagtcgacccacgctttcgactcaactcatgtgagcactacacattgcggaaggctcatattccgagctgccgcatactcttcaacgattcatgcgactaacaaatcgtatatctataataccaacgacttgctactgaaaattgatgctggtatatgtaactacaactatatattgcctcactgcaaccataatcttctcaagaagacatgtgcctactaccctcataaaaatctagata

SEQ ID NO: 245283 - DNA, 301 bp, Gossypium hirsutum
cccacgcgtccggctgatgtgaagattagagatttcgatcccgacggtgatggcgacaacgaggggggctgttaatgctgtggaaaaacattacctgtgttccgaatttccatatgtagataactttacaaaaaagaaactaagatgagaacctattgaaaactggaatttggatgatgaacaagtactggactaatattattttggtgtaatgaatgcatcacaatccggatttcttgagcttaaaaaaaaaaaaaaaaaaggaccacaaaaggaaccatgccttaaccccaaaaaaata

SEQ ID NO: 245284 - DNA, 240 bp, Gossypium hirsutum
tcagctgatttatatcattttataaatctttatatcgaactgtacgcaaaagatttgatatttatgtagaatagttatttagtttattcatgtttaatttttctgcttcggatgagatttttttttgcttggaatcatttaatattgggataaatctcaaaactatacatgaagaatgatttaatgtacaattgtatttatgaactttgattttatacaattttatacatgatttttttt

SEQ ID NO: 245285 - DNA, 235 bp, Gossypium hirsutum
ttcatgcgttcgtctacctttctgtctagctattttgatgataaaaaaccggccaaacgcaaagtgggttttgttgtagagtaacgtgggctcactaaacaggaactttttagttatataccaaagtgataaaaatcttgtatgttgacaattgatctgctattataatttggcgcaatctaacacctatgatttagagacattggacagactgttacccatatcaaaataaaat

SEQ ID NO: 245286 - DNA, 233 bp, Gossypium hirsutum
gcgcccacgcgtccggcatgttaccgtgccatggtttgaggttacattgactatggattggtggaaggggggatcaacttttttgagcagattcaggatactgccgaaccagataagtatatcatgagtgcagccgtgcatatttacaagtttgcgggaaaggaacctgaagctagcagtgttcaggattccatgaataattttgggatccccatttttggaataacctcaaa

SEQ ID NO: 245287 - DNA, 493 bp, Gossypium hirsutum
cgaggcgtgcgcccacgcttcctcccactcgttcgcccacttttttcttccacgcgtccagccgccatatctaaaagaaacttctttcgccacgcttggccctgtaaagatcccaatccccaactcgaatcgccactccatttgcttcagtaacttagggtccctgctgcggaagccgaaactgaactggctatcgcatgagccggagcagcatatgcacatggcgtgggtccggagtatggccggtggttgcttcaagagtaaggagacgctgcctgaactccggatcaaagtctaagaagacagtggcgaccaagatcttttcgatccccacgccatggcctccaaagattctgctgatcatcttgtgatcatgcccaatggcctgattggaaagtacctttcattttataggaatttcatatgagattaaaaattttaggcgaataaataatcaattaaactaatactttgttaaaaaaaaagtaaactc

SEQ ID NO: 245288 - DNA, 371 bp, Gossypium hirsutum
tggaagaatgggagtagtccttattagcaagggaccaaataaggagaagaaatttatcataacattgcagataacgagacatcactgacctttgttcccacatagctttggtttgcggtgaccattcctatatttatttgttagctttgctttctctttcttctttttcccttaagtctgcttgagtctttttctttttttatatgtacttaatgtaatattagaagccaaggcagggccatgcttttctattgtaaaattcatcacttcgctattttatatttgtatgtagacacatttcccgtttcaacatatttccttatttttatgcaagtcgattggtattcatcatcgctaaaacaacaaaattt

SEQ ID NO: 245289 - DNA, 306 bp, Gossypium hirsutum
caaatttttaaaatattaaaaaaaattcttatcaaaccaaccaaccatcattaaacaaaagaaaatacttttaaacaaaaattctccctctttaaataaactcctttctacccctctgtttcaaaattttatatccctttaaaaaaactccgattttacttttactaaaatacaagaaaaaaaaaaaaaacgggtcttttttcatcaaaaaaaagtaaatcaaaatttcataaaatcaaaccacccttttacctaaaaaccattacatcctttgattctacattaaaaccctcaacacctaattac

SEQ ID NO: 245290 - DNA, 233 bp, Gossypium hirsutum
gtcatatccaacaatctgcattgagcatcgagttttttagctacacaaaaactgcaattgctctcggcacaggggtcgttcttacaattctcactttctctgcatatcttactcacgcaacaatctctcctcatatactctctaatatcctatatcatccttacttacgactatcctttcataaatgatagctgcaccctttctcaaacccacctattcaaccctataagctc

SEQ ID NO: 245291 - DNA, 259 bp, Gossypium hirsutum
gcgaccacgagtccactctccaccaccaccatacttctactaatcacccccaccttcaatggaggggagaaggacctacctaccattacagctcccctcctccaccataaccatttcctcctccccaatactactacaaatttcccccaccacaagcccattttccctcaccaccattctattacaaatttccaccttctatatgtccctcacacaccttctatataataataccactcacctcccacacgtgagaaat

SEQ ID NO: 245292 - DNA, 424 bp, Gossypium hirsutum
ggattattctttggaccactgattgtaaggtgtttactaagctcattccgaccgaaaaccagatgagttgggaggatatagtgagcatccttcatccctaccagagctctgacaacttgcccgtatcatgtgggggtgcattttccgcagaagctcatatccatgcaaatggagatggatctctaaacctgacagcacaaatcatgtggagcggttgcgagtaaatcatatattgctccatgccttatctctatcggtttatgctgtgtgacccatggaggctgtctacttctttatatttataatactattaaataaatgtgacagccacttctacctttcctattcaacattgtgtgccttgtttctccattttcttttcttttctgtaataatatatatacacacggttgtgtgaattaat

SEQ ID NO: 245293 - DNA, 121 bp, Gossypium hirsutum
ccacgcgtccggttgtagatcacgagcaacctttctagacgaaccttgctttcttactcgtgcatccaacatcatcgggtcttgatagcttcacatactaccaattcactctccatctatg

SEQ ID NO: 245294 - DNA, 248 bp, Gossypium hirsutum
ccgaacccgcaccttcgaaactataaatttggctttcgcttcaataaaatgcaaaaacagattcaagaaggtgacaactttttacccattccacttttactcaataaaacattgacgtcaatgattgttgtagttttacgtgcatgctcgatggctaattcatagtcatgtttaaaaacgagtgtttcaatgcacttctctgttgtaatgtatattcatatttattactaaataattttttttaattc

SEQ ID NO: 245295 - DNA, 336 bp, Gossypium hirsutum
atagaactcttcttttcttttggggggaggggttttagaacttaaaatccaaatacgagtgagtgagtgagttttgatgcttggattatatcagttatgcaacactttcaattttactcaaaactcataacgtgcttttttggaggcactatcattcactaatctctggacttgaaattgattcattgaaggtagaaccataggatagaattcatatgcctccgacaactactccatagttttgtttaaaacataggtttcgactgtgttggatactcaattacaacaatatttgtgatcaagttatgttataaataaaatgtttcttgctctggc

SEQ ID NO: 245296 - DNA, 255 bp, Gossypium hirsutum
ttcaaagccaatgagtcatttggttcacttgttcctgttttgttaactagtttatgtctagaagataactttcattcgcaatgaatgactggttaaaaatataaaatcaatgatataaatgctatgaaaggacagttcaaacagagaaaaaaaaaaaaaaaaaaaaaaaaaaaaaataataaaaaaaaatataaaaaataaaaaaaattataaataaaacaaaaaagttttataataaaaacctctttaataaaa

SEQ ID NO: 245297 - DNA, 333 bp, Gossypium hirsutum
aatttgtctgtcacctcatcaatacataaaattgtggaaggaaccacactatatagtaattcatatagttggtttcaaaaatgattttggttgtatgtaatgtttcaccacaagctctgaaggatttgatgaaataagatgtttagcattttttttatgctctgcaagtttaaattctagccttgtcttcaaagggtagcccgctgatgaacatattgccttttgctggtatgttattgttagtacctaaagcttacactttcctatttgtacatggatatcatgtaatgtatttttttttcttcaaagcttctaggtacatagccatatttc

SEQ ID NO: 245298 - DNA, 203 bp, Gossypium hirsutum
cccacgcgtccgtcgaaggataccctaaaccagttacaacttactcttcagtgttctccgcctcccaatccacccccggtgcaaggattaaatcttacataactgcaaacccaaacctacacccttttattcaccaaataaccattctttgccacattaatcttaaaatatactttcacacgataagccacaacatctttacc

SEQ ID NO: 245299 - DNA, 390 bp, Gossypium hirsutum
cccacgcgtccgcccacgcgtccgccagctgaaccagcattctcatggatgattactttggagacggttaccttgcccattccatctctaacaaccactcccgatcctaatctgaaaagttcactattaaagccgacatcaaaattaattttgatatcctctccagaagagggaacccatacttctctagtcacctctttgtccataaggcccaaagggagacacagaacactcgttgctgggagtttgagcagacactaaaagcccaagtaattgataagtgggtgaccatttttggttggaggttttggaagagttaagtcaccctctatcaagcaaggtacatgcctagttgggtgagaaaaatggcttctagaatggtctattttc

SEQ ID NO: 245300 - DNA, 341 bp, Gossypium hirsutum
  unsure (1)..(341): unsure at all n locations
cgcgtccgtctatatcgcgtnccgccctttttttttttttttttttttttttnttttttttttttttttttaagaagtttttttttttttttttttaaaaaaaaaaaacaaccttttattttattgaacccaaatttaaaatacatccccttattttttgcaacatttaagtcaaaatttaacaccaacattttcttacaaacatttaacaaccagcatgtctaaaaactttttcaaacccgcaatttattggaattaaaaccttttttttttttttttttgaaatacccatttacaaactttgtttcatgtcctttttgcttttaaaaatcttaaatcac

SEQ ID NO: 245301 - DNA, 345 bp, Gossypium hirsutum
  unsure (1)..(345): unsure at all n locations
ccacgcgtgcgcccacccgtcctctcttacactttttattagnaannacaacatcccattgccaaagaaaacggtttnaaaaagggggctgtcaaatctttcttttctttttttaatatganaaggaagacattnatcttctgcgagttctgctgctacattctattaccggtaaactggtcacattcncaaaagaaaaggaagggctcaaactcgagctggaaaaaagctcagctgaaaggccatcgaagttaaaaggtgtgattgatccctcaatacgaggcacttttgcagatgaatcaatgaacaccacagttgaatccgctataaaaagcccgtcaaaaa

SEQ ID NO: 245302 - DNA, 368 bp, Gossypium hirsutum
  unsure (1)..(368): unsure at all n locations
gcgtccgactgtggttcttcaagggcttccccgaagtgctgtctttagaggatgttgagcgtttccttgggaggtgtgagtatgactcggccgcaanccaaacggttacattttcttgtcctgtattcaccaaccttgtcagattaacaactgngcaattcccctctcatatccaagcaatgaacgcatgcattagcaaaaacagaaaaatctgtctcaataatcaaatctctgtccgagttctttattaaaaacttcagtctgttagggtattgcctaaagatggaccaccacatcagtaggctgcctggtccatattgaactatgtgtatattttgcctgtttgagggtttgtgcacgcattggac

SEQ ID NO: 245303 - DNA, 262 bp, Gossypium hirsutum
cccacgcgtgcggcgaagcacaacaagagttaaagcaaactttaatgtaacatgtttatatgcctacttgaaaaagaatgatgtttaatcattcttaaaaaaaaacacaaaaaaaaaaaaaaaaaaaataaaaaaaaaaaaaaacaaataaaactgaaactaaaaatacaagaaaaaaaaaaaaacggggtcacaatttcaaaaaaaaaagttatctaaaaaattcttaaaaaatcacgccaccctttacgtggaaaaataa

SEQ ID NO: 245304 - DNA, 367 bp, Gossypium hirsutum
  unsure (1)..(367): unsure at all n locations
gaagaagaagaagaagaagaagaagaaagaatgaaagaatgaaagaaaaaaggttgtttgaaagaaactaatcaggtaaattatgagaaattatgagatatttaccgtgtttttttgtttcagaaatttgaaataatttattgtattttttgaaacaaattaaatgaatttttttttaattgcagatttgcaacaaatgagttctttgattaataataatcacatatcaagtactattaanaaaaaaaaaaaaaaaaaaaaaaaaaaaaaaaaaaaaaaaaaaaaaaaaaaagggaagggccgtccgatataaaggatcctagcttcccggcgcgggcatgcaaaaacatagatgggggggggcgtt

SEQ ID NO: 245305 - DNA, 482 bp, Gossypium hirsutum
cttcttccaggtaaaggacctgccaaggggaaaacatcccgttcaactcaaatccaatctcccttctagccctcacaaattcgagtcggaggttattgaggttgacctagagaagaatgctcaagttcatgtcggtcccctgaaatatagtgtggaggagtatcatcacaaacaggaattaactccggcaccggtattccctcttattgttggagtttcagtgatcattctctttctcagcattccaagactaaaggacatttaccaagctgccacgggaatacccaacaccgggttttatgacaactgcaaaaaaagaaccacggaagccagttgtgagaaagaagactttttgaagaacccttttcccacaaagggggtgcgactttggggctcagaagacttgtaaaaaagttaatattttcgtacattccccccggccccagaagctttggtagatgataaaactaatttggatgaca

SEQ ID NO: 245306 - DNA, 260 bp, Gossypium hirsutum
cccacgcgtccgatgagttcttacatgtatggtgatctctataaagaatagttgtatggaattgagtgtttgaatttggaaaattttcattactgtccacggcttatgtatggtactgcagattttagtttatcaagggacagattaggcatattttgtgacaaattgcctgctgtaacactgcctctgcagatccttccccatttatttgtaggatactatcaagttaacaaatgcatctcgatcgatgcagttcaatg

SEQ ID NO: 245307 - DNA, 367 bp, Gossypium hirsutum
aaggtgaccaaagcaaagtcaaggtcatcttcaggaagtccaaacgggggaaaaggactggtctcttatgatgatggttcacctgattcaggaaggtgaaatcgagtggaaagttggttgaagatttttgcttagtgtttgatgacccccatcttctgttgatgcactgaactgtgcagttttacgaacttcttgtctctgatttgtgttgttgccagaggtttgtggttagtaattacattaatccgattccaagtatttttctttgagatggttgtttgttgttggttggccctgtcatgcctcggtttaggataaatttttactttcggttataaaattaaaaattaaatgaaatttagtatgc

SEQ ID NO: 245308 - DNA, 178 bp, Gossypium hirsutum
attcaaatggaggacccaccaccttaccctaattttgcacccttaaccacaaaatgttgttaaggttttcaatccatgataattggttaacaactaataaggtatgcactgggtttttattgataactgggtgggtgattggctttaaactgtgattttatatatatacgaagtttag

SEQ ID NO: 245309 - DNA, 400 bp, Gossypium hirsutum
  unsure (1)..(400): unsure at all n locations
agaaaaccctttcctctttctctatctgaaaatcactgccccataaacaccaaatggttagtggttataatggcctctctctcttttttctcatcttcttcctgagttaaggttttttgaagcaacatttgtgaaaatggaaaatggggtagtaatggtaataataagattgcggaagaaagagttgccaatgaggaagtgaaggtgaggcttgctggngattccggtgaaacagaagaaccagtagatgaggtttttgaggaggcaagttcatcactggagaatttgcaagaacaggcagaaatatctggagtggatggccgccagttcagttgaagatgcaattggaaatgttgagacatttggcgatactggttcagaggtagttaaggagaacttg

SEQ ID NO: 245310 - DNA, 303 bp, Gossypium hirsutum
acaagacctaattattggtgggggcaggatgcatttaacatggccctcacccttaatttcaagggggattccgcctttaaccacctttttaaaatggcccgtccttatttgggttccaaggtaatggaagggaaaagcggtgaaaaaatgctcaggttcaaaattgtaaatgggaatctggaggtccccgaagattgtctacgtgaagctgattattttagcggcaagcctcttagcaccggtttgctccgctagtaattttctacctaaagccataacctatgccacttatcactatcagct

SEQ ID NO: 245311 - DNA, 433 bp, Gossypium hirsutum
cccacgcgtccgcccacgcgtccgttaatattcaaaaaaaaaaaagggtttaacatgttttgttcaggtctattccttctgaggagagtcctgaaacagctccgttgacgattttttacaacggaacggtttccgtaatccaatgtacctcgagacaaggcggaagcatcttcaaacttgccgttgaaggaagctcaaaaaacattgaatcagtagactcatcaaaagctgcaaatccttcaagtgatcaacaaaacctcctcgaagctcgtaatggagatttgccaattgctagaagaaagtcgctgcaaagatttctggaaaagcgcaaagagaggttgacttccccttatgcttggtagtcgctatacaccaccacctaaaccaaaaaaacgcgttttgaagaaaggaaaaaaggaggagggccccattt

SEQ ID NO: 245312 - DNA, 327 bp, Gossypium hirsutum
  unsure (1)..(327): unsure at all n locations
ttaaaacaaggtgaagtccctaaaactctaaaaaaacctttaataagtcgacatagagataattaaaggtaggtttcaattatgaacgttctctaatagaacaatttactagggataagaagtcgcttcgtaagtgatttatttagccttgttgctgatttggcttattagaataatttaaggctgcaaaggatttgtgctgggtggattaaggcgtcaataactaagcaattattttccttgataattttcagcattctcaattcaagctaaaagctatatgctactnntagatatnnttagcatcgtaaaacataaatttcccnc

SEQ ID NO: 245313 - DNA, 401 bp, Gossypium hirsutum
  unsure (1)..(401): unsure at all n locations
aagaatggcaagggcaagaccggttccaccattaagtttttgggacaaaggaagaacctggggatcatagttaacaaaaatggaaggaaaaaaaaccaagtccccaaactgtacagaaaagaaaagcaaaatctgcaaacagtttcctgtttattctttcttactgtttattctttctttctccaactcatagcaaagaataaaaaaatggaaaaggagtgtcttttgtaagctttcttaatttaaatgaagtccgcaaggcanaaaaaaaaattcatatttatatgaattatttgaaaattttatacatctgtattgatttggttggaaaaaaaaaaaanactacacaatcaaatttataccattttcttcttttttaaaaaaaattttccaaaaatttt

SEQ ID NO: 245314 - DNA, 109 bp, Gossypium hirsutum
cgggcaccacgcgtccgtctatttgtccaagttaaaataatcgtcaatttgtttaacttaataatgtaacaatgggcactgataattcaagcacttctatttagctctt

SEQ ID NO: 245315 - DNA, 393 bp, Gossypium hirsutum
  unsure (1)..(393): unsure at all n locations
aaaaaaaaaaaaaaaaattaaaataaaaatttttattttaaaaaaaaaaataaaaaaatttggggaatgaaaaattaaaaaaattaaatttggaaaaagggaaaggaaataaaattgaatttgttttnnttgggggcccgccttttttaaaaacccaactttactccccgtccttgcaaccttttaacttttttatttttgcccctaatttcaatttccccccccgccttttacaacctctggccttgaaaaccccttcctttccccaatttaattgctttgcaacccattccccttttcccaacttgccttaaaacaaaaaagccccccccgatttccttttccaacaattcccccccctcaattgcatattggaccccccctttacccccc

SEQ ID NO: 245316 - DNA, 235 bp, Gossypium hirsutum
agaaaaataatgaatatggtgccaggatatcaatttctcagcagacactactacaatgcgtaataaaaaacatgactgccatctaatttttcattcccgtagtcaataaagaacctatgtaacacgaagaatgtcaatgagaccataaatcgtgttaaacgtaacttgtgaatgcacccttcaaagatataaaaataaaaaagcatttctagtgcacactcccatgagttcaaag

SEQ ID NO: 245317 - DNA, 259 bp, Gossypium hirsutum
  unsure (1)..(259): unsure at all n locations
cgtnnncgcccacgccgtntcgnnccacgcggtncggggggaatggaaggtcttaccaccattattgtttcaaaacccgagaaatgtgattgtgaatcgaccactgaggagcatctgaattagctatgatggatgattttgtgtcttctggtgtttggttttgtatgtaacccgaatttgagcatgaacttaaaagtttgtgttggcacttgttatcagtttctcatttgttatattatcatcttttattcaaatttca

SEQ ID NO: 245318 - DNA, 209 bp, Gossypium hirsutum
  unsure (1)..(209): unsure at all n locations
ccgacccacgcgtncggcgttgccttgacataagtgagcttataagtttctaagattngctctggtgctggctgaagattgtgattatgttgtttgcatcattaccacttactatacatgaaccccataactcttgctgtcggtagcatgttgttctttatacgtgatattcgtgataggttataaatatttataatgaatcgctcttg

SEQ ID NO: 245319 - DNA, 487 bp, Gossypium hirsutum
gacccacgcatacgagaaaatctgtacttttccgtcattaggttttagttggggtcgttttatgatttcaccattgttgttgtattttcaattgatttagcgttttttcctttaatcttcaaaaaaaaaaaaaaaaaaaaaaaaaaaaaaaaaaaaaaaaaaaaaaaaaaaaagaaagggcggccaattaaaaaaaaactaaactaactaacccatacatgcaaaaaaataactataaataattgagaaaaaaaaatggggtgccctgtttaaagaaataaaatttactggactgggaaaaccctgtcatactttattttaatggcctaaaaatacaatccccttgcccgggttttaaaaataagagaaaaggaaaaacacccgggcgtccaaaaaaaaaatatgctcaaaaaaaaaaatccattttggaccctctctttaaaaaaaaaaaaaaccccccccttttttctatttaaaaaaatgggcg

SEQ ID NO: 245320 - DNA, 353 bp, Gossypium hirsutum
gtccgaaaccaccaccttcacctatcccggtcagcatggtcgtgcaactccttgaacgagtccattatgccttgaattaataataacaacatgctatttgagacagcgttgatgaaggagagatcaatgacagtaacaaatatggcttgtcttcatagttctgattcgagatatcaagggaacatcaaaagtggcagtgtgagggctgggtacaagaagctgacaaccaccggctgcaatcttgcacattttggttttatagtttattacagaaaccggaggttgggtaaaaacagctgcaggcacaaggaataaagagctgtagtaaatgggtaaagttggtgctatgtttt

SEQ ID NO: 245321 - DNA, 264 bp, Gossypium hirsutum
caggcgttcgacaaaatttcttcttttccgggattgtatatttaaaattaacctaatggaatctgccttagatttattttgaatgcctgtactttatataaaggcaaattttatccactaacctatcttactgcctatgaattatgtattatgcttgcgatctcaagtactgtattcggatacaattataatagtatttatatttgggagttaagatgataatgatgaagaatcaggaagcaatttatggagtggagttaaagt

SEQ ID NO: 245322 - DNA, 280 bp, Gossypium hirsutum
agggccgacccacgcgtacgaggacgcgtccgtccactcgtactttgactttttcgcccacggcgtacgcagagggtggcgggtattgacttgagctatcaaaaaggtgcaaagatcgttggcctgtttcttatgtctcgtgatggtgataagctaccagcggggcgtgcaatcgactgaggcaaggcgtggtcagtcactcagggataagcttcagggaggatgcgtgagtagccacaactggcccatggtgctcaatgacaaaggtacctcccgcggc

SEQ ID NO: 245323 - DNA, 336 bp, Gossypium hirsutum
  unsure (1)..(336): unsure at all n locations
cggacgcgtgggcaagctcaagttcatcgacacctcatcaaaatttgggcatggacgtttgcagactacacaagaaaacaggaattctatggtcggctcaaggcataaatcttgcaaattgtcaggaatttccgtctatcgtatggttaggttttggtattctctgagnctttagtttatgttgattctctattatgttttgaaatgcattggttggattaattttgttttatcaactctntttgaatgtgtggataactggggttttgcaccagttagaaaaccaattatacccaatgttttactttttaacagagttttccttttgatttgatt

SEQ ID NO: 245324 - DNA, 368 bp, Gossypium hirsutum
tcgcccacgcgtccgcttgctggattcctcatctccctaacccaagtttccagcaccactcagcgtgtgctccctttatcactcaatttcatcatctgcgcattgtttggggtcacttttcgctatgcaattaggagggacttggacaattttcagctcaagaccggcacatatgcagctttcggttttgtgaaaggccttgctacattgggaggagggacttcctctggaactgcatcctgtaagctatttgtctcatgctgttgatggtgcagtttatgtatcccacaatcatcttcgcttttttatttgctgctgatgccttggatttttgcattaagatgaggattttaagttctttttctatg

SEQ ID NO: 245325 - DNA, 284 bp, Gossypium hirsutum
ccgatccggtcgccacgctcgacactggagatgctgaaggcaacccgtaggatccgaccgtatctacgagggctccgatgagcctttggtctatcaaaggtaacgtcaggagtcatcattcgtctcgactgcgttaacgactccttggcagcgccatcgtcacacgaaagttagggcatgcttacacaaatggcttggcctggattaggagatatatccactcgaggttttctcttctaccaatttagagaatataaaaatttgggagcttgggaatgcacaag

SEQ ID NO: 245326 - DNA, 140 bp, Gossypium hirsutum
ttttgtcatcttcatgaagatgcttctaatcacccctactaccagtgtatgcactgttccagagacagtgcaagagtgaatcgcttaatactcatggctgatgcatatttgttagatggatcctatttgtggttataatg

SEQ ID NO: 245327 - DNA, 486 bp, Gossypium hirsutum
taatctcttaaacctgttgatctttgcaaaaaaaaaaaaaaacaaaaacaaatggcaggtgcaaggggggaaatgatcaacggtgggaattattcgccgagaattgctggacgtccgatcccaaggaggggtcaagtgaaaattgctatcttaatggggattgcccattcttttgcttctattttctctgcaagtagtcgcaggcaatctgcatctcacttgtcctaggttgtttaatttctcccaaaaagtaagagaactgggagggtaaacgttttccgtcctagggaagatgtgagttgttttttttgccatgttcatatcaagtttggtcagagcttgtattatttgtttttcagattaatgaatttccagttcctttttttcttacagtttcagtgatttttttgttgaatttcatcctctaagaccttgaacttgaaaaaagggatttttaagtttaaaaaggtaaaataatttcattct

SEQ ID NO: 245328 - DNA, 205 bp, Gossypium hirsutum
tccacgcgtccgaaccctaccttaccaatcaggattcaacatgaagggaggttaatccaggggggatactaacggctcgaggctcgccgtgaacaagatatctatcgcctaatctggaaagatatcggcgaaggcgtttaacgatccaaacaagccaaagaggcctgttagtgccttattttttttcatggaggagttccgtgag

SEQ ID NO: 245329 - DNA, 374 bp, Gossypium hirsutum
gggaaaacaagccatgcccatgattctctcaactcctcgtcaggctgaaccatcgcgtcttgggggaggccagggcaggaagggggtgcactcaaaggaagaaaactgcaactttctgctcgaggcacagatgaaaagacaacggggccagtctgcagagtggacgggtattgcataggaaggaaaacttgagccggaggcgtctgagggttggtttaggaacatcaggctggggtccaaccttggcttctgccgggaagaccaagagaaagaacccgtaggatgaaaaacgctggctagaacagaataaacggagacagaaagagaacaaacgctcccgaagacgtcgccaaatttcaataaaacaaggcttt

SEQ ID NO: 245330 - DNA, 245 bp, Gossypium hirsutum
  unsure (1)..(245): unsure at all n locations
ngcagagtactgactcgtcaggagatgcaatgatggatcacccggcagttgataacgatgggggcgacaaaaataagatcatcggttgcatgtacctcatggcagcagtcctagttctatcaagcagtggtgtattgcatgcggcaactttgggtgattttccggctccgatgtccttatgtgcaataacattcgttatgtggactgggtataacttcatatagtgcagttgctcaaaaatcatt

SEQ ID NO: 245331 - DNA, 283 bp, Gossypium hirsutum
cccacgcgtccggtgttttctgcgagttagcctttaatcaattttgactagtcttacctagttcttgatttacaaacgtaagtttttgtggatctattttgggacattcccaaatgattatgggcatttttcatgcatgacataacatgattaagaacagaatgagataggtgttttcctttaatccattactaaatatctatctaaaataaaaatgtcataaattaaaacgagactgctataaatcaatagcattgctaaaaaaaaataaaagctctcatac

SEQ ID NO: 245332 - DNA, 402 bp, Gossypium hirsutum
cgcatttctttcaatctgtatctgtcttttatcatcatctgagattgtccagacagcacaacaaaggagacgacattgtttactattacccatggtgaagactaattaagccattcccacagatcttgaatattagtattaatgacccatgataggcttagatttttccatgtttttgttattgtaggacattgtttgaaaacatggttgctatcttctttcgcatttcaacactgaagacaagagctatccgaagccattcttcttattttgagattttttagagtagtaataaagttccaggaaatatgccaaatagtgatggcaattttttatgggaaaatgtaaattccatagctgtctgtaggaattttttggtgcagtctgtattaaataatcact

SEQ ID NO: 245333 - DNA, 354 bp, Gossypium hirsutum
  unsure (1)..(354): unsure at all n locations
gtcagatcatcctacaaggcaggagaattctacatcaaatctatgatagaatctgatcgttctgctgctgcttcatagttccttttctcttcattccctatgttattctttttctttggctatcattaacttgccttctgatactacacagtttggctaataaattggtttggaggctgacagccaatgattcggtactccaattgttgcagtatattggcaccaatttctaattgagatttgtattgtacttgttgatgttgtaattgtacgtaagctacacttttggtgctttatgaaatattatgatcaaggtttaggtcttaattggtaaatanaaganncnnaattaac

SEQ ID NO: 245334 - DNA, 159 bp, Gossypium hirsutum
ggacgaccacgcgtacggtacgtcacgcgttcgttctgacgtttggatttgcgatccaagcgcaggattctccgggtgagagtccttcagacgcttacaccacatttgctcactccaattttcacctagaatcagaggctgcgagtttttcaagtgcat

SEQ ID NO: 245335 - DNA, 407 bp, Gossypium hirsutum
cccacgcgtccgcccacgcgtccgagggtggaccgcgtgtcatgcgtcctgttgatcctatgacaggtcgtgttttaaatgaagagaaaccagttgctggcaaccaagaaaaaagtggcaatgatgaggctgttgatgagtcaaactctgcatgaaaattttatattatccccaggagtcctcactctgcggtataagttggggaaaatgaaaaggtggatcatattggatgattgtaagtttttgtctgaaaaataacatttgccatttgcagaaactgccagcttatttccagtggcctggtcctgggtacaagatgagtttaattaaatgtgatctaatgacaaactattttggattttgaattcactttacaatactaaaccaaacatgttgatattattgct

SEQ ID NO: 245336 - DNA, 287 bp, Gossypium hirsutum
agcacatccaagttggtaactacaaaattctcttgaaaactaacggagcatactgaactagagcggtaatacgagaagcagcaccttgcaggtataaacaacatcaaacatgttgaatcgtatgataaaatacatagagtttgatgcaatcatcatagcaagctttgtatttactttttgtttttgcaaaatgatcttggttgttttttataacaatcgtatgtaaatatgatggcgctacaattgttatatttcgatattgaaattaaacctgagtgttaagtgtc

SEQ ID NO: 245337 - DNA, 404 bp, Gossypium hirsutum
tactacaaatgctacaacattgtggaaaaccatttcaagaccaactgaaatccccatggcgaatgcaacagtttggaaagcgattcccaagtccaccgaaatcccttcaactcatcccaatagatcggagaagctacggaaatgtacttccctaagggttgccactacgtttactcgagtttgtctatgtgcaccaatctcttcctacaacgaggtatttcgtgccgatgttccccctagaagaagcaacacttaccctaggtcaaaggcctttcccctggcgcaagaaagggtaataacaagcgcgagacttagcacggaaggaagaagagttttccgtggtaaatcattgacggacgatgtattgatgaggaagattgttgtggaagaagaagcaatgatgc

SEQ ID NO: 245338 - DNA, 469 bp, Gossypium hirsutum
cccacgcgtacgcataggctgcgccagataagtttggtatgaccagccagcaagccggacgatattttaactgccgcggagaaatacattgaagagaatggcacagatgcatttgagaagctcattcatagggctgacaagtccaggagtagtacttatggccacatatatgatgatgatggctacaggcattgatatccttacagcaacccggctatattttgttgctcttgagaagaactcttgaacgctagtttaaagcgtgtaaattatcttaattggcttgctagtgcaagtttctaaacacttttgtcaaactcagcacgactctttataagaaatacaaagattccaatcatataagaaaaggcaaaaagattatcatgagttgaaacagcacgattgccttatcaattattaaatgtaagacaatcagctcatgacttcaaattatgtcagttcgcaatca

SEQ ID NO: 245339 - DNA, 292 bp, Gossypium hirsutum
  unsure (1)..(292): unsure at all n locations
ggttaccnnncttccgaagggagctggtcaccagcgttataaaaatagctcacattgagaatacgccaactcaggtgaagggcgaatactcggcaaaggtgcgttgactatctttatacaagcttagcagatgcctatggtgacatcggattgaagcatcgggatgagctgaaccccatcaggtgcctcaaaatcttctgatttgcctaatggtccctcgaaataagcttacttcgcgttaagtttagctgctattggctcgtatcgctgatcatccatttttgttcaagct

SEQ ID NO: 245340 - DNA, 171 bp, Gossypium hirsutum
tcgctcttgcgcgtgccagctaccttatatctgttatgttatgtctgctagcactaatatattggctggcgttttacactctctcacttgtacaagcagggacgtcccccaagctaataacgcttgacctgatacactttagtctgttaactacacaggtatcacaagcca

SEQ ID NO: 245341 - DNA, 462 bp, Gossypium hirsutum
ccttaagcccccatatcccattttcggttctttgtaatcgactgaagaccaggccacctcccaccgttctcagccgaacagcagcccctttcaactacgattttgacagaacaggtgggggcgacggcggacgcgagatgcaggtaaggtttccctcgccttttcctttttttttattttttatacattcttatatatatatacatgattaaataaaaaggaaatagatagaaacaaatcaaagaaacagaatgaaaaagagaaaagaagaaaacaccttctcttcaaattttttattgattcttccaaatttttttcaatcgtttttttctccccccttttacagtatattcggctttagccgaaagaaaagaagaaaaaacataaaagaaaatcccctcccttttacaattcttggcttctggcttatatagccaaatacctcttggatactattttttt

SEQ ID NO: 245342 - DNA, 226 bp, Gossypium hirsutum
cattttttcttccaagagatgagagatgagagatgtttcctgttgtaatgattacccttttgtgcatgactctgcattttaattgctgctgctgctcccattgtttactcttctttactatttctagggaaaaaaacagttatatagatgctcaaccatgaacgcgaaaattgcagctgaaccaaatttcctccaaatcgacaatattgaatcgactatttttggc

SEQ ID NO: 245343 - DNA, 342 bp, Gossypium hirsutum
  unsure (1)..(342): unsure at all n locations
gggacgacgccacgcgtacgtcgtaaaataccttgttcatgggcaccttaagatttgagccttgaagcaaacgatttaagggatgggtagctgtctgaagatcctaatctgtgactcgatccccaacgagcatgccaggtgacgcaacatgtattgtttaacagacataacttgggacactcttgctaggcagaaagctgcttttggtccgacgtaatacagcgcacttcattctacatactgtaccagactgttactctgggtatacttcatatgagcacacatctnctgttagtgattactatgaccgcagtgatgcttacttcttaagtggccagctta

SEQ ID NO: 245344 - DNA, 391 bp, Gossypium hirsutum
cttgactaagattagtaactccgagaatgatgctaagccagtccatgattgggagagtcttgcttccacttaccgccctcaatatcacaatcaagctttaagggatctcttttctcattacatggaagcttggaaatcatggtattcggaagttgctggcaaaaccccaataaaacaaatctcctaaagcttttgatccaatgacacaccacttgctatctccggttgactgcatcttcggaagcattcttttcttaaaattgatctattttcactattttctcctttaaaaaaaaattgttcctttctttgagatagagatttgacctcttgctagatgcattttctctttgcaccaatttgagtggcaacacacttgtacactaattca

SEQ ID NO: 245345 - DNA, 214 bp, Gossypium hirsutum
agaacacaaggcgagtcagttggctaactccttaggtaccccaggctctactttttatacctacggccagtaaattgcatggaggtgacaccatataacagctgcgcactcgcatgctctcttaccttaactacgctcatctctagcgcgcgcccctatttataaagctggtacacattccccttccaaaaccgggcatcaaattcgatatgcc

SEQ ID NO: 245346 - DNA, 324 bp, Gossypium hirsutum
cggtcttgatttacagcgcttgactaagaagtacttgaagaagcacaatgttcgggactggattttagtgactgcttgcaacaaggatcggacggtgtgcgagctccgatactttaacattgcggataatgagggtgaggaggaagagtgaagaccggttcagctttttctctattcatcacccctttgtttgatttatttgttatgaggaacctattttatcaatctcaggtgtcgaatctttggacttgatttggttgttttctgaaccctagtctgatttcaatgaaattttggttgctcatagtaaaacattatgttttc

SEQ ID NO: 245347 - DNA, 281 bp, Gossypium hirsutum
gcgatacctacaggccattcgcttttatgtttacgtacggctcaacttgattctgcgcacgaaaacaaagtgtaagagatgaacaaaatataaagtaccacatttcaaaattacacattaagtttgatctaatgtgcaatgtaatgcaaactttgatttgatgcacttatatacatgaaaggtttatatacaacaaaaaaagaccaaaagctgcatccaaagatctatgggacaatatataagtgagaaaatggcaacgcggaggccgttttataacatcc

SEQ ID NO: 245348 - DNA, 291 bp, Gossypium hirsutum
cccacgcgtccgctttgatttggcaaacattgaagtcaataatgtaattgcagaaggctgggcagtttctcagatgctttctcagttatttgatgtggttgttgaggcagatgatgtaccagatgagcagaaagctagaatttgcaagagtttggctgaagcatataagcgtttatttgatggtgcggatgagtatttgcagctgctgtatatggccatcaacacaatgcgagctttgtctaacatgccttaagaattctctttttgtaacttatcgtgaaatgcccattg

SEQ ID NO: 245349 - DNA, 389 bp, Gossypium hirsutum
tccacgcgtccgaccacgcgtacgcccacttttacgtactggagtagccttgaggatttaatgaatagccttatccaggaagggaacataaagctagccgatatactctctagaatgattaacggaggggcagcagctagtggaaacaagaaagggaagaaacaagcaactggtgctagctaaattacttttcgattacgaaaaaaaaaagctttagatagtgatattgcgggaatacgacgaacttgagtttcatttgcaggaagctcatatcctgatttgtacttcgatgcttgcagtaccctggatttttcagggtcacatataatctttgcgtctagaggtttaaactttaaacaactcaattgtaacgagaaaaggaaagatag

SEQ ID NO: 245350 - DNA, 406 bp, Gossypium hirsutum
aaacggtcctgcaccttcattttctttcaatctggttctcttggtctcctctcctccgatgcttgacgatcaaaatctggaagccctcctactaggtaatggctaactcctctcttcagcgcttcttttgctagagcatgagcataaaaattttctatgttgggtatgaaatggaactttatctcttgaaattttcctttcttatgttgaatatctctgatgatcgcaccgatgctcgatttgtctatctctgtgttttggtattttttaattacctgctttgaatctcccacaatttccagtttgtttaaacccattaataaccctaacttgactgcttgtaaccctgcatgcgcttctgctgcaaatggatttgcaatttcggagtggatggtcgtttttgatg

SEQ ID NO: 245351 - DNA, 368 bp, Gossypium hirsutum
aattattatttgttttattaaagttttgattgtttgttaattcattaagtgaattagtacactcaattcatgacaaaaaaaaaaaaaaaaaaaaaaaaaaaaaaaaaaaaaaaaaaaaaaaaaaaaaaaaaaaaaaaaaaaaaaaaaaaaaaaaaaaaaaaaaaaaaaaaaaaaaaaaaaaaaaaaaaaggggggggccgtttaaaaaaaacaaagttaacgaacccgggattgcaaagtaaaaactttttaatagggccaccaaaaaaaaattcactggccgggttttaaaaacgccggaacgggaaaaaccctggggtaaccaaattaaatcgctttgaaaaaaatccccttttcccaagttgggt

SEQ ID NO: 245352 - DNA, 374 bp, Gossypium hirsutum
  unsure (1)..(374): unsure at all n locations
cggacgcgtgggcgcaagttctatggagattcggccgtacgaaagaagccgctcggggtgacatggaggccgtgagtggaaaatccctcgtgaaaacccgattccctggctgcagtactagcgtgttctagaaacctctaggtttttggtattctcaagttgttgggcctttttgggccattttggcaatgggctactgtgacttggaccagggattaagttgggggattttgggtgtaatgggactttgggttaaggtctaggtcaatagattttgggtttcaattttgagtctcggggttgaatgtaaaatttgatatttaattgggccaaaactgggcttgttgtaattggactttggacccttntatttt

SEQ ID NO: 245353 - DNA, 333 bp, Gossypium hirsutum
cggaagagccatcgattatatgtattaatattctgtgcctccgactgagcacagaggatgagatccaatttacagaaaatcaaagagtcaagagctgggcatatatgatacttaccgatgagattgttatgagaggaaaacgtttcatattttaaaaaaactagcaatctttttggcatctaactgtggtgaagaaatctagatctcagttctatttatagccatttgggagtatggttgctcaattctgtcaatataaaagaattgttgcattaatagatattcccattttcagataataaatttatgatgatataatgattttatggttgt

SEQ ID NO: 245354 - DNA, 446 bp, Gossypium hirsutum
gagagtttaaaacgggattaagggttttaatttgtgaatcatggaggaaacgccttgggtggcgtggtcttttccgaccttgtctgaacccaaatgggttccacgacgtttgggttgccggagaccccccaccgacgaccgaatacgcgtcaaggtctttggaagcgatgggacgaagccagggagtggttgagcctcgagcgttgaatgcgctgaccatgcacgtggggagcggcgcatactgctgctaggtttattttttctatttctgctttttttttcttttttgggttatgggcttgtaaaattttgggctagggtagtgtttggtttgattcgggctagttggtattaaggcccgtataaaattgtgcttttacaatattttatgtacttatgttaaaaagttacattttagtacttacattatcgttttgtttgaagtg

SEQ ID NO: 245355 - DNA, 166 bp, Gossypium hirsutum
ggccgacccacgcgtcgcgtccacacataactatcgtttagaatttaacttttatacggttcgttcctttattgggatacggtatcattagcacctgtgattgcctcccttcccaaaacaagtcccttttgaacttatttaagatatcaagacttttgtttaaaaa

SEQ ID NO: 245356 - DNA, 390 bp, Gossypium hirsutum
gctaatcttgggattggccttcggtgtccgttcctataccaaaacaccagcttcatcttaagcattgacactccccaagagataatttgaacaatcttcacaataagattatgctagcttaaatttgtttggaattttcacatactgcagggtggtaaatggttggatatttttattcaaacatttgctccaatgcagttgaacaaactcagattcgcctccgattgtgataatttgataattgtctttcccagttgataaaagtaaaatatcgaccgacactgtacttacgatgttcaataaagggacagaacatgttgtgacatggtattgcaaatacacaatgaagcgtgcacttatcgcactaaaaactgcataggggggggcctt

SEQ ID NO: 245357 - DNA, 125 bp, Gossypium hirsutum
ggaattgatcagccacggctgcgggggcatgatttattgtggagcatgtggaaaatatacgaatgagttattaccacacactgatattttggtgaaaacttttcctggataacacatgcaaagtt

SEQ ID NO: 245358 - DNA, 248 bp, Gossypium hirsutum
  unsure (1)..(248): unsure at all n locations
ggtcgaccccaccctcccnnataaaaacatttaatattattaaaaaaaatttttttttttaatctaataaaacaaatttgaggcggcatttttaaattgaggaacatgttaaaaatataacacttgttttataaccacacacttatattttgtgggtggccctttctaaaatacacaaactttatttccctctctttatacacaatctatattttttttttggacacccaaaaactatatcaattgcc

SEQ ID NO: 245359 - DNA, 348 bp, Gossypium hirsutum
ggttattcaattacttaccgcaagtgtaatctatcgatatgcaattatgaatgtgttggaaatgttcttttttgcactatcttgcaaccaaaacatttgagactgtttatggttgttatttgtttgatatgaacatgctatggattcaaaatgtgatatcggagtggttgatgtctacaaccccgaaattcaaagagtttccaaaagggttcagaatttttgcatatgtttgagaaactttgaaggagttgagtacgatatctattttttgttctgcttaaaaaaaacacgattcaataagaggaataaaacccagctgtaattgtatataaacagaaatggaataaa

SEQ ID NO: 245360 - DNA, 369 bp, Gossypium hirsutum
cccacgcgtccggatctccagtctacaataggggaaactaccaatgtggatatgcatcgagggttggaattgcggtctccaatcatcattaaggtgcttagaggcatgtgcttcatgaacaataagattttcaggaaacacctcagagaattttatcctttgcttacaaaacttgtctgttgtgaccagttgggtgttcgcggagcactgggtgatcttttcaggatacaattgaaagctctcctaccatgagttatgatgtctatttttgagctgtttttggaggattggggtttcatcattgttgcaagattccatcggatcatgaccatgttgtgttattgcttaccgggcgagaaaaaagaaatt

SEQ ID NO: 245361 - DNA, 232 bp, Gossypium hirsutum
cccactcgttcgaccactcgtccgcttttctttctcttttgcattcttgattctacagagataggtgtagtgttactttttgtttttgtcatatacgcatttaccttgtaaatgaattggattcgcctttcttatttatggattatgaaaaactagaatttgtgtgtgactgtatataatagaaaaaaagtaataaaagcgccattattcccaaaaatgggggcggacgata

SEQ ID NO: 245362 - DNA, 249 bp, Gossypium hirsutum
agcgaagcgaggaaaatggtgagctaactgacagtgagaaggactatgatttgctgcctaaggtggttgaattctcagaagagaatggccatggaagtgaagagaaacccaagttagagctgccatcagaacaacccaaggagcccaaaaatgagaattccctggaggttaatgatgactcaaaggatgaatctcttcgagatgagggtgccaaagtggagaatgtgaacggagaattgaaggaagatg

SEQ ID NO: 245363 - DNA, 464 bp, Gossypium hirsutum
cccacgcgtccgctgcgagtgatgttgatgataataatactgaaccgaggatggatcgaaagactgtggttcattccgatgaatccgacggccagggaggtgctgcagattatgatgatggcgaagaagaattggacttagaagaatcttatgatgaagaggaagaggaagaggaagaagaaattgatgaagggggggtagagaaagtagggaaaacagtgttgcaaaggaatttggatgaaattggagaagatttgaaggaagccgtggtgagtgatgtgaattggagttgtacggatgaggaagaagtggatgtggagattaatgataataatgataatcatgttgaagagaaggatgaaaaggaaaaggagaatgagccatttgctgtgccaactgctggtgcattctatatgcatgatgatcgctttcgagagagagcttaaatgatgtatatgatgatt

SEQ ID NO: 245364 - DNA, 396 bp, Gossypium hirsutum
acgcgtacgaaaatcttcatctgcgaattcgtacgttgttgatgatttatttggaggaatgcccgtctcacaaaatgcaaataacgatgatgattttggatccttcgtctcttccaccaagcaaaagggttctgccagtgacttgctgggtgattttagtggcgtggcggcgaaattgaagagttctagcaagagtggagcgtgggattcggtgaataatgaggctggtgttgatgatttgatacccgggttcggtgcaagcagcccttcagttaataggactaatgttaagacaaccaagtcatccagatcatcagaggaaccttttgttgtattagactctgattttggctcagaatataatttctcagaaacgcccatggatccactgggaga

SEQ ID NO: 245365 - DNA, 284 bp, Gossypium hirsutum
  unsure (1)..(284): unsure at all n locations
ggcagccttggtggtgaagtctgtgactgatggactgagaacatgggaggatgtgtgggagaaatatccccatcacacttctggctcagcagatgattgagccagtagaaattggaaggacacatttgttgacgtaataacaaaaagtatccaccagttggagtttcttaaagtcctcttaatgatttggatggagattacggtattgaacattttgtattcaaagaatctgttgatgttgtttctgaaattgcttattacatatcagttacgatnccnnnnna

SEQ ID NO: 245366 - DNA, 267 bp, Gossypium hirsutum
taaccggcatcgaggtagctcgaaggcgggtgaaaggatcaggcctgactacgagaactcgggatctcaaatcttttgaaaacgtataccgagctgttacctatcggaacacctggcgtaaactgtaccgtatgatgtgttatgctctcaagagacaggaaggacttttatggttcgtggtgatttggttttaggtctttttgtgaaatctttctgcactgcttgtgagttttcttgttggataatgatttcgttcatgaaattcct

SEQ ID NO: 245367 - DNA, 269 bp, Gossypium hirsutum
gcagatgatgctaccggtggaaggagtacgactgcgtaccctcagccatctgcttcgcctctttatgcctgataacagaatcaaggtcctgaaccaaagttgcttacctaccaagtatagtgggtgaatcgtctccagaacttgggcattcagtttttccatatatgccttttggctgtacagttattatatgaagctaatgtactcaaaagttggaatgaatgtgcaatgccgtattttgattttgagattacaaagcgtttgtttca

SEQ ID NO: 245368 - DNA, 464 bp, Gossypium hirsutum
  unsure (1)..(464): unsure at all n locations
ctgcttctttctcatctccttatcttttttttttcttcattttctcctttcttcagcttcagctttttttttgttctattataatggctgtggctatggcttctgctgctaattgtggtgtatacttttcaagcaacactaacaagcttaattttcctgtttttgatttcaaaaaccattcttggtctgctgcctttgtcaccacaccacccaacattcttgagaaaagaagtgttagattgtcattttcaatgatggggatcattccacgagcaacatcatcagccacagctgtggagagtgatggaagtttccaggacactgatacagttccaacccccaaagttataattgaccaagactctgatccagatgccaccgtagtggaaataacctttggcgatcggcttggagctcttttggatactatgaatgcactaaaaaatctggngttgaatgtttct

SEQ ID NO: 245369 - DNA, 441 bp, Gossypium hirsutum
caaccttctcggaactcccaaacggcaggctcaagtgcgttgaaacaggccacgagatggtcgtcaaagacaaggattcctatgctcacagcaaacgttgtcgtttaggccttatcgactttgctttgtctcactctaagccccctctcaacatgttcaaacaagaccctctttcccgttcgaagttgatttgtaaactaactggtgataacgtcaacaagtctgaggaacatatttggaagcatatcaatgggaaacggtttctcaataaattagagcaaaaggaaatggagaaggagttgaatgatgaaaccatgtgcgaggaaggtgagaagaagccaaagaaagtaaaaaataagaagaagatgaaggaaaaggaaaaggcagttgaagaaattatctctgaagttagagattcagctgaaaatgaaagtgagtctg

SEQ ID NO: 245370 - DNA, 430 bp, Gossypium hirsutum
  unsure (1)..(430): unsure at all n locations
gcgagcgccgccctttttttttttttttttttttttnnnnnattttttttttttttttggggttggtttttttttttttgggggtgcaaagttaaactattttttatttaatgttaaagttgttttttacatttggaaaaaacctatagtgtttttaattaaccccctaattaacaaaaaaaaaattaccgaaatcgtttccaaaatatacagcatttatttaaatttaaagggggggaaaaaaactttaaacaatactttaaaaagttacaaaagatctaagattgatattaaaaattaaacaaaacttttttaaaaaatgttttttggttatttaaaaaactgaagggggggaaaaacctttttaataacctaaaaagcagggggggacaaataaaggaggggaaatgttaccaatgttttaattttt

SEQ ID NO: 245371 - DNA, 337 bp, Gossypium hirsutum
atacctctctcctttcactatatctttctcaaccccgtttaaacaccccaggagatggtttttaaagacatggcttcccatgcacacaactatcgatcatcttaaagcctaatcgactttgcttagtcttactctaaaccccctcttaacactattaaacacaaccctctttccagttcaaatttgactagtaaaccaactggagataacgtcaacaaattacctgaacatatatacaagcatatcaatggaaaactgttactcaataaattataccaaaatttaatatataatgagtttaatgatgaaaccattttctacgaatgttataaaaatc

SEQ ID NO: 245372 - DNA, 133 bp, Gossypium hirsutum
gaaagatactggggaggataaaattggttaatttttgatcaatggcatgatgatgaagggctttgttttataaaatatgtaacattttcagcatatgtattagaataaagttactggtaatatattttcagtt

SEQ ID NO: 245373 - DNA, 279 bp, Gossypium hirsutum
  unsure (1)..(279): unsure at all n locations
tcggatattggggcgttgaatgaatctaagnncactaaacggaaagaaaccttgcagttcaatggcataccatctatctgcaatggatgtataccctgagagcaattgaaatgctttggtnntctgcagtgcattgataccctctctgatataatctggtttaaatgtaaaataccttttaacctttgttgaaagcccttgacattcatatnaaaaaaaaaaaggattggttaacaatgcagcaacctctggtaataaaatttgctattcatcttttta

SEQ ID NO: 245374 - DNA, 317 bp, Gossypium hirsutum
agaagatgatgagatgaattgttttagttttctagatatccactctcaccaatggcttattaatccttaatgtttatagatttttagatgcaatttgcttgttttttttttctttataattttatgcaacgttttaagtcattttgtcggatttaaaaaaaaaaaaggtgttgtaaatatgatttgggtcacacattattcatatgagagaatattgaaatcgcacaaaagcttatccaaagaatgagctttacataaaaaaaaaaataaaaaaccaaataataaatttaaaaaaaaagaagatcattttatataat

SEQ ID NO: 245375 - DNA, 367 bp, Gossypium hirsutum
agatgcagtcctgaaaatcgtgaagatgcctgagtctgaaagactcaagatagctacagcaacaaggagaagagctactagattttcggagcaaagattttacaatgatctcaaagccgcaatccgaccaattatatgcggttcttcctagttataggattgcattagaagatcacactgacatagaaaacaatagttatacttgttcttgtttattgggttcttcaccctttcgatccagtcattagaaaaagcttagtttagatttgtcaacaaaatagatatactcttaattttgatttgaaaacatactcttaattttgatttgaaaacatacttgaaggaattgaggatcatgtttggttca

SEQ ID NO: 245376 - DNA, 415 bp, Gossypium hirsutum
ggagcattgagagaaaaaagaataaactcttcatcttcgcttcttccaagtccaccgccggccggtctatcaattgaggctaccagatcttcattttatggataataagaaacccggcaatgacggaactgccgacgaagtgacacgggagtcactcattgctatctcttactcgttaccggacaaagttgctgctgcctccaaactctcatccgataattcaaaccgtgaaaagctgttcgaaagaaaaggttccgatggggacgaaaaatacaggtccgaattgatctcgatatcatattccaagtcacccgaaggtaagggcttgccgtctacgttgaattgacctaagcattagaagtgctgttgttcactgtgtttgttgtaagttgtacattttggatttgatcaaact

SEQ ID NO: 245377 - DNA, 430 bp, Gossypium hirsutum
cccacgcgtgcggtctaggaagttggtttgagaggactgaccagcaagaggtacatgaggatcgtgctgagatggctgagagggagacaaatgatcaggcttgtatgcaaccatgtggggccttcactaaaccaagcataactcacactagagctgtacataatacctcaacttctacagctagtacttctgtcgatacttctagttcaagattggattgaggtcttgaaggaggactctaggctttatgctgcgagtagggtaacggatattggacctgaccatagtccaaacgattataagacgggagatgggactgatggtaaatccaatggggatacgagtacgagtacagagactgaacctgctaccgtggaggatattggcgaggaactttactatgtggaaacgtatctagaaatgagttgat

SEQ ID NO: 245378 - DNA, 405 bp, Gossypium hirsutum
  unsure (1)..(405): unsure at all n locations
cttaacttggcctgaggcaagctgacgatggactatcatttcgatatgatcacctcaaaagttggtgaaccattggggagtctaatgagttgtgctggaaagttgggattttctaattgaacttgtagcagttaactttaaggtacagtatggttctcactacttatcttttccttgtattcgnggttgcgagaaactaaatttcagatgctaatcccggtgggaatgtagttaaacaatatttgctntattttgtaatgtgtttagacttggccgtagtctaaaaggcataagaagataggagtggatgctgtgagtaattagaacatttttgcatgtaatttgcaatagatcaatagtatactttgattgaagaaagtaaatacttcgttttatttggntttt

SEQ ID NO: 245379 - DNA, 461 bp, Gossypium hirsutum
acgcccacgcgtacgatttactttttctccacacttgctctaaagcacccatctcttttcttcttcgctcttttgtctctcaaatgtccattaaccacttccagtaattcaaacaaaacaatccaacgacaaaacaaactccttctatggaaccaacccaaacccccccttcttcaaagcttcacaacccttcctcaatttcccttgaaaactccccctggacctctcacttctacccctccatgttcctatcctccatccacgctccccgccacttcaaccttaaccatgacgacgacgaagaactcgacgaccaaacctccactctcaacaccctaaaccctaaaccaaatccccctgaaaaccaccagctaggccatgaaacggaacccatgtttgaaaagcccttaacccccagcgatgttggcaagctgaacaggcttgttatccccaaacaacat

SEQ ID NO: 245380 - DNA, 340 bp, Gossypium hirsutum
  unsure (1)..(340): unsure at all n locations
cggaattnnccgggctcgaccccacgccccgtccgggaccgaattaaagggagctatnntgatagaagtctgtaactttaaggggtttctggcatnntgaataattacgtgatgactgagaanntaggaaagaaaggtaaagaatnntggatnnctgtatctngnnatttggccccctacaaaaggatgganntagttcaaatttccttactttagttaccaacannntttaatanannttcaagccaacntnncgtatgtatttctttngnncttgagaaannacaaaacannnatgtaactannattaatggccaatnnntccgttcaatttcttctt

SEQ ID NO: 245381 - DNA, 311 bp, Gossypium hirsutum
cccacgcgtccgcccacgcgttcgattgcctgtctgaggactctgtacattgccatggagtgagactaaaatctacctcaagtagcttccttcatttgctcatcagtcagtaagcataactgagaagatcaaaagcttcggtatctgagaagatcacttcaagtaaaatgggtttgactgctacagtttaggatggtaggaagcttttaggttaactctaaaagacttttgacacttgcgaagggttgcaaatctggtttttaccactggttgttctcttaagatgattaatgccatgtagcctgcataat

SEQ ID NO: 245382 - DNA, 413 bp, Gossypium hirsutum
gcggggacaacagattactagtatttcatttatcatgtcagtcatataatttagcatgtggagcttcactagactgctcagaccaaacactttttagtagtgaggaggaaggtaatggccaatgcactggcactggtgagttgaagctttcatggtttaactggttgcgaactagcttattttcaagcaatacatctttgaaaagaacatctatagaatatagtcagtcataggctctaattgttcttctaatttttgacctgtaattttctaggattctagcatggtaaaggtggcacataatactgtgccccagctgtagagattgtttgtgctcgagcccaaaatcaattagaaaaattggacatcattatgctctgaaagatcagagccacttgtagagaaaacaatac

SEQ ID NO: 245383 - DNA, 358 bp, Gossypium hirsutum
ggcgaatttgcaaagtatagagaaacgttcgtacggagaaaatcgctcgtgaaagccgtgattgcagcactggtgtgttctggaaacccctagtgctttcggctgctgagattccccttttgggttctttcgagtttgggcctttttgcaaatcgggcttaaggatattggtctttgggcctctgtatatgtttgggctattcgggcattggaccagatctgtttttttatttttggggctagtataagtttagtgtttattaaaggttgtaaatagactatttggactttatttgggtttatttggctgactatttacttattgcgagtgaaaaaataaaataaagggccgggcccc

SEQ ID NO: 245384 - DNA, 287 bp, Gossypium hirsutum
cgacccacgcgtacgcccggaggtcattggagcttgtatgaatcactctttgaatttgcgtgtgttgttttctttctgattccaactgatttgatgattttgtttaaaactaggagaaattttccatggttttgatttgatctctaggatatggttttgcaaattgatattgagttagacaatctgttgtattagaaagtccctactctatatatgaaatttattataaaaaaaaaaaaaaaaaaaagacagaatggaaaaaaaaaaaaaaaaaaaaaagggcgccc

SEQ ID NO: 245385 - DNA, 290 bp, Gossypium hirsutum
  unsure (1)..(290): unsure at all n locations
ngcncnccancgngccgggccggcgcaaagccgggaaagcaaaanccggggggcgccaaaggccgcgacgaggcccgcagagaaaaaaccaccggaagagaaaaaagccgagaaggcaccagccgagaaaaagcccagagccgagaagaagcagcccaaggaagccggcgacaagaggaagaagcggccaaagaagagcgacgaaacccacacgagcaacaacaanaaggggcgggagcaagngcacccngagagcgggaaggggagcacggccaaggggacgcggaaca

SEQ ID NO: 245386 - DNA, 247 bp, Gossypium hirsutum
agcttgcccttttttggttgtaaccatagagtcagtttgttaaggggttttttgcgtttaacagtaattgtttgacaaaactggcataattctattcctttgagtcatgagaattgaggagacgagcatgagatacagagccattctcattgctctctaagtattcatttcttttattgatgagttcatttgatttcaataatgattaacttattgtagtattttgtcatttagtgagacgaaatgg

SEQ ID NO: 245387 - DNA, 433 bp, Gossypium hirsutum
cccgcgcgttcgaatttttaattttcttttttcatggcaatcctaaaccttgtctccgttgcggttattgaggcgccataaccgtcaccaaacgctacagctggattctcagtaggagtttctaccgtcgacattggctgctttatgatcgttatcccttacttgcttttttcaagcattaaattgaaggactggcatgagtctcctctctgtgtggctatcttttatatatatatatatgtatgaatgtatgtatttatgataccattctatcttatttaaatgcattgtaatgaattttattatctgaataaaatacttgcgttataagttatcttttttatactaaacccttcgagttcaactatgtagtttcaaactttaagagataactccctccctgtttctgttttctgttcatgtatgaatttat

SEQ ID NO: 245388 - DNA, 328 bp, Gossypium hirsutum
  unsure (1)..(328): unsure at all n locations
cccacgcgtccgcccacgcgtccggnggtccgactggttcatggatattgatcccttctgggttactactggggggtcagggtggtttccaatttctcactacaatttcatttcatggcgatgcctcacaaatcaatctctgaaaactcaacttccataatattgtcttcacaatcatgtgccctactacagcttttcctcctcctcctcctcctcatttctcctctctttgctcgtcccatctgttcctcttcctctactacgagaaatttgcacccattttcgacttctttgacgtcgatcccagcagctcaaaaccccgggaaaa

SEQ ID NO: 245389 - DNA, 312 bp, Gossypium hirsutum
cccacgcgtccgcccacgcgtccggctcatcctcgcgccaaggcttccgtcgatgccccgatctccgatcgcgacagagaggggcaccaactcggcgattccggcgaaaaaggtacgtgcttgtggggaaggtccgagattcgcgacggcgcgatgtgcgggattgacgcgcaaagtgcgggagcgaggggcgccgcattggcgaggccgttgcggcgctgaacttgctgctaacagcctagggtttctgcagtggtttctgctttgggctagtgggctagggttaggtgttgggccattctaggtttaatt

SEQ ID NO: 245390 - DNA, 254 bp, Gossypium hirsutum
aaaaaatactttcagaagctctctccccttccagttcgttcggccagaggtccgaccgtcgaccaccgcgccggccaccggcggcggcgccgcatgcggtggtcggagagccgaaaattttagatccgacccttccaaagcccttaaaaccgaatctagccccaaaaatgccaaaatcttgacggagaggggccaaatctcaataaactcttcggcttccgaccgtctatcctcgaagacgggtacctcaatcg

SEQ ID NO: 245391 - DNA, 320 bp, Gossypium hirsutum
aagaacttgaacgccaagaagcagatgatgaaaatagcgaggtgggggactttgatcctgtcgatggtacaagccacaggagattgtcttggcctccatcagttaaaaagaatggtctgtaaatgtaagtatttgcttgctctggtttgtttcctctctagtaagtattgtctttaatccatagtagtattgtttgcctgaaaattgagcaataaataacagtgagtctgcatattatctttctttgttttcttctttccccaaacatattatttatccactcagtgttcttatttgaaatcaatgctatgtttgaagtc

SEQ ID NO: 245392 - DNA, 298 bp, Gossypium hirsutum
ggtaccgctccctttcctttctctctttctttttccttcacaataaaatgctttgaacagatcgattggaatattatcatgatttcctttttttattataaatggaagtgggattcatttcgtttgagaatgagcttttttttctttaataattaaactcttgattctgtttttgttcatcagatttgtgaaattaaggataatatttggttcatctataaaagttgtagctttcgaatgctactgatctctctatgttttgctatgtccataaattgctcgatttcataaatcccta

SEQ ID NO: 245393 - DNA, 205 bp, Gossypium hirsutum
  unsure (1)..(205): unsure at all n locations
cccacgcgnccgcnccngtttacccaagtccncccgnngngaagcccccggcagnggggaccccnngnccaccaccaccaccngngccananccaccacccccggcacagcaaacaggccccanngacacccncaagccaggcgcangngnngangngnnagggggcnnagngcacanaggnancggcagcagcgccaaggacac

SEQ ID NO: 245394 - DNA, 412 bp, Gossypium hirsutum
gttctagatcgcgagcgccaccctttattttttttttttttttatattttttttttttttgtttttttttaactttttttttttttttttttttttttttccaaaaaaacccccacttctttattcaatacccccccaacacattttaaaatttttaaaatacaacaccctacatttatttttaatccataccacaacccaatgttaaaaggcccccccccattttaaaaataccaaaaaaacggacccaaaaacaattttttctcaaccaaacccaatcacaaacttaaaaaaagaaaaatcccccactcaacccatccactgaaataccccccctctcaagaaaaaaacccaaacccactcaaaaaaaaccgaactctacatttaacccctaaaaaccataaatccaacc

SEQ ID NO: 245395 - DNA, 435 bp, Gossypium hirsutum
  unsure (1)..(435): unsure at all n locations
cccacgcgtccgcccacgcgtccttttaatttcaaaacccatattttacgggtttgtcaagtgagaaaaatgctgagaatagatggtctctgcaaaaagatgggctacaaggacaccaagttactgatgctttacgggctctgatagccaatggcgttgaagcggggactatctagtgtgggcgtccaaaggaacagaagttctggatctcgtttgcgtatcgtgattctttttttcttctcaattctgatgctcattgctttgagttcattacaagatttccttgattaaataaatgtattatatcttttatgatcaagatttacttgattaagaaaatgcattgtatgttttattaccttgcatatgtattatttattntaagttttattctaaaattttatttttacttaaaaattctaacttttttatttt

SEQ ID NO: 245396 - DNA, 224 bp, Gossypium hirsutum
  unsure (1)..(224): unsure at all n locations
atcgtgtgtttttgcttattctattgcgttnncttcggctcttctaagcgttgttctgggctatatggactgcaatagatttgacgagtagttcggctgagtttctagtgttccattgctgagaagaatttagactggttgaacccatgcatgtgactataaaaacaatggtcacgaatataaagtcatctatatgtaattgaggccaatttgagcgggagttg

SEQ ID NO: 245397 - DNA, 392 bp, Gossypium hirsutum
  unsure (1)..(392): unsure at all n locations
attgagtgtgacattttggttttttgcttttcttctctctatccccacattgtttattctgctagttatttcattaaattcattcctttactgctcacccgttggaacgagttaacgaattgtatgcaatgttgacctttgaagacaccctatgattttttacatttagacaacagaataggtggaatcttatatgaatgtattttttgaacaatggctcccctttctagatttaaatttatatctttataaagactccggctnaaaaaaatacaaagaaaaagggacctgtaactgatttattagttaataaaaagataatttgatctgtttataaagaattcttaatatttaaaacactaagttttggggccttttttaatctaataaaa

SEQ ID NO: 245398 - DNA, 272 bp, Gossypium hirsutum
  unsure (1)..(272): unsure at all n locations
acccacgcggccgcccacgcgnccgccnanccnggcacaccatgagncncanagcnnggccgcggggccnggcctancgacgggaaccacaacnaaggggaaaccggagaggcaccgaagggggacagggggaaccacccacaanacnnagaagacaacgcacccgnggcgnnccagacagcaacggggagggggacgacgccggngaagaaacaccaacccncagcccangacggnngcgngggcgacgggaaaccaaccaagaacgacac

SEQ ID NO: 245399 - DNA, 362 bp, Gossypium hirsutum
ctccatactgtaatttttatttttgagggcttgtttaagctctatagtttcttgtaaaaaggtttagttaaaaaaaaaaaaaaaaaaaaaaaaaaaaaaaaaaaaaaaaaaaaaaaaaaaaaaaaaaaaaaaaaaaaaaaaaaaaaaaaaaaaaaaaaaaaaaaaaaaaaaaaaaaaaaaaaaaaatctaaaataaataaaaaaaacaaaagtttatcgaaatacggctgctattcctaaagtatgcaaaactttatccaaataaaaacacccgaaatctactattattaaaaacccaggaataaaaaatagattgtgtcaacaaataaaaacctcctaaagaaaaaacactctaacacaat

SEQ ID NO: 245400 - DNA, 387 bp, Gossypium hirsutum
tgtatctccagttctacattaacgataatggtgacaaagtttacaccactaagaaagaatcaccgttgggtatgcctactcagtctgctcatccagctcgattctcccctgatgacaaatattccagacaaagagttcttttgaagaaacgttttggcttattgccaacccagcagccacctcagaaatattgatagatcggatgtgttctttttgaagctttatgcagtgcctctggctgtaaaatgcagtttcctgtaagaacatatcaagtatatgaatgcattgcattggcatgttttcttcctggattattgtttgtatttatacatgtcgtgacttaaattttcttcaaagataatggtgcatacatgtgaacgtctttta

SEQ ID NO: 245401 - DNA, 231 bp, Gossypium hirsutum
  unsure (1)..(231): unsure at all n locations
gaaacgngaacnncacaangncnnnancanaaagcncnacaganaaaaccggggggaagaaangnnacaggaaccngangagaacgcngcnaagagaaaacgnacncgagaaacacnccgagnncnccaacaggcanncaggacannggacgaanngccannggaagcngaaacagnngagagggganacagnnngggnncngaacnaacaggccngccaaagaaccacgg

SEQ ID NO: 245402 - DNA, 267 bp, Gossypium hirsutum
  unsure (1)..(267): unsure at all n locations
ctggggaggctcatcggctcatggaaagtagtgcacatatcgggaagatactacttgttccatgattgctggtaagggccttgtcttctagaggggaaatggtttgtattttatgataaaatgagacacttatgaatcatgtatatgaagtttattttgcctgatgtccttgtggcctaatttaatcttttaccaaaataaaaatcatgcaaaagtcaaaaactgataaannaaaaaaaaaaanananaannaanaaannnnnnntt

SEQ ID NO: 245403 - DNA, 147 bp, Gossypium hirsutum
  unsure (1)..(147): unsure at all n locations
cccacgcgtccgtggagaggcagaagttgtggganggagaagcacggggggaggaagaggagtacgcggcccaaggaggtgaaggcggggaaatcttggacttctgcgcagaagtcctttttggagagtgagtcgattgggacaaga

SEQ ID NO: 245404 - DNA, 408 bp, Gossypium hirsutum
  unsure (1)..(408): unsure at all n locations
gaaaaaagggccgancacgcgtacggaaggattcttcggtgttggatttttattttatgacganggcatggagaaagggtgacggtcctatacagaagacactttgaaagtccacctatttgtctttattacacctttttccctctgtgggcatcttttcagtttaacattgaaattaaggagagaataaagaaaaacatatagtgcatttaggttcatgtgttattcatgatgatggtagttagtccttacaagatgtaaagcaattgggggaatcgcaccattttttctttccatttgataaccacaaatggctgcctttcttattttggattttgagtttggatcatattagaacaattttttgttattgtttctagaccgaaagctttgcttatcttttgtgcg

SEQ ID NO: 245405 - DNA, 209 bp, Gossypium hirsutum
  unsure (1)..(209): unsure at all n locations
cccacgcgnccgcccacgcgnccgcggcggggggcncncccccgccgcccccancccgagagccgccccancccccgacgacaaggggggccgcnaagaagaccaagaagacccaggagagcannaacaacagangggcncncgggangaagaggggnaaanacacnnggggngacaaaacggggcnnaaancgcncagaaaccccaaa

SEQ ID NO: 245406 - DNA, 296 bp, Gossypium hirsutum
cccacgcgtccgcttgagattagctactgtaggagtataatgccaagagattctccatattatcattgatactatcgaagggatgtataaattccatagctctctgcaaacatcattagtctcagcatgtatactattattactcggaccccaattagtccccgcaatagcttatcgacgcttcttactgaaaaatcgccgaacggcattactctacacacttggcaggcatcgggtcttgtcttcaccgaacggattcacataattctacctgccatatacgcgatatatggatt

SEQ ID NO: 245407 - DNA, 290 bp, Gossypium hirsutum
atagaaagcaatcccgtgcccagaaatcattctcaggaatcatctaaacctaaagttagagatgggctattcagtactttaaggttctggatcattcttctatgggtgttttctggattgggttttattttagtcatgttagcgatgtgttcaggttatacaagcaaggggtcatcaaaagggaaaagtaacaaaagcaggagaagatcttatacggggtttttaaaaaccagtgctcgtgatcggcaaggtcacaagtcagacgcatcattgtagcatcgcaagttgct

SEQ ID NO: 245408 - DNA, 333 bp, Gossypium hirsutum
ggaaggccgggccagacccacgcgtccggacacgcatactgccacccgtacattttgttttcatcaccgaaaaacataaaccagcagcaggcaagagaacaacaataaaagatcgcaggacctctattttgactactcatgacgagagcattgcttctatgatgtgatgcactgtaattatgctccacaaaaaaagatcaggtctgctgacctcaacggggagcaactctgcatacgcattgaagaaagtctagccctgaagataggactactataagattgaccacttgaactaaaattaatgaatatggatgaacgaagatagatatagat

SEQ ID NO: 245409 - DNA, 287 bp, Gossypium hirsutum
cctgtttcatagctggaaaatgttatggattgtgtatgtccaaaaaggtttttctgttcggttcgtttacattatacacgcttcaaaattttgaagacattgataacgttatggattgtgtttggacaatcattttgaagtggggagaaggtgatgagaaaagctacgggttaaatgatggtgatgtaattattgattaaaattcaaaccccataattgtttttttgtccctaatccctttcattgaaggacaatgaaacatggatgcctaagttgttagcagcagc

SEQ ID NO: 245410 - DNA, 296 bp, Gossypium hirsutum
tctgtgagagaccactaagtgatgttgtagacaacaaaaggggagatcctcggtcagaacaaggaaatcaaggattgagggagagaagcaaggaagaagaaccggttttgggagccaaggataatgaagcctaaggggaaacaaaatttgtacagagaaagggaagattttacgaaaatgcaacttttgatttatatatatatatatatgatatgtttcggttaggtaaaacactaaaatagttattgtagctagtaaactgttatgatgaacgtacgatggctgagcttgctgtg

SEQ ID NO: 245411 - DNA, 250 bp, Gossypium hirsutum
  unsure (1)..(250): unsure at all n locations
ctttgattatttattggtttctgactacatttgggatatgatcccttggtatgttatgcagaatcgtgtaattatttaatgttattcagatttttcatttttctgaaatcatttgtatttgactcatatttgtatggcatgaaagtatgatcctttgacatatatgagaggggattttcttttgtncaaaaaaaaaaaaaaaaaaaaaaaaaaaaaaaaaaaaaaaaaaaaaaaaaaaacggcccgccgc

SEQ ID NO: 245412 - DNA, 288 bp, Gossypium hirsutum
cctgtgagagaccactaagtagatgtaggaatcaacttaaggggagatcactcggtcagaacgaggaaatcaaggattgagggagagatgcgcggtcgatcaaccggttctaagctccatggatcgtgatgcctaatggtaaacataatttgtgcagaccaagggaaaatttactgaccatgcaacttcagacttatatatagatatatctgatatgttaccgatctgtaaaacactgaaatacttattcgttctactaaattgctataatgaacgtacgaccgctga

SEQ ID NO: 245413 - DNA, 255 bp, Gossypium hirsutum
gttctgggacatcaattcccggtctagagaaggaggagaaagaaggtgtgcccgtttctggaccgctgaagccagatcgattcgttccgcctcatcttaggccgggttttgttgggagagaggagaaacccgaacccaaggttttgcgtggaagagaacaggggttgaagcattttgggtcgtcggtattatggtgaagatggcggccaattggcggtacaagatcaaaagcctgatcaatggttgattccatcc

SEQ ID NO: 245414 - DNA, 214 bp, Gossypium hirsutum
cccacgcgttcacccacacgtacggtcatgttatcgaccacacgtccacccacgcgttcgaggacgctttcgataaaaaaagaaaaaaaaaaaaaaaatatagcaaaaaaggattaaaaaaaaaaaagtcatggtcctaacccataaaaataaaaaaaacttcattcaccatactagttaaaaaaaaaatgtacttttgtagcttataaatttt

SEQ ID NO: 245415 - DNA, 265 bp, Gossypium hirsutum
cccacgcgtacgcccacgcgtccgtaaaaattatatttttaaccaaaagaccaaaaatcaagagctaagatcttatgcatcaaaccttaaccttccaaattcccttaacttgctcctcaacgttagctcaaagaatgttccttccaacttccaatgctaaatcttcactgttcccaatagcctttctagatcttacttatcgagtttggttatcgaaagttacagatacccactttttcttcaaaccactaatttttcatttgta

SEQ ID NO: 245416 - DNA, 181 bp, Gossypium hirsutum
cccacgcgtccgcccacgcgtccgatgctgttgaggttgtgagctacccctctgtcttttcttccggtttatgtctttacactttcttgattctggtacaaagtataattgtggagactaattcaggcttgatgtgtttccttgattttcattattatcattattagtatagtcgttcatt

SEQ ID NO: 245417 - DNA, 298 bp, Gossypium hirsutum
aaaacccttcccctcttctctttcttttcctctgtgagggtttcaaaaatctcttatcgcacagcaccggaccactgtggctccactgcgagcgacagtcggagccacgcaaagatcagattttggccttctttaaagcagatacgaaggcaaaccttcctagtccaaaaagattgaagaaaaaaaggactctcctccctttattagtctgatttcggagccggagaagaacttccgacgacgaaaccgcgggatggctcatgtgttagaagcgtgggaggcgacgacagacactggg

SEQ ID NO: 245418 - DNA, 321 bp, Gossypium hirsutum
gaattcccgggaattatataaatatttttttattttttggggtcgagaccattgctttctctctccctcctttggctttgagtgtcggacactctcgttttgtagatccaccgtctctttaagtattcgggtacttaatggagccaaaatctaccactggatacaatattggacatgttgagagcttgactccgtccgatcctgaataagattaattatattttcgaggtcgggtcaaaattaatcctacccttcttttattttggtttaataggaattggaggaaagagagaaggtagtgaggaagatgtgggatgttta

SEQ ID NO: 245419 - DNA, 244 bp, Gossypium hirsutum
cccacgcgtccgcgtcgatctcgattctgttgtttgcctttgcaccgttttcaaggctagcatcttagccttaaacctaacctttccattttccttaacctgcttcctaaccgtttgctcaaagattgttccttccaccttccaaggctaagccttcactgttcccaatattctttcaagccttccttattgtgttgggatatgaaaagacacggttccccactttcacaacacaccaggggtt

SEQ ID NO: 245420 - DNA, 292 bp, Gossypium hirsutum
cccacgcgtccgttctctacttaaggcatttttctctctccctatttgtaaagtttcacttgtattttggagtgaaatatatttgatagtgcccgaggacgtaggcaagatttgccgaacctcgttaaaattttggtgttctttactatttaatgttcatattttgtgagtgtgattgtagtgatttattgtgctattaaattacgatagagggatattctggctaggaaagacttggtacttaagtgatcctcgtgattcacctctctttcctgggaattgaacttagtgt

SEQ ID NO: 245421 - DNA, 186 bp, Gossypium hirsutum
acgggctgtgggaagaattgccttactagctgttgcatattaggagcaaagcttgctttatatgcttgcgaagaagtgaacatggagcgtgaataagatgtggctgaaaatgggaacacaggaccctcaggtggcttttttgacttactcctcttggagagtgggaagatcggatgcaaagagggc

SEQ ID NO: 245422 - DNA, 325 bp, Gossypium hirsutum
cccacgcgtccgcccacgcgtccggttctttgatcattattatgagcttgagcatacatcgagaactgtagtaggaatttgatattttatctttggctaaagagtttcaagataacttgatgagaaacaaaagacatttgagtgttaaaaaaaaaaaaaaaaaaaaaaaaaaaaaaaaaaaaaaaaaaaaaaaaaaaaaaaaaaaaaaaaaaaaataaaaacaaaaaaaaaaaaataattataaaaataaaaaaagggggggctggggtgggggttttaaagattcaaatttttttttcgcgtgatttaaaatttttattttttt

SEQ ID NO: 245423 - DNA, 294 bp, Gossypium hirsutum
ctctaatttactgccaatggcgccaaatattccattcccttctgccatttatggggctaggggctcaatcccctttattgttgattcaagtgcacctgtcgtgcctcaaattatgggctctacatcagcggttccaatagctcactctcaggcacaattcattatgaacatgagcaatgcagctgctggtttaaatggttcaggcccctcacggcctaattttgatctgaattccatattagcaatggaaggatgaaatacagatcccatgggtttaaggcagccattcatgcc

SEQ ID NO: 245424 - DNA, 304 bp, Gossypium hirsutum
  unsure (1)..(304): unsure at all n locations
cgtctggtttctctatcacaccatgaatgatgatgttttctttactctcctcaccgatattatttccggtttgcctctcaacacccatttgnttgtaagaatatcttggtctatttctcttaactgttaagctcgcggattgttctgtgctaaagatctgtagcttagagtcaagatctttgtttctggttagatgaagtattctcgagttgcgttggttaaaaaataaaacaaaaaagtggcgctcgttctacacgatgcaaaactacatcctctatcttctagaatacaaaaactttggtgc

SEQ ID NO: 245425 - DNA, 292 bp, Gossypium hirsutum
  unsure (1)..(292): unsure at all n locations
ccgtccgctccacgtcgtctcgctccacgtccgtccgtcccacgtctgtccgttgttttgtgagcagattngtgtgagccatcgaatttgatgtacctnntggtttggtggttttatttagtactttgcnnaactttagttgtatttttggcacccttatcatttgtggaaagaagactctgggagaatgaaatgaatttggaacctggttgtgaattgttggtggattgtgaatgtacgtacnaactctaaatttatttatnctcttttctattttctggctttggtttga

SEQ ID NO: 245426 - DNA, 465 bp, Gossypium hirsutum
  unsure (1)..(465): unsure at all n locations
gggggggngcgaataatgcaaatttataacctaatttttcaattcttacaacngaacaaatcccttgtgtttggtggcctttagggtaaaatggtccaaaacaaatcaaaaaatacaatatttcccattgttttttgtcttctttgctgagtgtttgtatttgctaccgtgttcgccccttttgcaagtacaaaacgttctgtcgttctcgttcgggagtttacatacggtagcgctcttgactgcttaaatgctttaacgtaccttatctgtggaagcttaaatttttcctttcatctacttctattgatatggtttctacaaatttctttatcaattgttccctttcttctcatttctattattgattcaacccttcatttatggcatttgtttattgtaatattcctcttgcccatatatacttttttttgaactcatttacttcaaatttacatttattat

SEQ ID NO: 245427 - DNA, 301 bp, Gossypium hirsutum
ccgaaaatgaagctcttagaactccaaagccagtttgcagcctcaagaccactcctcaaacttcaatttagcgaagcaaagaagaacccgtggcgaatttgcaagagctgggcgtacggagaagaagaccccgggtgatgtggaggctgggcggaagggtctctcgtgtgagaccaactttctggtgcctctctagcttgttccagactcttctggaattcacaagaagctgaaacaattttgggtatgttgggcttcgggttttgggcttatttaggctaattttatttggattttggaa

SEQ ID NO: 245428 - DNA, 131 bp, Gossypium hirsutum
cccacgcgtccgcccacgcgttcgtctacgtttccgatttgtttcgaggcttgagggatgggttcaatgtgtgttagggttcatttcggctatctctttttgtccacgtatattcctcccttgctcttcaa

SEQ ID NO: 245429 - DNA, 281 bp, Gossypium hirsutum
cccacgcgttcgtttcgctacaaggttatatatcaaggcactagaatctctgctggggaggggtaaatatgcaagcgatgtatggcttgcgtaatggtaaagaataatctttagaaacagcctgtgtggaatgataacgacgacgacagattcatctcttgttaaagaaaataaacgcagctaactttacaaggggaaggcgggaactgtgtccgcacttaaagaacatgatccttagtattcgccgaccggattaacactatttgattaccaaaagccgc

SEQ ID NO: 245430 - DNA, 210 bp, Gossypium hirsutum
cccgtcgcgaatttgcgagagctgtgcgttcgggaaagaacaccccaggtgatgtgttggctgggctgaatgatctctcgtgtgagaccaactttctggcgcctctctcactgggtccatactctcttgggatgcacaagaagctgcaacacttttgggtctgttgagcttccggatatgggctgatgtcagctaatcttatatggattc

SEQ ID NO: 245431 - DNA, 327 bp, Gossypium hirsutum
attttgaagagaaggagaacgaggatataagtataagaagaggacgacgaggaagaagaaaagagtgtaaattacgggatcaaaaaggtcacatgtggtctttgaaaacggagttctaagaaatctagtccacattctgctgataagcaatatccagtgacgcctaatactggtaggcctgcacaggcaaggaaagacttaaaacggtattcacttcctcctcttccaagggcttactcttttaaaactctatcatttgataaggctcctggtggtcaacttaaatatattcccaatggattgcccctgttctcttgcttatttgac

SEQ ID NO: 245432 - DNA, 202 bp, Gossypium hirsutum
cggaattccgggccacgacccacgcgtacgctcaccatttttagaacaaaaattccaaatttttcagatctctttcacttacagaaatgggccaagttaacacgatgacagcccatttattgtctcctcgcatggcccttctcacacttgactccaagcacgttattatagcttgaacacattaatctaacctctgatcatg

SEQ ID NO: 245433 - DNA, 561 bp, Gossypium hirsutum
  unsure (1)..(561): unsure at all n locations
accctnactaaaggggaaccaaacagctggagccttccaccgcnnggtggcggcccgcttcttagaacnttagtggatctctcccgggccttgcaggannnattctgtagtaagtgaggaaacannttgattnncgtagnntgaagaaagtggtntnnagaatangnntcaaaccanngtgaaacccaggggaananntttcaataagaagatctcggtatttgattgggtcacaacccaaaaaaaanntttgaaaattttantggatacgagagatattatganngtctattttnncatggaaaattacacggcactttcngatttggagtttcttaattctcaagttatttaaataatttaagtgacctgttgctttcaggaagaatagcttgtagctgaatttgtgatttntgttgcaaacatnggttannaaacttgttaatgagatgcntttgcgagttcttaatgatcttatgtgtgatttcaatattctggttttaaattgagttcaaattcaagtgaagtgaatttgctaaatatgcattatgttcatggata

SEQ ID NO: 245434 - DNA, 237 bp, Gossypium hirsutum
gcgcccacgcgtacgaccacgcgtccttaaatttaaaaatttgaactaaaaataaggagccatgcaacattataattagactgttactttttactaaaatttattgatgatttgtcgtttgatcgatagattttgattttgatttgagtttgcctgtagcatattatattgagttttggtgaataataaatgatgtctataattttcctataactcatatgatctccattacctgat

SEQ ID NO: 245435 - DNA, 344 bp, Gossypium hirsutum
gacccaggcgtacgcgtacgccaacgtcttccacatacagcatttattgttccagtgcaaccaccaaccaagccgccagggtacccacctcccaaacctccagctcaaccttctactaagccaccaaccaaaccttcaactcaacccccgactaagccaccaactcagcccccgactaagccaccaaccatgcctgcatctcagcccccgacgatgccaccaacacacccaccatctaatacttcggccaagccacctaaatcgagccaggtggcagtgcatggcgttgtttattgcatgtcatgcatactcgccggagtcgacacccttttgggagctaaacc

SEQ ID NO: 245436 - DNA, 310 bp, Gossypium hirsutum
caggcgaccacgatctccctcccttccgaatcaagaatgcttccattctaaaatactgcttcttttcagggaggagggggactttactcacataacagataaacgtcttcttgctgcttttcctaacttggtgataacagcaaatctacacacatatgttgagactgtgatttatttactgtctacatctgccatattaaataatgcactcgatccttatttcaaatgaaaattatatcatgttcaaaaattttttggctgtttgactgctatccactctagtaactgagtatacttactctatagatca

SEQ ID NO: 245437 - DNA, 434 bp, Gossypium hirsutum
aaaattttctaatttctagcttgtttatttgtttatttgttcattttcattatatctatggttaggctctgcaccaaagcttgtaggcactagcggtggcgcttgagataggcgtcggcaattttgagtgctaggaatatcagattccggcggtgttttaactattaattttgactcttatttatactttgaagatttttttcaaccggaaaaggaagcaatcggtcgtcgccgtttccttattttatttttgctgttaaacaaattacgttaagaagagaagcaaaaaaaggaaaaagaaaatatccaaggagaaaaaaattattaaatccttccaaaagggaagtaaattgaacggatggaaactattacaaagcaatcacctcaaggttgcaataatatttgtccaacgccaccttcattaccaggcccag

SEQ ID NO: 245438 - DNA, 493 bp, Gossypium hirsutum
  unsure (1)..(493): unsure at all n locations
ccctcactaaaggggaaccaaacagctggagccctccaccgcnnggtggcggcccgcnntctagaaccctagtggatctctcccgggccctgcaggannattcaaacatgtgcggtgcctcaactnnntatgggataccgnnacatcttgattgtactcnngggatgagaannaccctttcacnnattcgttcaaactctatgccaagcattgttttgaaaagtatggcacttaataagaaggggaatncgtttctaatcnttttcgaatttttgacattcgactttaagacattaataaatcaattcggtaccaattttgggcgttatgagggtgctaatccttccttgtgcgtaaccgactcccanacctattttctcaaaattcgtagacctaaaatcattttcaagggtgatccgatcacacctcaataaaaggatcggtgggcaactccatttttttggtttttttttaaagtcgacaactaattttt

SEQ ID NO: 245439 - DNA, 334 bp, Gossypium hirsutum
  unsure (1)..(334): unsure at all n locations
ggaanaaaaggnggagctgcaccccgggggcggccgctcttaaactttttgatccccccggcttcaagaaatcccaaggtatgcatacttatcgattatttttagatattactgattgggattataaattcacaagaatttattttaattcttaatttaagaattttcttgaagacaaaccaattctcttaaaagtgggggtatttcataaaccacaatttatacctatttttataccctaccttaacccacctatgaatagtttctccttacattttgggaaatctcctcacccttttaacccgtacaaaaatctaaacaaacaatcgctttg

SEQ ID NO: 245440 - DNA, 428 bp, Gossypium hirsutum
aacatatctaacagaattttggctcttatgatgtgaattctgatcaccaactgaattgatgttgacttgcacgaattatatcattgttagcttcatttttaaaatttaattaatctaaagcattcatcaagttatgtagagtgatagattttaatttcactttatatttcattagatgctggtgaatttgaatactgatggtagttaaaatatctgctatatgaattcatatcactattaactgcaccaagtccactttcatcggatcttgtgtgacaacattttcattccaatttatagttgaagttgttagtgtattattggactgtcttaacgacatgaatgttatctgttgtccagaacttcttgattggttatgcaagcttgtcttttgttgtattcggctggtagattgggaaggagttggc

SEQ ID NO: 245441 - DNA, 179 bp, Gossypium hirsutum
gtcctagatcgcgagctgacgatctatatgatgcaaactggcgtgcgcgcgcatgctagagactagctcctctatacctgctcctagatacaattcacttgccgtcggtgtacaacacattgatctgtaaaaccctgcactaccaaactgaaactgcatttgtcacatacacatactat

SEQ ID NO: 245442 - DNA, 174 bp, Gossypium hirsutum
caaaaaaaatacacttataatactttttattcttatataaaaaaacaaatacgggagatcagtcttaccctactctcgactaactattgcttttaaatgatctgaaagatggaaatcgctttttataatgtataaaattctaatgaatattgcatacaaatatataacgtaatt

SEQ ID NO: 245443 - DNA, 395 bp, Gossypium hirsutum
cggacgcgtggctcttacacttctatactctttagtcttatctctttcgcggctagggtttttcgttctactgcacctctcctaacttttttttttaaattattaaaagattggtttggtttcataatataaaaatctaatggaagttctgtaagagtaagggatttcgcggttattataaaagaaagattctaaggggtttggaagtggtcagtgtggatttttcattcaagaaaagaaatggctggcttgtacccttttgatttgttgggggatgacgacactggagaactatcattgctgatcgctgctcaacaaaaagctgtcgcatccactgctactgctgcttgcccaaagaagggcccagctaagtcttaagctaagactcatcctgc

SEQ ID NO: 245444 - DNA, 440 bp, Gossypium hirsutum
gtgagttttgtttttattatagaaactccttggattagacggaactacgccaactaaccgtaaaccatcatctaaagggatcaatctaccttcaaaacatgcagcgtcgaagatcaataataagatcctcgttaagtctgaggctctgggatcgggaaatccatcaaagaactcgatcgttctcgatgtatccttgcttaaaggtggagctcccggtcggaccagaggtctgaatgttttcgccgtcgatccaaatccgttttcggattgcttaaatgggattcataaactaagctaacaaacgccaacactatttagttctgacatgatttttaaagctatctatttaaaactatgatacaaaagctctacttgtgttctaagatcattgcattagttggatatttcttttgcttgtttaaagagaaaaaaacaatgtt

SEQ ID NO: 245445 - DNA, 413 bp, Gossypium hirsutum
ctttcttcaggaaactctgtatgtattatttttgtttttattttattttgttatgtttgatttcttctgaacctttttcgattagttattgctttgcttgatctgttgttggaaatcctttttgaatgtatttttttttttaatttgcaacgaattattcgtaatcttagttaattcagaggtaggtttagatgcgaagaataaaaattttggatctaggttaacatgttacggttcgttattgatatgactgttatttctttgaatttgaataaattgtcgtgattcttccatttcttctttttacttggaacttctttttgtagatagcaactgttcatttaaatagtatcgagtgtgtgcgtattaatttttactgattttgcgctggcattttcaaaatttcacgctga

SEQ ID NO: 245446 - DNA, 228 bp, Gossypium hirsutum
actttttgattccccgggctgcaggaatttaaacgagagggtctcacttacaagatacgacgctcttttctctcaaaattacaaacaacctcacattgtttaaaatctttaaaacaattaaatataaatacggtcatgatacaatagcaatcatttatgatcttttcatattgttaacattcgactatgagacattaataaatccatgtcgcccctattttcttcgtt

SEQ ID NO: 245447 - DNA, 426 bp, Gossypium hirsutum
gcttctcaatctgggttccaattcggaggcaatcaacttcctgttccttctggtggattcaattgcagttgaaggacacatggttggagtagtaggaaaggggattaaggtcgggtattttatctcggtgtttgttttcggtattcacatacagttgaagtgatgccaaagtgtgtgattaagaagtcatctcaataaagacgggtgaatgacacaccatcatggtaaaattgttcgaggagagagtgtctggtaaaaccgtttaaatacttattttacttctccatacggtaaataaaattctttcacagcatccttgttactggatgcaagggtgagtttatttttctttatatatatcatatacatatatgtttgtctttgttttcactgtagtgggtagttgtggtttctgatcataaagag

SEQ ID NO: 245448 - DNA, 228 bp, Gossypium hirsutum
  unsure (1)..(228): unsure at all n locations
gggagaaanacgcgtacgcgcgcttaagacgcgccccctctttgacttttttattttcctgccaacctggattccggggaaatgggttccttcttccctatcttgcacacttaagaaaacgcaatcatcctcacattttcagatcgaatcctacgatccaaattcacttgctaatctccctacagcaaattgtgtctattagccagtctcttccacctacattatcct

SEQ ID NO: 245449 - DNA, 402 bp, Gossypium hirsutum
gcgctcgtttggtttcataatgcacttgtcatttgtccaaggttcgagggctgggggctgggagaagaagcggatggtcgaaaagaaagctatactcaaacaatttatccgagctaaatccctaccacagtaatgacttgataatccattgcttaaacctggatatattgcctatatttgttcagtttgactaagaaatttggaagttcggttccctacaattcatgcatgctgtcttatagattgaaaatgtacaaattttgttgaggaagtacttttttaatacggaagcgagcctgccattgctgttctaaatattgttaccgataaacttaattttggagcattgaacatgtggtttctgttaaatccaactggaaaagccaccattcatgttgaaaa

SEQ ID NO: 245450 - DNA, 375 bp, Gossypium hirsutum
aaaaaaaaaaaaaaaaaaaaaaaaaaaaattataaaataaaaaaaaaaaaaaaaaaaaaaaggaaaaaaaaaaaaaaaaaaaaaaaaaaaaaaaaaaaaaaaaaaaaaaaaaaaaaaaaaaaaagggggggcctttttaaagtataaaattttatttccgcgtgtttgaaatttaattttttttttttagtgagcccaaaattatattcaatgggcagttttttaaaaacgttgaaattgaaaaaaccttggtttaacaaatttaattcgttttgaaaaaaatccctttttcgaaagttggtttaataaaaaaaaggcccaaccatttccctttctaaaaaatttgcacaccttaaatggaaaatggaaccccct

SEQ ID NO: 245451 - DNA, 439 bp, Gossypium hirsutum
gggagacccacgcgtacgagcagaattgcttcaaacaatgctaaactgttattttctcctgtcctcattgatatgatggtcctgagccttccattataagctaatctcgcggacaaatcaggttttagcctataaaaaaaaaaatgaactaacaaataaaaaaaaatacgaactagaccattaagaaaatttaatataaaacaaatcacccatacaaaaacaaaaatttccttctactacaacctaaggtctattccccaaaccactagtaaacacgcgcggaacatgggtgataatacaaatctttcggccatcttcaaaatatatactcctcaaatatcccaccaaatttctatacactcgaaaagcatttcacacttccatatgggaaaaacatgccatttattaacattattttattgcacagacaggccgattt

SEQ ID NO: 245452 - DNA, 197 bp, Gossypium hirsutum
acttccacgcgggggccgcccctctaaaactttttgattccccgggctgcacgaattcacgtgtgatgatagtatttgattaaggcacatgaatggcaccctacgaagctttatagctcacattatttattttttcatgtaatatagagatatcaaagcctgctcaaattcagggattgtttgagacttcatcacac

SEQ ID NO: 245453 - DNA, 430 bp, Gossypium hirsutum
aaaatccacaaccttttgtacccttcccttttttccttcgtggtaaagtctattgctggtgataccaaactgcccaaatagaaattaccatggttgcacatactttaatattattcatgtagaagaaagaggctaaccattgtttctatgtgtggtttgcgtttatgtgcgagatggccaacccaacttcctgcaggatctgttttatgaatttgcaatctcgaaaaagatgttccatagtttcttctccaattgagcagactagacatgcagcatcgttcctgagtcttcgaagtttaaggatactgagcgtcggaagaaaattgttagcaactctccacagatgtatttttattttacttgggatcaagagattccaaaagcttgtaatataaaactttattttttgatttgggatgtaacataatcc

SEQ ID NO: 245454 - DNA, 357 bp, Gossypium hirsutum
cccacgcgtccgcccactcgtccggtaggtttgaattagcattaataaagttgattcgggcaagggttgggttgtcggagaacatgctcaactcaacactggttgatgctgcacttgtcataacatcaaatctaccattcatctttaagcccacctagatgtccctggtctgttgatgtctctatccttatcttctctatactcttttattcaacaactatatgtactctcttttaattcaattactgctcgtcttgtataatagttccatatcttcgtttatcatcaatttttcgttttttctttttttttattccttctcttatttttagtttacttgtcatattctttttttta

SEQ ID NO: 245455 - DNA, 349 bp, Gossypium hirsutum
cagcatttgaagagggctcaattcctgactttccatccgatcatgttcccaattgcgctcctgtggatttaggtgcttctattcctccagatccttctacctctgaatgtccggtgaatgaggaactggccaaccttgcagttgcttctaatgcaggagttgatctttctggagatgttcctgacatgcctacagaagtgagtgctctagtatcaaatacttctcgagagtccaaacagtcttccactggtgatgacgttaatggcaatggctatgcaagaaagcagttcagagagcaggtgactactgcacatattggtgatgatcttgaggatgggacttgcaatga

SEQ ID NO: 245456 - DNA, 359 bp, Gossypium hirsutum
atgggaagtgatagcgaagcgaatgatgcttgagaaagagggaaaatcgaagaagaagggtttcaaattttgagcacgcaagattctgttggtgtcaacatgaagaagcagctgacttaccattttccatggagaatgaggtcctttttaacgtttgtgctagatgtgttgtacttgatccgatttcccgtattaacttgtatgctgtataactaatatataaagatatatgccaatctgtcatgatgataaaaaaaagataaaataaaggacgaagaaagataacaaattgatatagccagtgactacttaacatattgctgataaaaaacaaaggggggggccgttctaaagattcc

SEQ ID NO: 245457 - DNA, 321 bp, Gossypium hirsutum
gtacatgcctcgcacgctttacaagaatgttctacttaactggatcacctttctctggagcatttccatcattgaaagtgctaaatgtctccgactcatcgagccagccttcttgacattgctgctgctttctgctagcagactacacaattctcgagatttcatgacacacgaagtttggttatgtggcatcttattgagttgacaagaaaagaacttgccctcttattccactggcacaatcaatatatgtgaacccgccgcattggttcaagacccactttaatctttgaatttcctatctacaaccgctatttaaac

SEQ ID NO: 245458 - DNA, 328 bp, Gossypium hirsutum
  unsure (1)..(328): unsure at all n locations
aaaggaacaacggcggncggcgggctcgggaaaggccctctacaacgtttgcatttttcgtgctgccagaattcgcggggctggtagtatttaatcgagcattggactggcaccctacgaagctttatagcttacattatttattgtttcatgtgatatagtgatatcaaagccagctcagattcggagattgctggagacttcatcacactatccaactatcacttaggtactcttgaacttaagtaattggggtatatggcatgtataggattatgggcattgtaatatatagtttggtaatgaatttggtcatgtgaaacgactt

SEQ ID NO: 245459 - DNA, 240 bp, Gossypium hirsutum
accggcggggagtcccaggcgtgacggcacgcgtccgcggacgcgtgggctgtcgatatcgcacagatgtatgagcccaattacaggctgatcatgaacggactcgatgccaatgtttagaatgccaattatcgctctaccgagatgatgcccttatcttagaagatccaaactttctacaaaaccagtggcttctgtcacatacaagattagatgaacactgagcagccacccttgggt

SEQ ID NO: 245460 - DNA, 447 bp, Gossypium hirsutum
  unsure (1)..(447): unsure at all n locations
ctttctcctctatttttcaatgtattatatgcatgaacttgtgataaagagaatgaaacagaaataaaaaatatatatatcaccttcgtttcctgtaaaaatctctggtgtattattgcaaaaatattctgtgtacagtatttttggtatatctctctggtgttttttttctctatgcgtgtgtaagtttttcttgtgtaagtcctttctacagattgaaaagaaggctttgtagcctcgataaaccactacaagttttggaaagaaatctctgatttctttccgtattcgcttcgcatgtctgttgtgattttctttccttttcttgcaggcgaatcgcaaggatttcgttcgagcaccaatgactgcgcgctgatggngccagtgttggattgtagcgcatgacaattctggcgtgattcgggcgccgatggtggcgcgatgcat

SEQ ID NO: 245461 - DNA, 191 bp, Gossypium hirsutum
gtgggtaccgtcgatgctctgtcataccaaagactagaaagttgccgcttgtaatgcaactgcagataagtttgaagagacgttcatgactgatacaaacacgtggttctttacagagctcatgttttaagagttgtattggaaccatgttttatgcttaagctgttatatcgaacaattttgaatttaat

SEQ ID NO: 245462 - DNA, 303 bp, Gossypium hirsutum
gcgcgacccacgccttcggagctttataaaatgatgtatcggatgtggactcacgtgcagactgcagcaggatggctaatatttagggctttggaagcggatgcagtaggggaagaatcgggaaggagcaaaaagtaagcctactatacctaccaagtctttcataaacatgctcgaatagtgcattatctcctgtgcatattgcacatttacaaacgtaaagtaagaatgtttttgcctaatgtgccaggattatcgataattcaatcgaacatacatccaatccaacatcaatacatggac

SEQ ID NO: 245463 - DNA, 336 bp, Gossypium hirsutum
agctagttctagatcgcgaccgttcgacctttttttttttctatagctttgtgtgggttttctgtggcgccttttttatcatggttattcttttccaaaccaaagaccccacggacaccggagccgcagcgcggatgctcagcgccgatatcgtcgccccgctgatggaccgcgacacgatcgacgcgccgctcgacctcgtgaccctgttccaccacgatacggacctgcccgacctcatccgtgccacgctgcgcgcgctgtccgatatcggccgcgccctgggccgcctcgtcaccagacgcatgttcccccacgacctctgccagctgcccg

SEQ ID NO: 245464 - DNA, 462 bp, Gossypium hirsutum
gcagaacacgcgcacgcccacgcgtgcgcttttctgctcaaccgaaccctaatccccttccctcaaacgccacaccgtcaccacaatggcggttagcattcttaggctacgaatgactactttgtagcctcgaagctcccttcaaaactctgatttcggcgaagcaaaggagaaccgatggcctaaacgcaaggtacggggtgtgcgtggcgcgagtacgggggctgtctgctggcgtacggaggcacgggcgtagctgctgaagcgctggagcatatggaggcgttggaggctatctgcggcgcaagcattaggtttagggctaggtttttctgaaaaccttagtattttgggtattaggccattgtatttgggccgtttgggttaatttggttttagggtctttgacttgggttatataattggactttgattattaatttggtttaatctttatggatt

SEQ ID NO: 245465 - DNA, 296 bp, Gossypium hirsutum
gcttgcttcacctaaagaatgaggctgaaactgcagtatacctgtgggaaaacatatggcttgatgggttcaggatctctgctttacccgaagaatgaggctgcactacataatgctagcattgttttcaatacaacatatccaattcctttgtctcaagcaattcagcaaacctggcaagccatatcaaattcagaagtttatagtaagatttctttggatatgcctctaccaattggaaagacatgctaacttaattgatcaatttggctaattcttctatagcttttggccat

SEQ ID NO: 245466 - DNA, 358 bp, Gossypium hirsutum
tcgagtgtacgctaagccggtctttactgagttttaaccgactgaatggaacgatcccgatggtctgtttgcacatgtaccccaacatcagcttagatatctcctgaaacaaagcactagggcaaccacctgctcaattcggtccaatgtaggctctctgaacatgtgacttacgctgcaacatgctgacccgatcaagtcacgtcgggtttctgtgctgtaccgatttgcgaatcttagacctgcatacacacttacttgcaggcaacattcaatacgtattgagtctgaaatcgaacttcatgggacttgattcattgtgaaataacttgaagggtgcgctcctcggatctttatc

SEQ ID NO: 245467 - DNA, 245 bp, Gossypium hirsutum
accccggggcgacccaggcgtgcggacacaggtacatgaggctaatgcggccgcttaaagacttctgattccaagccaaacgatgactacaactcgcttgcctaggagatgctaagaactgaatgggccataaacagatgtaaagcagttctcagggttcaccgatctacgaataatacactcgatgggcatacagttcaagcgaaccggctgctgctgcgagcttgcatgtcgatgggtatgac

SEQ ID NO: 245468 - DNA, 474 bp, Gossypium hirsutum
cacaaaccctgagcgaggctttaagctgacagatgagatactcattaaagcgctggagactatgaaaaagccatgggtatatatttctggtccaacaatcaacccaactggcttgctttacagcaaccaagagatggaaaacattttaagtgcatgcgcaagatttggggcaagagtggtgattgatacttcattctcaggactggaattcgaatatgaaggtaggggtggctggaatctggggagctgtttgtcaaaaatatcttcctctggcaacccctctttttgtgtttctctgcttggagggctgtctctgaaactgcttagtggagcactcaaatttgcctttctggctctaaatgaaccaattctaattgaagcatttcatagctttcctggcttaagcaaacctcattgtacagataaatatacaatcaagaagttgttgtctctgagagaacataaaaggaggtt

SEQ ID NO: 245469 - DNA, 417 bp, Gossypium hirsutum
cccacgcgttcgtttgaacattgtcataacttatctactttttaagcttataaaaccatagaggcaaatgcggatccctacaatgttcaatgaactcattgtgcgcattaaagacgtaaagcagttgctggtttctttgaccttggataatcaactcgacgagcgtatggatcaattgaaccggctgttggatcgtcgctacacactgaagggatttatgagcttcactcctttctactgatggatcacacaagatgaagtcccttggtcatgcacgcctcatccaggattgtcgagaaagcacaaaggctatatgacataatgcctggagctaaggatccagcctgtcttattggggatacatgtatatgcatgaactcttgtgttatgtgactctagattatcattatacggatg

SEQ ID NO: 245470 - DNA, 307 bp, Gossypium hirsutum
gtgaaacagaaacaatcttttgggaaactttaattagtgcagtagagatctttggttgaaaccgaaggtctgttgaaaattgaccgatgtaataagcgaaatctaactatgtgttgcttttttgaggagggtgaggcattgatcctcatttgagacttgtgctgaatttacatcacaaattgctattgctctaatctttgatgttgtgccactgcaccagctgccttaacttctatggctgaatggttcttttgaagttcattcctttgcatctatctttcgaatccttggcgaatatggaataaac

SEQ ID NO: 245471 - DNA, 285 bp, Gossypium hirsutum
gctgatgtcagtttttaggataactataagggataagatttatttgtttcaaaatttgtgaaacagggaggggttcacgtttgaactttttttctttttctttctttctttttttttcactggaggaactacatccaatatttttaatttactttcaaggatatgcaatcataaaaaagttcttatattgttgcctctactgagttggctgctttactcgctttgttattgctttgttattggaatattgcgtgtattccagtgttgaaaaagcttgactgatcg

SEQ ID NO: 245472 - DNA, 387 bp, Gossypium hirsutum
accggcgcggagacccaggcgcgacgcgcacgcagtcggacatgcagcacatgctactaacgatctcgaatcgtttgcagttaaggcatgctgaactttgatatagcatacttcgcgtctgtgtatgggcaacgaagttcctcttcggctcatatctgagtccctttatgatgacgatgatgatttaaaattacaaacagctaagtaacttgagcattttgtttgttccaagagtagattaagtcttgttatcccttctttgttttaagtattaggtttactatgttcctatctcagagaaaaaaaagctatacagaacactaaagatataattgtccaatctgcatgaccctatgggtagaaggccgtcatgaaataaactcaaaa

SEQ ID NO: 245473 - DNA, 412 bp, Gossypium hirsutum
  unsure (1)..(412): unsure at all n locations
cccacgcgtccgcccacgcgtccgtgctttttggtgtaatatttttatttaccatttaggggttttcttttcctgcaattcggatcaaatgaatttaagttttattttgactctttttttggtcgctgctattgaatctaaactcgttatccgattcaaaataagcttgtttagttttctaatgttttttaaggttttcataattatttgacctgatcatgtttttaacataaaaaaaaaagcaataaggtgacgcgttatttatttattagaacaccataccagttatggtatacttcattcgtcttaaacaacatnttaagatactttgctgttttttgttgaatttagtttaagagctcgaagtcttgtttctgcaaaagataatgcggtgctttctcaatgaagaaat

SEQ ID NO: 245474 - DNA, 392 bp, Gossypium hirsutum
aaaaaaaaaaaaaaaaaaaaaataaaaaaaataaaaaaaaaaaaaaaaaaaaaaaaaaaaaaaaaaaaaaaaaaaaaaaaaaaaaaaaaaaaaaaaaaaaaaaaaaaaaaaaaaaaaaaaaaaaaaggggggggccgttttaaaggaccaaagtttacgtccccgggcttgcaaggtaaaagtttttttatggggccaccaaaattaaattaatgggccgtggtttaaaaagggggggaggggaaaaacctgggggttcccaaattaaatggctttgaaaaaaatccccttttcgcaaggtgggtaaatacaaaaaaggcccaaacgaatcgcctttccaaaaatttgcccaccttaattggaaaagggaacccccctttaacgggccaata

SEQ ID NO: 245475 - DNA, 303 bp, Gossypium hirsutum
gcgaagtgtttaacaactgttcaacttgctctttttgcacctatcgtacagcgcacggttctggggctacgtccaaacaaagctcgtcaggcttactagcactttagacctgctaatgctatcccacacatgatccactaatccctatgagcggaccgcagcttagaattcacacagcgactgatgaaaattgaactccacatgcttcagagcatcagaccccaactttactgcacaaaacgaaaacttatcatcttattatgactacgggaatgcacaaaattgtatttgttgctaaccacc

SEQ ID NO: 245476 - DNA, 273 bp, Gossypium hirsutum
acgcgtgcgggattattgcccacccagcagacgccacttattatactgattcatttgatgtcatgcatgcgggacttttagatagcatacttcgcgtctttgtatgtgtaatgaagttcctcttcagctcatatctaagtccctttatgatgacgatgatgatttaaaactacaaacagctaagtcacttgagcattttgtttgttccaagagtagattaaggcttgttatcccttctttgttttaagaattaggtttactatgttcctatct

SEQ ID NO: 245477 - DNA, 298 bp, Gossypium hirsutum
acccgccagcagacgccaggccgacgcacacgtgcgctacttcattggaatcggactattttgtagtgaatcacttgtgagcgcgtgggtgctacagcatgtatacatgattttgcgaggtagaggtaaatcagtggacctgaatcgacaacctgcagaatgagaaaagacggctgtcacgcaacgtaactgacctagtagcacatacgagatttgccagatggcgtagtgctaaataggtcatatcctatcggccttgccaagagttgcgccggatctatggctaatgggaccctcg

SEQ ID NO: 245478 - DNA, 329 bp, Gossypium hirsutum
cccacgcgtccgcccacgcgtacgagccctctgttgtatattgtttcttcttctactctgatctgtttgctttgattaacgagacgtgatgatgatttggcattattttctcaccaggatgaattatgttttagaaattctattattctgtgtgtttaaagataactacaacttcttctactaaggtatcgtttatgctgcacccaatatgggtcggctgccgctacaatgtggtgacagatgatgtatactatgactacgctgccacgggggcggccgttttgaatggtccaagtttataagcgcttccgtgctcagttttatctttt

SEQ ID NO: 245479 - DNA, 364 bp, Gossypium hirsutum
gcggaatgggtcaaagtgcatgccatctgctatgtgttaactatgaggctacaggcccgcatggagcaatatgcagaacttagttagctcatcataaacaagggtattgagccctaaaaagaagttgctctacagatgctagaatcacgtcagtcaaagtttgcaaattaggaagctgggtttggatatgctaagacagctttctttgaatcatgatgatgtgtcgttattagagcaagacggatattatgttgaagctttacgttatgcacggaagcataatgtcactactatccggccatcattatttattgaagcagcatttacctccaatgacttacaacatctagcatcggttttgaga

SEQ ID NO: 245480 - DNA, 350 bp, Gossypium hirsutum
aattggagcacactgacggttcctactagtggttctgtcagcttttttccattgacctgcaccgacgatttttgggcgcgctcgttcattacatatgttcacgatcttgcccttcaacgccgtcaagcccttcaccgtcgcgacgagattcgtcactagatctgcgcggcgctgatactgcgcctgcacatacgcccatttcgccttgacattttcctctacggtcggtacgctgtttagtccaaacgccgagagcgacagggcatgctatcggctcgagtgctctacgaaactttatggggaagcaacctacaaataccatcaacggtgtgtcttatacgatgcctaca

SEQ ID NO: 245481 - DNA, 380 bp, Gossypium hirsutum
gtaatacccagatttgtgacctatggcttgtatccaatttgatggccaaaatgtttgcagactgggaccctgctttctcttatgtttaaacacgacggaatatgtcattctttgtcttattgtgttttcagatattgagatgacttttagcgatgtgagattctttgctttcacttaaatcacccatttgtgctagagccttttcttggaatctttgccatatcatgaaggtccagtttttctttttaatgctgcttcctagagtgtgggagttggtgtatatattcatccagaacaaatttttaggggccgaatgaaattttaattttatataatctatatatttataatttataaaggattaaatacaatctttataa

SEQ ID NO: 245482 - DNA, 342 bp, Gossypium hirsutum
cccacgcgtccgggagaacggagaaatggaagcatggatttttatatctattgacaaacatggaacaattaattatgaaagcaatattattatgtttatccttttttacattttgtaatttgtactttctagccatgctttgttcctagaaattagagattaaacgcagtttgtctaaaattgtggtttgaaacttcaaaaattttgattttcagctttacatgcaatgtctggtacgacttgttttggcaacacagtagttctattggttacttgtaattatgctcttgaaaatattaatgtatcttaagagtttaaataattcagaaggttcttagaaca

SEQ ID NO: 245483 - DNA, 301 bp, Gossypium hirsutum
cgagcggacgccagtgcgacggatacgtgcgcaatcgcatcacactgcccgtcgtcactagtggatccaagcattgcactggtggaatattttgattattgaaagctgtctagataaatgtgtcgttcaaactctattctcaaaattgaaatactagagggccaatgttgtgacacattaacctcatgtcgagctctgttgagttgaaaagcgattttattgcttaacaaactatcgatatccttgtacctgagacatgagatgacttctgctgcgtctataatctgagcactgataaaca

SEQ ID NO: 245484 - DNA, 286 bp, Gossypium hirsutum
cccacgcgtccgaccacgcgttcgcccacgcgttcgtaaaattttgggatgggagtgagaaagtggaaagtgttggcagacaagatgtaagcagtctgagaataaatagaaattaagttcattagtaatgtgctttgtattgtatgtttcactttaatttgattccttgagtattttacagaagttattatggttcgtattagttttcattatctatccttgtaaagttgatgaaacagcctgtaggattgattatagtataccatgttgtaccattacctgattc

SEQ ID NO: 245485 - DNA, 155 bp, Gossypium hirsutum
tcatgataacatatacttctctgcttctaatgttaccagatctgccgcgattgaagcggacgagtttatctgttcgaagcctacatacgtggcgcggattaagctgctgctcttgcttttgaagccataccacgtactttggcacaaaattgtgg

SEQ ID NO: 245486 - DNA, 265 bp, Gossypium hirsutum
  unsure (1)..(265): unsure at all n locations
cacactgncggttcctactagtggttctccgcgctttttaccgcagaaccggtgggcagcttattggggctcaccgtctcctccaataactctcatatcacgatcaagtctatcagcgtcacatggcgctcgcctttaaacatcaccagcgtctttcccctgatatttaagttcaaaaattcttctcccctcaatcaatgccatttgctcaccccctcataagccactcccttctttacaatctcgaacccgacctttcccctaa

SEQ ID NO: 245487 - DNA, 248 bp, Gossypium hirsutum
cccacgcgtccggtttgaatcagtagtgtttttgtgtacctcaatgccaatcatggttttctgcattgacttttaaagaatctttgatgccaactgatgtttttttctttcccaaataaaggtgttcgagacttcataccgtcaaaaaaaaaactaaaaaatgtaatgaacgtaaaagtaacgctttagacgaattgctgcaatactgattagacaaataactcgaggccagtctttttaaaggatcc

SEQ ID NO: 245488 - DNA, 299 bp, Gossypium hirsutum
gagaaccaggcgcgacccacgcgtatgtcttttatgacaacatatactactctgcctttaatgccccaagactaacgtggcttggaagggcttggatatacatgctcagtcaggataccatcgcattacagaaacccccccagaggctagaacatacaccggctcctaaacctccgctggaccttgtaaagagggtgccgaacacccgtccacggatcgatgatgggttaagatcgtactgtgtgctgatcgaatgctaatgtaagcctgccgctactctgtggaagcttaccagaaaa

SEQ ID NO: 245489 - DNA, 198 bp, Gossypium hirsutum
tgataatatatagttatagggacaaaagtgaatgtttccttacaatgctgaataattgtggtgatatctctaaccaaacagcctgttgtaagctatgaaaagcttagtctaataggatgattaccttttgttatgctttaggatataatgattgcttcaccagcggagttggctctaaaacaaaaataacactttacc

SEQ ID NO: 245490 - DNA, 455 bp, Gossypium hirsutum
gtggaaatgcccacagtggtactaagaaaaaaggaaatgcacataagaggatgaaaggctctatgctgcaagctaagccctgggaacatgttgatcatgtgattatgaatcttcctgcttctgctttactatttttagatgctttcagagctattatctcaaggaagaactggagagggcctcttccattggttcactgctattgcttcatacgagcaaatgaaactcaagaatttataatatcagaggcagagtctgccttaaatgccaaaataaaagacccgatgtttcataaggttagggatgtcgctcctaacaaggcaatgttttgcttaagctttaggctgccagaagcatgctatattgaagacgttgctaactcgacctgtcataatacaggtggattatgagttatgatctcaaaaagtatccaattttcttctagctcttcaact

SEQ ID NO: 245491 - DNA, 436 bp, Gossypium hirsutum
gaggtactggtgaaatatttaaagatggaatggacctccataatttcgttaagagagcattgcctgaaagattatcccaaatttgggacataataaaaaaaaacaaaaacaaaaataaaaaaaatacacaataaaaaaaacaaatataaaaaaaaggaggaaaacatacaattataagctaaaactgcctctatacaaagcaatgtgaagggaaagcacgacacattgaattgcgctactgttttttactcaatagaatcagagtcggaacttttatcgatcagatttatgttaaaaagattgtatcatacagatacatacattttgggaagatgtttctgtatatatcaaatgagcaatttgtacatgtaataatgtaccattagaagtagtagatatatgtcctgtcaaattagtgtatcactttcatgaaaaa

SEQ ID NO: 245492 - DNA, 327 bp, Gossypium hirsutum
  unsure (1)..(327): unsure at all n locations
gttctcagctggaggccagagctgtttccctcaaagtcagctgccctatctgcaagattttgtagaccaggagccctaatgggtaggaaagagatctgcaagtgcaattagctaatgaaaaacaacttggtgatcattatggctccaaacatccaaaggaaaaccctcctgctgtgtcaagttgattgctttcttcccatgtaaaagaaggaaaagaacaaattatcttttcctgtgtgattctagatattgtatgttaaccgtctttttaaaaaaaattttaaaccgntgtagaacttataaaaaaaaaaaaatgactttttaaag

SEQ ID NO: 245493 - DNA, 429 bp, Gossypium hirsutum
tcaaagtgtatattgaaccatgcggtaaatttgttaattgtatgaggataaattaatgctgatctaaagaacaattggatgttgctattaatgttattcggatctaagataagtcatgggattgaatgtaatgtttaattaagctatgagaagaaatatatgaacaatgtataaaaggattttgtttttgcctgctggtgttacattaaggagttgcactgtccttgagactgctggcaatggtgctcttcccgtgcttctcaaggtcttggaatctggcatctcagggattgacaccaaaaacgaacttgttatatggcttcacttgggggttgatggcggagcacaaaaatttaccctcgaacagcaggctgtaaatgaagcttctttcttttgtcctgatgaactaggatggcaaccaatgcgaca

SEQ ID NO: 245494 - DNA, 239 bp, Gossypium hirsutum
aaaaaagaaaaaatatatgagagatttttttatgtaaaaggaatttttgtgcaagtgaaaggtaaaagaggaaatgggcgggtgacattaagggtggtgtttgattggaacaaggcaaataacgggtttatgagttataacttgacgctgttaggaatcctaaaaaggagcttcagtatagaaatttggttgcagtgaactacacttttcgtgtaatatatcattatgatatttctttt

SEQ ID NO: 245495 - DNA, 429 bp, Gossypium hirsutum
gcgtggacagcctttctgtaactttttcatttcatgcctggtaatggcctttgtactgccgtggttcttccgtgtgaatatgttttagcaaaggtgtgaaccggacataacgttcgtcctctgcaccaccttttcttgccttcctgtcgggtcagcttctcctgtcgaatttgaatggatatgaaataactcgtcagtgaagctacattacgggttgtttccggttttcaatacccatatagacaaaccataaagattgagttttcaaatttcagaagtagccatccatgccccaattcttttactgtgacaaaattgtatttgctgcttgcaatattacttgtttggtatttgtgcctttcagcttaaagtcaaagcttaagcaaaagatggcttcggctgtataactgtattacagtgagaagtttt

SEQ ID NO: 245496 - DNA, 296 bp, Gossypium hirsutum
cgattgtttgtactcggctagctaggcggctgatggctccagcatactaacccatgggagtgcgtgagccattgaccgtctcagatgcacactctcggttctgataatgtcccgcacagggattgtctcatcattgggaaagcgacctcgcacttgaaccaacggatgatcgtcgtggcccttgttttgatgaaagtgagccgtaacgagttctcgaagacttctgcgtatagacagttttgtcgagattaccaaaaggtggcttgccacgtgattacgcgatgtgcgttggacat

SEQ ID NO: 245497 - DNA, 316 bp, Gossypium hirsutum
catcgttggtgccgggctagataggcggcttatctgtccagtctcctaccccattggagtacctggaccatcagtccgtgtctatgcacactgtcacgtctgataatatcccgcacacggatagtcgcaacattgggaaagagaccttgcacttgaaacaacgaatgatcatcgtggaccttgttttgatgaaagggagctgtaacgagttattgaagactgctgcgtatagacagttttgtcgacactaccaaacagtgaattgctacgtcatcaagtcatctgcgtgggtcatggtacatgctccatagatagc

SEQ ID NO: 245498 - DNA, 194 bp, Gossypium hirsutum
gatctttgcatggtcagaaatgtggaacatacaagataagatgtgctggatgcttgtcgcatgtcatgagagttatcgaacggcaaagttgaaatataaagcttgtgcatgattactctaacatggaaatcaagcaacacaaaaaattgatatgggctatttctcggccaaccgaccaacacattcaagtgaat

SEQ ID NO: 245499 - DNA, 267 bp, Gossypium hirsutum
atgaaaaaaatattatattacaagctttatttgtctgaggaagccaatactaactggtgaaggtgatactttggaagaactgtgctacaccttactgtcatgtcctttacttgggtagatggtaaaacctgtaattaaactcaaacctacaagcgcactctgtgtatggcaagggattatgctgccgatcctttaaccgaaaataaaacgagagggtgcgactttctgcaagtgaagctgttatatatacatctattattagctcaa

SEQ ID NO: 245500 - DNA, 218 bp, Gossypium hirsutum
agaaagatgtgtattccgtgggggcactggttcacgaaaaccttactggtaaggtcaaaaaggtggttggaaggttaaaatcccaattccgggggcccaaattcgagccccaaggtacgggtggtgggggccataacttaaccgcttatgaatccttggcccaattctgggtcccttgggatggccgcaaggcttataatgccaactgtcgatcgtgt

SEQ ID NO: 245501 - DNA, 434 bp, Gossypium hirsutum
  unsure (1)..(434): unsure at all n locations
tggaaaaattttgaatgttgaagttgtggatggaggactagtatgctcaagtggcgtgtatgtagaagaaatgggagataagaatgatgattgttacatagttaatgctgcagtttatgttggttactagttttattcccactgccatcttgagagtttctttcaagtatttggaccatggcatcaagtagacttcagtcttcgggcgcctatgctgaaagttggcatgcttttgacggagaatatttgtataactgcaccatctttatttcctgctgcttgatcctatgtgatgcttttttttttttttgtggaattggtgatttttggaacaccctattttccctagaagaaacaagtataattcttgttatacacgaacagatctttcagacaataataattaattgctaaacatattgcctnnnnnaaaa

SEQ ID NO: 245502 - DNA, 310 bp, Gossypium hirsutum
aaaaaaaaaaaatttattaaaaaaatatatttctaaaaaaaaaaaaaaaaaaaaaaaagggggaactttaaagggggggggccgccacttctttccacccaaaaatacaaaccctcccgcccgcaaagcatatctaaaaaaaagggctaccctttccttaccaaccaatctttccaaccctaccatcccaaacagcaacacttttatttaaacccacctaaccctcctcactttccaatactccacaacatccttactgaaaaaactatctgatcctcccccttaccctccacatatcatatcccaatat

SEQ ID NO: 245503 - DNA, 349 bp, Gossypium hirsutum
  unsure (1)..(349): unsure at all n locations
gaggtactgatgaaatatttaaagtttgtatggacctacataatttcgttaagagagcgttgcctgaaagattatcccagatttgggacanaaaaaaaaaaaaaaaaaaaaaataaaaaaaataaaaaataaaacaaacaaatatttaaaaaaggaggaaatcatacaattaatgggtaaaacttactctatacaatgcaatgtgcagtgcaagcacgacacattgatttccgctactgctttttactcagttgaaacagagcgggaacttttatcgatcaaatttatgttaaaaagattgcatcataaagatacatacattttgggaagatgtttctgtatatatcaa

SEQ ID NO: 245504 - DNA, 192 bp, Gossypium hirsutum
aaaacattgcccgatgttattattttcttttctgcgtgagccgaggatcatacgtgttggcatcatgaaaatcgtgtttaatgcacctattaaggctcacaattatgctcaacctcatttccaaacaactggatcaccgacggaatttatataccgtttctatttcctttttgactgcaaccttgtgacaca

SEQ ID NO: 245505 - DNA, 286 bp, Gossypium hirsutum
cccacgcgtacgcttattcttgcgccctttcttgtttctataaagacacaccctgaagcgaggcggcctttaatatgatcgtgggcgccatccatgaatctcgacgacccaaatccgaattcaactctgatgatggccgaagctcttaatactagcaaacttctgcggactgaaacactgggcatggtcaaaggccggaatttaaccattaacatcaacctaatttcgaacccgagcggatatcagaatttgagcaaactacaacaactgagtttgcattttagaa

SEQ ID NO: 245506 - DNA, 405 bp, Gossypium hirsutum
  unsure (1)..(405): unsure at all n locations
tcaaactgtatgttgtcccatgtttctttcttgttatttgtatgaggatacatgactgctgttctaaaaaacaaatggctgttactactaaatgttattccgatctaaaataattcatgggactgaatgtaatgtccacataaactatgagaaataacacttgaactatgtatagaagcaaatggcttttgcctgctggtgttacattaaggagttgcactgtccttgagactgctggcaatggtgctcttcccgtgcttctcaaggtcttggaatctggcatctcanggattgacaccaaaaacgaacttgttatatggcttcacttgggggttgatggcggagcacaaaaatttaccctcgaacagcatgctgtaaatgaagcttctttcttttgtcctgatg

SEQ ID NO: 245507 - DNA, 239 bp, Gossypium hirsutum
aaaaaagaaaaataatatgagagtttgttttatgtaaaaggaatttttgtgcaagtgagaggtataagaggaaatgggcgggtgacattaagggtggtgtttgattgtaacaaggcaaataacgggtttatgagttataacttgacgctggtaggaatcctaaaagggagcttcagtatagaaatttggttgcagtgaactacacttttcgtgtaatatatcattatgatatttctttt

SEQ ID NO: 245508 - DNA, 181 bp, Gossypium hirsutum
ttaaataaacagggcctgcactctatcaaaacaacagtttcaaaaccacttcaaacgacaactctttaactgccggaggcgacaacaaatttaacctaggtcaacctaataaacctaaaacacttctttaccagacgccatatttccggatatagcaaatgatttcatggataaagggttt

SEQ ID NO: 245509 - DNA, 344 bp, Gossypium hirsutum
aaaaaccggcgcgacccacacaaacgattgacaaaaaaatttctgagaatttgttttttacccgcaacacgaaaaagagggctcgggtattaaacaggcgagcggccaccacaaaaaactaccaacaagatcccgcaacacgtgtcaagaagctattgccacaccggaagctgacccgcaacaaaaaccaccgcaacctctagggcactctccactaccacgacaagcccgggaatctcaatctccaaaacacaacatagtatcgcaccacccagaccacctcccccactcctacagagcaacaacaccttgataaccttctcaccccttccactaaacaaaac

SEQ ID NO: 245510 - DNA, 345 bp, Gossypium hirsutum
cactcttacgtttgttcacctgcttgatttttaaccccatcgaattgatgtttggtgcgagaaaaaaacaagacggccgcccaaaaacaaaaaaaaaaacaaaaaaaaaacctccacgtgctcaatgcaacccacacaatattaccccttcaccccccctcattacactgcccctaataccactacactgaccacctttacaccaccccggggccccccccctaaccttgacccaacccaaacttaccccccccttccaccgcttatcaatttccattggccccccccaatttcaatcccccccccccttttttcccccccggcgcgccccggaaaacccccccc

SEQ ID NO: 245511 - DNA, 176 bp, Gossypium hirsutum
tatgttcaaacacacgggtatatttggattcctgccgccttatagaaacattatatatatttatatatatatatagctgcgacatactattaccattgtcatcataaaaagaagttgtggtttgtaacagatacaataaaatgctacgcctaacagctttgaactttttcctttaa

SEQ ID NO: 245512 - DNA, 285 bp, Gossypium hirsutum
  unsure (1)..(285): unsure at all n locations
gacccacgcgtncgaatgaaaaaatttattttaaaatttcgtttnttcaccacgaaaccaaaaaaaaaaggcggcgttattaaaaaaaaagggcggcgacacacaaaaaagacatatagaaatcaatggtgagatttaataacctgtacatagacacaattcatctagcgttcacattgtaaggccttggaatggtattccgaatcaatactgaaaaatgtaatgataagaagcgttttccttccagtgaatctctaatatatatatcttttattaccctaatcc

SEQ ID NO: 245513 - DNA, 527 bp, Gossypium hirsutum
  unsure (1)..(527): unsure at all n locations
aaccggcccgcacccacgccgtccgnnggaaaaatttntgaatggtttaagttgtttattttgtttgactagtatgcatcaagatggcgtggtatgtgtttattaannatgggagatgaaggaatgatcgatatgttacccatagttaaatgcgtcgcacgtttattggttgcgttaccttagtnntttattacccaaactgccanttcttgagacggtttctttttcaagtatttnntggaccatcgtgcatcnnaagtagaaacttcagtnncttcgggccgctctattttgcttgaaaagttggcattgcttttttgacgcgagaaatattttgtattaactctgcaccatctttatnttccttgctgcttgatcctttatgtgatgcttttttnttttttnttgtggaaattggtgattttttggaacaaccctattttcccttaaaaagaaacaagtataatttcttgttataccacgaacaggatctttcaagacaataataattaaattgctaaacatat

SEQ ID NO: 245514 - DNA, 230 bp, Gossypium hirsutum
  unsure (1)..(230): unsure at all n locations
acgaacccnaanaagagccggcgccttaagaaggggagaggccgtaaaaaaagaaacgtcacgctgaggatgacggggagaatgctgaagttaaacaaaagaaacagaagaagcgaaagcatgccgaagaggaagaacctgaggtgcagaccaagaaagagaattaaaaacaaaagaagaagaaagatgaggttgaagaagactaataattagaagagggaaagaaagaa

SEQ ID NO: 245515 - DNA, 377 bp, Gossypium hirsutum
gccactgctctcctgcaaaaagcggctctatgggatctacaagaagcaaccctacagtcactaacagtggattatttgggttaatgagctcacccccttcaacaattccgagccccatcaatgaccacaacaaaaatgaagcttattacaagctgtttaagcaagcaaatcaatctgagaacataaacgaggtagtgagttcattgccttcaacgcaagcagccatcatcaaagatgggtcatttgtcaataacgcctccatgaaggcaaatgaaagacaaggaggccaagcggttgcatcaaagctgaacacaaatgcaaatgaagtggaagcaagcttaaccagggactttcttggtgtgggaagtcaatcaagc

SEQ ID NO: 245516 - DNA, 321 bp, Gossypium hirsutum
  unsure (1)..(321): unsure at all n locations
aaccctaaacattcttcccccacttatcagatcaattcgcagagggctccccgcgcncactttcactacgctcaggagccccaacaccatctccaactccaaaaatgtctggagaagaggtagccaatgcccaaccagaggcaccccctactcttggagagccaatggacatcaacacagccacgcctctagtggcgaggaaatcccaagctccacgtgagcttgctcgtggctcacatgaagcttccaaggcaattgaaaagctcaattcacatctatgagacttggccaatgacagaaaccaacctgttataaataatc

SEQ ID NO: 245517 - DNA, 362 bp, Gossypium hirsutum
gatgaagaggtggttcgatccatggccggttttcttcaagagagagttcaaccggacgtggccctttcttgttggtttcgctgtaactggaactatcatcaccaagttctccctcggtctcactgaggaagatgcgaagaattcgcctttcgctcagaagcacaagaggtgatcccaattgaattcaaatgctcatctggtttgaggcttttggttgtttccactcttttctttttttcaattaactacaaaaataacataggacatcatcagttgtgagtattctactctagttatgaattggtattcttgtattgccattaaggtttttttgcctttgaacaatgttaaaacaccttttt

SEQ ID NO: 245518 - DNA, 373 bp, Gossypium hirsutum
gaagggtgtaaatatataagactggattatataggcaccccagaagctgatgaggaagttccggttgccggagaatgccaatgtggcagccattacggctaaatgtgaaaatggggttttgactgtggttgtcgagaagcttcccccgccaccaaagcctaaaactgttgaagttgcgattgcttaaaaggatctagttgtttggggggggatagaaaggttaaattatagagggctttcaagtttctcacctttgggaactggagatcaaacaatggttgatgtatttaggtgtggttcatcagcatgtatttttatttgcagtgtaatttgattgggtggatttgcttcttctcagtctacagtcttttct

SEQ ID NO: 245519 - DNA, 203 bp, Gossypium hirsutum
  unsure (1)..(203): unsure at all n locations
attttttatgctgtcgcagtgtactatttctgtgtcaaaaatttgcattatccttgggatttcaaacccaagtgcttattttgttattacatatttggtctccctttgtttattttcattcaatctgttaataaaaattttaggttttggcttantttcaaaaaaaaaaaaaaaaaaaaaaaaaaaaaaaagaaggacgnacg

SEQ ID NO: 245520 - DNA, 367 bp, Gossypium hirsutum
ctttgagcttagcattgaagattgtttttcctgaaagagcttggtcgaatatgtgctgcttcgttttcgatgtttgaggaagctagatggcattctacttggataaaatttctagatatcacggaattgtgttaaacaattagcattagtgggaagctttgaggagaaccatggctacattgttttcgttatggaatcatcttagacgcatgtattcacagttcacacacccgcaaaaggtgtcgaaccttgaagataaggggatgcatatgcagatgctgaactaacttgttaggccctaagttacatatgataaatcaacctcactgtttgcaaacctcttctttaatttgtggggatatatatg

SEQ ID NO: 245521 - DNA, 387 bp, Gossypium hirsutum
gccgtaaggataattctgaaaagcttttgcattatcagagagaagagttatagaagaggatcaagaatcagcagcgcgttgggattttaccttaagagttggtcaatgctctcatataacaagggatagttttgacgagaatttcacatcatagtataagcaaagcaagcatgaagattttagtatcaggagaatcctagtcctaacatatgcttttgaattaaggataaaataactttaacttcatggaattcttattcttagtcatacactgaaaggcagcctatcaatttgtaagtaaccattattcaccattatctttggaatttggtaaccagtttatcaacagagagagcgctatagaaaactgcaagatgaatgttagta

SEQ ID NO: 245522 - DNA, 394 bp, Gossypium hirsutum
atcgttactgagtcaattgctccactaatcccaccaaccagaagtgaaggaaaggagagtaatataagaacatgggtgattgttgcttctgttgtgggtggagtggcattgctggcattcttgggattccttgtactctgggcacgcaaatgcaagcggagaaagaaaatgcaagagatggaaaaggctgctgaagtgggagaagcactacatatgacctccgttggggatacaaaagctccgtcggcaacggtcactcggactcaaccaactcttgagaacgaatatgtgccctaaccctccctctgtgatatacgagcattttcctgttttcagtaattcttctgttcacagcctcacacccattcttttttttatggccgtttgttctttg

SEQ ID NO: 245523 - DNA, 162 bp, Gossypium hirsutum
  unsure (1)..(162): unsure at all n locations
attccttctnaaccttcctctncaccttatgttaatncgnnccntcataaatatgcgactattattggaatgtaggtgcacttaataaagtgtgtgaatttgtatggtatcttttttactttctttcaactttgcatctatttagtaaatattaataaggtt

SEQ ID NO: 245524 - DNA, 127 bp, Gossypium hirsutum
  unsure (1)..(127): unsure at all n locations
ccggtttcggaattacccgggctcgacgccacgcccgtccggtcggagaagagaagtgtctcannacatctcctttatcctctnngggacccgnnggtcacaagaagggtgaagggagtattgttga

SEQ ID NO: 245525 - DNA, 299 bp, Gossypium hirsutum
  unsure (1)..(299): unsure at all n locations
gattttcttcattctcatttntgggtggaagaaacaaccaatagtanaaaacaaggccggatttaaagaaacatcggagggtaaaagaagcantggataaaaggctgaaaaggcggagaaagaagaagctgctgccgctcctcgccgaaggcgccgtgacaattgagcaaatcttaaaacaaaggtggctggtggcgactagcaagttgagttttggctaatttttgcactggaggtggttttcgtagctgagatattatttgcctttggcattattttagatttacttactgaatatt

SEQ ID NO: 245526 - DNA, 404 bp, Gossypium hirsutum
cgtattattctcccggatggcggacttgtgctgcggtggcgattcaattggcttggaggcggtacaaacaccggttgacccttacgtcgttgtcattcattaggcctcggaggccgttgtcgagaagtaattcattgggggaggacagactcaggctttatacagctatgttaacttcaccaaaaccaaatcaagatgattttgatttttgaaaataaaaaaaaattaaaatgatgctacatggaattcccatggtccttaagtttgagttttctgaattaatgttcgctctaataccatttgtaagtacctcgtatttggtacgagagcattattctttacttcgactcagcctgtagttttgtttttaaaagaaaaaaaaaagtttgtttctacagctatat

SEQ ID NO: 245527 - DNA, 359 bp, Gossypium hirsutum
accacgccaacgactatgacaacttctttgttcaatacgatgtccaagctgctgcggaagctgacactaaaggcgacgctaagttcgctaccgatgcggctactgatgccgctgctgaagccgatgcttgcagcaaccgatccaaaaaccaacccaaggctacaatctatgctagccacaaggttgctcatgatcttgctgctatggttgatttcatactacaagtactactaagagtacgaacaaatgaatgaactgtctaatgccatgtaaagggctatacagatgtatgttcagatgtgttatagatgttatgaaaaatggatgatgagtgaaatgatttgtggttttgtttaaaa

SEQ ID NO: 245528 - DNA, 260 bp, Gossypium hirsutum
  unsure (1)..(260): unsure at all n locations
cgcccacgcgtccaaaatcatctggggggttaaaagtgcatgttccgtcctgtaaaatggtgattatatgtgagagatgtggctttgcggtnaaaaaaaaaaaaaaaaaaaaaaaaaaaaaaaaaaaaaaaaaaaaaaccacaaaagaaaaaaaaaaacacacttccaaaataccaaaaaaccaaaaagattgctgacaaaaattaacaagaagcttgccgtgctccagaccaacatcctgagggttaaaccctgactgt

SEQ ID NO: 245529 - DNA, 170 bp, Gossypium hirsutum
tggtgagcttgcgtgaaaatcccatagtggattttagagaagagatggagaaatttaggaggaaagaatttagtaaagtgtgagctgtttccagatatctgaatcctgctagtagagctgtcttgttgctaatttggctaataataataataataatttgttcttgttct

SEQ ID NO: 245530 - DNA, 362 bp, Gossypium hirsutum
cccacgcgtccgaaaaaatgggcagacgatatggagaagagggagagaggggagcgggcatggccgattacagtgttcatgggcgctcaacgcctccaccgttgcaccaatccgaagccactcgaactgctggtacagggcgtgtgtacgagggctgggtgctggtcgtacggaagctgtgctggcgcggggcgtgggcgtggcgccaggaggctggggcgtacggaggcctggagctgctggggttgctggttgcggcgcgaggacccctctgccctagggtttgccaaaatcgggcttaacctttgggccgtttagggtattaggttaaatcatttaggattttgggctattgggttgta

SEQ ID NO: 245531 - DNA, 142 bp, Gossypium hirsutum
  unsure (1)..(142): unsure at all n locations
tcgcggccacatgctttatccgatgcccgcaacgncgcggggagtttttttaaccttatggtgtacaccaaaaccatnacantgtttgttattgaatgactcatctaattttaaggatgcattgctaataaagcctattaca

SEQ ID NO: 245532 - DNA, 290 bp, Gossypium hirsutum
  unsure (1)..(290): unsure at all n locations
cgcagggctnggttcggactttgttaggctttcttccggagatgcttaaaaacccatttgaaacgagagtttttgcttttgtttgtgaaaattgttatggcttctgtgttttccgttttgtgctaatcaattctgtaatttttccatcagtaaatgtgatgaatgttgcttcctttgacagataaccaaaaagagtaactataaaaaccaataaaaaactataaaagggcggccgttgtggaatctatagactttctcttcctcacttgctactggttcatttttttttt

SEQ ID NO: 245533 - DNA, 229 bp, Gossypium hirsutum
  unsure (1)..(229): unsure at all n locations
cccacgcgtccgcacatgacaatcatgntttattcagttaatgctgacgtggtaggggattaatgaaaacacgtgtgggttacatacactccccaatttaggaaagagaaaaagggaggtttcaaagcatgatgagcattgagacttgttggccttagtgtatacaaagaatttgtcattatttcatggatgttttgttaaatggaaatttttgtttgtttttggttgg

SEQ ID NO: 245534 - DNA, 264 bp, Gossypium hirsutum
  unsure (1)..(264): unsure at all n locations
cccacgcgtccggttggtaattctaaattactctgttactgtttggtttgggttctgtcgtttttgatcgatgttggggctgttctcttaaaagcataaaaatggaatgaagtatcttcttttcaaaaaaaaacaaaaacataaaaaaaaataaagcaaatataaattaaaaacaaaaaaaaattaaagtacaagcccacaaccaaatttcaaaccttaaagaaaaagattaaaaaaaaagnatggggcggcctttttaaagaa

SEQ ID NO: 245535 - DNA, 363 bp, Gossypium hirsutum
ggctttgaagactctcctgattgcatgattcctgaagcagattgtgaaggcatgcgtagactttataaagaaatttgggtgcacctaaaatgaagcaaatcaggacagttgagagaaatagatgatgaactcatgtgagtctacaaacatagtgtaaaagatgaattacatgtatagtatgagcataaaagaaaattgcatagctccctccaatttatggctttgattcatagttaatgttttcaaatttgtatatcgtccctgcttaggggaaaggtttcctgttagacaggagcaataactaaaaatggccttttcatttgtcaaaatttctctagagtggggaaaattaccaacgttttt

SEQ ID NO: 245536 - DNA, 215 bp, Gossypium hirsutum
aaaaaaaaaaatataaaaaaaataatactatacttgaaaagcgtccatattaaaaggggcattttataaaaacgcttgcaggcacctaaaattaatacaatcaaaggttgcctaagattcaatgtacgaccagcagttttacaactgttatcgcttcgttacccgacccacctatcaccaaaggtaactatactctctcactaatttccgatact

SEQ ID NO: 245537 - DNA, 377 bp, Gossypium hirsutum
cacactcctggagatgtgatttcaatgccttcaatgcctcatagtggcagttcttccaagcctttgatgatgtttggtgctgagggtgctggtacacttgcatcaccttcaaatcaattgtgggatgataaagatcttgaattgcaggctgaaatggatcgatttgtggaggatggatctcttgatgataacgtcgagtcttttttatcccatgatgatacggatcctagagatgccgttggccgatgtatggatgtaactaaaggtgtataaatattacttgtatggttgctatgataatgataaagtctatcgttgtcgggaatctattgtagcgtattttttcaaacattgtagtttcactctatttgcttttt

SEQ ID NO: 245538 - DNA, 339 bp, Gossypium hirsutum
accggacgaaggagaattaggggagccgatttcaatctatcttaacaccattcaccttgcgcccaaaagcgaaggaagtggcaccttcattcactgcactttagacttctagatgttcgggagatggattgcgcatactgggactatgctggggtcagtccaacatatctctaaggacatgaacgcgcacctcacgcaaacgagcttaacagtatcacatgctgatattgtcgccgctactcgaagcacagatcaaatactcgagtgcatgaaggcacttgctttcatatgtatgtcgaactgaatatgcctggacagatcaatatacaatccaaggga

SEQ ID NO: 245539 - DNA, 211 bp, Gossypium hirsutum
tgaattgaattccagtgagatgaatccatttgacagcacgaaagagttgtggaggacgaaggaccctccattataaaagtacaaacggctattcctagagtatatgatgacactgacacgaataacattaagttgctcctttaagatttgtatttcttagaggcgaatttgagttatttattattggtgatgcatcatcgccgttaagatt

SEQ ID NO: 245540 - DNA, 338 bp, Gossypium hirsutum
cccacgcccgtccggcagaattcagaattggggtttgagattttactttattaaaacagagccaggaaaactcctacgggtggaggagcattcaaaaactacactgggttcccacgaatattgagataagattgctacgaacgtcatgatgacttgtaatattcctaaaccatattcaaaaatgtatagaaaaaaatgggggggggggagcgtttttagttatcaaagactttgtaccggtgctggacaaatttaattgcttttaataggggccccaaattttagttgggtggggctagttatacaaattttgaaatggaaaacacgtgggtgtcccc

SEQ ID NO: 245541 - DNA, 411 bp, Gossypium hirsutum
  unsure (1)..(411): unsure at all n locations
aactagtgaatacaagcttatcactaattcaatattctagtgatcctttgaagtttaaagggtcacttttcaggaaggaaggtcaacagccgatggcaggtttcctgctgcttgtaaatcttcttgaggaccacatgggcggtactgttggatacgtcgattggataatgcaaatacaccgacaagtccaacaaaatgcatgatatacgggtaattgttcaagaggtggctaaactttcatagtcttcttgaacttaagaacaactattgttcctttcatttgggataacttttaatctaatttttggttgagacaagcaagtttttcgagtcaggatctttagtcagagttaaatggtgtttgagttaggggctttcttttaatggattacattgcaatgaatcttccng

SEQ ID NO: 245542 - DNA, 302 bp, Gossypium hirsutum
  unsure (1)..(302): unsure at all n locations
naggatgttaaccgagagcagccgggttacttggcggcgccatatcaaggaatgccacagatggcggcatctggtagtgtcccggtggtcagtcaatatagtgaagctaatgttaatgctcatgcttctacccaaacttcttctctgtgatttcaactaaaatatgtcagtgtcggtttgtttataaagttataattaaaaaaaccactctgaatcaaactgaatatctttataggctatggcgaattcttcaatttgttatgtaacttttaagccatttattttaaacatttctaacagat

SEQ ID NO: 245543 - DNA, 385 bp, Gossypium hirsutum
ttctgtttgggctttatttccgaaaatcttttgatttcctattgctattgtctatctctgcatgttttctttgtttgcctttgcgtgttgcactttctgttcccctttatggtctgtttgcaggttgggaggagggtcaacgagagaggcttccgttttggtgcaaaggacgggcaaagcctatcctcgagtgtccaatgcgctgctgaagcacatgggcagtaaaggggaggcgcggcgctgacgctagctaaggtttcggctagctgagacccaatttggacattgggcctattgggccgattgggttaggggtttagggtctgcttgtaaaatgggtaggatcttgagtttgcgttttatgtcaaatggactatctttatta

SEQ ID NO: 245544 - DNA, 406 bp, Gossypium hirsutum
gagaatgcatggcagatgtagaaatgattggatttttttttttttaccttcatggtgattttaggtttctgaggtctactagcgccccataggatcaaggaaaacgtagtgaaaagcacgaagaagccaacaagaaaggagaggaaatagcaacgtcgacggtgtagggcatgatgggcagcttcaccgtcaagcaaagcttcttcttcaatggcgtcgaactctttccatgactgcttattggtgcgaggcttgcgagatccatggtgttttgagaggcgggtggaagaagactcgcgggaagaatgagggcctaaggaaaaatttgaattgaaaatgggtgggctgagcaccggggtgagttgaagagtggtagtcttttaccatcatgggaatccttgatgac

SEQ ID NO: 245545 - DNA, 271 bp, Gossypium hirsutum
atcgcctacgcgtgacgggacgtagatggaaaattagaatgatatatggaagttcagtggaggagcaagctgaaaggaattgaccgcacatccggatgttgatggctttatggatgaaggagctttcgtaaaaccaaagattgttgatgtgatcagagctactatggtgaaaaggacttataatttagaaagaaggagtgacaggtgaaacgtgaccatccttctgaaaaagtttaagtactcgtgtgaacaactcaccttggaacctaat

SEQ ID NO: 245546 - DNA, 380 bp, Gossypium hirsutum
gctattcttcacaaaaaagaaaagaaaaaattcagtgaaaatggcaacctccagtcactggctcagatcgcagagaatctctccaggcgcaaatagcaaacaacgaaaccaagtcattttcgtgagtagattcagaaccctccatcaaaatagattaatttctctctctctctctctctctttggtgatacgccgtcgattttgtgagtatccgatgtttgggttgccgatggaacatctcatcactgcaaagttcatgtttatcatttcacctgtgtatgtgtatcagcttcttttggttattttgtttctctttttctttacttgtttaatctgtgaaatactattatactaataataaatacggacacttgattgtt

SEQ ID NO: 245547 - DNA, 300 bp, Gossypium hirsutum
cccacgcgttcggctattcttccgggagctcaagtttccactataaccgtccaagggagcgccccttttggagaggtgtggacaaagtctatcgctgctgaagctgttcctggacctgggattggttctgccgctggtcgggggaattcgacaggtcctcttggttaaacataaactggtctttctaggccatgtcctggtgttggtcgacccgcaccttgtaggaaactttaatttttgtagctgacagcttttcttggaacctaaatgttgtccaaaaacttccgctgtaataaggcc

SEQ ID NO: 245548 - DNA, 327 bp, Gossypium hirsutum
aattgctaaccttctctattggtttgactggaagttgcctcctcatatctctgctcagaacttggacatcactgaagctttcgggttaggcgtttgcatgaagttccctctttgtctcctggcaatgccttatcgtccttagtccacctagttaacatttccaattcaagtccatttcgctctcacctaaagccatttactatgctatgaaataataaaggaaaagaatattagagttatttaagggtactagatcgagcacataatctgctctacttgcaccacattgttttatgattgaatttaactgtgtttgtttccatgtga

SEQ ID NO: 245549 - DNA, 388 bp, Gossypium hirsutum
gatcgttaaccctctgtatgggtgggactttgcctggcctcacgatatctctgctcagaagttgcacatcactgaaactcccggcttatgcgtttgcatgacggtcgctctttgtctcctggcagtgccttatcaagcttagtccacctatgtaacattgcccattcaagaccatttcgctctcacctaaaggcatttactacgctatgaagtagtaaacgagaagagtattacaggtattgaagggtactagatcgagcacatactctgctctacttgcaccacattggtgtatgatagaatttaactgagtatgtttccatgtgatagggaaaaagaactggacgatgctggatatatggatgcccaacaacagccttaatttact

SEQ ID NO: 245550 - DNA, 370 bp, Gossypium hirsutum
  unsure (1)..(370): unsure at all n locations
cccacgcgtccgcccactcgtccgcccacttgtccgcccacgcgtccgcccacgcgtncgggatcttgtaccgatactaatagtgcaagggccccagatagaatgttaggtgaagtgagagggagtaactccaggtgcatggcttcatcattagtacgtactggttttgtgcggggttccgtgacccaaggaaacggttgttaccagcacagatgtgtaaataactcattagaggttgctgtggatggtatttggaaagtgtgtcctaaatctggtggaccggttcagttccctggttttaatggtgaactgatttgtactgcttaccacgaactctgtagcactggcactgtttccatgtccgggcaat

SEQ ID NO: 245551 - DNA, 337 bp, Gossypium hirsutum
gcgataccaatcgattaatttcaaaaacattacatcaatggctagcaataatgtaggaggagaagagcaattgctgaagatggcggaattgagcaaaaccctaaaagaaggagaaagaattctggcgcccacccgaagacccgacggcaccctccgcaaacccattcgtattcgggccgggtatgttccccaagaggaagtcgccatttaccagtctaaaggtgccctgtggaaaaaggagatggcatcacaagtagtgcctccaggttatgatccacctgcagatgcaaaaccaaagaccaagtcggcaaagagaaatgaacgaaagaaggagaaa

SEQ ID NO: 245552 - DNA, 308 bp, Gossypium hirsutum
gtggtgtttataaccattttcatagggtatctgatagctgctgataaaaaactgccacgggtggctgcatctgggagtgtgccggagttaagtcaaaatggtaaggatgctgcaaatgctaatgctcctccccaacttccttttttgggaattcaattaccatttggcaggattggtttggttatcaaggtataaatataatataagactttgaataagactgaatatttttataggctttggtgaaatcttccaggcttattggacttttcaacatttattttaaaaattttggtgatgttacgttg

SEQ ID NO: 245553 - DNA, 373 bp, Gossypium hirsutum
cggacgcgtgggcggacgcgtgggttagtattctcaagtaggcttgatggtcgtttgtactcatattattgttatgtaatttctaaatagacgtttagtaaaaaaaaaaaaaaaaaaaaaaaaaaaaaaaaaaaaaaaaaaaaaaaaaaaaaaaaaaaaaaaaaaaaaaaaaaaaaaaaaaaaaaaaaaaaaaaaaaaaaaaaaaaggggggggccgtttaaaagaaacaaagttaacgtacccgggattgaaaggaaaaagtttttttttagggcccccaaaattaaattaatgggccggggtttaaaaacgggggaacgggaaaaaccttggggtaaccaaattaaatggcgtggaaaaaaaacccctttt

SEQ ID NO: 245554 - DNA, 280 bp, Gossypium hirsutum
tccgccactagatcgagagagtgccaccgggtatcttttatctgttgttaaaaaactggctgcgggtattttattacagactgcgagcacaaagatatatcatctccaacattctaaagaaacaaccgcactaactataatgctaacaactattggtccactcaagaagcagacccctggtactgtatctcacttacatactatagccactactcgctcttgcattacaattggccgactagacgatgatacatcgatacccactgataataccttccta

SEQ ID NO: 245555 - DNA, 304 bp, Gossypium hirsutum
gtggtgtttcaagtctgtatttccacgtctcggtgcgtagcaccagctttagtgtcagtgggattgctgcttctagctttgattaacgggttagatccaataggtaggaacagagtaacaagttgtggttgctgggattttgattcgtgtataaagttttttccatgtttcagattttggcactgtataagtaaacagtaactgtaatattatgcctgttatgttttctaaaaaaaaaaaggaataaaatgaaacaagattgaatcagttaactgaaaaaaaaaaagaaaaaatatatcatctg

SEQ ID NO: 245556 - DNA, 314 bp, Gossypium hirsutum
caggatgtttaccgagagcagtcggtttacacggcggcgccatatcaaggaatgccacaaatggcggcatctggtagtgtcccggtgttaagtcaagatggtaaggttgctgcgaatgctaatgctcctccccaaacttcttctctgtgatttcaattaacaatttgtcagtattgttttgtttatcaagttataattataatatagtactttgaataagactgaatatttttataggctttggtgaattcttcgatgtcttatggaacttttcaacaatttattttaaaaatttttgggtgatgttacgtttg

SEQ ID NO: 245557 - DNA, 343 bp, Gossypium hirsutum
  unsure (1)..(343): unsure at all n locations
accacgcgtccggaattattactgngcgagctttttgagcatggatgtgacgtcagcaagagttgaactacgtatcttgatgacattgcatcttgctttacaagttatggtggctgacaaaagactcatttttacaggtttcctcgatgccgaaccagttcataaccttttgttaggcagaacaataaacactgctgctgaagtgattcaagtatttttttgcgatgattgctgtagctcataaacattgttataaatgttttgctagaaacaagaaagggaaatttagatatgccaaactcttcgacctatgactgttggtgtatgagtgagtcattttatg

SEQ ID NO: 245558 - DNA, 254 bp, Gossypium hirsutum
cggacgcgtgggtgggatcttgaacacatcttataactgctataacagacactgaccacgaggcgcatgctttcggcgagtgagccgtcatcagtgcagcctatcaaagccgtgacatcgtcactggggtaccacactgtaaggacgccctcagttaccgctcgccctcaaagctcaaggcacctttgggaggttaggataagaatatacaccagtatggtctctgtcgacacactggcactcgttacaattac

SEQ ID NO: 245559 - DNA, 267 bp, Gossypium hirsutum
cccacgcgtccgaattattgcacggtgaataattatacagcccagaggacgacagtggggatcatactaaacagaccggtgacgctaactttatggttatacggcaaagaatgcagacctttgcagctagggccaacattctcatggcacctgtattttgaagtttcagataagatcctattaatagatggttaagctaaggatgctttttttttttcgactatctgcatattctgttgtacgccttccagatccctaaacagcata

SEQ ID NO: 245560 - DNA, 389 bp, Gossypium hirsutum
gccacacccacaggtcaacccgttgggtgttgcttagcctagagaagttttgctggaagagcgcggtcaggattggcgaaggattgatcttgaactataacggcgttggatggacagaccagaaacagaggaggaaaagatattgaaagaagaaatagataatctgaagaaagagcttgagaaggattcaactccagcttcggaatctgctttggaccagtctgctttacgtgacacactacttcataaggagagggaactagagaaacttatccgaggtttggagaacaaagttaaatttgggcaaaaagctgttgaaaggcctggttctggatcaagcaggattggcggcagctactctgatagaccaccctctcagtctggttcta

SEQ ID NO: 245561 - DNA, 189 bp, Gossypium hirsutum
  unsure (1)..(189): unsure at all n locations
gtttgctgttgctagggttntgacatacatatgcggtagctctgttntatgaaggttatgtttcattttaatatcaattagaacccttcatttatactttttagttttatagtcaccggatgaatatgggattctgttttaaatcttgttttttctacaaatgatagccttttgtgataatattttatc

SEQ ID NO: 245562 - DNA, 286 bp, Gossypium hirsutum
ctgtcgcgtggagcctacggacggagcgtattagcagctaaagatccttactgaacatgagggagagagatcttgcgtggcgcagctatccgcaggaccctgacaagaaacagagatgagtgattacgatcaacatgcgccgtgagctggtgccactactactctcgggtattcaccggaaggatattcggatgatgctgatgcaccacggggatatgctccaccacgatctgctcaagggtattctcctggaggatgttctcctaattacgcccctcaatatact

SEQ ID NO: 245563 - DNA, 412 bp, Gossypium hirsutum
gagcaatggtgattctcgatctagtcgatttagccgctttggggtctccgatgttgatactgatcagagcactggaagaacacccttctaaattctttgagggaagaaggcagcaatctcgatgacagctttcagtgggaaacagaaattgggaaacaaggattttttgttttggtacgtgataagttttgttgggaagaaagaaaggatatataaccctaatcgctttcctctcccctcgccggttagtgcttaagttaactaatatatatactagttactcagatgggaatgttttaagatgcttgactattaatattgaaattgattctatgtgaagagaaaatataataaaaaaaacattcagtacgatcatgtattacgatttaagttatcatagtatattttcaat

SEQ ID NO: 245564 - DNA, 198 bp, Gossypium hirsutum
ctctcgcatacgaatgtacgaatggagttgtaaacgttcaggacctcttatccttaagaagagagacaatcatttgcgctgcgggatcttattgagcagctatattgttactgaagaagtttaattacattctccaactagcctcagattgtaagtttactcctcaatgttatctaccgaccttttatgcagataatg

SEQ ID NO: 245565 - DNA, 238 bp, Gossypium hirsutum
  unsure (1)..(238): unsure at all n locations
cccacgcgtccggtaactttaaccaactctacaatactgggttatatacatnngggactgagaacactgtggcctaatgatcctgtgttcaaggatgaatccacttcaacttgtgaaacatacgaagtgctactattgacataatacctatatatatattctgcataagaaaataacattcatcatacaaaataaagagtgtagttgaacaaattgactatttctttgagaccttttt

SEQ ID NO: 245566 - DNA, 264 bp, Gossypium hirsutum
gtaacttcagccaactcgacaagcacgaataagctaaaggggtgactgagaacactgtggcctaaggatcctgtcttcaagcatgaatcggtttcaacttgtgaagcatacgaagtgctactattgtgttaatcctattatatgtattcgtcatcggagataaacattcagctgaagagtttgagtttattgatataattttttttttctttgtgatctttttgaattgatgcatttgagtacaaaattggtgttgattcgtgt

SEQ ID NO: 245567 - DNA, 283 bp, Gossypium hirsutum
cccacgcgtccgattttatcaagtgtgatttgtactttatttttgaagaaatctgaaatgggtaattttactttctggtaaaaaaaaaaaaaaaaaaaaaaaaaaaaaaacaaaaaaaaaaaaaaaaaaaaaacgcgcgcacaaataaaaagaaccatacatacgcacgcatgcaaccaaaaacaaacctacttataaaaacccaactaaattcaatccactcgccgaaaaaaaacaacaaaatgccggaaaaaaccctgtcctaacccaaataaatctcctt

SEQ ID NO: 245568 - DNA, 280 bp, Gossypium hirsutum
cccatgcatgcggggatataaacaaggggtctaattattggaccacctatagcatcggggattgttgctatgagggaacctatgaagaaacccaataaattgccatcggaggatttatcttaggagtattgtatggacactgtgaagaacacagtggatactcatgttgatgctgaccaagcatgaaaacttgcttagattatagacgatcttggaaccactggtggtaccttgactgttgtaatacggctactggtacacgtaggggagcatgcttggg

SEQ ID NO: 245569 - DNA, 337 bp, Gossypium hirsutum
cccacgcgtccgcccacgcgtacgcttggcttcctggtttgattctggcactaggttctacaagtatgcacgagcggagcatagagagaccatatttgactgcattggatcacattaagctccattttccatcatggcccctaattttggcaaagatcgagcttgctgaaatgagtgaacatgatgatctggaagaggatgatagagtttctgaaccagaattcaccgagttcaagaaactcatgggaattatcatttcattgttaaagggaaatcgcagcatactggatgcagttggcgttatcttcttggcaacctcagttgttgggctagatag

SEQ ID NO: 245570 - DNA, 241 bp, Gossypium hirsutum
ctcacgcgttcgctcacacgtacgttcaggtctgtgtcttgaaaaaggcgctagggtctaggactattcgcgagcctaacgttgctagaccatataagactgcattgaatcacatgagccttcatacccgtcagggctactaatcactgcatatatgaaggtgagctacatgagcgaacactatgctactatacaggagcagtcagtgcatgaaccagcaagtacctatttgacaaaacta

SEQ ID NO: 245571 - DNA, 390 bp, Gossypium hirsutum
  unsure (1)..(390): unsure at all n locations
accggctctgattcggtcgaccacgcgtcgcttttaagaaagttgaaatcttacactttcccccccccctgctcttcgccgaaaggcttatgcgcaggccttcaaccacccaaaagtcgccggcgaccggggaagtaaggccctctcgatggcgcaaacatgaggcgtggtaagtctcccttcttctttcctatttttaacttatattgtggatccgatttaaaaaaaaatgaagaaaaacaaaataaaatcacctttgaaactatttcttggtgggtttttttactgattcttgcgtgagatttgtatataaactttagtacctaagtcccgattctcgatttactctngaacttatatattctctggtatattcgaaaaagaaaactc

SEQ ID NO: 245572 - DNA, 387 bp, Gossypium hirsutum
gcgtctgaggagatcaaatggttactcaaaggtgtgttatggaagacccagaggagataatccatcgacgagctcagttcttgatccacaaagtgctggagcgagcagattgtagaagaaaaccatcgtttctacgaatcagactgtgtaggctaaaggtgaagatcaggagaagattgaagaagttaaggaagagtggcgtggttagtatttcggcagcaagaactggtgtttacaagcaggttatggatcaattggaaacatggagacggctgttttaccctgctaggcatcatggaaccattgccacccttactcgccctttgttaacttgaaacatatatatatgtggcctttatattatacacaatctcctctgggtttttt

SEQ ID NO: 245573 - DNA, 361 bp, Gossypium hirsutum
cgcagatccgtggcttgtgtagcttacctgctcatcgatctttctatacgcaagtgaaacattgcagtattcgcaataaaaaaaaaagaagcaaatagttcgaaattgtcactctttagattgcagtgatgccacttcacctgaggtgagagactacaccaactctagaactagggcattgttgtaacttttttgtgtactaaaatacaccaaagttctgaaaagtttttctgatgaaaaatagtttcccattaaaaatattgtcgttcaattttaaaactattgttttttacaaagtaattgtttcaagtttcaacaacgaactagtttgtaggcaatgttatatgggcttgaattaatt

SEQ ID NO: 245574 - DNA, 168 bp, Gossypium hirsutum
cccacgcgtccgatcgtagaatacattttcttgtgatttaaggggcaaaaaaagggaaatatttccttaatgcttttcaaattcatggtataattagtgtggcagcatgaatattatgtttagctgttgacgaaaagtgtgttcagaatatcatcaaaccatatccat

SEQ ID NO: 245575 - DNA, 294 bp, Gossypium hirsutum
gcagtttcaatataaaataaaaaaaaaaaatattcatgacaacaatgaaatatacaaaaaaagcaaaaaaaaaaaaaaaaaaagaaatgggtggaggatgaggacgaagcctttaccccctggtgatgctgcacaatctgggctccaatttggaggcaatcaacttcctgtcccctctggtggattcaatttcaattgaaggaagcttggttggagtggaatgaaactcagtggtcagtactttcttggtgtttctcggaattcacatatcgttcaagtaatgcatatgtatgt

SEQ ID NO: 245576 - DNA, 285 bp, Gossypium hirsutum
ctgccatctcttcttttaacaatgctatgttggaggggcaagaaattcgtgtaaacaaggcataaaacggggtgctccttctcatcttgtatccatttcacattcattgcaaagtaggtagttgttttgtttctgttgaatggacaatcactcaacttatgaggttgttgtaattataggaggctgaagcttaatttgttgaactggaaaaggagaaagaggataaacactttttcatttgggaagctgaatctgatgcatattatatcatctcatttttcccta

SEQ ID NO: 245577 - DNA, 243 bp, Gossypium hirsutum
cggtaattagttaatatctaaatcaaaagtttatgaagcaaagcaaacaccatatggctatggagaaatcccatggattaaaaaaaataaaataatgagagatcatgcagccaagataaatcatcatcatttgatttctgaatctttagaccatcgtctaaatcattgatacgaacttaggtacttgggcatctgatatttgcactagagtcgcattactcctaataaaagaatactacaact

SEQ ID NO: 245578 - DNA, 226 bp, Gossypium hirsutum
agctcatcaagcgcttctagcttacaaggtcttttagaacttcgagatgcaaagtcaggatcggtgatggaatcacacgactgttctggacagtcagactctgatgtcaacaattccggcggggactgagaactccccttctgaatcctcgacgcgtacagcggcatcacaatggagtctccgtcagaatcacccgcggacaacctgacgaatgatctttgtgccg

SEQ ID NO: 245579 - DNA, 340 bp, Gossypium hirsutum
cccacgcgtccgcacatcggctgcacctgcttatcatgtgcagtggtattacccagcagtggggacacctgcgtcaccctttcatcatcagcatcatcaggccgttcccttctatggctactctcccacctacattcccacagatatgagctacaatcataagctgagctacagtggaggatcctacatgaatggacatttctctcaagtgtatccagcagggcaggctgtcgtaagtgcaaatacattgatgccaatgtacccgttctatcattaccatcaatcacaaacgatgggattaccagcagcagccacccacatctacccatcaacaacagct

SEQ ID NO: 245580 - DNA, 185 bp, Gossypium hirsutum
cagaaatcctgatacacttccattggcgctttcccggtaagaacagcgagctcatcaacaggctgtgaaagacatcctgggtgaggctttccggctcgatccttggataagatattggacttggttttgcccatgtcaagtacccactcgagtagcgggatcttaagttgactggtagcgtgaaa

SEQ ID NO: 245581 - DNA, 215 bp, Gossypium hirsutum
  unsure (1)..(215): unsure at all n locations
attcctcattaaagtgtctcgtagcaggtgcttgctatgagcaacaaagtcttgtatatgatattcacttgttaaggattaacttgctcatttgttcctcatcttcctctcgttttctatgtatgtgcgtggggttttatggtgacaaaaccacccttgctttataaataaattaattgcaccattagtctgtgcattatcagcnnngcnnanna

SEQ ID NO: 245582 - DNA, 169 bp, Gossypium hirsutum
cggacgcgtgcgtccactcgttcgtccattgtgcggtcatcgattgctttcctttacgctgagctcttcaccatgtactcaagtgcttgctttaattttcacttaatggctcgctatttttttttttcaaggaaaagaacaaaaacttaagttgcttcatccgcgactt

SEQ ID NO: 245583 - DNA, 307 bp, Gossypium hirsutum
  unsure (1)..(307): unsure at all n locations
gcagcctctagttttggtcattcctagtttatatattgtggaacaaacagtgctttttcccacctttcaagctcagtacatcataatttgtttcatgacccgatctgtcaagtcatgtgtcagatttcgggattgtcttttttgtttgaaaaaaaaaaaataaaaaaaaaaaaaaaaataacctttcaacaattgacctattatcttatnaaaggcaacttgccatgagcaaaatgggtggcgttcatgctctaatgcaccctcagggacagcatcctctgaagcaagcagcaattggagtgggtgc

SEQ ID NO: 245584 - DNA, 424 bp, Gossypium hirsutum
ggaatgtatgagcagaaagttctgccaaatcaaccacctttacccccaatgcctcccccaccaacaattttgccagtccaatccgattatttatcttcggttagtggcagtccttccctgttgcaatcttccattcccgtgtcagattccaagtttatgagaacttctatgccttcgcctagtggaactactaggcctccaccatcccttccttcaacaccgcctccatttgcatctagcccatataatttagcttccttaaatacttctgcttcccaaccagcactgtacaatcagtctgttatgggtaaaaccgaacttcctcagggttctattggacctactattgatgctcgtcttcctacttcagctgctggcttggcttcatatccacctccaccattgatgcaatctttagttttta

SEQ ID NO: 245585 - DNA, 188 bp, Gossypium hirsutum
cccacgcgtccgcccactcgtccgcggactcttgggaccaacttccctttaccggatgaaaccaactgttacaagggccagaaccagcatatccctagccaaagcagcacggtggaggaatctggaagcccaacggtggagtcgataatggtgggattagcggagtgacccggtcgcggccggttcta

SEQ ID NO: 245586 - DNA, 268 bp, Gossypium hirsutum
gtgctagaccagcttgctgattatttcaagagacgcttggctggctaccctactacactgaatgaagatgagtcattgttgtcagatccaaacttgaatcccaagaaacgagttgccactcagcttgttaggttggaaaagaaaattctccatgcatgtttgcaggcaacaatggatctgattgaccagttacctgatcacactgtgtctccatgccctgcaccttatgcccccctgttgaaataaaagtctgctgtattaccagtct

SEQ ID NO: 245587 - DNA, 437 bp, Gossypium hirsutum
  unsure (1)..(437): unsure at all n locations
gaatggtagaataattttttcggtccggcatggacaggaaacattaggtctaattaacatgtctttcaatctaaaacttgtgttttagtttcagtaatcctttgtgataatgtgttgttttgtctgtacgtgaagttataaaattatgtgcattaaagtaatatctacagttttacattttttagtaccccaatctatcattatcaatatacattgtaatatctaaaacacaaaaaaaatggggttggggtttgagcaagctttgttcttgctttggtcgaggttgttgtagatgtctggtgttggatgcaacaagcttgaccttccaaattttatatcatcggtgggaatatattttctgtggctagctagatatatatatttgatttcccatgtatttagagatttttaaaagaattacgtatngtcattttctt

SEQ ID NO: 245588 - DNA, 278 bp, Gossypium hirsutum
gaacacaaacaatttcccgagtgagggtttattgctaatagacattaaccaacccctaatgattctttcattttgcctcttgactatttcactatccatcatctttttctaattaataatgtttacacatctctacgattcttagttcaaaactatcctcttttattaagatatattcacataaatctgccactgaatgagaaaataacctatcatgttcttttacaaataactactatatgccaacgtaccttgtaattctttaaccatctttattt

SEQ ID NO: 245589 - DNA, 205 bp, Gossypium hirsutum
aaagtaataactctcatatagggtgacctaaattgcattttactagaaccgccgttttacaacaaactgactggaaaaacctctgttttccccaacttaatcagccttgtatcgcatgggggttttaccagttgggttattaaccaaaaggcccgccccaatcgaacttcccaacaattgcacaagctgaatggcaaaggggacg

SEQ ID NO: 245590 - DNA, 264 bp, Gossypium hirsutum
cacccgtccgccaccctttagtgacgtttaaattacacatacgacgcatctcttcaagactgggcaattcgatgcgcacctgctccctatgaactagctgacgctactacgactggcgcatcatacctgcacataataccatctgcagacaccaaggatcaaacccaaactagcgaaccctagggacctaaacaggcaatcaacatccacgaagatacactcgagcatcatattcgtgctgaacttgagcgcaagataccacct

SEQ ID NO: 245591 - DNA, 211 bp, Gossypium hirsutum
ggagatgtagagtactagtgtggtgcttctttttctttttactaggagagaactatttatgggagggacgtatacaggaatctgtatcattctaaattccacattttgtcgtttttgtattgcatgataatcccctgcgtttttaggtgaatttccagggctttgatggtatactcatttgctctcatgcaataagaaattggtttcaggt

SEQ ID NO: 245592 - DNA, 288 bp, Gossypium hirsutum
cccacgcgttcgttcacgaattcgagaaagttttgttttattctacaactgctcagactggtgtgcgtggacctacgtgagtccactatcaatcatcacattgatggcaaattaagtgctagctcggcaaaatagaaggctacttggaaacatcaggattctatgcgtcttttccaggctgcttgtactgttcttaaaaaacacttgaaattcaccatcgcctatatcactccgctattgcttgtactgtagaaagaaaacttttttcagttcatggaaattttgggt

SEQ ID NO: 245593 - DNA, 127 bp, Gossypium hirsutum
tcgttgtccaaacagctgcttattgtatgagacaagtttaacgagacactggctagcattagatactaagggtacctggctgtcttctatcagccttcggggcctactgagaagatagctcaagagt

SEQ ID NO: 245594 - DNA, 216 bp, Gossypium hirsutum
atttgagttgccaccacctattccctcggatttctgcgggagcacccttcgaccatctggaagactgctctttcatgtacaacgactgtttttgtgggaaaccgcttatagcttgttgatgacatggggaataaaaatttatctattggttcatcggaacggtaatggaaaaccctactctaacacgaaattttttaaacatcttttgtgacgccc

SEQ ID NO: 245595 - DNA, 263 bp, Gossypium hirsutum
ctgtgaaactatatattaagattgtgcactataaacatgggatatgccgatgaaccatcgtgcgtgtgccatgttcttagggcggagacactgcgaacctatgataagatttatattgattatgctacatgcaatggccatgttgggcgaatgcatcatgacgcaatcccaggcgcagggaacaaattttgaattagacaaactttgacagacgagaagggacaagattgttctgatgcgtgtctctacagccgaagattatt

SEQ ID NO: 245596 - DNA, 144 bp, Gossypium hirsutum
cttattgcaaggcaaagttctgggacatgctgcaagctaagacgataccacagagtgcaagctgccagttgcctgctcatgaggattgcatagaggattacgcgcgcctaaaaggtgctatgctaagcatgtgcaccctagggc

SEQ ID NO: 245597 - DNA, 274 bp, Gossypium hirsutum
cccacgcgtccgaaaaaaaaaaaaaaaaatttataatataaaaaaaaaagaaaaaaaatccggagaatgagaacattacagcctattatatgcaaactagattaatatttcatgccataagctcaatttcccttatttggccatcgattttaaacaggaagactctgataaccatcgggtggcgctttttaatgagtctgaatttcatacccctttatcgagatcaatatatttttttattggccccaacaaatacattttcggcactgttgtt

SEQ ID NO: 245598 - DNA, 396 bp, Gossypium hirsutum
  unsure (1)..(396): unsure at all n locations
ggggaaggggttctctgctagggtttcgaccctagcaccctcatgccgccgccgtcgtgcccaccgtgaagccatcgcgaatggcgcccgaaaccaggtgcactggaggagacgtgcgtggcgtgcgtggagggcgataaccgctggcacacacgcgcggaaaggcctggtggttgcggcgctggctggggttgaatgctattagggtttggttttattttttggtgaaataagcttagggttagtggtttgggtctttataactattgggctaggtatcgggcctctgtaactgggtttgggattaggttgatatgttgagctaanaatttgtaatttggattgcgtttgacttacattttttttgggatttaattttaattaattaggttttgg

SEQ ID NO: 245599 - DNA, 115 bp, Gossypium hirsutum
gggtatccgttatcataatatacttttatggatgtaacttgagaaaactaatttcattcctaaatatttgacattaactatgcataacctgaatatatcattgcttggaacctcg

SEQ ID NO: 245600 - DNA, 219 bp, Gossypium hirsutum
aaggaaattttatatacaatatctatgcacttatggtaatggacaggcatatttactaacgttgggcaagggtggttttctttttatctttaaacctatatatatttctgttctctcatgaggaatgatcaaggtgatgaattacctctattcatctttattccataatgaaataaataaatgtataaactggctaaaaaatacaaacatgactgcccg

SEQ ID NO: 245601 - DNA, 289 bp, Gossypium hirsutum
ggctgctgtttagacgattcatccaaccttgcatctacctgcaaatagacaaccgtcgactcatgttgctggcttgtttgccagctcatcagctcctgctgcagtctatgccccacagacttctgcagcaacatcagcagcttcctcgggaggcggattgtctctttttagtacaccgtgctgtactcctgcttgttccatgtcatactttctgtatgcaactccaactacaggtgctgtcatacaaacataccttttcagttcttcatcaagatctctcctaggatct

SEQ ID NO: 245602 - DNA, 333 bp, Gossypium hirsutum
acgcacgaacttacgaccactcttacagcataattgtcaattccgtctacctagaatggtattggggaagagaaaaaactctctggatttaacatatttcaaaaagacactactgctttcatgtgatttaatgaatacaaaactgaaagaaatcaatatagacgatttaataacaaaagcaaatcacgccctggcaaggaaattcattatggctgaagaaaaagcagccaaagcatttctactagctcaacaggcagctgaaaagaatcccatcgatcgtgtaaagacagcagagacgaaggcagcttcagcatcaacaagcggttcatatgt

SEQ ID NO: 245603 - DNA, 200 bp, Gossypium hirsutum
acgcccacgcgtccgaataaataaaaaaaaaactttataaaaaaaacaacaaaacatacaaaatcgtgaggtgtaatatttctgatgtgtgtccacctaaaaataagttcactggccattgctttacaaatatcgtgactgtggactcttttactggtaccattcttaatcgccttctttcacattaaaataatttttat

SEQ ID NO: 245604 - DNA, 178 bp, Gossypium hirsutum
aaaaaaagagagagaggaaaggatataagatgtaagagggagaaaggagaggggagaagggagagcaccggccaggggccggtcaccggccggcttctccgccaatgggcttgccgacgtgcacggctgccggagagggtattgaattgaacagattgttacaggtgggggagaagta

SEQ ID NO: 245605 - DNA, 261 bp, Gossypium hirsutum
gcttaccttgatcacacacaatcggttttagttcaacaaggattctcaactggacagaacaggacttcaactgtcatacgtcaggcaccgttctcatccggcgataggactgggcatgtgaacgctcaaaacggtaatcaacatgtcaactccctctttgttgacaatacagtaagggtcaaatctgagagagttgctgatgcaccccctgccaatctataccctgctccctttggacaaaaggacctaatgagtgttttt

SEQ ID NO: 245606 - DNA, 185 bp, Gossypium hirsutum
cccacgcgtccgcccacacgtccgaagaagtttgtggaagatggaaaaatcaaatacataggtctaggtgaaactacacacgtgactctatcgattgcacactctaaaaatacccttactggcgtacaacatcaatggaccgctttatactcgagagaatgctgaagaactatttccgctttaca

SEQ ID NO: 245607 - DNA, 278 bp, Gossypium hirsutum
gccgaagctgcggcatatcctttatagtactctctactgtaaacatgaacaaggcgagggtgaccaaggtggtcggtgcagtgtgcaccgacctaaatggtatcatcagaccaaagaagaacgctgtcctcactacaactaccacagacgacaaacggttactaagcaccctcaacataatacgattcactgctgttcccgtaatcgaggaagtcaacactcttcacgactacgaagatatgcactttatgaatggcaaatgtcacgcatcctttggt

SEQ ID NO: 245608 - DNA, 440 bp, Gossypium hirsutum
atgatatgaacgacgattcacctcagccgcttaaaaagtcagctagtctcaatactggtaatggtggactgggtctctacttgaactcgagaagtccttcaggattcgatttgagtgatttgagtttgcccattgcctcaccggtaacaataacggggtctttggtgccttcaactcaaacagcatcctcggctactgatcctcctactttactcagcctctcgttacccggatcagatactagtgaaatcactgacttaggacccgtatccaactctttcccaagttctaccttggtggcagaaccagcaactgttccggctctgaagttgcagatggagaagcagtttttgaacgctgagttattggcagtgatgcaagagatgataagaaaagaagtacggaagtacatgagtgggagtgaatccaatgggctttgt

SEQ ID NO: 245609 - DNA, 269 bp, Gossypium hirsutum
cccacgcgtccgccagcaccagctttcggcattggcaaccataaacacaagtcaggtggaggaagttctgtgaagaagaaagcaaagaggcgaaaagattcggattttgttttaacatttctcatgtcccgaaatcggtttattcgaaccacatgatggtaagggggaattggttgagggtgtgcttttgaggtttgatgcgcatggagtagaggtgttgaaacggcgcattctcttattattcaaactatgataattctttaattgtt

SEQ ID NO: 245610 - DNA, 127 bp, Gossypium hirsutum
acgcttaggctatatggactatacgctacacttttctgcagggacgcctgcgtcataggagaagagtgctcacgatagaacgctctgctaactctttgaacgaacacgcctaattcgactgacatac

SEQ ID NO: 245611 - DNA, 373 bp, Gossypium hirsutum
agggaaaggcaggaagaggatcctttggtgattaacagcaccaatgtttttgctgctcttgggagtttgaagaagaagaagaagaagggaggtgaaaaggaaaatctgggttcatcttctaagagcaaagggttgaaaggattgggaaaggaagcagagaaaaaagaggtgttttgggccccatcacctctaaaggttaagtcttgggctgatgttgatgaagaagatgatgatgattattacgcttcaatggctcctcctggttctgcttggggccctcctaaagaacctgaacctactttagaggaaagtgaaagcgaggaagatggtcttgaagaagtcgatgatgaagttgaagaagagcaatgaaacg

SEQ ID NO: 245612 - DNA, 423 bp, Gossypium hirsutum
cggacgcgtgggttctggatcaacttcagggcttacccatgtcgatgtgaaaatgggagaggtgcaagccaaggcgtgggaatatgaaatcactaatttggaggccttcttttctagctccgaatttagagctcattatgagttggacgaacaaagaagagctgttacgcatcaccttgtatatgatgacaaaccatagctgcagcatttctacatgagagataagctttagcggcggcaggcagcatattgcaagaagacataccccggcttcagcaatcctggcaggaatcgttggccactaacagatggatatatcatatgctaatttcttagcaccgacatacttttgtactaagtagccatattttacttgatgaccaaatttaaattgacattttgtctaatacaaaaattgtattg

SEQ ID NO: 245613 - DNA, 461 bp, Gossypium hirsutum
acgccaaaacgcctctaaagatctaatcccttatcttgttctgaactcttcaaattaggcaacgggaagataacaccgaacagatgaaaatctgtttcctcgaattccgcgctggcgaattgctagccatcttgcgtggcaccaatgccccgtatggaactagatacccaatcgatcgagaagaaatgatgcctcacgatctttactatgaaagggatacaaactacatgtgtcgttggtggatctcaaggctatatccattttgacataacactcatgagggcgtcgatctggtggtgaagggacctaccggcgatcaaatacaacactcttgagacaagatatgtgagaaatttgcgtgtggtgctcatcaaaaaggaatccaccattcttgttctcagaataaatctccttactatgaaacggtcgactatgatgtacatgaaagtcattctacatac

SEQ ID NO: 245614 - DNA, 237 bp, Gossypium hirsutum
acgcccacccgtacggaatttccttgctattaattttacataaccaactgggctcgccttccgcgggctcgtaactatgcaacgaagagtgatcgtcccccccacatgctctagcagacgcagttgctaacaacaaacaacatcaactgcaacagaatctaccatcgcggtcaacattctctcaatgtgaaccctttcgcctacctacaaccaacacaacagctttcatataccacc

SEQ ID NO: 245615 - DNA, 335 bp, Gossypium hirsutum
  unsure (1)..(335): unsure at all n locations
cccacgcgtccgcaaagatttcgttaaaaattattcatatttagtggggagttgctctccagacaattgttctattttaccatgaaagttttgctttagaaaaaagctgataaaaagagcagtgacaaatgccattgccgcctctctgatttgttggtttttatgaattgaggggtactttatatttgaagttctaatttcaataattgcttctgtttcaagttgttaaaaaaaaaaccanannaaaaaacaaaattgaaagaaaacatacaaccggtttaagaaatattgctaggaaacgatggacacgagaaaaagaaagataaaaaatacaa

SEQ ID NO: 245616 - DNA, 250 bp, Gossypium hirsutum
atggtaaagctcttctttttaccttctttcttcattttacttggattatggctaactagatggttcccatatgaagaagattaccactaatcctttgttttgttctgttttgaggttgttgtgacattgtgttggccaagaaagcaagtcctttaatgtaacctttgcagctcttttctgctaaaagggtataataaatgaaactcttaagttcctttggaaaagacatgaacgaggtatatttactgtt

SEQ ID NO: 245617 - DNA, 341 bp, Gossypium hirsutum
gctaaacagtacttgaatggaaaattttgaatcatggtaaaagattaataatttctgttgtgtggttaactatatgtagtagcttcatggatgacgatgcgttgaatatgcgtaattggggttactacgaaccgtcgtttaaaggacatctcggtctgcagctaatgtcgagcatggttgaacgggatgcaaagtcttttattcccggccgtgatcccaatctcatgattactaccaataccacctttcaccagcgggaccccattgtttccgaggcacatatccccatgaattatgttagggatagttggattgctgacagagataagtttttcaacatg

SEQ ID NO: 245618 - DNA, 413 bp, Gossypium hirsutum
acgaaatgggtatggaatcagtacccaaggtatctccgactgcaacccttggcacccgcggggtgcacaacagtggtcaaacgggggcttaaacctggtgccgcaacgactttcaaatgccgctgcattacccaaggtacacccaagctgattacgaaaccatgccttaatggaaacttgattgtttgcttaaaaaataccgactacccatcaccggcgacgttgagcagaagagaagctctcccatggcagcttttctgttgcctacgtagctacaaaatgttgcttcatggatcccaattttcctccctttaaaaaaaaaattcattagtctgaaaaggcattgtgtttatgatcttttgcttaatttgactatgaaaatattgcgattttgagccatatgtattttaaat

SEQ ID NO: 245619 - DNA, 343 bp, Gossypium hirsutum
  unsure (1)..(343): unsure at all n locations
cacgcctcgttggaatgtaaatatattctggctctcttttcaaatcaaatggtttcaactagcaaaatatatgccttggtgctaaactatcaaatctgcttacctcacctaacaaaccacttacaaggggcctcattaagttctgatccatcgcaggatcttataggggatactacccagctggaagatctttatnaacaaccaaaacatggtctttcccaatacaatggtcatatgaactacaaacagaatgggagaacatggtatcaaaatgataggtgtaataaatccaacgttgactttgaaacctctgctgaactaacttgtggtccaagggccttaa

SEQ ID NO: 245620 - DNA, 202 bp, Gossypium hirsutum
cccacgcgtacggacacaggcgtattatattgacgcaatagaattaatttttcaacggtagaggtaacttactttaggcgccaggcactaaaaaatagatattcatactaccagattatgctatatatactaacaaattgattgtcttcatcaaaaactgcatacattccatctatagtcgtatctagttgaaaggacccat

SEQ ID NO: 245621 - DNA, 259 bp, Gossypium hirsutum
cggacgcgtgggcggacgcgtgggcttcgatttcttttaagtgattgtctgttagggctggggggtaggtgatggctccaaacgaacctaaaaactggcctttttggggcctaaaacaaagaaaatgtggtaacaaaaaaggaattggctcccaacccttctaataaaaggggaaaactagctagaaaattcactttttgaagaacctaaatccggaaggtggatggttcccttccgatgaaaagaagaatactggact

SEQ ID NO: 245622 - DNA, 296 bp, Gossypium hirsutum
aggaaccttcgtcttcatggcagaactcagtttgaagtgtttttatttgcttttctttggtgacgaagactgtttcggcaggggcatttataacttgattcctacctttttcaagaacggtgtatttttaaaagcctaaatttttagttaggtccaaggaatatatatcctgttcactttgaactcgcagtaatatgttttatgtactcggtttccaaatttttttgttttaatgtctgattagattccattagctaaaaaaacacttaaaaaaaaaattagtgaaactttttttt

SEQ ID NO: 245623 - DNA, 264 bp, Gossypium hirsutum
  unsure (1)..(264): unsure at all n locations
cccacgcgtccgcccacgcgtccggggattattcgctgtgtttaagcatatcaataagcgggggaggatgcggaggaggatctccaggaatagtantagtgtgtgtttcttactgtttgctttcttaacgatttggattttttttttctgttctttcaacctgaattcctggtttgggtgttagaaatgtggtttcctggcttatgtttttttgtttacgaacatctttacatcagtagatagatactagactcgtacggatgc

SEQ ID NO: 245624 - DNA, 339 bp, Gossypium hirsutum
  unsure (1)..(339): unsure at all n locations
acgcggacgcgtgggtgataaagaaagacttttaactgcttgctccccatgccaatatctaggttccgttaatggtttagagcccaccgtaaatcaattatggaattantggttccctcaagttttcaactttttaattaaaggaaatcgccagatttttgcctttccggattacttttttttgaataaagcggattttgttcgctttaattctaaaaaaaaaagattcatagccgttataaattttacccaatcttattttacaaaaagttaaaaataaaaatttaactcatttgggcgttccttttattatcaattatttgtaaaccttttaatttt

SEQ ID NO: 245625 - DNA, 423 bp, Gossypium hirsutum
cccacgcgtccgcccacgcgtccgaaagttactcggaagatattgtaaaagctttgaagagtggtaatatcgacgacatcacaagaaatgtttcaagtttaactgattggatcaggagttggcccccaacatcttgaacgcttgctattttccgcaatctaccctctgcatatgctttgtttcaccatgcaaaagaagctctggtgagtgccttaatcaagtatgtctctatcaagtatcggtttaaatctctattgcttttaaagtttagctcgaacacgaaatcagttaattgtggtagttttggttattttcgtgggctaatctccaggtctgggttcgagttatgtgagaatggtatctttaattttagtatttttggtgatgaagtttgtaactgatagttcaaggatgtattgtgat

SEQ ID NO: 245626 - DNA, 247 bp, Gossypium hirsutum
acctgacatccaaaagttgtgcactagcgcttaccacaacaatggttgccaacagtttacgggaggtcattccaaataaaagctccccaccattggattatatatgagtgtcttacactgtatacgacacacaaccaatcatgagtatggagagcgttggaaaaatcgaaggtagcatgtaagatacatacttttatctgatttacacccgagtacgagatgcatagctccgttattgtattatctc

SEQ ID NO: 245627 - DNA, 238 bp, Gossypium hirsutum
acgcggacgcgtgggcggacgcatgggcggacgcttgggcggacgcgtggggttcaatattcttgcaactgtggggtcgaattatgagcattattctccatgcaattgtaagtaccgtttcgtttcaagtgacgggtccatattatcaaatgaaatacaatttcactcttccattgtttcaatcatagcttgagcttgagacatcccacctctctaaccatctaggctcaaacaagcc

SEQ ID NO: 245628 - DNA, 334 bp, Gossypium hirsutum
cccacgcgtccggcactccaagagcttgttcggattgaggctgccgttgtcagccccgatgagaaaaccaagtgccatacatcaggtaatattgagcttaaggaagagaagattattgttaatgaagagttcgaaccaagggccaacggttcaacttattggggtgacccttattttaaaaggaaataattattattttttggctgaaaattttgaaccgagacctaacgtttcggcttacgggggcgatgatgctggtcttaaaggacagaaagaatcattcactaaagatttcgatccagagccaaatgtctccgcttacaataactaatta

SEQ ID NO: 245629 - DNA, 423 bp, Gossypium hirsutum
cttttgtgaaagacaaaagctttcaatccttctttgccaaaggctgcacggtcttgcatgtgatcgtggccatgtggaggttctggttcgagagaagagtggaggatttggcttgggattggcttagacaaactgttggcgacattttattgggtctctcttgggttttctttttggtttactcttggagagaaaagtatgactaggtttaggtctattttttttttcttttctgcttaaattaaatttactcttttctctttcctgtcgctgcttctgttctttgatttttatattttgtaatctgtgaaaagtggaagaaggcagcggccacgtgtttgcaaagattatagcttagcctaaatttcaccttcttcattattcatttttaaggttcatatttgaattaagggggttttgatg

SEQ ID NO: 245630 - DNA, 196 bp, Gossypium hirsutum
cccacgcgtccgcccactcatccgctcacttttacgtttacacatcctttatttctggcggtgcttcttttatgcagagggctgcacacatgcatttgaatctcacataacacatcttgccattggatattaaccttaaactaccattgctttatagaaaattgatccttgtagttcattatctgatatcttacac

SEQ ID NO: 245631 - DNA, 408 bp, Gossypium hirsutum
caagttttgaggtagaaaacaagagaccatggcaagagggcgaaccattctgacttgtctcatgtgggctttactcggtttctccattactttgtgtgcaagtgcaactgccggttcttgtctgggaacatcccaacaagttgtttatccccaaggtacgtatatctattctgtattattataatatatttgattaagttcatatatttaagaatgcagctttaaaggcgatgataatgatgatatttgcagggtgtcgctgctgctatttcgttgggaaacctttcatgcttcggtgtggcaaagtatgctgcgatgatgattgctgttagctatgttagcatgagatttaaggttgaatcattatgtgcatcatcttttttcccctttgttgaatgtaatgtaatt

SEQ ID NO: 245632 - DNA, 431 bp, Gossypium hirsutum
cccacgcgtccggtttcgaacaacaagaaaaatcaccccaacccatcagatcccaaacagcggttcggctcctcccttggaatggaacacttctagatctactccttggaacaagttatgaaaatggctatatctcttgtactgagtcgactcattctcttcctcactctcacctgctttgcagccgtctcatcatctactacgaccacaacaactctaaaacggcactctgggtttctctactctagaacccgaggaaaatgcactcctcagttctggagcagcaggagagaggcgtggccaaggatggtcccacagggatcaacggtatcgaacgtgttcgggtcgagagcgagtgagcggtacagatcggatatgacattgttggaatcaagggctgtgaatgaagaagggaacgtgttcaatgagct

SEQ ID NO: 245633 - DNA, 419 bp, Gossypium hirsutum
gctgagtttaagcatgcatggaatggaaaaaaagcaccaggatatttttatatttgtacattggcattgtaagaaaactgacattttcatttgctgcctttttttttgtgacaaacgagagggaattcacaaaaaaaaaaaaaaaaaaaaaaaaaaaaaaaaaaaaaaaaaaaaaaaaaaaaaaaaaaaaaaaaaaaaaaaaaaaaatataaaaaaaaaaaaaaaaactatatttattgacattaacaaaaaaagggggggcctttttaaagatccaaattttacttccggggggtggaaaggaaaaagtttttttttggggcccccaaattaaatttcctggcccgtgttttaaaaacgtggggatgggaaaaacccgggggtacccaaattaattggctttgaaaaaaatccccttt

SEQ ID NO: 245634 - DNA, 411 bp, Gossypium hirsutum
gggatattattctatttctttttcctcagagtcattctcaaggatgatatcttcatttgacagcacagcaagcttagctctgaccattttcatgatccctggcttgagtgctgagaagatcctcaggttgtatctattatggtaatatgaagagataaaagtaacatttagtccttgaacctggtagcatttttcagttttggtccatgtgatgactcacctaaaaattatcacagggatcgaaattgagaaaagttgtcaagtttcaagtctaatatgaaactgggaagatagtatgaattgcatgtttaatctattggatagtattgttgcagatgcagcggctggtggtactatatatactattctttgatagaatggttcatgggactgaccaccgcccgagagcct

SEQ ID NO: 245635 - DNA, 316 bp, Gossypium hirsutum
gccacacttgcagccacgcgatctgccaaattgatgctgaatgctcaaggcgcaaaacttgtggctctactgatttcacttacatgataaatgaataagggagtgggattaccgcctatgatacggatgacccataagaccaatcatctgcagaatcttatgcaccgagataatgtatatggtcgatcaggtcgcatgcctttttatgcttagagagacacggaatggatgtgtccacgacacaacagctgagctcaactatattgcgctgaacaacttgcatatactaacacatgaagaactctggtaacttgat

SEQ ID NO: 245636 - DNA, 381 bp, Gossypium hirsutum
cccacgcgtacgtctaaacatcctgattttataaaacttactcattacaacctaaatagtggagcaaggggggaacacatgggttgtgtgctgttcgcacgttgttgaatcactgcaagcatgaatgacgaccttatatgacatacatttgctcttatgtttactacaaatggaagatggcatatttaagcccttaaatgctatatgaatttccatttaaataaaggagacgaggtttaccatggatactatgccatggtacaatttcctagatgtgaattgatcaatagacgggaagaagtactaaaggtttacgtccaaataataggactgtacactacattgacgacaatgatgatgcgtcgattgttctaatcgaac

SEQ ID NO: 245637 - DNA, 331 bp, Gossypium hirsutum
cccacgcatgcacccattctatggcgaacgttttgacggccgcatcactcaacgaggatcgacttttatcttaacgtactactatctctctcatttgtttccacaaccattgacatgatggccctatctatgtggtaatgttcaaactattgatgctctattcctttctttccatgtatcattcaactatgatgtttaatatgatgtttgcagctaaaaagtgattgtgatgcttattccttatattttctttattttcacattcaaggtattttttctccaccgaaaacatttattttcaataacatgttgaattgtaataaattattaa

SEQ ID NO: 245638 - DNA, 398 bp, Gossypium hirsutum
tcgcccacgcgtccggtgtaattcattgtcatatttcagatgagtactggaatggttgggggtttccaataggtgaatgatatacttggaaggggattgctaatgggggacatgatgctgttgttgaagttaattgtaatttggtttggccatgacctgactttgctcaattgcattgtgttcttgatgaataaatagccctaattatatcagatatcagtccaccatatatcaattctaataaaagtgaaggagtttcgattttgaaaaaaaaaaaaaaaattaaaaaaaaaaaaataaataaaaaaaaaaaaaaaaaaaaattttatttaaatattttatataataaatttatatatatttttttaaaagggggggcccttttaaagattcaaatt

SEQ ID NO: 245639 - DNA, 105 bp, Gossypium hirsutum
  unsure (1)..(105): unsure at all n locations
acccacgcgtccggnccgtcttcaactttccaatttcattattatcttaaacctaaactttgtaatcgccgtcaaaattattccatctttgacacatttcaatgt

SEQ ID NO: 245640 - DNA, 345 bp, Gossypium hirsutum
  unsure (1)..(345): unsure at all n locations
gtgagacattgttttgttgtgagatagttttttggtagagatgcaaataacctggtatgataatgataatgaaatagttacgtgtgatgagaatttatcgctgcagttgggaatagtagtttttaccttttttacgcatttaaagttttggattggttcaaaaaaaagaaagttctggattggttaaattctgaggatggtccctgtacttatctatttgtctggatttagtctgtccctgtacttatcgatttgtgcggatttagtcctctacttttatttgctccnnanaaaaaaaaaaaaaaaataatttaattataaatatttatattttaattaattttt

SEQ ID NO: 245641 - DNA, 321 bp, Gossypium hirsutum
tgttgatggtggatttgacaacaatgaactataatatgaagaaactcacaaaatattcatgtggcctagctatgcaactcttccttttccatctgtggagttgcctgagaaggtgctgttgtttttattattagactagaaataatgagaacattgagaaattaaatatgtagccaaaattttgtcacctgtcagtagtagatactcgtagagttccatcaattcaacattgcaagaaaatggaatcgtatgtataataaccatattgttgtactgatttttgttatataataatgaaaagaatatatgttcttttctcgt

SEQ ID NO: 245642 - DNA, 212 bp, Gossypium hirsutum
cccacgcgtccgcccacgcgtccggatacccagtttcatacaagaaccactgtggactttgactgagggatgatgcctcatctgccaacctgctctcctctttttgttaactgtagccgccgcggctttcgtttttttttttttttgaatatgaaaacatgtgtcgatgaataatgcaggatcagtagcctaatacaaattcgacttacatg

SEQ ID NO: 245643 - DNA, 434 bp, Gossypium hirsutum
attcaaatgcactttttgatcagaatgatgagatagaggaagatgagagtgggtgggaaactgtcagccatctcgaggatcagggctcaagttactcaccaaaaaggagtgctgcatctgtcaccaggaatcaccgggacagcaatttctcgggtagtggaactgaatgggaagaaaatgcatgtggagataccccaatcactgaaattagcgaagtttgttcattacctgctaggcagtcgaagaaggcgtcgtccataacgaggctttggaggtcatgcccgaataatggagaaaattacaagacaatttcagtagaaggagcaaacggcagactttcaaatggaagaaagtctaatgggggtattgtatccccagatcgaggatccggtaaaggtgggctcagtccttcaatgggacagtggagttcacct

SEQ ID NO: 245644 - DNA, 402 bp, Gossypium hirsutum
cttcgctaaatcatgtgcagcttaaaaggggatcttttcattcaataccgcagcacataacaatgggcgtacatcttttgctcggacactacaactataatgtaacattgacacacatcataaaaatccctttaagactatctcagtgaattaaaaacagcttcatatcactccttaatgtcctaaatattctggacaaaaacccgttaaatatatattcatataacacttccctgctatatatataataatatagtttgtgagtgcagactcctaagattttatgtaatttctattaattatgtgtattaattaaaagtggagagcttgatgtaatatctttctttcttgtttaatactagcatataacagtttatagttaaaaaaactcaattctaaaaa

SEQ ID NO: 245645 - DNA, 403 bp, Gossypium hirsutum
gaaaaccggggcggaccacgccgtcgataggtcacctctgcagttcttctaaggtctagcggcgacaaagctgacacaaccacgggcgggtctctttatggggggacgactcaccatattaatcatgtcgtgcatcccccgtagacgaaaactcaggacaaagagttattatgacgaagcttttcggattattgcctacccagcatgctacactaaaatactgatacatttgatctgatgcatgctgcacttatctatagcatactatgcgactctgtctgagacatgaaagtatgattcagactcagatcagacctccctttgatcactatgtgcatccaaaaatacgagcacttcatctgcatccacattttgtttgttccatgctttaacaccatgaatg

SEQ ID NO: 245646 - DNA, 389 bp, Gossypium hirsutum
aatcacaccaacgtgcggtttattaacttgccaatatttagaacacatcaaaacagtaaacataacctcgattgaagtttaagtaacagaaaacaagcactaatcctaaccaactgaaactaaaaaaattctttaattgtacatgcccatttcattaatacattgccccctatgtatgccaaaaactaagctgccaaaacggcaaccaaatctcagaacctcagaagcatttgtgtgtcaatacctttctatatgaaaaaccagcacaaataccaaaattaagctgtccgccaaagaatgcaagtacaacaccacagcaaaaaacaaagtgttgtaatgttcattcatttctaaatgagacttaaaaaccggaaatacctcgcgggtgt

SEQ ID NO: 245647 - DNA, 321 bp, Gossypium hirsutum
tacccacctcgaaaaaaaaaaaaaaaaaaaaaaaaaattaaaaaaagggcgacatataagggcgagttacaaccatcatgcacaatactctttatagggccctattaatcctgccgcgttttacacgcaactggaaaacctgcttcccaacttatgcttggcaatccctttgcactggcgaatacaaaggccccccgtccccttccaacattccatctgaatgcaatggaccccctgacggtcattaaccgcggtgtggggttacccaggtaccgtaccttccaggcctaccccgtcctttgtttttcttcttttcgcacg

SEQ ID NO: 245648 - DNA, 366 bp, Gossypium hirsutum
cccacgcgtccggggcatttggactgcctgcatgctttgtagatggaattcattgctcagagttaattgacgaattcattgttgacatttcatagtaacatgttacattttatgagttttacttgttccattatcaatactatgttgattcttgtttgtccaagaaaaaaaaaaaaaaaaaaaaaaaaaaaaaaaaaaaaaaaaaaaaaaaaaaaaaaaaaaaaaaaaatggggggggctctttaaaagatccattttttcctgcgcgtatatgacaatatatattcttttttattgtgcccccaaattaaaatattgtggcccgtgtttaaacaccgagatacttgaaaaaccctggggacccaa

SEQ ID NO: 245649 - DNA, 328 bp, Gossypium hirsutum
cccacacatccgcttttagtagttatatttgtacttaaaagagcacctataacagagcgtgatcctaaacttgcttaaattctgactgcttttcttttttcttttcctttatttaatcctttatttttggaaacgcggctgacatttgctttgaacattgtttaaataaggctgaactgtttcacttctttcttgtttccatgcgaggacgttatatacattttcttttccccgttggaaagagtttatggatgctttcttgcgatcttttattcctggtatcaaacctttaagcttattgtaaaattttcccttccgatgatgcttt

SEQ ID NO: 245650 - DNA, 395 bp, Gossypium hirsutum
  unsure (1)..(395): unsure at all n locations
ggcaaatatttcagagtgtgctgcctcatcattattgaccctggtgactctgatgttggtaagagcatgcctagtgatcactaagctacagcggatgacatatcttcataggttttgttctgatatagtttcttctattttttgggtagtttgaaacattaatgatactctgaaattcagaactttctttgttgccatcttgatgttcgacttgtgatgatgatattattggtctatgttctggaaattntgtgagtcaatttcgttttaagactattgccatctttgtattttgttctggtttacttctgcatctggataatctgttctatcttgctatcaatttgctcatttgtagtgttggaaaaaaaaataacaaaatatattttttattt

SEQ ID NO: 245651 - DNA, 304 bp, Gossypium hirsutum
  unsure (1)..(304): unsure at all n locations
ccggnctggaaaacccgggcccgacgactgctgcagctcatcaacattgatataactgtttggctataaacaggaaaggaaaatttagatatacagagctcttcaatctatgactttgggtgtatgattgattcattttatgaaatcaaagtttttgaacaagaatacatgtaaagaggactatatgatagaagaatatgaaaggagatccaaaaataaatatataaattttacggtttgaaaaaaaaaaaatataattcataaaaaatgaatcaataaatatataatatatttaatttggggt

SEQ ID NO: 245652 - DNA, 334 bp, Gossypium hirsutum
aataatattacatataatccaacacttgatctgagatattcattatcgagtgatgttcaaaccattgcttctgaatctgcttaactatgattttaaagatttcaattgagtatttttcagtgtattttttttatttcaatcttgaaaagaatctagtaggcttgcaatgtcttgataatcatcaaatgatgaatttggaaaagaaatcttaggacaccttcctacatagctttaatattaaagctatggatgagaagaacatttcctttctgatgatgagtgatgaccattatgcaagtaatgtcccctgtaattattctgtttttggtaacgt

SEQ ID NO: 245653 - DNA, 311 bp, Gossypium hirsutum
gagagatttaaaagaaaaatggctgacaagcgtcttgtattttatcatttgcataaccttgttggttgctggaaaatatggtacatgcccctgggggcccttttatttgcctatttttgggggtttttttattttacaataacacaccgttttcggcatattctgtgaacagaagcagaaaaacatgcgggagcgctctaacgcttaagagccttacgccagggcgggcgtcgctctgacgcctctgtgcctgcttacttgggggggctcgatttaccggggtccagattactgcgctgaagatgcttacc

SEQ ID NO: 245654 - DNA, 395 bp, Gossypium hirsutum
gtgggagaaacgttccttattacccacaaatcatcaatgagattattagtggccgcttgggaataacaaactgtcatttttaggtttggggaaaagtgtattgggcctcttaaaactgtccctggtggggagaacattcccccccttccatgtgggaaaaaacacttggagacatttttgtctttgggcgcgaactattattactttcttcaaggggggtctctccctctttcttgcttttctgtgttctgatttgaaagaaggattgaatggtggcgaggggtcagaatatctcaatataaggcagtacacttgctgtttatgtctaggatggatgtggactggataatcttggatgtttgaaattcaaatctaaaatctacttaatttaggac

SEQ ID NO: 245655 - DNA, 357 bp, Gossypium hirsutum
  unsure (1)..(357): unsure at all n locations
gttatataatttttgctatggcttggctatctcatgcatgattgggacatttttgctcatgtttttatgagccgagccaagctttcactaatgtctagaaatcgttgcccagaaagttttggactgatactgctactgtattcttgctctggatatatgtatatacatacgtatagatataagcacaatatttgaaacgttactaattcatattagatattctttatgcatatattttcttggccangacaaaagcaatgggccgggtgaacaggcagatgaacttgccgtcgttgcagaaaattatgcaagaattcgagatgcaaaacgagaagatggagatgggtagtgaagtaa

SEQ ID NO: 245656 - DNA, 204 bp, Gossypium hirsutum
  unsure (1)..(204): unsure at all n locations
gaaaaaagagccgacccacgcgtgcgnccacgcgtnncgtcaatggttaaaccctttctttttttgataagggtctggctgatggggttggcaaatttgtccgaatcgaacgttcttatttgattggacaaaggtattctttcttttttgggccgaccgattacatataccatgatgaaattttctttatttgaaactattctt

SEQ ID NO: 245657 - DNA, 347 bp, Gossypium hirsutum
gttttaaaggtggaaggtttgttgctgttggattgagcttcttggtagtgtttttgttgctctaagttttctagtttcttttttgtttgtttcattttcagtttaatttatatagatactggagaataagtaaaggcttcagtgtggttatatttttttatattgtcttttttttttccttcttttaattgtgattatgttgtttttctcttggatagataaaggaaaggtttgtgattttctttttcttttttgcttggaagtttgattattgatgaaaaggcaaatgctatagatattggaatagacaaagttgtggttataaagtgatttacaggcaatttaat

SEQ ID NO: 245658 - DNA, 393 bp, Gossypium hirsutum
tgctgaagaaagagagattgtggatggagaagtgcagggttgaaacttgaagaagtttgtttgttagtttgtggtggtcagttcttattgtcactgtatggttaaatgttaaggcaattttggtttcttacacattgtaggtgttgagttatcttggtttgtttcaaatgttcaatttttttatctgattaaaaaaaaaaaaacaaaaaaaaaaaaataaaaaaaaattatattttaaacaaatgaattattaacaaaaaattaaaaaataagtcgcccttacaaaaaaataaaaaaaccttgaatggaaaaagaaaaaaaaccattaaggggggggtcttttaaaaaaatcaaaatttttttacccggttttttgaaaagtaaatttttttt

SEQ ID NO: 245659 - DNA, 292 bp, Gossypium hirsutum
gctgagtttaagcatatcaataagcggaggagcgactgatgttgtttgtttatcagatgatgactaaccataaccagaaaaggtaattttgtataacatagatgcagttatatgcaatgcccgatccattttgagtcaagaggtagtagttgaaggtcagaaattgaagtgggaatttgcggtgaatagttattcaatttgtaatatatatattaatttagttgaaaaaaaaaaaaaagagaacaaaaaaaaaaaaaaacaaaaaaaaaaaaggggggggagaacctaaaag

SEQ ID NO: 245660 - DNA, 316 bp, Gossypium hirsutum
cccacgcgtccgcttttaaactctctctccctctcctcttgtctccgaccgaaggaaccctcagcagtcccccgtgctgctgtcggggccaaaggctggagttgcgcgaaagggactctttagtcccattccaggtgaacccgaaaggccacgttctccaagctccgaaaataaaaaggtaaaagtccctctcttcctttttaggaaacgaccacggcgacggagatgagaactccgacgatgcggccacgagataaatccgacgtgtggaaggccggtggttgatgccctgagcgatggtggtggcgcgcgtgat

SEQ ID NO: 245661 - DNA, 259 bp, Gossypium hirsutum
gaaaaaagggaaaaaaaacgtacattgagagagggagcaaacagagagacccaattgaacaggctgaaaccagtgatatggaggagagggcttggagacctttgccttggagaaagctcaagttaggcgttcagagaagtttgaaatatggttatcatttaatgatcccaaaaagattgtttggcctgaaaaggacttgatgagcagtgctatgtgtatggttgcaatgctaacgtgcaaagattgataaggcttactg

SEQ ID NO: 245662 - DNA, 134 bp, Gossypium hirsutum
tctactagtgttcagcgggtactcgctgtgaagaacgagggttggaggatgtaatgcgctatcgccgactggtcatagagcgcaagggagcttcatggctgagcttgaagggaaagaaaaatcgcttgacagat

SEQ ID NO: 245663 - DNA, 210 bp, Gossypium hirsutum
cccacgcgtccgagaaattattgagaactgaaattaatttgtaaagtaaaatctgaccttttaaactgcagatatgagtagatcactgcagaaggattttgcaacttaagagtgcatcaggattaataattatagtggatatcaacagtttgttggcgcattcatagaccaaaaatagaataatcaccgaggccttgttaaaaaaaacaa

SEQ ID NO: 245664 - DNA, 279 bp, Gossypium hirsutum
cccacgcgtccgtcgcgagggccgccctttttttttttttttattacatgttaaaatgagatggcagtgtttagattttaaaatttcgaccatctcgtaatctcacattacggctatcctgtaatatagggtgtaatctcttgttatagcttttgataattaacaagtccttggctgttgcacctctagagttatacatacattatatgattctgttggatgctaatggctttctaacgcttctaattaatgtcacaaaaataatataattggactctc

SEQ ID NO: 245665 - DNA, 163 bp, Gossypium hirsutum
ggacattgtatttgtactctagtataatcatgtggataagaggcaacttacaagtccgagctgggatatggaattactgttgataaaaacatgaataatactaaaaatgacaaagcaaattgaagatgcaaaaattggcataattaacttgtacatttaaacc

SEQ ID NO: 245666 - DNA, 253 bp, Gossypium hirsutum
cccacgcgtgcgaaaaaaaaaaaagtaaataacataaaaacaaaaagcgccggctgtgatgtattgttaaagcgtagctagatcataaatgcttgtggctgctcgattctttggttggctaatcttatggagtagaacgcgaatggaaatgcaatgtggggaaatggaaaaagatttcgtgtcgcaatgttgtaacagaacgaggctaagatgtttcatcagacttaaaaaatagagccagcgccagtttggc

SEQ ID NO: 245667 - DNA, 450 bp, Gossypium hirsutum
tgagctaaaagtcatcacaactatggaggcaatggtgcaagacatcatgaataagttgatgaaggctcgtgaaatggagtatgaagcagaggagaagagatttgagaagaagaaagctaatgttagaaaagacaaactgaagctggagaaggatgaagctgacttaaaagagaagaatttcgtgggcgcctagtgggagaaggtcacaagagagtagaggtttagggcgtgtttttcggagttttgtttctttctttgggaggtttaggagttcgtcacgttcaggttcagattctggatttacaaggagaagtagatcgagttcagtgttcggtagatcatcgagaacggatagcgactgggatttcgaggattgagtgatggtcgaatgtatcttttggtcattttgatgttagccttcctgtccccattactctgatactacaaata

SEQ ID NO: 245668 - DNA, 196 bp, Gossypium hirsutum
gttgcagtagaaacatctgtgacagcttagatcatgttatatgttttttatgtcttttttttctattataggaaaaaaagaaaaaaggccatcaatgcctagtgggatcatattgtccacattcctttgttcatatgatgtaaatatattggtctcatcttcattatataatatatatacatatatctattttttt

SEQ ID NO: 245669 - DNA, 267 bp, Gossypium hirsutum
  unsure (1)..(267): unsure at all n locations
cggacgcgtgggcttgcaatcacaattgtaatagacaaagaattgctttgctccttggtgttgggggcccttatttctcccaagttgttcctatggtaagggccttccttgaccaattttcctgtcctggttttagtgggagttttgcattttcagctccactgttgtagagagattggaatgcctctggacatcaattgtctattcaatgtgtacaatgaaagataaccttttcttttcaaannaaaacactnggatgagaatttg

SEQ ID NO: 245670 - DNA, 375 bp, Gossypium hirsutum
cgaattcccggggtttcctgacaagaagctgtttcttttcaattcccttagttatatactttcttttttacctttggtttgtgtacttgattatttgagtttctattaaggggtcccttcccctcaaaaaaaaaaaaaaaaaaaaaaaaaaaaaaaaaaaaaaaaagaaaaaaaaaaaaaaaaaaaaaaaagtaaatcaaaaaagggggcccggtctaacgtatacaataatcccacctaaaaccggctacctggacaccattttataaagctgagtgtggcaaaacactgagcggccggactgaaataaccgtgggggaaatcccctaaacgaccatacgtaaaatcctgataaggcccccacctttcaccctt

SEQ ID NO: 245671 - DNA, 222 bp, Gossypium hirsutum
cccacgcgtccgcagcagcagcgtctgttgttggtattgatgaggatgaaactgaagatgatgtgacaattgatccggacttatgcggaacctggaataagaatcacaatactgaaaatcataaagcagatatacacatacaaataaagatcatgtatacgaagatcctgctccacatgtttagctataacgcaagaagaattcactatttcactggcaatt

SEQ ID NO: 245672 - DNA, 251 bp, Gossypium hirsutum
tgcgttggggacaattgctttgtggtgtggggaatattgtgtcactgccggcaactgtgcgacgtgttgagattttggtgggtaaaagatacgtcaataaagttggaataggacggtggctgtgcggcggttcctgccaatcccgataaggccaataatgttttcatcatattatcactcacaaacctttactgaattgcaactgtatgttctgtggattttattgaatcatatttctcatcattaggaac

SEQ ID NO: 245673 - DNA, 241 bp, Gossypium hirsutum
ctcaagcgaacggtacgaaaagtacgcgggtgcttgtatggaatcccgacggaatagtaagagcagtctatctcctggggctgagacctacccaccgatcgagatctatccacgatgaatatgtgctgctagattggcctttactgtgtctgagacaacatttgcacactttttttatgttaaactttactcaacgtaatattctgataatcccatcgggtaagcggattaaacttttttt

SEQ ID NO: 245674 - DNA, 327 bp, Gossypium hirsutum
gctattattgctgctatgagaactggtaggctcactggacaagccgctgctcctgctgccggggctgttaacgctgatgctaaggatattacttgctgtaatactagctcttatggcattcatattggacattcaaaagtacataagaccttaatgctggaaaatgtgcttgaataaccagatataggtactgatttgagttctgtgagcaatgattttggcattgatacggattttaactcatgtatttgctattggttgtgataggtgtttaccccagatttaatctccgagtttatttgaaccgtatttatcaaggttggaatt

SEQ ID NO: 245675 - DNA, 217 bp, Gossypium hirsutum
cttaatgtttataagaatttaaaagatgttctccatggttgtcagctcgttttttcttgcgggaccgaaagggagaaatttgttagcgtccataaaagttccatagcttttgtaatttgaatcctattaatgttatttatggtctttttcccttgtcaaaattatattattttattttttctattaaaaaataatattaataattttatatttatat

SEQ ID NO: 245676 - DNA, 338 bp, Gossypium hirsutum
atttgcttctaaattagactgttatttttaacaaataatgatgatttaaagttgataggtattggactcttaccagttcacaagttaagcttttgcataatcaacagcacaagaaatatgtgtatatatattgagtagtttattttgctgagtgtttgtgtagataaacaagcgggcaatagcagggacctctacagcatcccaagttcgtagtttgcgtaaagtcaatactgatcaagttgctattcctattgatgcggatgattgcaacaatagttggttagaagatgaagattgattataagttcatggtttcaaatcacttaccacatcaagag

SEQ ID NO: 245677 - DNA, 339 bp, Gossypium hirsutum
cccacgcgtacaagcagcatgagaagaaaagaggcatggacatcgatgaagcacaggaaagggggtgtatacttaggtctctcctcatgaacatctttaaaaaaaattcaaagacaaagattacattgaatatcctgctgctgtgcctgctcacttataatatttattatttacatcaattttctttaattagtatcccacaaccatgactaattttcaagccatcagtactgactgaaaataatgtatgatcacacctacttttctctccaacgagaaaaaataaacggcagattcttatggtgactgattttgcggtttacttggttggccctccca

SEQ ID NO: 245678 - DNA, 473 bp, Gossypium hirsutum
  unsure (1)..(473): unsure at all n locations
cccacgcgtccgggacaaacgagatggcatgttcggtccacaacccatggccattccccctgttcagcagatgtctcgccttgatcaaccaataccccctgcagctggctatccaccagcagcatatggacagccttatccaccacctcaaggttacccgccggccgcatatcctcctcatcagtaccctccagctggttatccagcacctggttaccctaagtgatctttctatggtttaccttttggtttcaattgcctgaatctggattactgactactgagtcatggatgaagctggtattctttataaaatttgactttgcatgctgttgggatttatatatagnngttatattatattatattgggtgaattactttttttatagctgatttaaacagcaaaaagtgttaaatattaaaactgtcagcttgtttattctcaaataatttcttttacttcattgttct

SEQ ID NO: 245679 - DNA, 126 bp, Gossypium hirsutum
ttccggaaaactattccgaaccaaatagacttcaaagtgtgtttcaaggtgttggaggaaccttattaagtagcatccctatccctactccctctgagtcaacttctcatccggtaatatcatcac

SEQ ID NO: 245680 - DNA, 215 bp, Gossypium hirsutum
tgggctcaaattatcggggtctgggagaatctggttgggagtctccttcatctatctttctcaatgttaatggtatagactatgaggagatcaaagtacacatatcgaagggtcagcattcattcatgtaagtttgtcaagttttattgctttttggagttgcaatgcaaataacaaattgggatattgttaatgtgttttatagagaattcatt

SEQ ID NO: 245681 - DNA, 495 bp, Gossypium hirsutum
  unsure (1)..(495): unsure at all n locations
cttttatttgtaatctttttgggattatatataagatcttatggatgtaatataactaaggggcaattgtgtcctaccagctggtttcttgacaagggcttcacgtgcagttgtaaggaaaaagccagggaaggcaaaagcgaggaagagcttccaatgggtcaagcgttgatggtcatttatgttgttgctcagatttttcctcaaaggggcttcttttctttccttttttttgcattggatgaaaagcaaacctttattttgacaatgctgcaataatatctttcacaaggtttggtgttagttatgtaatgtgcttgtaatttctagcttcccctacatgattattagccagttgttaggaagatttgtttagcaagaattacttttaaaaatattccactataacaagggagaaattggctctttatttttatatttatttttggngaaagaaggaaaaccggttggcacctcattgactctaattttgct

SEQ ID NO: 245682 - DNA, 284 bp, Gossypium hirsutum
aggaaacttgggtcacatgtgtgagattataatcttatgatcattatttaatcacccacagtgcgactaaacgtgggttttagaaaccgtcagggaaccctccttttctaatacccacgtttagtgggattgtgggtgatgaaattcacgtcgcatgtgtgagattataatcttatgatcattatttaatcaaaataattgagaacgaaatatatactatctccaacaaccatttcatattaatataatccataaaattttatattttttaaatttaaaataat

SEQ ID NO: 245683 - DNA, 428 bp, Gossypium hirsutum
ccctaggattgacaagacggggacagatctaattggagaccctataattattgacgatctgctgaactcgtaagacgccacatgagcatcaagaggaaaattatacgatgctgtcgtatccacactcgggcatcaactgctgaacttgaaagtgaaagacgacaaatgagcgctcgagcaatctatccgattagaaaaccatctcaaagatggcgcagaacgagcagtcaatatattgcaccaggtagatgtggatccatttgggtcaggaagccatgaatatattaggtatgaatcctcggtagaagaaaccctaacgacgctgaatgctatgagtcccgaagaagccgctgcacatgtttatacgagaatgggatattcttgtgaaagccggattggttcaaggattctcaggtatatggatccca

SEQ ID NO: 245684 - DNA, 347 bp, Gossypium hirsutum
ggcgtgtaatccgttccttcgaacatcgagctcaaaaatcaagccggcctttaatttttcgggccaatgcaaatccggttgaagcactgggtgtcattcgtcaagcaaaggataatttctagggcttgtttagacatcatttctgtatgtgtataggtgatgttagctcttccatatgtgaaataaaaaaccacaaatgtttaccaatgttcatatgctttgatttttctttttggttctttcgaaattctcttgagctaatctcaaaatattattttgcttatttcctcataacaattttttattcctttgcctcttatatatatgtaattgtttaacattaaaat

SEQ ID NO: 245685 - DNA, 321 bp, Gossypium hirsutum
  unsure (1)..(321): unsure at all n locations
cgttttcaatgagcttcctgatgaatttggtgctgaggtgaaccaactcatgagtctgaagctcgagggatccgtgggttaagtatgatgaaggttttattcaaccgaggtcaagttggacaatgaaataattttgtcaatgaaatcaataaagttcaagctcttagcatctttttacaaatgactagttagctgtaatgtactttgctgttcctgaagtgctgtttagtgtatttcctggaatatacctctgtgtatatatttgatctcttaaaccatgaaaaactgtgttacatgcantaaataaaaaataaaatataa

SEQ ID NO: 245686 - DNA, 339 bp, Gossypium hirsutum
cgtaaaccctttctggaaaaataatcaacaccacgctcaacaacaacagaggaataatgggttccttgtaggtgaagttcaaaacacaggtattcaagaactgtatcaaaggctcaaatcatcatcaagttattactctgatacttcagcagtaattctaagcaatgtcgcttcttcttcatcaacatccattttggagtcagctccagttgctgggggagaattgggttactggaatccggcattttcatcatcgtggtctgatcttccaacaactaatggtgcatatccttaaaataaccctttacctttcgtttaatctcaccttttttttttata

SEQ ID NO: 245687 - DNA, 496 bp, Gossypium hirsutum
  unsure (1)..(496): unsure at all n locations
ggcgtccgcccacgcgtccgcgagtcccctgttaccaacaccacagcagcagcagcagcagcagcaacagcgacagcttagtggtaacttaatgcagaagaaccatccacagtctcctcagggtaaccaggttttacaacaacaaatgatgcaacagctgtaccatgatatgtctaataacaatactgcagttcaacagcaacagcagtccctgagtgggcagaatgggaatgctagtgtgggaagaaatggaatgggatacggtaacaacactgctgctccagctgtagctacctctaatgtatccggaagtgtagcagggcctgctccgagtcgaagcaacagttttaaaggtgcttcgaacagtgattcctcagcagcaggtggcaacactggattcaaccacagagcacctgatttgtctcagactcttcattngcaggacgatatagtttcggatatagctcaagagttcctcgacaatgtggtttttaac

SEQ ID NO: 245688 - DNA, 255 bp, Gossypium hirsutum
tcccggtcgcgcacgcgtccgcaaatctcaaggaaatcctcctacaattgccaacgcttctaccctctccttggtatcgggcgtttcttgcttttttatacacagaacaaaaattacaatttgataatttatggcagaaagaagtgtagtgaagtaggcttcagcaactatggttttactctgcatttttatatatcggattttcagctgtagatcccatgttcctgaaatgttgaaactgaatttttatttttt

SEQ ID NO: 245689 - DNA, 264 bp, Gossypium hirsutum
  unsure (1)..(264): unsure at all n locations
cggacgcgtggggtttgtaatgcttgttgatctttaaagaaaatagtggggaatgccccagagaagcttctccaattactttcccttggtttcatcttcattatccttttcttatcaaactctgtttaaggaatgctgtttaattaatgggactntatccgtatgtctaatataaaaaaacccgtttgatttatataatatattataattatttctaaaattatataaatattaaaaataatttataaatttataaaaattttt

SEQ ID NO: 245690 - DNA, 219 bp, Gossypium hirsutum
tagtaaaggggttgaaatactgcaatgactcatatatagtgtctctcagccctctatgatataggcttgatactcaatcatctccacacccaaaaaaactatattaatgcctttatatatgtattcttatttgattgactataattttattaatgcctttattacatttgttgaggttgaatccttatttcattaactagaagctgctggtttttggct

SEQ ID NO: 245691 - DNA, 319 bp, Gossypium hirsutum
taaaaaaaaaaaaaccaaataaaaaattaaaaaaaaaaataaaaaaaaaaaaaaaataaaaaaatggggaaaattttaactaacagtattgcattctttcttaataaattccatttttcttcccctatttttactaattttaccccttttattcgccccccctctttcattatcttaaatcttccttcccctacttcccccctctaatccctttaattttgcccccttaaataaatttaccttcccccctcttaacaactacttcccgtaaaaccccctttccccccccaattaaacccttttaacccaaacccctttt

SEQ ID NO: 245692 - DNA, 422 bp, Gossypium hirsutum
  unsure (1)..(422): unsure at all n locations
cccttcgcaactttttaagctatcttaaatgcttgcagccgctgtgattcattcgaggatgcttcaatgttgttggaagagctccggttgtttgataatcaggtgtacggtgttgcccatgggcttcttatgggttatagggagaatgnttggatccaggctcaatccctgttcgatgaagtaaagtcaatggactcgtcaactgcttctgccttttataatgccctgactgacatgctgtggcactttggtcagaaacggcgagcccaactggttgttctcgaagggaaacgccggcaagtatgggagaatgtatggtctaattcttgcctagatttgcatcttatgtcatctggtgctgctcgagcaatggtgcatgcatggttgctaaacatacgttctgttgttttcgaagtcacgaa

SEQ ID NO: 245693 - DNA, 420 bp, Gossypium hirsutum
gtgcaccggaactagccaagcttctttattggctcatggtggttggatacagccttcggagcgtggaagttcgatttgacatgcaaagggtacttggcactcctccaaaacttgccgagttgcctgcaggtgaaaatatatatgtgctggtgggcaactgcaaatatactcgatagcaaatttggatcacattaacctgctattatttatgtgtgagaaggggttcattcaaagtgatttactgcttgagaaaacttgaaaattttcgcgcatgccttacatttttggcttctatagtagctttaaaacttattatgaaacaagtgcttgcaacagtgacttctacctttaaatacaactgaatttggtttacgtgccgaaaataactgttttaaaggtattattaaatgatttgtttcc

SEQ ID NO: 245694 - DNA, 224 bp, Gossypium hirsutum
attggtgagatggaatgtttatttaatcaaaattcctttgcagtgggcacaaatagttaacttttaatctattaaaaaaaaaaacttacctgtttattttttaaaaatgggggaatgggatttttttccgttttgtaggaaaatgattgtgcctgaaatcatctaagttgcgacgttgaatctatatgaccttgttgatattcatatatatttttttatttaga

SEQ ID NO: 245695 - DNA, 383 bp, Gossypium hirsutum
aatctctcccatactagtctctttgagccacgcccacgccattgtcaagttcagatgggccgatgagattgaaggatgtttgcggcggcataagggacccttccatgggagatgtggagatagtggagttggaaatttgatgagtaggggaagcattcatctcttgctgctgggcattggatttggagctggtagaccctgactccttttgctcacttttgtttatattttcttcaccacccttcctttcatgttccttcatttcctccaaatacatctcttcaaccattggcttgcacaggcggactcgagcatttataaatcaggttgacacctgcgaaccaacgtgccctatgttttttaatacaaatagagaattaaga

SEQ ID NO: 245696 - DNA, 267 bp, Gossypium hirsutum
ccacgcgtccggccacacattcaaatacaagttcgctaacacatcaatctactcctttgcttgttacagggggagttgattctcgaattcgctaatacatattctgaaggtgagaacagtctacgtgatctacgaaattttccagagattaatcatgtgaacaaatacatcatgttctcattaaatgcttttgtggatagttaacacaaccacttgacagtgttaatgttagaaatcatgaaattgaaccttttgagattaatacac

SEQ ID NO: 245697 - DNA, 215 bp, Gossypium hirsutum
atatttttgtgtgaagaagggttgtttcagttttattacccaagtacttgaatggtggaggttcattgcaattggttttctactttaatgcatacgtggtgattatggtttctctacttaaattgatatcttgtgattatgttaaaaaaaaaaaaaaaaaaaaaaaaacaaaaaaaacacatacaaaaacaaaaaaacaaaaaaaaaataaaaat

SEQ ID NO: 245698 - DNA, 250 bp, Gossypium hirsutum
aaaaataaccggcgccacccactcatccgcccacacttacttctatactcatatttgagtaataactaacgatgacaaataatgcgtgttcttccaattacaacctactcctccaacttacaccatcttcaaaaactattctttttccaataaaacataaaaacccttgacaaatatcataccccataaatacaattgtaatatcatcctaacatgctactcctattaaaaatcaaccattttctcaact

SEQ ID NO: 245699 - DNA, 308 bp, Gossypium hirsutum
cccacgcgtccgaaaaaaaaaaaaaataaaaaaaaaaaaaaaaaaaaaaaaacattggggaatatacaaaaaataaaaacactaacatacaacaaaataaaataaaaaaataataaaaaataaattcggctccctttttaatggttcaacatttacttccctgttaatcccacttcataactttttttaatctcccttaattacaatcccctttccccagttttccaactatcaaattggaaaaaccctatcgtccctcaatttaattgcttttcctaaattcccttttttacccgtcctttttttat

SEQ ID NO: 245700 - DNA, 422 bp, Gossypium hirsutum
cccacgcgtccgcttacagcatatcagaggttagcccatgtttagagttgcagcagagtgactgttgccttgggtccggccagattctatccatcacattagatttgcatcttgacccaggagaggaagtactattcgtctgcattgctcattttggaactagtggaatatgttgtttccagtcctggtttcccagccaaccttgcattctctgcactgagagatagaaaagccatagggaaagtgatgattgtatttgatgatatgggaaggcctaagctttaagcgattaggatttaactgggaggagatatgcattccttgctcaagcgccgaatctagaaataatataatatggaaaataatgaggatgtcaatggatggcactcctttgtttactttcaggatgcagatgattggca

SEQ ID NO: 245701 - DNA, 251 bp, Gossypium hirsutum
cccacgcgtccgcccacgcgtccgaaattgatgaacatctgacagctattattgagctcgcactagtgatcatggacgaatattagctgctgcaaaaacctttctattatttaaaacaacatacatgctttagttgatcattatgtttgatagggattgaaagagggttagaagtatttacattttattttttctttatattacgtgttattaatctttatattataaattttttttatttttttttttat

SEQ ID NO: 245702 - DNA, 220 bp, Gossypium hirsutum
aggtttgcatgtaatgaagtatgaactaagaagattatggtctggtaaggtaatttgtggatatatgtatatgtagtcaaactaatagagactggcagcagatggctgaatacttgtgaattcccaagtggatacactattatattgtaatttcaagtaagattccatgtgagtaattttttttttatctaataaaaaaaataataaaaaaattaaataa

SEQ ID NO: 245703 - DNA, 119 bp, Gossypium hirsutum
cggttttattatgatgtgcccttaactatccataaactactaactgaactatcaatcggggatatatcactaaccaaagcggaagatcattccaattaccttgattggacattttttat

SEQ ID NO: 245704 - DNA, 260 bp, Gossypium hirsutum
gaaaaagcaagagatgtactttacgatgaggaaaaatgccattaaggtataagcttgaaatatgacttaagatggatacctttatgttaatttcaaagggactactataggttatagttgaagcattgagttgaagaatattcgattacttcataacattccctataatgcaaaagcatcttacaattatgaattatagaatataaagagcggtgaatactcctttcttttataaaaaaaaaaataaacaaggcggacta

SEQ ID NO: 245705 - DNA, 335 bp, Gossypium hirsutum
aaaaaaggtcgcccacgcgtccctgcgcttgttatcctcaatagtcatattcaaactgcctacgtttgaaagttcgggcatttttagacaagtatgaattctcaaatcccaccataattcataattcggtgaataattattcccagtttgcttctttcccaatctacatttatggatcctacagcacatttgaatcctgaattatttaataatatggttgctttgttatacattggacattttgtggtctatgaaaattggttagatgattcgcttccaaattaatgtttgcaagctactatttaatcaatttattgttcctttgacttatattg

SEQ ID NO: 245706 - DNA, 212 bp, Gossypium hirsutum
tcctccaagaaataaaacgcttcatcatttgatcactcttacacacttcttcaccggaacctggggttcttttcaacccctcagtgtaggaatacaaacacgcctttaccaacatctctgaattctttccaccttaatatttcaagaacgattcactcattacttaccattttaacacccattattcccctagtaaaatattctttacgaca

SEQ ID NO: 245707 - DNA, 274 bp, Gossypium hirsutum
cccacgcgtccgcccacgcgtacgcaaatttctagaagggaatcaaccttcactcccggggggatgattgctcgaaatcagaattctagaaaaaaatcaaccttcacctctgataggatcattaccataaattgaatttctagaaaggaatcaacctctacttctgatggggtcattaataaaaaccaaattactcgaaacgaatcgacttccatttctgatggaatcatttctagaaatcaacattctaaaaaggaagctgtgtgtgctaatg

SEQ ID NO: 245708 - DNA, 346 bp, Gossypium hirsutum
cccacgcgtccgcaaatgcctacgggaacgctgagcagcaaagtgaagccaagttcaatgggaaaggatgggccaccaaagaaaccaacaactacaatgtcaactattacaatggtaacaatgaggccttgttcactgagaaagggtggagtaccaaggaaaaccagaatagcaacaactattacaatggtaacaatgaggccttgttcactgagaaagggtggagtactaatgaaaaccagaatcgcaacaactattacaatggtaacaatgaggccatgttcactgataaaggatggagttctaatgaaaaccataacaacaacaactattacaatggtaacaa

SEQ ID NO: 245709 - DNA, 346 bp, Gossypium hirsutum
ctgctctagaattatatctagttaatagaagaacataatctgttttgttttgagtctgcttggctgattggctataataatctctttaatgtgcacaaaatactattgattgaagtcatgcatgaggcaacacaaggaaaacaaaatttgtatctaagaataattgaagatattgatattgaaaaaaaaaaaaaataagaaaataattattataaattaataaatatataataaaataaaataaaaataaaaatataaataataataaaaaaataaatataaaaagggcgggccgtttaaaaggaccaaagtttattaccccttcctttccgaaataaataacttt

SEQ ID NO: 245710 - DNA, 154 bp, Gossypium hirsutum
  unsure (1)..(154): unsure at all n locations
gcggcgcgagaaaaaannggaaggagaacgagggcaaagcagaagggggagaaacacacggagcgcggcggcagcancnacagggagaggcaaaccaaaangcacaaagaanagaggaggggcaacaggccacggaacaacgaaacaggggaaa

SEQ ID NO: 245711 - DNA, 272 bp, Gossypium hirsutum
caacttgtgcatcatacccaattgttgcttgatccagtcgatgaaccgtgttggatgatgtcattcctttgtgttatagaaggcgtctagttatggtctacaaatgttgtagttgttcagggttatggtctagttgaaacccatgggttcatgtacaataaggatccaaagacatgtaagatgcaaatcttatgtacactttttctgtttaatttttaattatttcatgttagtgtgttttttattttttttttttcttttgtttattattt

SEQ ID NO: 245712 - DNA, 322 bp, Gossypium hirsutum
gtgggttcaatattctgtggctcacccgttcgatttgagtgaggtcctgaagctgtcatgttagatgaaattcccattgcatgctattgctgtggaaagagaggatacccttttgccttatcctacggttttaattttctagggtttaactgttatcatcgttcttggttttatttaatgtgttcttttttgtttctgtttttttgagattgtctatgtgaaactgtatatttagtatagtgggtaaacgaattttctgcatgtatttgatatttaggctttggtattggaatgagtttttttgggctccttaattataatt

SEQ ID NO: 245713 - DNA, 188 bp, Gossypium hirsutum
gattgattgatgtttcacacttaaaaaatcatagagcaaatgttattgtaattacttttggtttgatttttgtatgcatgcatagcatgcaaagattatcgcaagctcctagactgcgtaaattgggtgattaacttatgagacgggacgagctttactcgaagtaatataaccagcttagttgcact

SEQ ID NO: 245714 - DNA, 318 bp, Gossypium hirsutum
gctcactgtctgatatgggtaacaagtagaagttaaaggttttgtgacacatttagatgtgcttaagtagttctacaacgttatgcagcatcgttgacatgcaggtaaatctccggattccccaacaggaaattgaaagtataaacagtattttggaataagttagcaattaggatctgtttccatgttatcatgtattgtaatacagaactcatctaaaattatcatgccctttgccttgtaagagttttggtcatgttcacggtcacgtttatataatggttatggtaacatcttggaaaaaaaaaaataaatagg

SEQ ID NO: 245715 - DNA, 245 bp, Gossypium hirsutum
tcacaacgattgaattaaccaaactggggtgtagtgctaaaaaacaaatggcagatgggggtgtaggttaattttgtgagggactttgatgagaatttgtgctggaaggatgaatcacttttttggtgatagtagacctctagatatttttgctattgagttgaccctgttataactcgtgactgatagctttctcaaaggtcttttgggttatagattattactaatatggtatttattagttc

SEQ ID NO: 245716 - DNA, 169 bp, Gossypium hirsutum
ggcagctgtcggattggctttagtgttaatggtgccacatgccgattctacaaggtgggttgtttgatggggaggcatcggttttactactaatgtcaattacactgtcttggctcgaggtaagcactgctacaatgggtacggtcttgcatttgtttaacatcggatc

SEQ ID NO: 245717 - DNA, 305 bp, Gossypium hirsutum
aacatcgagagtaacaatgtcctgaatgagagacaagtttctgaagtgccttttaaggggggtaatgaatgacccaaagaagaacctttggttgtacggctgaaggtttgatcctgtaccgacttttaagcaccgtatcttcggtctgacttcagttatccattgtcttcactcgacttctgggccatagactgttctaagattttgtaacagcatgtttgttcccgtttcaaaactaaagtcggtctacacttgcaggctcaatgcaatagatgaagggaaaaagagcttaatgtccttggaaa

SEQ ID NO: 245718 - DNA, 384 bp, Gossypium hirsutum
  unsure (1)..(384): unsure at all n locations
ctcggcatagcatcccagttgttgggttgatagtgaaaaatgatgcatggttgccatgcacgggaccggaataatatattgtagttttgtggtctttctcgctaatccaacttactctgattaatttccaagttagctgagggataagattacatctttcgggagctgcaactgtacaagttctcgtgaatacagttttattcaatggaacactctgtttcactatttacagtatagctatagaaacttacatgcaaccatcaaacagtggtacataaaatttgtctctgttaatttgctttaacattgtttatgattnaataatattttattattttatataattttttttatttttttttttttattattattttttttttt

SEQ ID NO: 245719 - DNA, 290 bp, Gossypium hirsutum
aatccactccccacctcctccatatgtccataaatctccacccccacctattctggtgggcacctgcaccttatgtctacaagtccccttcatcaccatcacatcccaaacctcattctcatccttatactaagccttattcccccacaaccgtatactccactctcaatacccaagcctcatccttcacattcaaagactccactcccataacccaagtatttttacaagtcgtcaccaccttcgaaggctatctaagctaattgttttttgacatcattattttaatc

SEQ ID NO: 245720 - DNA, 160 bp, Gossypium hirsutum
atgaactcatgttcactgaaattagcgaagagaagagaagaaatttggtataagaggggaattcgaaggaagaaattggttgtcgtggtgcttcagacagagaatacttattcctctgcctagagatgagccaaatataaaaaaaaaaaatatattttag

SEQ ID NO: 245721 - DNA, 406 bp, Gossypium hirsutum
gctactcttgcccccagaaatctttgtttttatcttctccctttcatatcttaagccagggatggcaacatcctctcaagactcttcctcttccaagagacacttccattggactaacaaagttgcaaccgaagataccgaagcctcttcaacaacacctaatgaggatgacaagaatggaagatcaggtattaaaacccatgtttctttgtccacaccaaggaagaaaaagcttccggctgctgctgtttccatcgcaaggctccgatcgctgtttcatcttttaggaagagccgatcgagccttccttttggcctcgggtcacgagtgatcggtactctttttggttacaggcgaggacacgttcacttcgccttgcagaaagaagccggttccccaccagctt

SEQ ID NO: 245722 - DNA, 291 bp, Gossypium hirsutum
ctggatccccgtcggatcctggcgttgctctaatcggatccgtaaggccatactgtgggtcaccttaaaaaaccgacctgtccaaactacttgtttacactccccttagttgtaaaccccgtctggagcaccgttttgacctacgccggtgaaccgttcgatgtgtatttcatcaatatgacctccatcaacgttatcggcaatccaattcagatatactcctcgttattagctgtcgtcgtgaactgttccggtgggacaaatttttcacggtcgttccttactctgttt

SEQ ID NO: 245723 - DNA, 391 bp, Gossypium hirsutum
gccacccgtccggccacgcgttcgcctgaaccatctatgaaatgctggatatatagagggagaatctaagaacatggaggcaatcaacagcattctatgctagatgacactggcagggcccctgaagtaagctatctcaagaagaactggatgaaagaagcgaaaatagattagtgggactttgcacaaggcttctcgggtacacatataaaggggaaatcagcattccacaaaaaaattggtttctggaaatctgggaaaacaagtccaaagactcacgtggtttccagaaaggaaactgggaatgacagaaaggcgaaactgtaacagctttcgtctctactaatgcatgcagctgggttggagagcaaaaaacgggaggaatttgtct

SEQ ID NO: 245724 - DNA, 343 bp, Gossypium hirsutum
  unsure (1)..(343): unsure at all n locations
cacgcgaccgaaatgtnagaacgagaagggagccagggagatctggtactcctatatcatatacctgtgggtggagacgatttaacgatatggtagcttcttactaattcttaattgtctaaatgagcatagatttggactcaagctagaccacagtataataaacaaggtcgagttgggtcaagctctaccactttaatgcctttatctatgcctaatgcgattttcaagcatcaaaaggatgtaattgaatttgctatgacataaacattattattcatataatgatattctttagaggaaaatgaacaattttgtatcacttatagtttaattcattgcc

SEQ ID NO: 245725 - DNA, 317 bp, Gossypium hirsutum
cgtagttggaattactcgcctcaagttggatcttttacggtgcaccctaccctttgtggccgttgttttaatgttgttggtattcaaccaacacctgcaatggcagcagccatcatctgagacctaaactcaaacaaatccggctgaaaatgaggttaacctggaagttggccgatctttcgtttcaagctttccagtgtagccaatttcacgtccaagctaaaatattacccattctttgcagaagagtgttaagtcaatcaattttttgcgttacatgtgacctttctgcataaattactatactttgcacacaa

SEQ ID NO: 245726 - DNA, 275 bp, Gossypium hirsutum
cttccgcagatccattggctctcaagcaactctccttcttttaaagtctacgcctgcggtcttcctcacattaagatttcaaatcccccttttttgcggcggttaacgtttgctgatcgttgctcggtttccgaggatcaatcatgactcatatccttttgtgtaagtgaacgcggtaaccatagagagcgagatcgagaaagggctcatgcccgagcggtcaaaggcagcatgaacaatgacgatggcttaaccccagaacatcgccttgaaag

SEQ ID NO: 245727 - DNA, 442 bp, Gossypium hirsutum
tcgttccgtgtgacgtcgtgtgtgtggtaggtagcagtctgtgtagctatcttccctatcttttatgatctacatcctgggggattatgcgtcagaaccacgtctttgccaaatgatgctaataggctgcataagaataggagtgaggagaggctaattcaattggcgcttgtatgattgtctacaggtatgacacttaaaatcatgattggtattgcttggtctttaccgtggtttacaatatttcatgtgttaggaatcatcagtttaccgtggtctatacttttggaatgtttagactcctctgaagccaagtgcttctcacttggagattctgcaaggatagttatctttgcttagctattgctttttggtttggttcatcacaaaatggttgctgggtttttgcaatcgtaccccaaattgattactggtgcttttg

SEQ ID NO: 245728 - DNA, 327 bp, Gossypium hirsutum
ggaaaaggtgatttgattatcagaattgttatgtgatctactttcttatcaaatttggtgggaaagaagggatcattttattcatttcccaaatccaaatccaaatctattcatcctacatattcggggtattcttcaagcaacatttaactccaatggggaatcttcttatgccgtacgattaggagtatatgaggatggctatcttaaaacatgaataaactttcaaagaactagtgtacgaactgcatcgtctatatcgaatccagagacattgatgtaaagcatggaaagcgaccgtcctaaaggaaactttagcctgaagaa

SEQ ID NO: 245729 - DNA, 350 bp, Gossypium hirsutum
cacgcgtccggtagtcccgtatcggtttatttgttaacaaaggaaagctgcaccggtgggaagcacagcatgaggaactcggataaaactcatgcccatttgcaagtcaactcagcgattctgatgggtggagctagagggattcggagactaaccaatgcaatgttgacggagatcgtcagagctacaatgcaacataagaagaagaaaaactcgatatcggagtcagaaatcttgagtcaactcgtttggaacgggtatttactaaaaatgtggatttgttcacatcgacggggtcaattcatgtaagcgtagtcactcatgagttcgggctccaacttctcttggag

SEQ ID NO: 245730 - DNA, 274 bp, Gossypium hirsutum
  unsure (1)..(274): unsure at all n locations
gagggaaagcgaaggcagcncaacaaaaccgggaggcagcagagagaagaagagccggaaccgaaggaagacctgaaccaggcgacaaaaggaggggaccagaaaacagngcaggcgtaagcatgggcagagacacaaaccacngaagaagaagaagaagaagaagaaaacgacgaggacgaacaaaaagaagataggcaggcacaggagtaaagtaacacagcaaaaagaaggtttgtagggtagacagcaaggacatggaaattactaatga

SEQ ID NO: 245731 - DNA, 306 bp, Gossypium hirsutum
cacgattcctgcgttcaagctatgaacattgactatctgagtcaaaagtgcagccaaggcggcatatattgcatgaaggatttccagaaaggaggaggatggagtttcaagggttataaatgcctagtctatcaagtctttgatgtcatctctattgtcatgaattctgttctgttcgctggatgaattcttcatattcttttatcttttacccatctcttctctgtattatttatttttttttgctatctgcatttctttttttgttgtttcatttttttatctctttttttatatttttcattt

SEQ ID NO: 245732 - DNA, 411 bp, Gossypium hirsutum
  unsure (1)..(411): unsure at all n locations
tccttaatgattggcctaatgtggcacctggtaaattcttgatggaagaggcaaatcttctaaatatcttacagcttggaactattgaacctctaagtctatggaagtttttattgcaaaaatttttttttaaacacgtaactttgttgttcttttactctgctccatggatgaaatggttgactcgtaagttgtgttgtttatagctaagctccactccactctggactntaagcaacgaacattctcggaaaggatgaacttaatagttggtgagaggagcaacatanagctgaataggatttacttttcattgtctttcatgttgcatangaaatactgaacattaatgaatcggtcaatgagcacgataattttgggatataagccaagtgtaatacggcattctta

SEQ ID NO: 245733 - DNA, 224 bp, Gossypium hirsutum
  unsure (1)..(224): unsure at all n locations
agggcaggaagccaggcacgcaaangaacaanacgggcangagcgcaggcacggggaggaacanggnaanggggcaggcaacccacangcaancncaaagggggangccaggcggnnacaacccgaagaagggagccaggggcnacacncaacagcaacagggnggggggggaggcnaccgaagagaaaacaagggcaaggagaggaacggaagggacaccccc

SEQ ID NO: 245734 - DNA, 119 bp, Gossypium hirsutum
agtttgtaggcgcttctggctgaaaattcaccagatagttctccctgccacacttgaaaatcgtcggtaagagtttccgtaagagggatctgcaaaatcatttgagcaatatttgctgg

SEQ ID NO: 245735 - DNA, 171 bp, Gossypium hirsutum
cccaagtgtcctcgaagcttcttaataatctgccatgtatggatagtattattaccagctagggtgtagctagtttgcaaactcaacctgcaatttgtattattaatgtcattaatctcactacccaagatttgacacatgaaaaacatcaaatctggatttttatttatc

SEQ ID NO: 245736 - DNA, 476 bp, Gossypium hirsutum
attagacgatgcagagattatgtacgaagctccgctttttgggtctccaatcaacccaaactcttccctctctttctgcttctcgtcgccttctgcatcattcgtttcctccaatccacattatttcaaccaaatggagccttgaaccctttctcaataacagtgtcgcatcacctcctctcgccgtcaactccttttcttcttccccactgcttctctctttggtccaagtccggcatgtttcgtcaagagaacgagcaaagaggaggaagcccatgactccacgtacttccaaactcaagaagattaagatgaaatcttattcgtcctataagtcccgatttaggacaatgaatgatgggaatattcgtcgctggagggaaggcaaaaatcataatgcacatttgaagtccaagaaatcaagacgaagactgcggcaaccagctatagtacccgccgcatatgcaaaggtgatg

SEQ ID NO: 245737 - DNA, 367 bp, Gossypium hirsutum
cccacgcgtccggaaacaaggcattgctaaagagaaagaaaagatgaaaataaacagaagcagaacacatggtgatgaggcagagaacatggcaccctctaatatctcactaaatttggaggatgtgaagcacaaaaacaaaggggaagaaaggttactgcaaatacggaccaatccaccctctcctcagtgcttttctgcccctaccaaaacaactgccaccccttccaaggcttccagatccagacttatggagaggggaatcctttaagaagtgtagcaaaacatggatattaatactgaataagcatgtagtcatgtatctccttgttcttttgttattaataatgttaatgttacggatgga

SEQ ID NO: 245738 - DNA, 436 bp, Gossypium hirsutum
accacacgtactatattatcacgtattcattcacatacctataatatgatctaagatgtggcgaaggaagctaaaactcaagctacagctgatacaacggcggctgcaccggcgccagaggctgtatctgaagctgaatctgtggatacaactgcatctgcagcgacagctgaggagaaccctgctcaggccgaagctgttgatgctcctgagactgctccagagactgtatcaagtggaacacctggtggatcacatgatctagataatgcccttgcagaggatgggaaggcattcatgatggcattcgtcgaaggttgggaagacagtgcaaagaccaaagcccagaataagctctatgataaggtctcttgtgtagacacctgggaaaactgtctggaagcatatctggaagcaaatgtggaacaaattgaag

SEQ ID NO: 245739 - DNA, 195 bp, Gossypium hirsutum
ggaagtatgcttccattatctacgatagctcttcaaaagctacgtttatagctgcgggggctgatggaagggtgccaaactattcttgtactgatgcttattgcaacacatgtacagacagttcccacggagtctagcgcgcattgtataaaacctgcagatggattgttcttagagtcttgccgtgaagttgca

SEQ ID NO: 245740 - DNA, 263 bp, Gossypium hirsutum
gccacgcgtccgagattaacacccatgtggaatattgcaaacacttgctagaagctgggagagttcaccgggaaggcgctgaacgtgtacagcaacttaccgggcatgatcatgacgcagcttgacagcttgcattggccgaggaagcccgtcaaaggccgaacgcaatggaaatatcagaacggcggtgtaagcgtgctatatgctgatggacatttaggtctgggaggatttgcatatcttacagctaatgagggcggacg

SEQ ID NO: 245741 - DNA, 300 bp, Gossypium hirsutum
  unsure (1)..(300): unsure at all n locations
gtgaaaaaccagacaagagagaaaacaagaaaaatgggtgttctggatcatgtttcagagcggcgggattcgcttgcaaggnttgttcccaaaatcattgcatccttcatcttatgtggatattttgtgcccagtcttcaccttttggttgtccatcttaggtaacattatcttctagaccgtccaattttactggtttgtccaatgccttggcttaatttgttcttgccttcttctctagtatgataccaacggattgagtgttctaacccactatcttttgttttatgaatgtatgct

SEQ ID NO: 245742 - DNA, 270 bp, Gossypium hirsutum
cacaaacttacaaaggagactagacgaaatactagtagaattataaatagtagtgatgaacggagtgattatatggatccatatatacatacaaaatatcacattcaaaattacattcaaatatctttattaaaattggtatttgagttcgtgagtttaaaagtgagaacaaatgttagatcaaactttaaatttaacgtttaatgaaataaactaagagcaataatcactgtaatcagctttctgatcattgtgctttttattgtggtt

SEQ ID NO: 245743 - DNA, 386 bp, Gossypium hirsutum
cttaccgtcaacggattataatatccctgagaccatgtccgagaagagtagggattctttctcgtacaacccctccaaacaacttcaaggtccgtaattcgaggttttcaaatgaaaacttttgaaactcgggcctgttttagaacaatttgggcaggcttgttatgaattgtgaatggaaaacaaacctcaacaaattaccgaagattaacttcaattctcgactgatcataatcatgctttccctcagatgttcgagcatggagatgcattaagccattcgatggatgaattaagtgaaggattagaagtggatgtgataatttactaacactctacacatgagacaaactcttcaaaaagagctacgcgagtactcttgtaat

SEQ ID NO: 245744 - DNA, 153 bp, Gossypium hirsutum
ccggtcgacccaggcgtgcgtcacgctttcgactcactacatattactcctctaacacttaccaatttatcacaaacatcggctggcatttcttcaatgatgtgtgtattctatttacttttaaacttattcctatcttttttaaactacttt

SEQ ID NO: 245745 - DNA, 260 bp, Gossypium hirsutum
cccacgcgtccggagcggagttcagtctaggagtgtgtttggtctttttaatgttcctgctaaaaggtattcattcatcttattggtagtatttccagcttgttataccaaagtcttggtcttggacccttttggcatttggttgcttgcaataccttgctatcacttctatctgaccatctttcactgctggtctatatgtgagtgtgaggctatattatgcggggaacctatcatcattcgtaatatctcagcttttg

SEQ ID NO: 245746 - DNA, 492 bp, Gossypium hirsutum
cccacgcgtccggaaattttttattagcacacagagatcgatctgatttcaatagatcctttcaatgccggttgaaacggaagaagttgcggggccgccgccgccgcctgccgttcccatccctcctcagcggcggccgagggtaagagaagtcagttccaggttcatgtctccggtatcatcctcccattcttccggcgaccattcgagatctccacttcataagcaacaccatttgcagcggcagagacggcaatcggaaccggaggttgacgagaacatcctcgccgttgccccttgtgatactccaagagcctctcttgaatcgccgttcataaatataactaccgttcaaaagaagcatcgccattcaagaacttatagcgataccagcaaattatttgggagaagcacagcaaataatacgcctttaaggccagatacgcctactattgaaagaacttcatcattaccatcatcaacaataaagat

SEQ ID NO: 245747 - DNA, 221 bp, Gossypium hirsutum
tgaagatgaaaagaagcgaggagaaggaactaaagcttagagttgcggttaatattggagcaaatattgaaacatagctgctacgtggagaaaaagactgcagagtgtatgtctggtttatacaagatatatgatttactatttgttagtgctatcaccattgtttgccttgtaaaaaggatctcattctattaatcaaaatattcatgttaatgcttttg

SEQ ID NO: 245748 - DNA, 104 bp, Gossypium hirsutum
cccacgcgtccgctcgggcatctgtggttattaccttaaaatctgttgatcattctccatatgataatcctcttgatgatcgaaagagagtgcatgtacaggac

SEQ ID NO: 245749 - DNA, 143 bp, Gossypium hirsutum
gcggcacacaaaaaagtcgaaattgtttactattacccatggtgaaaacccaagacattgtctaaaagcatggttactgtcttcttctgtatttgggcatcgaggacatgagctatctgaagccactcttcttaatctagatt

SEQ ID NO: 245750 - DNA, 309 bp, Gossypium hirsutum
taccaactgaattcggaggaaaggctgtattggagtacaaccatgaagaattctcggagcggatgagccaggatgatatcaagtctgccaatttgtggtgatttgatgataaactccaatgtatcggcttcaggcactctggatcctactttttctccgagccagtcttgtcttgcaccatctgccagttgatctacctgccttatgcctgttatgttggaatataattcatattatacatttgtatattgtctatgctactgtatagtgtgcatcaggtattgaagcagcgaattgtcctttttgtct

SEQ ID NO: 245751 - DNA, 338 bp, Gossypium hirsutum
ctcattctccacagtttctttctttcactcttttttttttttgccctatctaatagggttggagtcatcttcaagctccaatctttctcatgcattcgtgtattcaagccatacacggcgacgtttagccttcttcctttttgggtctctttttttggctctctttggagggtttttgggcgtggaacagtgcatatttgacctcccggggttttttgagctgtactcatgtcaaagctctctgcttttagtggaagtgatgatttttgccctgtggggtcaatctacccaaaccggaggggagtcagtctctttctttaccctaaccaggatgtgta

SEQ ID NO: 245752 - DNA, 306 bp, Gossypium hirsutum
ggcttatcagtgaaaagagaagaacatcctttcaatgcaagaccaacaacagaagatagccttaatccaccatggcctggtcccccaccaataaaccttttagatcacccactgtcacaaaacgaaaaccctagccaaaacactggttctaatacacttcttcctccattccagacccaaacagcatctccacacatgtctgcaacagcactcctgcagaaagcagctcaaatgggtgtgactatgagccaacccttacaatcatcaccagtagcggctatggctttcatgcaaagagcttacatg

SEQ ID NO: 245753 - DNA, 369 bp, Gossypium hirsutum
cggttttccttggttgtgtgaaccatttattcattccttggctaattttttggcccgggcggctccgtgaagttggcttgtggccgcctcggccgggtttttcggatgagtggttaaaccgaaaaccgctgtgtataatcggcatgggacctgaaagcttttaatggttttctctttggctgagttgaatcggttgaacttgccagcttgtaaatttgatttccactttactttttcttttccttttcaggttacttattaaattcatttttgttttattatgtattatctttttggataatctgaaatcttgatattacataggaaaattctccgttggattaatccatgccatggcatttttatttt

SEQ ID NO: 245754 - DNA, 295 bp, Gossypium hirsutum
agacgcaccttagctcgactgggagctaagccatgtaaattttcccataaacattgtgtgacaggcgtaaatcgacttccttggctatgactggttgaaggtatcttataagaaagacctaccggccgtggaacctcttgaactagaggtatttttatacctggtgttgctctagtataacttcctatccaaaagggattagctgcttaactcctcttagagaattaaccaatgtcattgctagagctgatcacaaagattcaaaggaattcactcttggagattttgaaaggtt

SEQ ID NO: 245755 - DNA, 270 bp, Gossypium hirsutum
cccacgcgtccggggaaccaactgtagctcgcattatgaatgcccggttcgatggcgagggacaaacactaaccggtctagacgtctaacccttgcatacggaaggtggtctgaccattgcgttgatgttaagattccacatagtacaagggttcgccattccaaagttacgaatgagagacgctataaggctcttacaagttgttactgtccacaagcaaggaatttcatagaagcgctcatgtagaggagagggtcgtacagatcaag

SEQ ID NO: 245756 - DNA, 139 bp, Gossypium hirsutum
cccacgcgtccgagtggtccaatcctgtaactcatagaatttccccatcaatagaagtcggggggtctactgcaactataagagatcttgactgtaacagtagcttagtagttgctcctgtggaagatcatcagcatga

SEQ ID NO: 245757 - DNA, 325 bp, Gossypium hirsutum
ctttctctctctccatagctccctcccagcctctgctccccctataagcttcgttaatggcgtttcagatctcaaaaaacaaactctaagccttaagtaaactcaaatcctacccaaacccaataccaaaatcgagataaaaaaaaatcatcctttcatatcaaaagccttcattcttttctttttttcgtgtgtgtgttttcttttttccttcttttcgagttttaattaatgcataagaaaatggcgttttcgttcccagacgaggtgctggagcatgtgttctcattcatacaatcagataaagaccggaacgcggtgtcga

SEQ ID NO: 245758 - DNA, 236 bp, Gossypium hirsutum
ctcgtgtttcccggcagcgaacttgttttgttctttgcttttagattatgcttaagaaggggtaacactataaaatgtatgcctacatatgacttaatttatctcttgcttgtgtaatctttccatgctttctgttattcatctttgattcgagaagtgtagtcaaacccgacttttcgagatgcggaatacatgcaggtatgatttagcctaatataatggtgcaacattctttt

SEQ ID NO: 245759 - DNA, 109 bp, Gossypium hirsutum
ccttctgatcttaatcatatcaataatcataggatattttacttaccaatattcccctagtgacggttatctaaccgggaaaagcccattcttttaatccttcgccatc

SEQ ID NO: 245760 - DNA, 181 bp, Gossypium hirsutum
actatactaaataagcaaccactattgtctctggtttgttgtttaaaattcacttctgagtgggtgcttatggcttaattgtactttcttttgatgtctacgaaacctgaacatatatgcatatagcatgaaaaaaaaattaaatttttatttaataattttattaaaaaaatataataat

SEQ ID NO: 245761 - DNA, 400 bp, Gossypium hirsutum
ctgttttctgttcatctactgcacaaatcattacttctcgcccaatgaatgtaacgcggacgggtccctcaaccatactcaactctacctttttcaaaaatgatcatctccccctttcctactttctaccctatatcctttatcaccaaagactaatttaattgatctttagacatcctataccattttgatacaaatcctcgaagcttttttacaatatattttaactataattaaacactatcacaccttatacttgtaatgtactccccactccttcatattcaccaactgcactgctcaatacactacctcatatccactctcatttgaacttctccaacttcaatgtcatcatccactcaattatatacaattcactctgatttcacactcatct

SEQ ID NO: 245762 - DNA, 286 bp, Gossypium hirsutum
gttatccttattctctaacccctgctaaaaatcctatgaactcgctggaggcccatactaggagagtaaccaggtataaagtcgactttattttcattaaattgttaaatgaaactcttgacccattctttatattgcgttgtgaagggcattcttcatttcctatctatatcgtgaatcaagtctacagcacatgcaattctttttgatataacttatttgaaacatgactcaattatcatattttatatatacatctatgaatctaattcaatacttttgtaaa

SEQ ID NO: 245763 - DNA, 461 bp, Gossypium hirsutum
cccacgcgtccgtcggccttgggttcaagaaaagcaagcaaaaatgcaaaggctcggagtgacacaaacacatacaagatttcaggtaccaatgccaatgctgccatttcaagcaaaggtggatccttaaatgataactcggaatccaagggtggtgaggaggatatgaacaacatcaaaactgcgagttcaaagaaaccaagtgcagcgaatttcttgaatagaatgaggagctctttatccggtaatgagccattgacagagacattgaagggtgtgattagttctgattatggaaaaggaggaggagatgcaggtgaatcataatataaacagcactatcagttaatgtgatcaacagatatatcgaacttcgactccacggacacgttctggcggaaaaagaacgagttctgcatataggagtacaggaagaccgcctaaaagagtgcctgccaccc

SEQ ID NO: 245764 - DNA, 289 bp, Gossypium hirsutum
cccacgcgtccgggtggatcttgctccgatggaaattcgcacctttgtcatggaattgagagttgatctgatgtctactactttcaagagaatagttgatgcataagtggctgcctgcagtttgttttttacaattgagagatgtaatttttgtatagtgttggaatttgcaaactgctgagggcaccgtttgctgtgcaggtgtgtatggactaatcatgtgagtctaataaagggtataaagtttgtcttatacatattaataatttattaaaataatttatataat

SEQ ID NO: 245765 - DNA, 319 bp, Gossypium hirsutum
  unsure (1)..(319): unsure at all n locations
cccacgcgtccggagagattgagaagtggaaagagtatactcaggagatggaacgactgtggccttgggttgttcaaatgaccctttatcatattacaatatcagtgagggattcaatgtgaactatagtttatatctgaaacttgtaaatatgaaggctacgatcatttggagctaaacagttaacattattttccaaattctgcctcgattaaaattatacaggctcatgtaaaatgatttcaattgtggatcactaaaatcacaataagtttaaacctannaaaaaaaaaaaaaaaaaaaaaaaaaaaaaataatg

SEQ ID NO: 245766 - DNA, 452 bp, Gossypium hirsutum
  unsure (1)..(452): unsure at all n locations
ctctgtcgttcaaatctatattagaaagaatctagtttagatttaaataattccaaacttgacgatagaacattatctgaaaacatgatacaagggctctgctgctccaccacacttgtgacacaggacatctcttctaatccttctgtgttggagattaacaaaagtaggcaagaaattccaagtggttttccatagattaatttttacttttgaagggatttttagagatcatagttttttgtatagctccctagaatcataatgtgtataattagggttaaaagtacctttatgtaatagtttataggaacttctgacagaaaattcccttgaagattccccctccagacccgtatgtcttcaatcctttctttggccaaaggagtttgtaagattttcgacgcaatctcttcaagaaaggtactattaattagatntactttccattc

SEQ ID NO: 245767 - DNA, 315 bp, Gossypium hirsutum
acccacgcgtccgacacaccccactctcaaattaattatcacgaggaaaacaaagccgcctacacccctcatagggaggctatatgcaaacatataaacccctcctactgctaatcccttccattatattctatcccaccatacctacaattttcactctactatattttacaggtattcactgcttctatctacacaaaattcaatgttataaattcccttccttttaccatttgattcatgctcatgaataaaagactactacggcacacgaaatattcaaatctgtccaccccgttaacaattaatatcact

SEQ ID NO: 245768 - DNA, 426 bp, Gossypium hirsutum
  unsure (1)..(426): unsure at all n locations
cccacgcgtncgcccacgcgtccgatttgttaaagggctgctgttatccacatctttttgccttctcttcctgatccttgactgaaagaggaggcaaaaagatgtgaatttgttaaagggctgctgttatccacaattcttgatgatgttttatgataccttaaaggatggttgctgcaatcgtgggcttttcacagcgaagaggcctacgatatgggtcttcgcctattgtatgggttgctgcgctgtttgtagtgattatgtttgatgtattaagcaaaagtgttaaaataaggtaggaatgagtgtaatatataagtggcatgtgtggactttttagttattaggcctgatcaggtttncacttcatccttttcatctcaggtcatgacaatattaaaaataataataataattttatccctg

SEQ ID NO: 245769 - DNA, 256 bp, Gossypium hirsutum
tattcttttattgcttatcggggttaatatgattggaccgtcaatggtggggttgatgaacaggtctctttctctttgaaaataaattgattctcttctataaatgatggtattgttgataaggattgcagggtggacctttatttgagaatatatatgatgattaatcaactttaatggtgtgatgattattttgtactataaatgatgtatcaacatatcacactcttgtgatatgctgaattttaatatagct

SEQ ID NO: 245770 - DNA, 321 bp, Gossypium hirsutum
  unsure (1)..(321): unsure at all n locations
cccacgcgtccgggagcattgctgcagaggtttatttgcttgaaatccaaagaacacgttgtggatgtgcaacaaatttctctcaacaattgatctaacagaaaaacgaacttaccggaaacttgtactgctaaaatgtaggggaattataggtaccttataatacactttcccctcttctgagtaatgtatgtaaatagcagcttagcaaagattgtaattatgctgtgttccatgaaatagcgctttgcatagattagntaagaanaaaaaaaaaaaataaanaaaaaaattttaaaaaataaaaanatataataatta

SEQ ID NO: 245771 - DNA, 460 bp, Gossypium hirsutum
  unsure (1)..(460): unsure at all n locations
accggccgaatcccgggtcgccacgcgccggataatagaattaataaattcataagctggtgacagaaaatctctttcctatgcaaatgctctcatctctcccacaaatgaaattttcatacgtaagtttgtatagcactggcttaatactgcatttctatgagaagttttcctactcgaaagttgttgagttattctgtaaaatctttgtaccaaatatacttacaaatgtgaactaggagttgctatccaattcatctagaaaatgcgaatgttccatttagtgggcctctgaaaaagaattcattttcttctagtgaatttgagttgactctttgattgctaaagtataacatcagcaacgtatacatccagaagcaaattggaacctctgattcatcttgtgaaatattctgttctccgttttcagtcatgcattgaatgtgcanattttcattaa

SEQ ID NO: 245772 - DNA, 379 bp, Gossypium hirsutum
ctccttttacttgcatcattctactgacaatgacatcttttgttgctggattcatctttaaaaattgagctcatggtttgagccgtttttaacgtctttccggggaagaaacgatgatcttagagttccgaaatgacttatacagcagccaatgcttgttgaagatgttcattgcctggataagctgcaaaccaaaagaaaaaaagtagtgattttcacatgaaatatacaagatgtttaatgttaggtgctatttaaggctacattagaataggcacagagatgatcttgtatatatgttttttatcaagtagtggattttgtgcataaacagagaaaaactgtaatgcttaatgggacatatttgcaaggtactatt

SEQ ID NO: 245773 - DNA, 450 bp, Gossypium hirsutum
  unsure (1)..(450): unsure at all n locations
gcctaaggagggaaatagtggaacctttctatcagaagaaagatgaagctaanatggttgccatagaggctgccctggctgcccctaagctgcccgcctcttccccaccctctggttctatgcagctcgaagaacaagttaccgcacccagttccgcaacaaccaatctgaactccatggaggtggagatggctgactgtgatgaaaacaagaccaaggcctccttgagagctattggtagaataggaaagatgtccaaaaagaaattgaagatcaaaatttggaataatgccatttttgtgtttcaagtgtgtgatatatggccttgtaatattcttttatttagaagaagtattttttgggttgtgatagaaagcaaactggggatttcatgaanttgtaatttgaaggatatttcctgtcggcattggaatcgaccgagcatgtacc

SEQ ID NO: 245774 - DNA, 336 bp, Gossypium hirsutum
  unsure (1)..(336): unsure at all n locations
cccacgcgtncgtttttctttaaaaaaaacttttgagatacttttaactcacgcctcctcttgtccccttttcagtcggcaccgatcctgtcgaagatttgtcgcgccatggccactgatgaaagcccgattccggcgacgagctcacgataacaggtacttcccttctcttactttttgaaattcgtatataaaaagaatgaaataaaaaaaccgaaagaaaatcaaagatagaaaaataatcaccttcaaaagatcttgtttgaatcaattttgtttccgtgctttttcgtactcaatccatattcaatttctctcaaannanaanannnnnng

SEQ ID NO: 245775 - DNA, 465 bp, Gossypium hirsutum
gaaaaaccggggcgaccgacgcgtccgcccacgcgttcgtattaggaaagtaaatgacgtttttatgttgatgttaatgaatacaagggggggagatgaattcttgatgggttcaagtcattggttttcatttgaactttgtgattacaacacaacaatttacttgaatggaaatgcacttgtgtttttatatcctacaaagcttctttagtcaacttttgagttgaaattgatattaggatgtaattgatgattttttattatgttaatgaacataattatagaccaagtttgggaccttttattttggttaaagacattgatattcattgagaatttcgtgcattgggattagataattacttgaatgaaatgcactttttggacccctgtatagctttttaaaacatactttgtgatggaaattgtttttatgaattaagaatggagattttttctcaattt

SEQ ID NO: 245776 - DNA, 451 bp, Gossypium hirsutum
  unsure (1)..(451): unsure at all n locations
cccacgcgtacgatttgctgtcgatttcccctttttttgttgcgttctctctgttgctttgcaggtgtttgttgcgagttgttgcaggtatcgtacgaagacgtggcacggctcgacgcgatgcatagaggctacggttacggcggctggagagagcgacgctagaggctactgttgcggcgctcgtgctagggctgaatgcctaaggtttctggcatttggtttaggccagttggccagggtattgtgcttaagtttgggctaagttaattgggttagattttgatgggcatttgggctagtctagcttaagctaaaatgatttgggccacgttgggcccatgtatttggaactgtggactttgntttacttttggttttaatttatttgtgaattttgggcccttgcaaaatttggccttataaaaaagggtattgttgaatattttct

SEQ ID NO: 245777 - DNA, 299 bp, Gossypium hirsutum
ctgatatattggacttgtcactcagaataacacatatatatccaacctaatccggtgtttacagtttggagcctggaacaggcaacgtataatgtatcctttgtaattaatcaatggtttaagatggttagaaaattgtttcactttcataaatattgtattctactgtcatgagtttgattatgaaagaaggattgatcctcttctaaaaaatataatactaattaaaaaatttattattatatatatataataaattagtataatccataaatttaaaaagggcggccgttttaaag

SEQ ID NO: 245778 - DNA, 181 bp, Gossypium hirsutum
gtttgcagttccaatctgttaatggtttcttcttgtttaaattcgaggttttgtctagtaatctgtatgtaaaagctgtattagcagaatataatgttgtattctatacctattctacattgattatgtctgagatggtggattggtgaaaaaaaaaaaaaaaaaaaaataattaataatt

SEQ ID NO: 245779 - DNA, 329 bp, Gossypium hirsutum
  unsure (1)..(329): unsure at all n locations
cccacgcgtncgctcttttttcacttggccacacatgaagatacttcgaataagtctgcctgcgttgctttaatggaatcacttaccaataggcggaaaagcatattcaaagctgtccattagtagaaagcagtgctcaattggccgacaatatcaccatgttattgacttggattcagcttatagaacctcaggtaaattatttcattcttcacttggttattaattagaaaagtccaagaaattgctgggtttttgtaccttctgctgtctaagttaccaatgttaacaaatacttggtcattatttggtacataatttttcttttt

SEQ ID NO: 245780 - DNA, 434 bp, Gossypium hirsutum
tgaagattcatgccatggatcacagttcttaagcaattacgttaagaaggttccttttctcctaactcttaaccaacattcttttgatgcattgttgataatgatataatggaattaagcatgcatcaaattatgatgcttgccttgtttcttgaacagcttaatcatgagttagattgtcaattcagtaggtgtagaggcagacttaactcagtcccgatcttcccatcggatgatgttctatgttttccaaggtgattatagcttgtgttctccattaaacagtaaattatgccttgcagatcacgtcaaattggcctcaatcaccaaaatctggaaggaagccatctcccagcacagtgcaagatgcaaactctatacatccaaggaggccttcaattaaggctgaaagctctaaaatggatcaatgaaaa

SEQ ID NO: 245781 - DNA, 351 bp, Gossypium hirsutum
gagaaatcggggaatgggaagactttcttcacttctttatcgaaagggatcgggaggatcgggatatttagcggtcccggcggaggaaaacgtcgcaagccacgtggatcagaagggaaaagcggaaggagtcgaaggtattctgtgtcttaaaacatttgctttgcttgtatttaatagtaggaaagtagtaggacgtgaagaagcttctcatttctgactgtatgtatttacctatttatttagatttaactacaaaattgacctcaaattatatatattatttaggtaccttcgttttatccaaaaaatatacgacattcaataaaaatgtgcacgtatcatgttttt

SEQ ID NO: 245782 - DNA, 446 bp, Gossypium hirsutum
  unsure (1)..(446): unsure at all n locations
cccacgcgtccgaaacttttggatgctactatgaatatggaaggagttttgttggccggggttcctggagcaggtggatttgatgcagtctttgctgttaccttgggtgattctagcaggaacgtgacaaatgcatggagttcgcacaatgttctggccttgttagttagggaagaccctcaaggtgtttgcttagaaagtggcgatccacgatgccgggaaatcatttccgcagtttcttcagtcaacatcaagtgagctttgattaattgttttgggtttgatgagttagggatgtcatttaaagatttggtggaaaacatgatttacaagagaaattgtactgtgttctggagatataatttaattgggaaatgatttcannttgncgaaaacaaaatattaattctatttggtttattaatttnntatgaaataaatttaaa

SEQ ID NO: 245783 - DNA, 475 bp, Gossypium hirsutum
  unsure (1)..(475): unsure at all n locations
cccacgcgtccgcccacgcgtccgcgtattgcctttctctccaaaaaccccctttgcattccatttcattggctttttatagccgaataaaaagaataataataataataatacaagaaattttcccttagatctatttgctgtcaatctgttgcgggttgttagtctgctattttcttcttgcaagttcgattgtacggaggagaacgctcgtggggatgacgtggaggaggcttggggctctgtggcgctgaagacccttgctgaggaggctgcaatgttggtcctagggttttagtccctgaaaccgaatattgggccatctgggtcgagtttcaattgggttaaatatttgggctaagattaatgctttgggtctntgtatttatggattgtggactatattctatttttattcgggttatccattcgcttgtaaataaaattaaaggcccgggcaaaaatggccttctac

SEQ ID NO: 245784 - DNA, 441 bp, Gossypium hirsutum
  unsure (1)..(441): unsure at all n locations
ggaaatgaacaagtggtggttctggctacagcgagtgttgacaagaaagtgagattgtgggcagcaccatcagtaaattcttcgtgagccaatgcttttacgttcattgtcaagaatttcatggagaagaccagggatacctgtggatgcactttagatcacatctgctcagcaatcttttaacatcaatagagaatacatacgtagctcttccggaatggtagaatagctgtatggtaggcatatatgattggaggagatacagaggaatgttccatatatttgcttgaatggtcttttatgttactgaacttttttgcttacttgaaggatttaaaaaagatgtagtgggctgtttgcgataactcgcacgagtagtatcaaggcaattggcccatgttatgaattataattanttgagcaatgaaatgttttgcgatt

SEQ ID NO: 245785 - DNA, 132 bp, Gossypium hirsutum
cgtacttatgagatgaaaaggggagattagtgccctagccggaaactgcctctcaacttaaggacgcctacggtttaagaactctgctgataattgaatcatgattctactgaagaaaaactaacaacaggt

SEQ ID NO: 245786 - DNA, 216 bp, Gossypium hirsutum
gtttaaaccgtctgtttgttggccagcatgagccggcaaacattatataggcacctagggtgttttttttagggaatacggtactgtaaggacttatttccatactgccccaagaaagcagagaaaagaccttacatttctggatgcagaacacatacatacagaattccatgttttttgaggatgagaacccttaccttcaaaactttagatcct

SEQ ID NO: 245787 - DNA, 402 bp, Gossypium hirsutum
cccacgcgtccggattggagtagtttgagagcacaaacccctccaaagcttgctttagagacaggggctcaatcaagtgatggcgatgattataatgattcttcatggaatcctacgcacattggagatggttctgccaggcagagtgatggaatcgtcagctcctcatcatcagctgaatcttctggtcatataactagacttgcctcaattgattccttcgactcaaaatggcaacaatttttggatccgggagaatctgttcttatgatctcaatggtgaagaagctacaaaagttatcaagcaagaaggtgcagcttatcctcaccgacaaaccaaaattgatctatgttgatccttcaaaactggtcgtgaaagggaacattatttggtccaacaat

SEQ ID NO: 245788 - DNA, 276 bp, Gossypium hirsutum
cacagatactgtggaaggaaattgcctcaaacatcacatgccattgttgcttccaactgtaaaatagaagatttgtgacaattggaacctttcttgtaaggttctgtttatttattttgagttgctagtacgtgtttgatactggaaacttgaattttaagtttcgtacttatgagatgaaaaggggtgaatagtgccctacctggaaacttcctctcaacttatggtcgcctttgttataataacttttctgataatttaatcatgattttattt

SEQ ID NO: 245789 - DNA, 298 bp, Gossypium hirsutum
cccacgcgtccgcccacgcgtccgcttaaattgatttctatcagaacttgtgtcattgtgggaatgttgaaatttcataaacgatttgtctctttaatggaataccttttttattctcaaaaaaaaaaaaacaaataaaaaaaatggcggactgaataaaaaatttaagttttcgtacgttaacaaagcgacatcaaaaaaataaaatatagacaccttaatttttttatactaaacaaaaatttacatcctctttactggaaacacccttacgtaccccaacttaataacctatcac

SEQ ID NO: 245790 - DNA, 325 bp, Gossypium hirsutum
cccacgcgtccgatataaagcaggttacggttttattaatttatcctatgttactctgttggagtgaaaaactcagtattcaggtttcaaaataaaacaaaaaaaaaacacgaacagaaaaaaaaaccaaagaacaagactaaaaaaaatcagctgccgctcaggagcgtgctaaagactaagaagatggacacttgaaaaacgaaagagggggggaccgttttaaggaaccaaggtttccgaccccgagacgcccaagatatgctttttcaaaagggtcacaaaaaaaaaattactgggccggtatttcacaacgccggatctg

SEQ ID NO: 245791 - DNA, 290 bp, Gossypium hirsutum
gaggaaacgccaatagaggagccagcggccgcaccttttgaagctgagccggacacaacatgagatggctcgggtgggggaggaacctgaattttccatatccgaagctccacctgagctcaataccagggaattggtcaaagaataatcaagcgctgctgaggaatcgtaaaaagcaaaggatgaggcataggatgacacccctgcagtgcagacagaaacagttacagtggacgccaatgtagagaccgtggaacccaccttggaagcagcgttggcagatacaccat

SEQ ID NO: 245792 - DNA, 285 bp, Gossypium hirsutum
tccgagtttttccttgaaaccatgtggacgtacacgtttattacaacaaggtaactcgtgatgggggattgtactaaacttctagattgcaagctatttttgaaagacttctaaccaagtgcttacaattgctgcgctatttgagtatggagttattcaaagctatctaactctactaaaaatgattcatcttcaccgacctagctcatcattgtacctatgaatactactgtccgcgaccttaaaactgaagctacaaaattttttgaagatgtatatgccatg

SEQ ID NO: 245793 - DNA, 265 bp, Gossypium hirsutum
ctcatggaaggtctaattcgaattttgttggaaaacaggacagggcaactggggcatcgttaacttctagaagatagcttgtgcatttacctcaattgtgagttgtcttgtttgttttgatgaactgatactagtttgttattatagcatatttgatttcatggatgtttataatatcatcgctcaaccaaaaaaaaaaataaaaatataaaaaaaaaaaatataaaaaaaagattaacgatgtatttgttctttataatattca

SEQ ID NO: 245794 - DNA, 287 bp, Gossypium hirsutum
gcgacccacgcgtcctccgacgactcctctcttagaacctgatatcacagttctttaagacaagccccgaccatcatggggggcttctgttgacggatcatccgcactttccactacagaaacacctcctactccaaacgttgccaaacccgacaaggactaaacacccgctgctcatgactataagcctatgcaatacaatcgccgctatgtcactgccgcagttcattctgggacgaaccccgtgctcacctatttagagaacttagaacccacatgtgcaacac

SEQ ID NO: 245795 - DNA, 385 bp, Gossypium hirsutum
ccggggaataattgccgcgaccaacgagtcctccgggctcgcatccgcctacacatccatgttattacgtcatccatcatcataactgaaaacggtgttcgtttctagacgagacacttccattgctcaatcaaaacttccgtaaaaagggcgttaactgccgcgagctgaacaagcttcacatcacctacttcttcttatcccggctcctgacgacgcacttggcgaattatgatggtcgaactctgctgatcaactggcatatactcatcttaacagctatgcaacgaatgatggagtggattgattatgaatgtgaccatcactcttcattcatcatgataatgtcactgagagacaccacgaaaatacatggtccagagca

SEQ ID NO: 245796 - DNA, 463 bp, Gossypium hirsutum
ggatgattggttaagatttaaggagatggatccatctgtaagcggacgaggtgctgagcctgtatttcgtgataagacaaaaggggagcgcatatcaaaagaagagtaccttaagtcaaaacgaaaaggagaagaaaagcccaaggagaaagagttggaatggggcaaaggcttagcccaaaaacgtgaagctgagactaggttgcaagatttagaactcgagaagagtaaaccatttgctcgaacaagggatgacccagagctcgacaatatgttgaaggatcgactaagatggggtgatcctatggctcatttggtcaagaaaaaacaacctgagctggttcttaaagacctaggggatgctgagaaaatgaaagagtcagggttcatagttcctcaagatattcccccgcatagttggatagtaagaaaactagatgctgcaccaaatcgttatggtata

SEQ ID NO: 245797 - DNA, 286 bp, Gossypium hirsutum
  unsure (1)..(286): unsure at all n locations
cccacgcatccggggcaaaaccgtaactaagtgaggtgccggctgagaaacggtggctggggttcggatcaaatcgttaggcttcctattgtttgacatgaccttcgcaggcatgaccttcaccatcaaaggcagaacgtcctcatgtggctgtcgcaagtgattttaacaaccttgagccactacatgtggaatcattattattgatgcacgcatcccaacctcgaagtacaaaacatggtggaantacaagaataaacacatgcaaatgcggaacctcatatat

SEQ ID NO: 245798 - DNA, 488 bp, Gossypium hirsutum
gaggaagcaaattgaacaactctacaagaaggctacacccaaaaagccccaaagggggtgcgtggtctccaagaaaggggttcaagttagggctggcaaggggaaagtccttgttgatcgacggatgaagaaggatgctagggcacgagcaacgggtaaatccggaaaaggctgttcaaagaagggaaagaatggtaaagttgataagaaaggtaaaggttctggcaaggcttcagggaggaagggaaacaaaaacaaaggtagccattcatgaaagaacaagttttgaaagatgcaattttagataaaaaattgaacaataaattacatttaggaactgttttcttttgttgtggttgatacttgatagattaaattgaaagttcgatgcttttttgagtgtgtgttgattcaaagtgtaatttgcctgttccatttgctgcataaatattgtcgtttaaaagcatatcctttgtgttctgtaccaa

SEQ ID NO: 245799 - DNA, 312 bp, Gossypium hirsutum
cttatctgcacgtacagggtgcgtggcgctcgggtacggcgctgtgctggcgtgtgtacgggagccatgctgacgtacggtgactcggcgtggttgctggaggtgtagtacagcgcctagaggttgcaggggctgcatgcggcgcaagtagaaagctactaaggtttatcggctgagacattgagcttattaggcctatattgggacaagtataggtatagcgtaatgtggactgaactagggtcttgagtctaatatcggacctatgtaataggactctaagcatataatggactattatagattttatct

SEQ ID NO: 245800 - DNA, 327 bp, Gossypium hirsutum
ggcgcaggcgtccgaaatcccccttttttgcggcgattaacgtatgctgttcggggctcgaattccgaggatggggcataactcgcgtgtaccagatagagcaaaatcaaaaaaggcgctcaagcacgaacgggcaaagacagaaagaacactgactatggcttaaccccagaacaacgccatacaaagagatgcgtaggaccttgcacgaaaatgcggcaaacaaagcatgccaagcggcagttttaaggaacaatgctggaggcaacactaacaccaaaaactaattattcaatgatgccaaattgtgaatgagatatttcttct

SEQ ID NO: 245801 - DNA, 488 bp, Gossypium hirsutum
  unsure (1)..(488): unsure at all n locations
aatggattgagcgagagtgtgaagatgagattatttgctttgggcagtgaagttttgttgcaaacctcatcgtctttatctggggtggtaaagaaacaaaggtgccaaaggagaaggaagttgggagaggaagaacaagctgcaatttctttgatggcattgtcgtgtgacacagtttttgcgtaaaatatgaaacagactagacaaaacaaaacaaacgaaatgggggtttcaaaaaggaggggggggggaaacactaaccgaaaaagctgtttcttcattttgtcttttttttgcctgggattttccttattagtgaaatgaaaaaaacccatgttattgactgctgctgctgcttcttctttnttttgttntggtttttttacgtaagagagagttgagggaagtaatgttttttggggatggctgatgatggttcaatcataatgtaaatagtagatcgagaatcaatgagaatggcgtatttt

SEQ ID NO: 245802 - DNA, 289 bp, Gossypium hirsutum
cccacgcgttcactctaaccctagccctatatcatgattcaaacacgaaaggaggtaaaggcgaatcataagcctggagcgccaacctctcccagaataataaatcaaccaccaacgctggaaagaaatcagggaaggcagctaatgatccaaactgccatgacgcctggttgcgcctacttcacatttatggaggaggtccgcgagctatacaagaaggaccaccctaaacacaagtccatcgctgctgaaatcaaagccggaggagataaacggaagagcatttctg

SEQ ID NO: 245803 - DNA, 445 bp, Gossypium hirsutum
ggacaaccttgaaaatctgcaggaggagattaatcgattccaggggagctggggaatggaccggtcatttatgcccagcagaaagtcgtttgagcgtgcaggacgctatgacatcgcacgggcattggagaaatggggcggccttcatgaagtttctcgtctactgtcactcaaggtgagacagaagcaccctagcagacaggggcaaactagtgccaaggaaaaacaggtagacaatatagcagcaagtaggggcatagaaagtgaagaaaagactccaatatcaaagccatatgtttcgcaaaatacacaaaagtggctcacgaagctaaaaggtttagacattaattgggttgaataaatgtgcctactactactattactaccagtctactggtttagtttctttccttatgtttacggagtataataaattgggtttaat

SEQ ID NO: 245804 - DNA, 268 bp, Gossypium hirsutum
acgcgtcctacgttcccaaactccactggcctgttttatcaaccaaacgacgctaatcgggggtgaatttcaatagcggcttgctcttctggaatagcaaatctttcgctgctgccgcattgaaatatcttgatgaacgtgatgctccactctatcctcataggtgtgctagcgcccattttgttttcatagtggagttgcgggagcactacttggatgcgcccccttctaactaattgcttgctgatagtagcacagccgccgtaga

SEQ ID NO: 245805 - DNA, 235 bp, Gossypium hirsutum
tcccacacgtcctcccacgcgtactcccactcgactttctgtgttttcatacacaccaaaaggggggttttattcaatgtaagctccatcatttaggtaacaattgacccactagcttactatatgccgctaaacttcacggctatacattcatctcaaaaaccaaatatattgggttgctccaaaacttatataatgtgaaacaatatccgtctaactttcactgctttattat

SEQ ID NO: 245806 - DNA, 346 bp, Gossypium hirsutum
cccacgcgtccgaagggtagaggatctacagcacctggctggacaggggcagggtttgagggggatggtagaacctacaggcataatttcaggtcctcttttctttactgaaggatcaggacaaactatcatgtacggggtatcaccagtctttctccccaatttatttcttgatctcgaccctggcatcctttcaatcgcatatagctggttgatatgaatgatgtcatatggcttttctttcttatttatgacctgaacagataagtgtcattagtattgactccaaggaggaaattatttagaatccatctctttaaagaaataataatataaacaatttggg

SEQ ID NO: 245807 - DNA, 368 bp, Gossypium hirsutum
  unsure (1)..(368): unsure at all n locations
cccacgcgtccggtcttatctacgggccattgcttcaagttgagtcactacggtaggaatgtgttgtgtacatcagaaaatttttttccctttgaatcattatatccctacttttatgttcaatgttttagcttagaatctatatagttcttgcgaagttacaaaccttaatccgaccattcttttcgcccatatctgctattaagaaatgaattatctgtgtaaaatctaattaggaaacttgtcactttatgcgatttgttggtaattttggatttagagtctagagagtggtttatgcaatggcttacttgtagcttcatcgngcttgttattttccacatatgttgattttttcttaaattgaa

SEQ ID NO: 245808 - DNA, 487 bp, Gossypium hirsutum
  unsure (1)..(487): unsure at all n locations
tgcatctccatcactcattttccgatcacacaaacaaaaaccaaagccatggcgccgccacctggaccttactctggcaccagcactctcgctctcgtggctcgtgcatctgctttttcttttggacttgtttatgggaactttaagctcaagtacctcaagatgaaggcaaagtctcaaaggaaagctgaagcaaaggcacaccattgaagcagggggggggggtcttgttcatagttcaattgcatgcgtgacctgagggtttttctttttgtcgtaataatgcattaacaatgggattataccagtttttcattttggcctgcagctttttatggaccatggtgaactgcctttaataactttttcgggtagttatcatcttagccattcagggtttgtttatttcctgtagttaaacatgcaagctgctggngtgattatatattctccgcagttctaaataataaattcagtctcttttttg

SEQ ID NO: 245809 - DNA, 406 bp, Gossypium hirsutum
ctcaaccattttaaatatcaattggacgcacgcaacatgagctaacatgatctcgatcccgataactatcgccaaaatgcttctgctgtgtctcctctccacactcacaacaactcatcacccttcggtagcaacaaattacactactagttctcaatgccataatatccatatatacaaatattatataataatgcgcacggtggtactacattcaatgccttgtattaatgaatcatttgcttgcaactcgtctcggcttcttcttgttattgctgactggatgatcaggttctgcatggaggcaagatccgcttgcttctaacaatttatttttcattatgcagcagcacatgtatcggaatgaaattatttctatattattactactactgttgttttagcc

SEQ ID NO: 245810 - DNA, 483 bp, Gossypium hirsutum
cccacgcgtccgcaccgccagttcatgaagcaggtcccgctaaatctttgatacaaaatgtgaaaagttatcctggtagagatgatggacatgaaccgactggatcccttgttcccaacctgaatccaaacatggccatttcgtcaaatgggattttgccagtgtcatccctgcgaaaggttaggtctggagcaccagatagaaaagtcagggatcggcccagcccactggggccaaatggaaaggttgatagtttctcacatcaatccatgggaactgaagacaatggcaataaattgggtttggagaatggggatttgacaccatatgattatcagcgaccattgcagcatcctcaagcagttgccgagcagcctcaaattgaaagagaaggtttggtgcgttccacgggaaagccaagggtgcttagcaaaggtcagactgaacgagccattgttgaagacggtgaggaggtggagcaat

SEQ ID NO: 245811 - DNA, 351 bp, Gossypium hirsutum
cccacgcgtccgcccacgcgtacgtgatgattaaagactctttgacataatggccattgaggttttatgtgagacccgtctgtaatagacacagaatttttttagaagtgaaaatatttttatatagtatgccaggaaaatcgcctgtccctttcagctcatccttgacatgtaattgtactctttagtataggtcggaaaaatgtttgaagtggttcatagtgcttgtagacattaatggtggtattaaaaaaaaggttcatcatggctttgatgtgagaaattgggtttgtttgacaatggagttgctccccaaaatatgtagaatgacatcaatgtttttaatgccat

SEQ ID NO: 245812 - DNA, 393 bp, Gossypium hirsutum
acgcccacgcgtacgcggacgcgtgggggagtcgtactttataatattgcatcagtgacccaaggatttgtttggataacttatatgtgatcaaattgatgacgattgtaattaagccccactgatgtaaaatgaacaatctttattcgaacacaaaaagatgctaaagggagtggctaaaaaaaagccggttctagaaacattggaaaataaagtaaaaaacgggcggccgttttaaagggttcaattttccatcccccccctttcaattttatagcttttctatagtgccccctaaatccaattaaatggccacttttttacaccggggggactggaaaaaccctggagtcacccaatttattcgatttgcacaactttccccttttgccg

SEQ ID NO: 245813 - DNA, 461 bp, Gossypium hirsutum
tcgaccacgcgtccgggtttgtgacagtaacacggacacaatacacttccatgccgtcttccagtgacaaacttcgcctggaaaagctaattggagctggtgacgaggatgcagacttccctgttaatgaggggtttaatataaaggcattggattcaggcagagcaagagcacagaaggttgctaaagggagtggcttaaagaaagccggttctagtaacattggtgaatcaggtgagaaacgacgaagtgggaaaaaggtttcctatgcaagtcaacctgtctcatttatatcgagtggcgtcatggtatctgaaactgatgagatcagaactacggatcctgaaggcacatcagaaagttacgaacacaaagatatcatcagatcagcacagtttggtgcattcgaggtacatacaaaagggttttggatccaaaattgatggcgaaaatggggattt

SEQ ID NO: 245814 - DNA, 447 bp, Gossypium hirsutum
gtgaaactttcccctttatcctcttcttttttttattttcttctttgtaaatgaagaaacagaaagaaatagaagaatagtcaagaaaaaaaatgaaatgctatgataagtttttaaaaaagagagcaaatcacctcttttgatttcttgttgttttttattgctatgtgcatgtaaagaaaatacattgatttgtttttgggcttctagccaaaagaataaaaaaaataaagaaaaaaatacaagttttttctattttctttcctatttggtgttgttctcttgtttgtttgcaggtacatggtgtgtatggtgcgtgtatggagggtacgaaggcatatgtggcagggctggcgatcatacaaagctgttgcagcgcaaaaaggtgacctatggttttctagtgtttgggttttgggccagttgggctgtgtataccttttgggc

SEQ ID NO: 245815 - DNA, 246 bp, Gossypium hirsutum
cacgcgtcgcgccacgccgaccgtgaaaccaccacaatcctcctcgcatgccttctatcaactacaaagtgaaggtatacacgctcagcaatacgagcacacgacgatacaaacatccctggctatgacgtgtttttaaaaaaagacagtcgaatcacacggcttgatgcattgactcgcagaccgttattgctgtgagcgtcttacgaaaagccagctcttctatcgtgggccctatagccaata

SEQ ID NO: 245816 - DNA, 368 bp, Gossypium hirsutum
cacgcgtccagccacgcgtccgaaaaaacacaaaagactgaagtgtgttatatttgaaattgccaggtgaaagaacactgcgcgtggtgtttgagcccatcattgtttatggcactcattcttaccttggatcaagatgtaaaaaggagttcgtctttacactgtacaaaatccatgctaacgtacggacccgtgcagggcaatttgtataatatacgggagcctgcacacaattgagttgccaagatcttaaggttgcaggactgggagcacagtattgattcccatctgcttcaacttgcagatcatacgcataacaccaggtgaactcctaccgaagtgctcttaacggactttatttacaatgg

SEQ ID NO: 245817 - DNA, 204 bp, Gossypium hirsutum
gttgtttgagcttgaacgaaaaacaatagcccatgaatgtctttttttttttatgcttctaggagtttttgctgatcattttcatttccgctaaatacttcactttagaacttctccatggatttgatgttcaaaggacatgtttttgcaacttaatatttgagtacacattatgtggtaaaaaataaatatgatctttacctt

SEQ ID NO: 245818 - DNA, 301 bp, Gossypium hirsutum
  unsure (1)..(301): unsure at all n locations
ccgggncgaattcacgcgtcgccacgcgtgcggaaataaagaacaggaccatggccttctatttataatacggacacattatagaacaattgcaagatgccgaggacgcagtctaagattaaaggctcgtatatggagaatcgtccaaggatgtacatgggagttcatctttccacggaacaaactcaatggacatgtacggaccttggaagagcaaatcgataaatgtacgtgcgcagtcacattgaactgatcctgacatcgaaagatgacacctccaagaacaaaccattgactacgt

SEQ ID NO: 245819 - DNA, 338 bp, Gossypium hirsutum
cttcgcccacgcgtccggccacgcgtccggccacgcgtgcgtccacgcgttcgcaagaagccatgtgtttctcgctcaaactgacgcccaaatacatcctccacattcctgaccctaatggggggtaaaatgagattgcatttttaaacatttctggaatccgcaattacagatgccttgtctctcataatcccaacaaactctctagctcaatcaacggcgataacaacattgtttatggcccaactgaagacggcaattattcaacgaacaatgatggttcgacggctggaaacaccgaggctggtcaaggagaatcgtttttttcatctaaagat

SEQ ID NO: 245820 - DNA, 445 bp, Gossypium hirsutum
  unsure (1)..(445): unsure at all n locations
ggcaccaaaacataattttcacggcacaagtatacttagaccagcactccagaatgttgctgctatggataaggttgctgtaattgagctgttctttccttctatcttcagagctgtagtctcattgcatccagctggttcaacagatccagattcagtggctttcttttctccggacgagggcggcagctacatgcattctagacttcttcggtctaccatgtatttagacagataacggagcacgctactgttgccctccagtatttccttggaatcagaagtaaaacagcattgcattctcttttgcactggatatgcagctaccaaactttattcaccaaagtctgcaacaaatgcggacggctattggcaatggacaggcaatcagctttaatcttacctnctgtccatcgtccttatcgaactctgtctgtttcaaaac

SEQ ID NO: 245821 - DNA, 233 bp, Gossypium hirsutum
cttttagtccgttttgcaagcgaacgtggtggaaacggcacgcgtggaggccgaaacttgcggcgactggagactgctggggtgtttgagggcggcggctacttgctgctactagtgataatggtaaaataaattttggcattcttattttcaaaaaaaaaaaacaaaagaaaaaaaaaaaaataaaaaaaaaagaaaaaaaaaaaaaaaaagaaaaaaaagaaaataaaaat

SEQ ID NO: 245822 - DNA, 187 bp, Gossypium hirsutum
ggggtgcttaatacatacctttttgctaatgcctccatacttcaaaatactcctcccttactttacaacttattccactgctataacccttgatttacccaccttaaatctaattaaaccccatccttattaaaccataatggccttgaaaaacagcgccttccccaatctaccttcctaacaaaaa

SEQ ID NO: 245823 - DNA, 400 bp, Gossypium hirsutum
tgaaaaagaagatggctttatagccgaatgagaaaaataaagaaaaatacaatattttcttgtctccttttttcttttttgctgttgtgctgtgctgtttttgtcttcatgcagatgggggaggacgtagaggcacgagcggcgctggggagtacggaggtcgtgcatgggagcgtacggaggctagaggctacggcgctaaggtggaaaccctagggtttctgtggataatctggtcttgggccgcttgggcccgatttgttttatttgggtattgggttatgggtttgtttgggcttagaattgggttttttgggtattgggccattgtaattgttttgggctgttttgtaatatttggactgatggccttttgatttggatattaatatttttgttt

SEQ ID NO: 245824 - DNA, 439 bp, Gossypium hirsutum
cccacgcgtccgctgagccctgatgttgtgaacatattgccaggcttgcagggggataagatagaagatgagttgcaaccagacaaggtgaggaagccatatttgtcggaggcatggctggtacaaggccctgtaccacctcccattccaacatgtgtatccaagaattcagcaaaggatatgaaggcacaaatcaagttttgggccatagctgtaggcaactaatgttcgacaagagtgctgagaatagcattaaaaacatcacccatttctcgtaccaaatttgacataaattttgcttttcttttctatttctactctcatttatccatttaggactgatatcctttctattttgcccggtgctcatgtttcgaaggcctatagaagcagagtccttgtctgatactatgaaatcttatgtaaacaaaaatctttt

SEQ ID NO: 245825 - DNA, 445 bp, Gossypium hirsutum
gtgacagagagagagagagagagagagagatttagagagcgagagcgagagagagagagaagaaagatgaaaaagatagagagaaaaaagagagggagagagtgaccccttttaactatcttaaaagtatgaactatatttgaagtgatccttggtaattgtaatggagcactttacatttctaatataatttttagcttatttttacagagcctcataaaaaaaaaaaaaaaaaaaaaaaaaaaaaaaaaaaaaaaaaaaaaaaaaaatataaaaataaaaattaaaaaataaagaataattaaaattttaaattaaaagtaaattactttttatttgaattataactttttaattttttttgtaacaaaaaataaaaagggacccctttttaaaaattaaaattttttttatccgggagatacaaatctaaaccttttttttt

SEQ ID NO: 245826 - DNA, 446 bp, Gossypium hirsutum
  unsure (1)..(446): unsure at all n locations
cggaanttccccgggtcgagcccgacgccgtccggacccgtttcccctcatcgaatttcgtcaagggcttatcgccnngcccatctcatagcgcctccggcaagggggtgagccttccttcatnggacctgagtacttgtcaagaaccggcaaatctcaagggatnacttcctccatantgatcnnctgattggtacctanttatcagagccnnngcttccatgtgcgaaggaataatatatnnnctgagggngtaggtcttnnggtgttggtgccctttagaaggatntnttacggtggggctatagaagaaatgtgaagccgtcccctcgccatttctgtaaagagnncagtggatctgttgcttcgccacaattcttcaacatattgcaagaacgttaaacatcattgatatntgatccctaaagggtggtagggagaaatca

SEQ ID NO: 245827 - DNA, 319 bp, Gossypium hirsutum
  unsure (1)..(319): unsure at all n locations
ccggnctggagaacccggcgcgaccgacgcgtacgcccacgcgtccggaaacgctaaatgggccttccctacatgcgcaccgttccgactcccaagagtgattctggcgactggtaaatcgatcaaggctctcgctataatggtacatatgaagggtcgagcacatctagcatgaagaccacaagccacgaacagtggagatagctcgaaatataccatgagatgagatagttctgtaattaggatttttatttaagatatttttattgtttgggaataagcgagaactgatgtggcgtggaatcatttaatgaaaggt

SEQ ID NO: 245828 - DNA, 460 bp, Gossypium hirsutum
ggggagcacgcgtccgcccacgcgtccgggggttaatgatgatgattattctcctgaaaccaattagcggcagagaggccgtcctagtacttaggagcaacgccacttaccagtgcaatggccttctcggcggctgcgttatccgggaagaattggagtcggagctggatttgttgatgatagattctaccgttatcagaatcctccagcaaggtagcggtcacatatctatagaggcgcttaatgctaataaggcagcagcgaagccttgccctgaaaattattcgaattgtattacaaaatccaagtcaggtaaacataattgtaatggtaataaccttttttgtagatagtgatgttgatcaacctatctatgacaataagcgccctatgcattattcgaatcgtaaaggttgctacttttgtggactctatttatttctactttgctttttgttgc

SEQ ID NO: 245829 - DNA, 277 bp, Gossypium hirsutum
  unsure (1)..(277): unsure at all n locations
cgtccgcccacgcgtacggcactcatnctcccctcttccgaccattcgtccgtccacgcataggggggtttacgagatgccgacccacccataacactgtccatgcaaaacaagaaacgctgctgctgaagggattcaggaactttttgtcgatgattgcgtgagctcatcaacaattgtataaatgttttgctagaaacaggaaaggaaaatttagatatgcaaaactcttcaacctatgacttttggtgtatgagtgattcattttatgaaatca

SEQ ID NO: 245830 - DNA, 207 bp, Gossypium hirsutum
  unsure (1)..(207): unsure at all n locations
ccggnncggaaaaccacggctcgacccacaccttcggcacagtactagaattccttgtttccattatctatctcaccgctccgcaaatgatcaacatagtgcgtttttggggcaaacctgtcccaaaggatattataccaaacctcgttcatgatacaaaccttttaacatcttaactccattttatatgggtctatatttttaggt

SEQ ID NO: 245831 - DNA, 374 bp, Gossypium hirsutum
accgggtgggaccacgcgtccgatttttcctgctagcaaaacagcggacattctccaaccactcgttcgcccacacatgcgagggttttctggatgccgaacgcagtcataactatttgttcaagcaaaacacgaaacgcttgtgctgaattgattcacgtattttttgtcgatgattgctgtagctcatcaacattgttataaatgttttgctagaaacaggacaggaaaatttagatatgcagaactctgaaagctatgacttttgtatgtgcgtgatacatttatgcattcataagaggtgcagcgtgtattttggcgtgttcgcggaaatgctggctgaagaaggggagacgtgggacgttttcacgttg

SEQ ID NO: 245832 - DNA, 383 bp, Gossypium hirsutum
cgcacgcgtacggccacgcgtccgtccacgtgttcgcccattcgtacgtccacacttccgagggtttcctggatgccgaaccagttcataacttttgttcaagcagaacaagaaacgctgctgctgaagtgattcaggtattttttgtcgatgattgctgtagctcatcaacattgttataaatgttttgttagaaacaggaaaggaaaatttagatatgcaaaactcttcaacctatgacttttggtgtatgagtgattcattttatgaaatcaaaggttctgaagcgttgattgctgacagtcacactataaaaatttgttttcatactgttgggggtgtcactgtcaatttgcttttgaatgtgagtttcatatcagaaa

SEQ ID NO: 245833 - DNA, 286 bp, Gossypium hirsutum
cccacgcgtacgcatatctctctctctctctctaaaagcccactctgaagtttaaagagagagaaagagatcgtacactttctctctctagaactctaaagggtcaaagctttaaagcctccaaatatatacatataaatcgagagagagggagggaaacatattttgcctctcttttaattatcccctagcgagagatattgaatcatgggtggcgcgaagaaattcggagctcttctatgctctgcgtactcgcactacattaataagaggtactgcaggtatt

SEQ ID NO: 245834 - DNA, 446 bp, Gossypium hirsutum
  unsure (1)..(446): unsure at all n locations
aggaaaccgtatctattgcagaagtggaggttattgtcaacgtaggagctgacatccattggtcaagggttgagatcatgtctatattanagaaattgcaagatgagaatatattgatgatagctggagaaaccgtgcatatgatagtttaagatgtaagagaagaccaggatcaaccaaaataagcagatgcagaaagttgagatcatgctttaatgaagtacttataagttggttctttggaacctgatttgaacgttttctttattaattaatgtatacaattgttttttattatcaatttgacctttattttttttagttaaaattaactaatacatttatgtttggttcctgttatgtatatgataaaatttaagagttgttttcagcaaaattatttttgacatgaaatatttgtatgacaccaaattcgaattttaaat

SEQ ID NO: 245835 - DNA, 212 bp, Gossypium hirsutum
tcgcggacgcgtggattcaaattcaacgccatgctctaaagtttttctctaaggctgattgttgtgagttcattacaagatttcattgattaactaaacgtatcatatcttttattaccaagatttacttgatttagaaaatgcattgcatattttattacctcgcatatgtattattaactgtaatattgatgtgtagacccttatgttta

SEQ ID NO: 245836 - DNA, 310 bp, Gossypium hirsutum
  unsure (1)..(310): unsure at all n locations
gtcagggccagcttgacactctggttacgctcattgagaggttcagaaaacagatcagaatagagctctatatccaaattggagtttgtgcaactatcttgcagaagctgtaacgcaagcagacaatagcaagctatcattttatgacttggagtttatggccaaatggattgcttgaggcaaaaatgcaaggccacctttcttgcttcagtagatgaaggattgattgtccttttatacttccaattatttgcattctgattattttgttgaatcagctattatttaatgttttggtgattttgatnna

SEQ ID NO: 245837 - DNA, 331 bp, Gossypium hirsutum
cccacgcgtccgcccacgcgttcgcccactttttcgcccacgcgtccgtatcatttcaatgcgggagaatagggtttactgtagatgtaaatgtaaaatgaaacgaattatgtaactttaggtgattgctgttgaattagaatttagttttctgatggtataaaatgttaatgggagagggtagaattagatagtgttctaaatttgaactcagtgattaataaaaaaaaatataaaaaattaataaaaaaaaataaataaatataattataaatattaaaattaaaatgttattttaaataataaaataaataaaattatttggggcggc

SEQ ID NO: 245838 - DNA, 331 bp, Gossypium hirsutum
cccacgcgtccgctcagttggatgttgtcgttaccaacaaattggctaggctgcgcagccgggagaacgagtaaaggtcggttcttgaatgttgattttgctctttttagtatgatattctcttgtttaggaagtaagaacttttggtccaatgttaaaattgttatatttttatctgagtagcgttgtctctttttttttttggttgtgatttgagtataaaaccccatttctaatttaatgtatccttgatgttttgagggatctcttctttgttcatgcttttctacaataatgaaaggtttaagataccggcaaggttgtttgaacc

SEQ ID NO: 245839 - DNA, 334 bp, Gossypium hirsutum
  unsure (1)..(334): unsure at all n locations
cgaaaggaagaggaagaaagtacctagaaaagaggacaagggtatcgacggtatggtgaagagccccgatctttgattctaggtttctcttaataggagattttatgcataaccaactcttacctgaaagtactgaactatacttatatgtcattacacactaaaagcttgtaaaaacttatgtttaatggtaattcaagttgtaatacaacctatttactagttgcatgctagtgtcaaatttgtatatgttaaactactttgagagtctttgtatctctctactataaaatcgaataatttagtttggttttttttttaanaacaactttat

SEQ ID NO: 245840 - DNA, 314 bp, Gossypium hirsutum
agccttcgggcctgttttgccaaaaccccaattcgatttttttaccgcaaacaataaatctttctctgaggaggatgcatccgaaagctgttttaccagtgtacgtggaagcgattatgtcagagcgtttataacttttgccttctgaaactaagcctaataatgcctgatgaggcactattaagtttactgcagctcaaaacttgtattagagatatcctaaaatatatatacattggataatgaatagctgggtcactgtattgtggtgcagatatagcacaatgggtggtagatatttcttattctttttg

SEQ ID NO: 245841 - DNA, 322 bp, Gossypium hirsutum
  unsure (1)..(322): unsure at all n locations
cccacgcgtccgctgattttgagcttattttggttcaaagttcaaacgaggttgtattgggtgttcttgtgacttgtaaccattttttttcctctctttacatttctttcacgattgaagaagaagaaaaaaaaaatgtcgatcagatgccatttaattttctagtttcttcgttatattcgttcatttactggagtgtttatggcagatctgggagtaccatatggattgaagagtttatataanaaaaaaaaaaaaaaaaaaaaaaaaaaaaaaaaaaaaaaaaaaaaaaaaaaaaaaaaaaaaaaaaaaagggggcggc

SEQ ID NO: 245842 - DNA, 326 bp, Gossypium hirsutum
cccacgcgtccggtaaaaagttgacccagctttataaaaatgactacttgaattgtctgcaacgtcatcgttgatgatatgttgttgattttcaatgttatcaaaaaaaaaaaaaaaaaaaaaaaaaaaaaaaaaaaaaaaaaaaaaaaaaaaaaaaaaaaaaaaaaaaaaaaagggagggaaataaaaaaaaaaaaaaaatatataacgggttaatggggggggatatttattaaaaaaaggggaatatatataaaaaataggtgggggaggttaaaaatgtggggggacggaaaaaaaattgtttttaccaaaaataaaaattt

SEQ ID NO: 245843 - DNA, 377 bp, Gossypium hirsutum
gagagacccttcctccggttcttttaatctagacagcttctatttgtagtcgatcatttagaagccctacttctacccaaatttattctcctataaaacgattcaaaacctaaagtaattcctttctcatcatcatcttcaacaaatcctcccaagccatgcaaaaccagggcttgcttgaggaacaacaagagatgcctactcccatgggtttcttttctacttttcctcccaacaacaacatcacttcatgtcctccattgggttgccatcctctcaaagccttcaatatagcagcacctgatcatcatcatgcacttcctactgaaaccctactctcatctctctcctctccaaaacatagagaacaccttgct

SEQ ID NO: 245844 - DNA, 444 bp, Gossypium hirsutum
gtttactatttgcaatttagcctattttatttggctccaagaatggacataactcatgagtgatcctttcccttgtatggtctatgacatttccgcccattgttttcttccaagttacaacaacgatgaattgatagtaaattttaaaaaaaaaaaaaaaaaaaaaaaaaaaaaaaaaaaaaaaaaaaatactttaaattatacaacaaaataaaacaatgtgacaagaatattatacaccacattgaagacaattgaaattcttttcaacaaaaggatattcttggatatggaggcgcatacttcaactttctgttctggtgttttggattctctagcaaatgaattgaaatcatcaaatgacttctctaagttatatgcaggcattgcaatacttggttacatttgttcagtttccgatcctatcaacccccgttccttttc

SEQ ID NO: 245845 - DNA, 347 bp, Gossypium hirsutum
tattttcaaataaactcagctatttggtttagatgtataacgcttccatttatttattttaagaaaactcagctatttggtttagatgtatcttccttaaaaataaattaagcaacaatctctggatatttatttaaagttaaaaaaaaaaaaaaaaaaaaaaaaaaaaaaaaaaaaaaaaaaaaaaaaaaaaaaaaaaaaaaaaaaaaaaaaaaaaaaaaaaaaaaaaaaaaaaaaaaaaaaaaaaaaaaaaaaaataaaataaaactgggcgacgatatacaaacgtaaaaaaaaaaaaataaattggggggggtgctctttaattaaaaaacattaaccttggg

SEQ ID NO: 245846 - DNA, 372 bp, Gossypium hirsutum
cccacgcgtccgcaacaaatgaaccagccataaaacaaagatgattgttaccgcaagggacgaactagtgttgatccgtaaaggtaactaaaatagccaaccagtatctgcccttacagagaacaaaaatttgcagccgtagcagagaagaaatttttttactgacattgttgtacacaattgttctttgtctaacatgagatgcatttacccatgttagcacatcagaacgaactgtttgttagtgaaattttgaaccccatggtaagtggaccaatgtagtctgtcaatttaacaaaactgtgatgttatttaaattcatgctctaaagagagccattttttcaataatagccagaaatatttttccctt

SEQ ID NO: 245847 - DNA, 203 bp, Gossypium hirsutum
cttccgccactccttccgccacaccttccgtctttattttctctgttcatacaattcttttatggcgttgaatattcatatacacacccccatcctaaactctcaatcatgtctttcaaacaaggtggcaaaacaaagcctttgaagccaccctaatctttgaaaaaagaaatttaccacgcatctattttgcttacattctt

SEQ ID NO: 245848 - DNA, 232 bp, Gossypium hirsutum
cccacgcgtccgcccacgcgtccgaaagaaggaaggtgaggcagctcctgagaaacccatgtttttgtatgcttcagggggggatgcaagctacattgctgaaggtcaatggactggaccttacattggttgcgatgttccctatgtttgtctctataaggatattcaggtgcctgtctccactgctgtcgagtgttcttgtgattcgtgatctgccctcttattttcttct

SEQ ID NO: 245849 - DNA, 331 bp, Gossypium hirsutum
  unsure (1)..(331): unsure at all n locations
cccgcgcgtacttgcgctgaccgtcacctttaccgacgacccagctctaggccaggcgggaggcatttgcggcgtcaatcgtatccatgatattatgcctgagatacctactgtgaggcctgacttcaacgtactctgcccctttcttctgacagctccactgaatgcaccatagaatagtatgaaccataatatgaaccgttgtgacgccggcggccatgccaattacctcaacaatttcatcaacaaattgatttagaaaaccaatcttgggtcctgacttgaaaaactgttgaaaaaactagttgttgatgtattttgngagggattc

SEQ ID NO: 245850 - DNA, 238 bp, Gossypium hirsutum
cccacgcgtccgatttattttccattgattttaatttttgtttttttgaggcttgggaagagctgtagaagaaagatgccgagaacatttgccctataattaatgctttttttttcgactattgaacagttcgtaatatcggacactaatccgagcaattgcattttatatatatttgtgtttttaaaaattagagggattagtttttaataaaaaaattaacttattttttaatttt

SEQ ID NO: 245851 - DNA, 438 bp, Gossypium hirsutum
cggacgcgtggggtttttttttgtattctatgtgtataatatgcatctgtaaacttacgaactgaagaaataccttggctttatagccgaagggattaaaatgatagaactaaataaaaagaaaatacaatattctttgtttttgtctttgttttgctgtgctttcgtcctttttgcaggtacggagtatgcgtggctcgtgtacatggctgtgctggggcttggcgtgaggcgtacggaggcgcgcgtggtggtcgtacggtgctggaggcgcatggaggctgtggcttggctgcggcgcaaagtgggagaagccctagggtttctattagggtttaaatttttggggcttgctggcctgtgaatctttgggtctagacttgcttgggcctatattgtaatggactgggtttgagtttagtaacaataaatttaaag

SEQ ID NO: 245852 - DNA, 372 bp, Gossypium hirsutum
ctaaggcatcaaatgatggaagaaaggagaaatgcagaggaatggatgttagatcatgcacttcaacaggcagtaaccaagcttggaccagctaaaaaaaagaaagtggcattacttgttgaagcttttgaaacagtcttaccattgcctataactaaatgtgaaactcatttaaggcatcatacttcaacaggatttgctcatagccatggtagaaccattcaagcttgtaactgatagactgttctattacatgttattagtttggttttttagtttgtatttgtgggtgagaattatgtctgctgttatgtactcgtaatggtggcactaaagtttatgttttaaatatttaatgcatcaatgtttttt

SEQ ID NO: 245853 - DNA, 467 bp, Gossypium hirsutum
  unsure (1)..(467): unsure at all n locations
ttcccgggttcgacnccacgcccgtccgtcccactgccgtcnncggttcaaaaaatctgtcatggcgtgttggatatagaagggtggcnntgatgggctactagaggcgttanttccttctgaaagagtgcgctctggnngaaattgtgttttcacttgggcgagnntatgatagaaagggcgcctggatgaataccacttnntctgcattttgcaaagtcttaaatnccagattttantttgtgatcntgttttanagctttancttgcacaatnntgttcttccatatnccttggatggtttatctcaatggtcatgctaatactttttgttgtactctttctctaggattctttcttttcttgaactccattgtcaaaaggcttgtaccaagttgtaatgccagtattaatgtagtcaataaaaactatatgtatggtaaagtatgtatttttattatttgctt

SEQ ID NO: 245854 - DNA, 257 bp, Gossypium hirsutum
gggggtgtaaagttaggtctttcctcatgatgatttttaaaaaaaatttaaaagaaaaagaggacattgaatatcctgcttctgtttttgttcaattataataattattatttccatcacttttcttttaattagtatcccaaaaccatctctaattttcaagcagactgaaaataatgtatgatcacacctactttcctctcatattaaacactgcttcctttagaagctttaacttcaaaaagagcaaaacaaat

SEQ ID NO: 245855 - DNA, 433 bp, Gossypium hirsutum
  unsure (1)..(433): unsure at all n locations
ggtagtcaatagctcactgtagctctggcagctatgttattagaatggttttatgtggagacgttcttacaaggggaatggtattgttttagtattataattattattccagtggagctttgagatgcagcagcatgttgggggcgtcaaatatattacacaaaaggaaaggatatactgtttttatggttttttagatggttctttaatttgtctcacctgagttgttttgttaatttgtttgaacctcttcnaaaaaaaaaaaaaaaaaaaaaaaaaaaaaaaaaaaaaaaaaaaaaaaaaaaaaaaaaaaaaaaaaaaaaaaaaaaaaaaaaaaaaaaaaaaaaaaaaaaaaaaaaaaaaaaaangggggggggcccttttaaagaaacaaattttttttcccggggtttgggagtttttattttttttt

SEQ ID NO: 245856 - DNA, 193 bp, Gossypium hirsutum
tttacacgttacaacaataatgcagacctttatcttatgagaactgaaatgtgtgtggggggagcgcttttcctgatgtggaacatacagctccatcacctataatatgactctccgctctactagattcccattcggctcctagtgaaccataaacctgtcattggcgcctttacactcattggagaaaaac

SEQ ID NO: 245857 - DNA, 377 bp, Gossypium hirsutum
  unsure (1)..(377): unsure at all n locations
cgtccggcangagcanctgctttgccattgatgcttctaccgcgagcttgttcctctaccctctgacgtgaggaactcgaaaggcaagaaagtangcgatcatcatcgtcaacaacccttagaagggctagtgtggaaggattttgattgtttatagtatgaacattttttttttcaattttttctcttaaattcaacaccaacatatagaatataaaagatgtggttcatccacccatccctctatatttagataatgaaatagagaggatgctgttttttgtagatatgagtgcataacttgatgtgaaactgggtccaatattttcctcaaatccaaaatgcaatcatatatttatataaatatatacacaagt

SEQ ID NO: 245858 - DNA, 447 bp, Gossypium hirsutum
gagaaaccaacagctgctgcctttacagcaacaaatcaaagcaatgaaaatggaaacatgagtgatcctgacttgctcgtccaaattctcagcaaccccaaattgattgagaaattagttacagaacatggagtggcttcaggtcacatcggtagaacagaaaatgatggagcgttttacggcaagtcaaatggggttggaattggagcctcaaataaacatggttcggttcctggtgtatgtccaatttcgcattcacttgcaatggaacttccccaaaagaaggatgtaaactattacaagaacttgattcaacagcatggaggagaaagtcaagtaggaggtcagaagttcaataaccgatacaatcaacagttaagacccaaccaagaagtaataaataacccgaggtcaagagattcgaagccgaggataatgaaaccttgt

SEQ ID NO: 245859 - DNA, 429 bp, Gossypium hirsutum
agttctacatcaccagcggctgccctcttttttcaaaatttgaaccccatctagtggttggggctggtgggtatgtttcttttcctgtctgtttagctgctctgcagaagggatcaaggttgccatccaaaagcaaaactccgttcccggtattgctaatagggccatctctttcgttgctgattgggcgttcgttgcattcaattcaacggttcatagtttcccaagaaaagaaaaatgtgttgtttgcgggaataccgtgagattgtctttgaaaaattcggtttccaaggcattctcaaggttgcatttttttccatggctagaaaaaatggaaggtttcttcagaggacatcaaagtgattaagggtcaaggaggttctataagagctaatgctgataacattgccttgttgaatgtgtactctc

SEQ ID NO: 245860 - DNA, 346 bp, Gossypium hirsutum
gctggctgaagaggagaccagaatgaccgtcagtttttttgctgggttttatcacgaagagaaagacgttggatattattactagaaatagcacaaattttggatttgcttttcatatatcgtatgtgttatttttttcactcaaacgatgacagtgaaccatcattttgagaccaatgggtgatattgtatatgatttgttcaggcataacatacaagatgccactgctgtattatggcggatttctgagtggtatgctgaaagtttaatgatagcattgaccttaggtattgggagaaagtagttgtcaatttatatacacagccgcttgtattgttttttttt

SEQ ID NO: 245861 - DNA, 292 bp, Gossypium hirsutum
ggtgaaaagtataggagtcgctaaaggagaggaagcaaagaaagcagcaatagcgcaagtggaggcaggccgttagggtttaaagataggattaaaagggcgtaaaacaataaactttcaagggtttacttttggcacttaacaatctattcttttctttgggcagggctactgtgccgggcccttccaccaaacctgaccataaaccaaagccaaaccccaaccccagcaccccattttaacagggcaagtgccctaaagatgcccttaaattaagtatatgtgcttatgt

SEQ ID NO: 245862 - DNA, 272 bp, Gossypium hirsutum
attgtgcttacaacacatttcaagacactgctaataactatgtttcttaaataagcgggttccttaattgtgccgggggatggtgatttgatatttgttttgtttaaggagtggaattaattataatttttatgtttcttaaataaatgggcacttaattgtgctgggatggggattggatatttgttttgtttaaaggggtggaattaattgtaatttttatgtttcttaaataaaccggcacttaattgtgccttggatggtgatttgtt

SEQ ID NO: 245863 - DNA, 146 bp, Gossypium hirsutum
cccacgcgtccttccacgcttccttcctcttctttcgtcagccacatctaccaaagtgtgccagactaacttttaaagcatacaaatttcacctttactaaatggcccacatatcccatatatagccatcctaaacgtaaccgcct

SEQ ID NO: 245864 - DNA, 451 bp, Gossypium hirsutum
cccacgcgtccgcccacgcgtccgcacgagttccatcaccgcctacatcaatcctatggccgaagccacagctctttctaattttttccatccgcttttcatcaattttagtctccataaagaagaccatttggggattttgttgcttcagcaaaaaccgaagccttcttattgcctgtggattccccagtccacggacattccaacatattgtttttattgcattcggtcggcttgccttttggcagccgccgatctctttcggttggaattttcttcctgcaaaaatattccatcaataatctccaaagttggttgaccatatctccgcttttttgttgcaacttcccagattccatctgggccatattcaccagcttcaatctctaataatttcctttttccaagtttactttctcccacagaagcactccgctcttttgttgattta

SEQ ID NO: 245865 - DNA, 372 bp, Gossypium hirsutum
gcgtccggtcaaatcagaatgccaagatattgcggaaatgtttttatccactggagttggatgtttatgagcgatgttctaattaacttcgcaaacaattttaatgtcctcttcagatcctgagggatgaggaaggtaaaaagctctgtctgtaagctaatgtgataagctccagctcaaaagattatgatttcaagatgatctgattgataggggtcatccaatgcaagtggataatcatctgtgtcaacatctctagaatgggttccctcttacaaagaaacaccttttaccggtatttattattttgttgccgtgctgacccacaaaatgtttgaaattgccctaatcacgtccattaattttttcgtt

SEQ ID NO: 245866 - DNA, 449 bp, Gossypium hirsutum
cccacgcgtccgcagaaccgataaagtcaatggcatcgtcaacatcaaagctggcgtttcgtatagcactggcggttctcctcctcttggctctcttctacgtcggccgtccgctttactggaagatctccgccaccgtccacgacatccgccacaacaaacaaaccgttcaagaaggtatttcacagataatgctggaggctcagagatcagtggggtggtttaatgacgaatcagactcaggaatccatgaaaatcgtggtaagcaagcttcaaggagattgaaatttagggttttgtgatgggagtccccccttttgattcttatgttaattaatggagttttatctcataattttaataagtttagtttgatttagctcttcttattagaatttttttgttgatgttttagattggaaatgggtttttttagaggaaaatgtgag

SEQ ID NO: 245867 - DNA, 436 bp, Gossypium hirsutum
cccacgcgtccgcccacgcgtccggccttcgattatggctggaaaatcagtgccggtgggctggattctatccgtggtcgaggaggagatgatttgaagctcgaagttcttgacggattgctcgatgaggttgatgaagtgatgatatcgatgcagcccacgatctctctggtgcttgtgaagattttcttttggatattgaatttcccgaaaagttatccgagttggattgcggtcctcgtgaaagatcaactttgtgcaactcaagttcggaaagtcattcgcccggatttagtggaaggagtaatagtgtcgggggcatatcagaatcatttacagcaactgttcgagaatcaacagcgagatggtgggctagagaagaggttggtgcgattacatcataacttaggagaaacacggtgtcaggtccgtatga

SEQ ID NO: 245868 - DNA, 413 bp, Gossypium hirsutum
gtccatagaaattgtcatgtacctctgcctcatacacaacaatttcacttgtcataaaacgccattgatcgacctcggcctctttaaggtgccgtagtgttgttcatttctttgttgcttctctttgtaattatgtacttcgctttaacagtttccccctgctttccctctttggccccttgtattcttgtctctttgatgaatttagccagcaagtaaattgcgtaagtataaagtttcacatacgtttcgaatttgtgattaaaaaaaaaaaaaaaaaaaaaaaaaaaaaaaaaaaaaaaaaaaaaaaaaaaaaaaaaataaaaaaaaaaaaaaaaaaaaaaaattataaaataatttaataatataaaaaattttttatataatatttaatttttgggggggcccttttt

SEQ ID NO: 245869 - DNA, 236 bp, Gossypium hirsutum
  unsure (1)..(236): unsure at all n locations
cccanccccaccncccaggganggaagcaggagcccacccaccaaccccnangcnnacncacgagaagcaggcccnccnccccgggcgggngcacacccnggagcccccangaacnanccngcanacgggggcnanggnaaagggnnggcaccagcanancagcaggcccacnaccganaggcaaagaggacaccacncnggcganggnaaccacnganacgcngaccaccgaccc

SEQ ID NO: 245870 - DNA, 453 bp, Gossypium hirsutum
ccagcttagaattgctggacctctcctacaatttcctcaatggatcaattcctgaaagcctagggaacttgaccgcattgcgcagattgaatcttaatggcaactctttgtctggaagagtcccaggtgcacttggaggaaggcttttgaatggagctagctttaattttactgacaatgctggtctctgcggcatacccggattacccacatgtggaccccacctctctgccggagcaaaggtctgcattgccttcggtgtatctctatcatttttacttcttgttatctgttcagtttgttattggaaaagacggcagaacattcttcgagcacagcagatagcagcaagaggtgctccgtatgcaaaagcaagaacccaattctctcacgatatccaaatgtcaaggcaccataatcatggccatactcggactgctgctgagaatggac

SEQ ID NO: 245871 - DNA, 236 bp, Gossypium hirsutum
  unsure (1)..(236): unsure at all n locations
aaaaaaccaaggncatncgccgagcgccagaacccaacccaccacgaaaccaaaccaaangggggacgcagggagcagaaccgggcaacccccagagcncaaaaaggacagggacaaacaacaccagancaagccgaaggcaaaacggaaggaagggggnacacagcgngggcacgaacaggnaacgaagccaggggcggacaacaccggggaggggaacggcaangagaaaacag

SEQ ID NO: 245872 - DNA, 410 bp, Gossypium hirsutum
gtcctagatgctcaatgcttttactcgaattcgtcatttaatggtgaaacaacaacacgaatgaatccaaagcaaagttcagttgataagaagttgatgaaccattatttctgttttggagcacaaggcctagctgtcgaggataatagaagccatacacggctggatcgccgcatcaagagtgcccgttctttagttgcttgatgcagagtattgcaattttctagaaccaccgttgacaggaaaggaatttaggattctatgagattcctacacttcagtttactgtgtttgggacctatgaataaattcaaggtatatactgaaaaatgacccagaatttttaatgtatcaataaacataccaagttgtattatatgtttagtttgttgttgaagttgtaagttttt

SEQ ID NO: 245873 - DNA, 452 bp, Gossypium hirsutum
cccacgcgtccgcagcaagaaagaacaacttttgtatcatctttgcttcctcttttggcggagtattccctgcagccaccagtacccgatgctcaatccattgtaagctatgtcaaggttctatttaaacatctgcaggagaagcttattatcaccgagtcaaagctaaaagactcacagtatcagttggcaccttggcggtcggatgtcaatcattccaatttcgctccccaatctccatctcattcccttggtccaacattgacagcttcgagcaaaaatggtcttgaattggtgccacagccggttttttcccatggaaagacacagatagtctctgatgctcaaacagattcaaattgggatctacccggtcaataccagggtggctcaggtggtggtattgtctcaaaaaatttggaacctgatgatttggggagatattcacccat

SEQ ID NO: 245874 - DNA, 448 bp, Gossypium hirsutum
gtgaagctttattgtcagagtttctatttccatatccgattttaagttcatcagtgcctgacagagattggaacggaaaggctaaagtcgttcccttgcctttgaaagtcagaaccatggcaaacatattagcatgaaaatagaacaattatgaccataataatatccggagctttcagtataaatatttatagatactcagtatgctgatgtatgttccacatcattgttaatgactttctgcaattgttcttaattccatgtttgtttgaattttctaaactaatgcagagcaagatgagttgtctgatgatcaatgacattgatgctggtattggtagatttggtgagcttatgttttactggaacagaaaaccttgaactgtaccaattatgctttaattttcataaatttcctcttggttaataagttttaaaaagttactta

SEQ ID NO: 245875 - DNA, 194 bp, Gossypium hirsutum
ggccaagcctgctaaatcgcaattaaacctttaaaagggagttgagaagcgggccgccgggcctgggacccatgcttaacccaccccccgtccgaccgtctacgttcactgtactggatactggataaatggagatgtgcgtgagttatcatcgtgcacactggatacaccgcggcgtcccctatctttacaaa

SEQ ID NO: 245876 - DNA, 452 bp, Gossypium hirsutum
taaacctggaagtaatacaccaagttctattcatattggaatgccaagtggttatggaccagatggctcccccccagctggttataatcctagttctgctgtggcaactgggaactcaaccacaaatgaggatcttagtggtactcagttcaaggaaagcaatgtctacgtcactgggcagcagagtgaaggttcagctgtatggattgctccccccgggcgagacatatccaccctaccagcaagttcattctataaccttgcccctcaaggtcagaatgtaacttttgctccaacacaggttgtgcctggctcctttgctggtatatatcatccacaagcagcaacagcagcagccgttcatcctcttctacaacaagctcaaactatggccggagctgttaacatggggggatctgccgctggtgtttatcggcagcctcaacatgccc

SEQ ID NO: 245877 - DNA, 273 bp, Gossypium hirsutum
ttaaagaaccaagcaaacatacacatgcgtgcgacaaaaataactattatatagaggggccggccgttctttagagtccacgcttacttacacctgcttgcctggtaataccttttctttaccgccacttaatctcattgcactgcacccccttttccaccgctggcgtctgggaaaaccagtgcccttaccgatcttacttgccatcgattgcacaccctttatgccggatggcacactccctgtaacgcccattccgctcgcccttccgta

SEQ ID NO: 245878 - DNA, 321 bp, Gossypium hirsutum
agttggtacacctgaagaaaatgttgcccatttctttgaggttgctaaagcaatcaggtactaaaagcaataccagattaactgttttcggaccgagtaaagcttatgcatcttcaggttatttttttttcagcccttgattcttcatttgtatttctcggtacacattctcggatacggtgcttcaagaaaaatggagccgtaggaacataaacttgttggaatttagaaagttccgtttggtctttttttcagtttgtatttgtttatgtgcttgagctaacaagaaactctaaatttggaagcattctcatttgaggc

SEQ ID NO: 245879 - DNA, 443 bp, Gossypium hirsutum
ccgctttcgttaaggtttgacgagaaagtttgatcggatcaaaactgaacgggttcaatgggttccgaggagttttatacgcaatgaggaatgtaagctcgttgctcctaatgatcttgctgtacggactagtttattgtcgaacggaatccagtttcctacgaggaggatatgaagggtgtctaattttcggatcagctttcatgatctcaacagggagattgcagcaaagagtggccgcagagatcaaccaaatgaatgggaggccggggatattgctttatgagttcaggagatcgaagttggcaatggaggagctgagaggggagctagagcggatgggcggcggaggggtggaggagtgggaaacggaggtaggggggataagggaaagggttgagaacttgaaagggtggtttggggtgttgagatctggtgctgac

SEQ ID NO: 245880 - DNA, 352 bp, Gossypium hirsutum
  unsure (1)..(352): unsure at all n locations
accaaanccgggagtcttttttataagttgtgcggcccatccacaacntctactcccatacattaattccttttctttcctaaacttttctatatacaaactcaatcaaaatctttatttattcacatttcattctaattttcattatgttctcttcaactttgatatgtttaacaaataaatttaaaataaataatttttctaagaaaaatttcaaccttcaaatttactaaatactatttaaaatacatataaatttgtattccaattatattattttatacaaaatcatcatataattaataaaatttttattttaaattcaaaaacttcccatcacttaatcatttaa

SEQ ID NO: 245881 - DNA, 328 bp, Gossypium hirsutum
gctcctgctcatgtatttctggaagtttccttgtacattatctccttgctcttcatatgagcggacacataatttgttcgctggtgaagataagatcttcaaaatgtggttccaggggaataccttttgcatgcaaagcaagttctagtggttataggaggagccctgacttctcgaggcatagacatgggttgcaaggtaggaataggcaaaatgaagacaaatatagttttgaaaatcttgatgaatctgaaatgttatcatcgaaaaatgggccagttctctcgctattccgttcgacaaatttttaagccacatcatccccatc

SEQ ID NO: 245882 - DNA, 238 bp, Gossypium hirsutum
cgcgtccagaattttggttagatcaaaaaaaaatatacttcttaagttcttagtattttcttagggattgactatgtttatagtgggctggcgatttgtgttctaagttgatgatctatgggaatggacactgtcttgtttgaaacatgtttgagataatatttgactttgtggattttgaaatcaacacaatgattaataatccaagaatggggattgtttcttaaaaaataaatat

SEQ ID NO: 245883 - DNA, 310 bp, Gossypium hirsutum
  unsure (1)..(310): unsure at all n locations
cccacgcgtccgaagatatgtatggttataacnagatcttcctctccatccatagataaatattttatggcagccaatatatattgaagcccgccccccccatccaccaaatctttcacctactctccgtgcctaaatccatatatcaaccatcaattatgtattgtcctctctcaaaacgtttaatcatccacccccattttaaattatacctttcattatcaccgtaataatatgagaaaacaacctatttaaaaatcgtccagcataaaataaaagaattagtacaaactaccgcttgagtcttaac

SEQ ID NO: 245884 - DNA, 366 bp, Gossypium hirsutum
  unsure (1)..(366): unsure at all n locations
gcgtccggcactcttcctgtcttattgaatgtctatattcganctggnctaagaaaaagcgagatggatgaaaaagtcagtgcggtggagagtaaaatcgaatctttacaggaggagctgaatgctgtaatccataagaagaacaaagcttatgaaaccatgcaacatctttttaaacaacgtgattaggcgaatgctcacttttaccagagcctgtctcttttaaacaaagccaaagagctatctgcaaagaaagatataaaggctcttgaggagctttcgactgtcgaggccgataaatttattgctctttggagtaacaagaaagctttctttgacgtttattataaaagaattcttccatcc

SEQ ID NO: 245885 - DNA, 215 bp, Gossypium hirsutum
gacccacgcatcctgtttctataaacttttataaacgattttattttacaatggcatccatctatcttatgggcggtctctatactgagggggagagccaaatttctcccttaaagttccaccatatgttttgccacatgccgcaccatttccaccacactatctctgaaaaagttcaaagattctttatacatataagtaaatttttaacttcc

SEQ ID NO: 245886 - DNA, 424 bp, Gossypium hirsutum
gtaaaaccagcgggacccacgcgtccgggctgtcctacattttctgtttactttttttttacattgcatgttatagattttctgagcggtttatatgcaaaagagtcctgccttcctgggaatcgagctattaaacgaaccctctgctgcagaagttccattggacacgttagtttcatattacaaacattgctatgaagtggtgcggaaatactctccatcagcgtatgtgataatttgccaaagaattggcagtgcatatccactggaactttatcaagctgatatatgctcacacaacctagttgtggatttgcattactacaatctctttgatactttctttgttaacttgagtgcgattgataatattcaattcatatataagagcagggaaactcatcttcaaacttttaatggtgcc

SEQ ID NO: 245887 - DNA, 363 bp, Gossypium hirsutum
tccacgcgtccggtaaaaaggctttttatcttttggctttttatcacgaaatagcggatgccattatagcaacgctgtttgaagtcttcttcattcaataatattacctcaacatttctctttgcagagaaaaaaaaagaagaaaaagagtgagaaaaaacaggtacttaaatggctgagctacaacattcagagacagagagcagctcaaattcaacctcatcgccgccgctatcaccatctaactcaacccctaactcaactactacgaccccaaaccataaacccgaaactttcacttcgggttctactaaaaaacccaagacaatgagggactcaagcaagcgcaccgtttaccggggt

SEQ ID NO: 245888 - DNA, 234 bp, Gossypium hirsutum
ttcaacaactccttgcttctctgttactctcctaactctccaactgttgtttccacttcctctcttccatatctgaatcgcaaaaaggaattctcatattgttcgcacttttatcacttgcctaagacacagctcattacgtcattttgtttttaaaccgataatcttctataccatttacaaacaactcccaaacttctccaacttaatcaccatctgtcttcaaacctttcc

SEQ ID NO: 245889 - DNA, 242 bp, Gossypium hirsutum
cccaactgagctaaatcagcaagctgcttccaatagagacgggccatcttccttcagaattatatcatccctcattacagctttaacaattatcttaaatttggacctagaactacttttttgagacttttagattgcttttaaacaaatcctattctaatttcaatgttttccaatctaatgtttataattatatctattgctccaatacgacagataattacaaccttcactttcttctc

SEQ ID NO: 245890 - DNA, 382 bp, Gossypium hirsutum
cggacgcgtgggctttttcaatcctaatcttcatcatttcagcaaattcactttgttttctcacatttccttgtcttaatcactatggcatttgtagtgcaagaaaattccttgcgtatgagctgtgatgttgagttcaacaatgctcttctcatatccttccttgaagaatcacctaacgaagagtacgatagtaaagaattggaaacctggatgagatcgttagaagccgaaatcaatccgaacccgattggtatccaagacttaaagatgggtccagaaagtcttagcgatggaaaagaaagcaatggtacaaaacccattgattgtgaatttcaatggaatgacttggaatcaatgtcatccccatcaccaaaccatg

SEQ ID NO: 245891 - DNA, 266 bp, Gossypium hirsutum
  unsure (1)..(266): unsure at all n locations
ggcccggaacgaccgaggcgacccatgcgttaaatatgggtaggggaaaaagagatgaatgtgggaacatttagtgcatttctgttgttttcctggaagtaataataattttgttactttgaatgaaacggattttatttatgatttttatgcattgctgccccatgtgatttgggtgcttggnnnnnaaannnannnnnnaaaaaaaaaaaataccnnnnnaaaaaaaaaaaaaaaaaggaaggactaaaaatacgaaaatacat

SEQ ID NO: 245892 - DNA, 438 bp, Gossypium hirsutum
cattcccatctctctttcatcaacccgaatgcctcctacaaccacaagttccccggtttaacactacatgcatcacttatttccccttctacacctccctcatccagagaagaagccattctccaagccaaaacatgcctttccacctgcttggagaagcctctcaacaatcccaagctagtaggcaagctcaagaagctaaaacaacccaggtttcaagttgaaattccactcattgatgactgtccatcatctctagctcaactagctctagacatctttaaagatatgtcactcaaaaagaaaggttctttagttgagattttagttctttggcctgatgttcgtttaaaagaagctggaattcaaacttttgaatcatcctcctcgtttagccatattgaacatattgacttaccttcagttagcaaaaataat

SEQ ID NO: 245893 - DNA, 330 bp, Gossypium hirsutum
  unsure (1)..(330): unsure at all n locations
aaaacagggccggccggacgcggcggaaaattgaacgaanctaataaactttaattttgtgcacattacaataccaatttgtggaattgctaaattttaactgttggacagtccattataatgttgacataattacagcactctactcatatttgtatcatgaaccccttctgcatgtctctgcatgtttcaagaaattgacttattttcattcttgaatgattcagattgtgctcttaaatgaatttatatttcaatctcaaaaataaaaattcttatttaaatatatatttcatttttatttattataaatattttttatttttctaa

SEQ ID NO: 245894 - DNA, 238 bp, Gossypium hirsutum
gaaaattgaacgaagctaagaaactggaatcaagtgcacattacagtgccaattgtgggaaagactagaggttttctgttggacagtgcattataatgttgtcataattacagcactctagtcatatttgtatcatggaccccttctgcatgtttctgcatgtttcaggaaattgacttattttcattctggagtgatttagtttgggctcttaaatgaatttatatttcaatctcag

SEQ ID NO: 245895 - DNA, 399 bp, Gossypium hirsutum
ctccttaatatcccaagaatcatctttttcaaaacattttactccaacgttttgatttccatggagcaaaccttcattttcctcacaaaaacctcagtctggttctcagacccattcgtcctctagtgttttgactgcataccttggtaccgctccttccagtgttccagaatcggttcgttaagacaatggctaccctcagaatagctcttcgtaacgtccaccgcatctttaatacctccgccgtttccggccgtacaacgaccgttttcagaaagcaaaaggcgtctttataacagattgttgtataagagcaaataaagaaggtttttggagcttgatttggttttgggaaaatgggttgaagaacatatccattctatggatgaaaatggaatt

SEQ ID NO: 245896 - DNA, 467 bp, Gossypium hirsutum
  unsure (1)..(467): unsure at all n locations
gcctgaacaaggttcaactaaaaatagtggtgatttaattgctgttggtgctgatgggagaggtggtagaattaaggttatgcgatctgcgaatcaatcttcaatgggtgataaggagaattcagttagtgcaaagagattaaaatgtggagctaaacaaaatagtttcccttctggaggatgcttgcaaatagagcacttctttggaaagacccattactgattgaaagttgaagactcagcacatgcttgaacttgtaccagggaataatgaaacaaggccgaagcaaatttgcttatgtcatcagtgtatgatgacgtangcttgatgcctcttgaatagtaagttatatcatatatttgtttgataaacactaaaactatgaactaattttatatatgaaatttaattgtgtaatttatacataaaattttgatttaatctaatttttgtaaattattaacac

SEQ ID NO: 245897 - DNA, 311 bp, Gossypium hirsutum
agagccggcattttttttatcttctatgaagggatcaaattattggtttcaaccacgcacaatgcagcatatttatttatggttagattcaacaacaatatatcagggtttttttttttttcattagctagttttactatgcataggatttacattttttggaaagggcttccattattatatacttaatttgttctttcaatatttaatgggcaatatgtttgcagttttgggttccttgcgttttcttttaggcttgcctcaaaactttggtttaatttcaatctgcagcaaacaagctccatttgttc

SEQ ID NO: 245898 - DNA, 235 bp, Gossypium hirsutum
gaaagttgaggagaaagaagaatccgatgatgatatgggattcagtctctttgattaaagagttggttttgtgcagaaattctcttctttttttttcaaatttaaggctagtttagattctaaaatttcgttattttcgttgtcgatttggggattcgatgaacaatggcatatgtttttgcttaaacttaatgttgcaatgaattttccgtagtctattatgatgattttcttg

SEQ ID NO: 245899 - DNA, 406 bp, Gossypium hirsutum
agaaactacaattgtaacaccccgactcgtgtccgtcgccggatttgagttacgaggcattaccgaccaaaaatccaactcaatttttttttataaaaaaaaaaaaaaaaaaaaaaaaaaaaaaaaaaaaaaaaaaaaaaaaaaaaaaaaaaaaaaaaaaaaaaaaaaaaaaaaaaaaaaaaaaaaaaaaaaaaaaaaaaaaaaaaaaaaaaaaaaaaaaaaaaaaaggggggggccttttaaaagaaccaaatttaactacccctttattgcaaaaaaaaattttttttttggggcccctaaaataaaattactgggccggggtttaaaaacgggggaatggaaaaaacctgggggtaacaaaattaaatggcttgaaaaaaaacccctttttcccaagtgggct

SEQ ID NO: 245900 - DNA, 216 bp, Gossypium hirsutum
cccacgcgtccgcagagatgtatgggaatctatactccaaccgatagccaggaaggcactaggcgattcatttttgtgtggatccagtgggcactgagataatgtagtaagaatcaatacttacaatttttttgcattcctaataacataatcatacatatgtatccacaatattaatgcttacattggtttctaaagcatcctaactccggtctc

SEQ ID NO: 245901 - DNA, 392 bp, Gossypium hirsutum
gttctagatctcgattgagataaagcgtcatgtttaatgtgccaatcactgattttcaattatgttattgtgacgtcctttttctcctgttgccataatattgaaaattatttatacttccttttttatctttaaataaaatgataatatattttaatatatttaaaaaaaaaaaaaaaaaaaaaaaaaaaaaaaaaaaaaaaaaaaaaaaaaaaacaaaaaaaaaaagaacaacctaaaaacaaaaccattgctgctgttgaaaaaactaatgaaaatgaatggcattatcctatattaagctgggaagccaccttatgttgataaggtacatacccgaaagggccaagtattaaaagaacatgggggcctacaataaaaaacaggctggg

SEQ ID NO: 245902 - DNA, 179 bp, Gossypium hirsutum
gaacgaccgaggcgaccgggccgtgagaggtacacctacactatcagtattttaaggttcatgtgcaattactgtatctcggatcaatgctgatagttaatgaaattaggcgtcatggtaacatggcaatatcctattttttcaaataaaagaatatatctaaagtctctataccattc

SEQ ID NO: 245903 - DNA, 211 bp, Gossypium hirsutum
  unsure (1)..(211): unsure at all n locations
ttccgcccacccttccaatcattctgtcacgcttgattagaataaatgtatgagatgtatatcttcatctgattaaaagttaaaattctcatactggatcatggtattttatcattatattacaaataaagattaaattctgagctgcnnannanaaaaaaaactaaataacctgttatacaaatgaatttggaaggatgtacaagggttc

SEQ ID NO: 245904 - DNA, 411 bp, Gossypium hirsutum
gataaagacaaggaaaaaaagaaggatagaagtgggcatcatgattctggtgctgatcactcagaaaagcaccatgaaaaggttggaagttttttacctcttacatgttttgccccgagtatagtggaaaaatggttaaagtcaatcagtctgttaatttatccattatttgttcaagaataacattgtttcttttgagctatgcatgggatgttttcttttgatcagttaagctttggtatagtaagggataaaataatggcgaaagttgattggcatatcaatatgttcctggattgtgaaagacgcaattttgtcatacaggcataccatagagatttattggagcacatgcctgcaccagttgcggtgatacgacgcccaccaacattgccgaatattattacccgt

SEQ ID NO: 245905 - DNA, 251 bp, Gossypium hirsutum
gccgacccacgcgttcgcccatgcttgcacccacgcatcccgtcacccgtatggacaagcgttttcatatgggtggactgccaatcattgtctactctccagagacattcatatacatctacaactacaagcaaaggccttacacttctatcaccttcactaaaaaactcatgatcaagataagtgtatagagcattgactcatcattaatattagcttagaccgactcaattacgatattcttacaggcg

SEQ ID NO: 245906 - DNA, 353 bp, Gossypium hirsutum
ctctctcatgctttatacatggattgaggcatttccagagctgattccaagaccgcggccctgtgcgccaatctctactcaactacgaaatctaccacgaaagctgggaaggcatctaaggatgcaaataagcctccaaagcctgctaacacgtctgttagctccatgttcgagttcatcgagcaataccagaagcaacacactaaagaccactctaatgacactgtcggcactgctggtggcaataaatggaaaaatctatctgagactcttaatcaaccttatattcatcctgacgatgatcaagccgtcgaacgtgaagtcgactttgaaacctacattaaaacacacgc

SEQ ID NO: 245907 - DNA, 339 bp, Gossypium hirsutum
  unsure (1)..(339): unsure at all n locations
cggacgcgtgggcggacgcgtgggcggacgctttggtgcaaattcccttatgcaggccacggggaactggctaaaactgcttcaggtataccacccanattttcagttttttgcctcacatgggatgtacctcgggtgaaacaaaaagataaaccagtgtgtgattttcttccttttccgtgtccgaaacttgcacctccaatgcagtcaaactgaggttaaatgctttaaatttttggtacggtgatggcataccattcgagagaagcttttttactggatcggatttcctttacttgcaaagaaagaaattgaaacagttaagagacctatagacat

SEQ ID NO: 245908 - DNA, 431 bp, Gossypium hirsutum
cccacgcgtccgctctgcacgcgggacgcttggatgcaagtgttattacaaatcgaagacgggtatatcaactgcgctctcaattccgatttcgttaaactcgtcttcgaattcaaacagcttaaagggaaatctaatagtttcaacaccgtttaccaagagaacaccgccgatcaatacacgctcgtcttcgctaactgtttgagtcatgtcaaagtatcgatgaatgtccgatcggcgatgtacaatctcgacgggaaagaaaaacatcgggattatctttccccccggaaaacgaatcttcctaagggttacttcattttcgcccttctttatttcacaatggcagggatttggatttacgtgctttatttaaaacgacttaacggtttcagaatccatttatttatggtggctgtgaatattttaaa

SEQ ID NO: 245909 - DNA, 266 bp, Gossypium hirsutum
  unsure (1)..(266): unsure at all n locations
cggaattgaccgggtgcgatcccacgcagtctcgtaactggttggatagaggctggttggtctctcacccatctttgtctattattanntctcaaccagcgcagaaacgagattcacggcttcactttttcgggttacangnnttcaagggtgannagttattggggagccaatcgtttggggagannggaacanncttgtgtnctttagaacccactctcagcgttttacctggctgcnncacacttnngagcattggcatgcac

SEQ ID NO: 245910 - DNA, 348 bp, Gossypium hirsutum
cggacgcgtgggaaaatttgtaactggacattggattcataaataatttggtttactttatttctgtgggatatatttttttttattttttggttttctggtttattataggcccgggcaaatttggcctattacgtaaaggatagtaatcacggtactaatttgcataatagaataataatgaacgtgataacatgaataacaatataatagcaaaaaataaaaaaggggtaaataataataaaataataaaaccaaccaattacataaaataaaagaaaagaaaaataaagtaacaaataaaaactaaaatttaattaaaaaaattgatagtaattactaatgggt

SEQ ID NO: 245911 - DNA, 302 bp, Gossypium hirsutum
cccacgcgtccgcaaataggtgctgaaactgataagtttgctcaggaacttgtcacggagagttcttcaggagaaaggttggaaaaagaggtttctgctttaaaattagagtgctcgaattcgattgctaaaaaaaaaaaaaaactataaaaaaaaaaaaaaaaaaaaaaatttctaaaaaaaaaaatttttcatatttttaataaaaacaaatcaatttaacaaatctttgaatttattaactattctatatatttaaaagcatttaagttgggggggccggtttttaaaggttccatgtt

SEQ ID NO: 245912 - DNA, 290 bp, Gossypium hirsutum
cccacgcgtccgcccacgcgtccgagaagacagaaagcagctatcaaaatggctactttgctagcggctgcaggtcgtagagcaactactctatctcgatccccggctctgtctcaagccgcttctctcattcctcgccgtggtcttgccggcgctgcgggtattctccgttttccctttttttattgttacaatttacaagtttttgttgactcaaatatatgtaaagtttgtctgaacatttttgaatctcgtttaccttagattatagttgaagctaaaggatctta

SEQ ID NO: 245913 - DNA, 335 bp, Gossypium hirsutum
aatggagattgcagaacaagaccaaggactattcctgcgctcgtgtggtgaaagagggtgaaactttgtcttccatttcaaaggtgtatgaattgtccgttcattcaattgcagcagctaataagaacattgttgatattaaccttgttttccaaggccaactccttaacatcccttcttcatccctactagacactcaacttgaccgagccaagaaaagtaggttatggcaatccatccgtgcacttaaagctccttcagggcaaaagtttttcaccatgataacttcacattgtttaataaaatgctaaatccactggttattttctagttct

SEQ ID NO: 245914 - DNA, 318 bp, Gossypium hirsutum
agcttcggtaagccaagcccttaacctgtttcatctaatgctggtacgcagtcttggagtgggtccactagtaccgaagaacagataatatgcaaggcctcagtaccttcaactccatctacccctattagcaaattggagagtccaaatttggtgaataccatgggatctgatgctgccaccggcatgatgccttctgttccacaggctcgcaaagcttccttggctcggtttttggagaagcgcaaggggaggataatgagtacagcatcaccatacaatcttagcaagaagtctctagattatgcaactaccatg

SEQ ID NO: 245915 - DNA, 209 bp, Gossypium hirsutum
  unsure (1)..(209): unsure at all n locations
gcanccncagaaancgagccancccccaaatctaanagncagnnngnacacgagggcggaggggnnggacaaggcgaagaacgnngnggccganaagggggccaanangaagaagccngaggcnagcancacggangnngancngacccangcgggcnnngacggcanccagnanaaagcnaaagncnccgncaccaaccccaaaagcg

SEQ ID NO: 245916 - DNA, 154 bp, Gossypium hirsutum
  unsure (1)..(154): unsure at all n locations
ggaggacgggaaagccaaggccaccaaggaggccgcnccgaggancgacgngacacagnncgggnaccccaaagnccncggcaaaggggnnnngccggagaancaaccggnggncgncaaggctaagnnggngncgaagaccgcngaaaagaaa

SEQ ID NO: 245917 - DNA, 165 bp, Gossypium hirsutum
tcgcggacacctgtgcgcgacactcgtgtccagactcgtgcgcggacgcgtggccggacccgtgggcggacgcgtggggttcctttctttttgatactaataataatatattcccctcactttttcaacaataataataccattgattttgaaccaaataaaaat

SEQ ID NO: 245918 - DNA, 467 bp, Gossypium hirsutum
gattctttgatgtgtggcaccgatgctccaataagtgcttctcggatgttaggcgaaacttgtcaaacctggagggacctatatgctgataactcatagtgagccttcagcacggatgcctcatatgaacccggcaccgcgtgtgtgggatatatatttgtgcacactacacacacccggttttaagaggacggcaggttgttgatcatcaacagacgtacttctagccgcttccaatcaccgcaaagggattacttcctgctgactttgttttggaagaccccgattctcacttcatatatgtttgcaaaaagatggatgacacacagctaaggaacatacccacctatccattaacatctgagattttatagtgaaaagagtaaaatgaatgaagtgctgaggtagcattttatactgctttcagaagcttcaacatcacatttggattcataagcatttgtata

SEQ ID NO: 245919 - DNA, 120 bp, Gossypium hirsutum
  unsure (1)..(120): unsure at all n locations
cccacgcgnccgcccacgcgnccgnacnngaaagagancananaagnncnnnagcnggagcagngaaagagcaggaggcaagcanccngcgccnncccggagccggaggggcaagggcag

SEQ ID NO: 245920 - DNA, 356 bp, Gossypium hirsutum
aaaaaaaaaaatttaattttaaaaaaatatttattaaatttattaaaaaaaaaaaaaaaaagaggaatttgggtacttttaaaagggcttaaaaaataaataaaattggggccgtcttttttaaagaatcaaacttaactaccccttcattccaactaaaaattttttttatagtgccactaaatttaaattaattgcccgttttttaaaaacgttttaattgaaaaaaccttgctttaaccaaattaaatctttttgaaaaaaatccccttttcccaatttgttttaaaacaaaaaagcccccaacaattcgcctttccaaaaattttcccacctttaatggtaaatggaacccc

SEQ ID NO: 245921 - DNA, 221 bp, Gossypium hirsutum
  unsure (1)..(221): unsure at all n locations
nntattnngnatncaatnaattatgatactaaggtaaataataagagatttgatcactgtctgtgcccccctagtgatcgtggaactgtaaattcctgtaagttggagatatgttttagtgtttctccataatagcagtggcattagttgttttttttaactactaaacatgtgttaacggtcaatgttgcaaaaagaaatgataagaaatagatttgttt

SEQ ID NO: 245922 - DNA, 251 bp, Gossypium hirsutum
cccacacatacgcccacgcgtttgggtgctttgattcaggtcccattgcgggcgatgaagtgaatatagtgtgtccggtccgtgcgaacactgcttgacagtgacagcaaccaaatcattttgattaagctctacaactgtatatgtgtctatgtgatccgcagctaattttgaaggctcatgtcccataatcatatgataattgtgaagtacagtacacatatgtgaaattgagtgcattcactactgtt

SEQ ID NO: 245923 - DNA, 336 bp, Gossypium hirsutum
cccacgcgtccgtcggctggtcggcagcatcgtgcggcatggagaggatgcgttgcgcaagtccaaaccgaaatagacacttcgcctctctgggagggagtgctgtcgctagaataatcatcctgtttaagcagggagggcaaccaaataaggcattaggtagcttaattgccactgatcattaaataattgcccttcccaccgatctgttgtcaatcatcctgtgttctgtttttgttttgtaatgttcacaatctttatggcttgcttcctgtgggtggtctattatgtgtcttttcattaataaatgcaaaatattataaaatcttttgtggt

SEQ ID NO: 245924 - DNA, 276 bp, Gossypium hirsutum
cccacgcatactactgtttaatataaagctttatatgtgagaaactgaccttctactgttgcggcttctgaaattgagccggagttctcgaattttggaacaatgattcctgactgcgtgtttatccctaaccgcaaagatatcgtccttgtttgacatacttttgttagaacccgaaaacattcttacttttcacaatacaatcttgcatgtcctatacaatatgctgtaacgcaagtttacatatataaacgcagaccaaatatcactgttact

SEQ ID NO: 245925 - DNA, 430 bp, Gossypium hirsutum
cgaaaatgtcagaaagctcatcaaaaattcctaatgttaccaccaaggatcccccatgcatgagcacaatcaaagcccatgataaagaagagcaacaaattgaagctcagcaaacgagccacaaagagattacacgctacttcgaggaagaagaacctgaccagattgaagctcgaagcgttgatattgttacgacccgacctgacctgtcagatcgtgtcacaatgaacacgatgatcagccctctgaagggagagaatatttcttatggaagtcttccgaggcaaccggtttgcaaggccgataaatacggcgactgtataaagccagtcggtgaagacaaccgcccttgcacggtctataaccgatgcaagcgcgacaatcattgaaccatttggcttttcttggattaaatgggcgggattttact

SEQ ID NO: 245926 - DNA, 369 bp, Gossypium hirsutum
caacaggagagcaccttgaattcgagctgttttgatgaaaagatctacttgaagcgaaagggccctaatgtatcaaccgtccgcatgagacctttaatcagcccggtgttgtaaattaaatatgtagctcatagtgtaaatttgatttgagaatattttgtaaagctgatatcagattttgtcacatcagacaccgtaatcttttctttattattgtaaggctgagtttctagctttggttgtgaacaaatcaaatgagtcacgtgctcagaatttcatttgggacaggagatgcgtatacttcattattacaaacaacaacaattgaatttttaaaaaaaaaaaaaaagggcgggcgttcgcgcccac

SEQ ID NO: 245927 - DNA, 282 bp, Gossypium hirsutum
cccacgcgtccggttcaatggttttgttgacctagatacataaatattccatttctctaatgtaaacttcaacctcatcttttaaaaaaaaaaaaaaaaaaaaaaaaaaaaaaaaaaaaaaaaaaaaaaaaaaaaaaaaaaaaaaaaaaaaaaaagggcggccataaaaaaaaaaacaaacttaaagacgcaagcatacaaaataatacctcttttatagtgccacctaaaaaaaatccactggccgtattaaaacaacgtaattaataaaaaaacccgggg

SEQ ID NO: 245928 - DNA, 280 bp, Gossypium hirsutum
cttgtttcttattttatctcattgtccttcgttagatatttttctcgactcatatttggtgttgaatgtttggtattggaatcatgtacactccctgtagagaaaatagaaagatctcgctttcggttataggttgagtttatagatttgattctctctgtttttttcagacctgtggaaatttttattgtaataaataatataatgtacatgtcggaaaaaaaaaaaaaaaaaaaaaaaaaaaaaaaaaaaaaaaaaaaataaaaaaaaaataaacaaa

SEQ ID NO: 245929 - DNA, 208 bp, Gossypium hirsutum
ctcctatggcgcctgatgaatcaaaccattttcagtcttttgcctgagtttgccactaaggagttttttgcagctttaggttttgctgtactatgactcgaattacactacatgttacataaactcttccggaaatagtgcaatgcttgttgccaagattcctaaaacaatcccaagcgcctccatggttccctgatatctttctatt

SEQ ID NO: 245930 - DNA, 452 bp, Gossypium hirsutum
  unsure (1)..(452): unsure at all n locations
cccacgcgtccggggggtttgtaatggtaatatctacggtaattgcattgtacctatcggtccatcatatcgtccttgtactgtgtatacacgatgcaagcgaggagttcgataatcattttttcaagattgtcaaatttatttttagcttatttcatctatgttttgagtgagcaatttcatatgttgcttttcttagtcttgttattataattctcataataatctatacacttacccnnnanaaaaaaaaaaaaaaaaaaaaaaaaaaaaaaaaaaaaaaaaaaaaaaaaaaaaaaaaaaaaaaaannaaaaaaaaaaaaaaaaaaaaaaaaaaaaaaaaaaaaaaaaaaaaaaaaaaaaaaaaaaannnaaaagggggggcctttttaaaaaacccaaatttacgccccggggggtggaaagaatttttttttttttgggcccccaaa

SEQ ID NO: 245931 - DNA, 281 bp, Gossypium hirsutum
gtgtggtttggaggataaaaattatgactctatatcaactaaactcaatgatgggaggcagaaggttttcattatttccggcccataggtagttgcattgcatgttactattctgaattatgatcaccattgtttcttcatttttctcctttttgattcggtggtcttgtcttgtgctttgaagatggaacagttaatgtggattgtgtgtgggtaataacttaactgcgtcatgaacagtaattattacctaaaattcaacaagccgtcttacttcattt

SEQ ID NO: 245932 - DNA, 200 bp, Gossypium hirsutum
ccctgagctcctttcgattaaagagtcttctattaagcatgtatccgaacccaataagaagactgttttatctggatcagggactttccccgttaaaaagtttgacttcaaaagtaaactatgcgagactagcagagctttagaaactaagttatgaattcattgattatccccactttttttatcatcttttttataaa

SEQ ID NO: 245933 - DNA, 123 bp, Gossypium hirsutum
attcgacgccctgtggagttctcttgtgtaatttttggatatcacacgtcatgctagaaaatgtctctgtttattgtactggacacctccagattcaaccatctaacattgtgtatgaactat

SEQ ID NO: 245934 - DNA, 443 bp, Gossypium hirsutum
cccacgcgtccgcctacatgtgatgtcggttggtactgctgtaacagcattgtctaggacgcttgcctggtttcgccagcaaatgctattttctggtatcagtcccagcaggattgatatagtgactggatggggcaggcggagcagggttaccggatcatcacttgtgagacaagctgttcaggatcttctcagtatttttagctttccatttttcaccgagaatggcaattccgggtgtttcatagggtgtggagagcctcttaacagatggttacttcaatcatacgtggagcggatgcatttactttagcttgccgtcctcgtagcacaacagaattttgttggaggatgtagtacaagaagaggttttgtatatttatttaaattattcgcaacctttcaaaagtttagaagttaaataaggagctgatggcagcttc

SEQ ID NO: 245935 - DNA, 367 bp, Gossypium hirsutum
  unsure (1)..(367): unsure at all n locations
cccacgcgtccgcccactcgtccgcccacttcttccggcaaagatcttgagcttgccaggctgaagaaggtggccaaagagcagcaacagttgaaggagaaggaggctgagaatgagaagcccaagcttgaagccaagccattggaggaaatccttgcataaaacttttaccagcactgtttcgtcttccactatgttgtgttaattttattgcatttctactttttttgtggtggtgatacccgtttctatttcttttctagcgagtaatgtatgtcatgttttccacatttgatgcttgtggtctattatatactcgggtatcggtnatagatgaaaataaaatttcccacttcactttcttcct

SEQ ID NO: 245936 - DNA, 401 bp, Gossypium hirsutum
  unsure (1)..(401): unsure at all n locations
cccacgcgtgcaagaaatgttgcgatcaatgatggcggatgatgttgcctattagctagaggatatgaactcatggaaatgcctgaattactataatgtcccgacaggagcatgccgatgattacacccaaagaagacttgagaacactagggcgtgccctataactaaatgtcgaactaccgacgctctaaccttttgacacgcgatcatacttgtattgatggtgcttaccagatgccgaagaaacatagatctgaaacacaatgtggttgtggtcttgtttataagcgctaagagtcgcagcttctgatatcatctgatcaacatattctggaatcgaacattttactttgatgaactaaaaatcaaatntattacatagctatgagaaaaggctgct

SEQ ID NO: 245937 - DNA, 326 bp, Gossypium hirsutum
tttccgggtcgagccgcgccttccggttattgaatctcagccatctcaagggatttatcctaatgactcttttgattttgtcctggcagaacttcacaaagagggaacaattctaacagaggcaattgctctggatttgatgttcgttctactatgtgctagctttgaaacaactttcctggctctaaccttaaaaactaaaaggcctccagacgacccatgtgtgaccacggatctcgatgctgaacctgatgacactcttcgagatactgcttacactcactctgatcctacatgaaatgagtatgaactctagacagagagct

SEQ ID NO: 245938 - DNA, 248 bp, Gossypium hirsutum
gctgcacatgcgaaccatctgtcggacacgtgttgcgccggaaatgatccccaattgtggcagcgctgctccaccttacatgtgaccggatggcttcggcccatctctgaaccacaatggtgaggggggctaaactgacacaatgtaccctccatccgaatgtgttaaaaccttcacataggtgcccacatccgaaactgttataatcatctctatgtgcatagtttattattgatagggtaggaaat

SEQ ID NO: 245939 - DNA, 284 bp, Gossypium hirsutum
cccacgcgttcgcccactcgtccgcccactctttcgcccacgcgtccgcccacgcgtccgggtatttaatttgagttccacaaaaggatttcataatttttcccttcaatctgctgtttacctttatggattttgccattctcatggaacttttaatcatggaatcgtggtgattctagatgatatattaggaaatatacttatgaggttagtttgggttcatttgttagtgaaattattcaatttgtttatgaattggatagggatatggcattcatttcttt

SEQ ID NO: 245940 - DNA, 276 bp, Gossypium hirsutum
  unsure (1)..(276): unsure at all n locations
gaccgacgcgtacgcccaggcnttcttaaaatttgttatcaattttttaaaatgagtgatgtactaatacataagccaacttaatattctaggaaagccccaccttatctaatgaatttccaacttatagctctccttgatttacaactaatggcgtaatcaagtgcacaccccataaccataaaatttcttatccacattgataatataaaactttggatactatacaaacatttttagtgcttaaattaaaaaaaaaataatatattattaaaa

SEQ ID NO: 245941 - DNA, 189 bp, Gossypium hirsutum
  unsure (1)..(189): unsure at all n locations
tcccactcttccgcccacgctttctcccacgcttncgcccactcttccaagtattttttttaagagccacagaacccacctcataatctcccccttcaatcctctatctacctttatcaatcctcccattctcaaccaacttttaatcatacaatctctctcatcctagataacatattacgaaatata

SEQ ID NO: 245942 - DNA, 455 bp, Gossypium hirsutum
cccacgcgtccgggaaaatccaggattgatctacggatgtaatggtgtggaggaaatcggagttcccgaaatcgatgctgatcttctaatgtcgttattagaggaatcgcagtgtgaggagtactgcaatgaggagcaagtaaatagtctgatagaatctctagaagctgagattagaatggtgaatgctggttcatgcagtattgaaggagacattggaagcaacgattgctttgaatggagtgaaatggaaatggtgccttcctctccaagcgatgacatgaattggtatgtggaggatcatgtccaagagatgtcgatggacggctacttggttcaatttggaaatgattttcctttgaatttctacgatattcagacagaaaatggttttacttctttgtggcaagaaacctatgatacagctatatacaattagattacatacatttttt

SEQ ID NO: 245943 - DNA, 383 bp, Gossypium hirsutum
cacagctcctgggattcttgaggttatgtttttcaccacttgcaggaactgatttaagaagttatgttatgtctggtggtggacttacactgaagaatttcaaaccaaaatttatgagaaagcgatgttttcttatcttccccgtccaaggttctgagagaaagggtcttgtgagtgttgaagtcaagaagaaaaagggagagtatgatatgaagctattagcagtagacattccaatggcatcaggacctgatcagcggctattcctgattggtgatgaagaagagtacaaggttggtggtggattgatctccatgctgagagatccagtagtgaaagcaatggctgcaaccaacgaatttgatgatcttgaccaaattgat

SEQ ID NO: 245944 - DNA, 120 bp, Gossypium hirsutum
ctgataacccaccaaataattcttctttccaaacctgaaaaacttcaagctcaatcctcttcaaagggaatttgaaaaatattccgaacaatatcctcttaaacgtattattaacccgaa

SEQ ID NO: 245945 - DNA, 116 bp, Gossypium hirsutum
  unsure (1)..(116): unsure at all n locations
gtttgcggctcanaagccttaaagcaagattctggttcagataatttcagatatatatattgtcaatgcacctccgatcatgatccgtaatgattagttgcataacattattgatt

SEQ ID NO: 245946 - DNA, 464 bp, Gossypium hirsutum
  unsure (1)..(464): unsure at all n locations
ccgggcgcgacgcgcacgcgtacggtttgttacctatatattatgtgtgtacccttatatttttctaaatagaaagagactgacatatatcaggatattttttatattgcaacgtggaatctacctaagacattgaccatataactttgtttttgtactttgtttactgatgctgtgctaagcaacgatactcgtatccctgccataaccatacctgaaatgtggctcaagcggngatattgttactaaaattttggttcctcatcttccctcttcttatcatgtaatttgacaaaaaacaaaggctttgacaacttttcatcgcacttattaagatgtttaaagtttttatatataaataaaaaaaaaaaaaaaggcctttccttctatatgattcaagccttacttacgctatcattacaaagttataacctcttttaataatgtcacctaaatataaaatt

SEQ ID NO: 245947 - DNA, 434 bp, Gossypium hirsutum
cccacgcgtccgctgttatcacgaggttggtttcccttggaggatttgggattcaggttgggtgtgtttatcggattcgaagaagccgaccaaggaagaatgtcacagcacttttgaaattccatcccagtggcatgggcatgacagctacgtttataaagaagggttttgatgtacatggctctcaaatggacaatgggagtatgaacaaagttttggaagccaaatctactcctgagcaagctccagaacagtttgtagctgaatcgaagaaagagacgacaccaactgatatggggcagaatatgggattaaaatatgtagatccatctggagatacttcagatgataatgttgttacagtgccaacagcaaaaggtggaattagaaggaaacatcatcgagcttggactctctctgaggttatgaagcta

SEQ ID NO: 245948 - DNA, 263 bp, Gossypium hirsutum
attagtttaagccttaaggcatggttgttgtctttgtttgatcaaatttgcatgcatgcatgcgatcgttaaccatctgttttctaagcttcgtggtgttagcaaggttccattgtagctcaaaatctcgtttctctgttaataaaattctcattgtgttaaaacaataaaatttgagttttgaaattcaatttcatcatttagatgaagcacaaaccaaggtttttttggattaaataataatgaagatattttaattgctg

SEQ ID NO: 245949 - DNA, 179 bp, Gossypium hirsutum
cccactcgtccgcccactcgtccgaaaacgttgaaaatattctgtagcatcaaagacttggagtgagaataatggagtagaggcaatttgcttggagatatatcatcctatcaaaatcaggtcacacaattatttctgttgcttaaaatttgtttgccttcctgattattatatgtatg

SEQ ID NO: 245950 - DNA, 429 bp, Gossypium hirsutum
cccacgcgtccgcaaatatacggtactatatgttatagacatgtcaaagctcttgttgggcgtgtgtagagcagagcaaaaggaagaaccctatgccattattccttatggatatgaaaatatagtccttttaatgtagaaaagaaaagtttaaaatttgagagtatttgcatcctatattcaatcaacattgtgtaagttcatgctggtttgttttgcaattgcattttttttgctagcagcaaaacaatgtctgtaattgttactataattttcatggttgtattttgtgttaaaaaaaaaaaaaaaaaaaaatgaacaataatttaaaattatattaattttatatatttaattaccgtgctatataattttgtaatgtacgattctttgaaaccatttgcttttgactggtatcatgcatgatag

SEQ ID NO: 245951 - DNA, 286 bp, Gossypium hirsutum
ccgacgcacgcgttctttcacattatacacaactttaaataggatttttaatatgcaactagcagcttttgtctgcgacatttttgattactgaaccccgcccttcatctccaacaatgacaactttaatctcggactatcatcttatacacaaccattagatcctcatccagctatggacaattccctcaaagaggcttactctctatttatgacaaaacttttcctacacttcatgcacagatctgaaaaacatagaagagtgagaccacttgaccctttttaa

SEQ ID NO: 245952 - DNA, 423 bp, Gossypium hirsutum
atgggtgttttcaggaatagaggcaagtttttttatctctaatcccctctagttcagctagataacttctgattttctcaactagatcccatactgaaatggatttcctttcatgaacaaactggttcattgagttccatatgagccacaatgcgcaacaaaagatcctacactgttcattggtacctcttacaaaaaaccaggacactgtctaaagacatgatcactatcctcttctccaactccacagcaagggcagatgatgttgttagccactctcttgtaacttagattgatcaatgtagagatgtaattccagtagatcctccatattgtaattgtaattttttatggtagctgtatgtcccatagttttctaaagaaatctttagattcggtctgtaataaataactattaggatc

SEQ ID NO: 245953 - DNA, 221 bp, Gossypium hirsutum
aaaccttacggttcgcatttaatgccctggccactttattgtatagtgctgagagacaacttaacgacgtagtgtttccaaggagccattggaggccacaaaaacagataactggctcttcaaaatgaatgctgaagttgttgaatagacgctctaccgcatacattgtagatcatgtcttctacacttgctccaatatttttgtatatcagcacacgctc

SEQ ID NO: 245954 - DNA, 162 bp, Gossypium hirsutum
ggggaatacgatggtatgtacacaagtggttaaaaagactttaatctctctgttccctgaggaaacttctgtgatgacactgaatatttcttcaccttgagttacaactcttaaaatgttatgttaaaagattggaatatatgggtaaaaaaagttaaatct

SEQ ID NO: 245955 - DNA, 153 bp, Gossypium hirsutum
gctgacatttgtaagttaagaaatataggtagaatgctcctatagcattagagacaagatcaacagttacatgatgcatgtctaacacatccactattacacccccaatcatacacacacatagaccttctatctggttaactaaattcaatt

SEQ ID NO: 245956 - DNA, 351 bp, Gossypium hirsutum
aaaaaataaaaatccaaatttaaggaatgtatccaaactattattacacacaataaaaatagggcaagtaaaaaaaaaaaacgagaaaaacaaactaacaaaataacattataaaaatcaacaatatctgcctacactaaaaaaacctaccattcgggaatcacatgccatccctcaggcatttatccatatctatatctgacgaagcccgaatctcagaactatatgttcagccttaactactgaccacccggacgcaaacatctattgcaaaaccccatatttcgcaatcgatataatcaccggcaagttacatacagtcattcctgcctaattatacaacgcaacatg

SEQ ID NO: 245957 - DNA, 251 bp, Gossypium hirsutum
  unsure (1)..(251): unsure at all n locations
cccacgcgtccgagcggagctcgaccggnattagtgccaatgctcaaaggaaggttgctagagagatcaagactgctcgagcgtttggtttaatgccatttataactatggggacaaagtcattcgttttctgaagatcaatggaagttgttaataaagattatgaatatgatgctttcgatgacatgacttccgctatggactaataagatgcttgagccgatatttgtgccttgcatagtttcattttt

SEQ ID NO: 245958 - DNA, 422 bp, Gossypium hirsutum
gaaatgacggtacatggatggttctttggctgtccggtccccaattaggttacgatagatggtttgtagactcatccacaagttgacttttgagtgaaccatttggacgttttgaatttttctttcaagttggtgacttcagctgtaaagatctttttttgttcctacaagtttgtatgtcttagcaattatatcttagtaaacactgtatcctggctgtagcgtttacaaatctgagagcaatgtacatacatttatattccgaataaaattagttttagttctgcgtaaaataaggccattacatatgctataacatatttaattgctcctgaatgatattatgatcaagagaggtactacttatgacctctgagctgaggctattatacttaatgctttgaatatcgttaaaaaataaa

SEQ ID NO: 245959 - DNA, 230 bp, Gossypium hirsutum
taaacggccaattgggattttagattcatggcatttgtttacattccataagtgttgatgggcacatctgcagtactttcagagctgagtctgattgttagacaaaataatgacggtccacgtgaaacatacaagtaagaaatggtttttggaggagttataaattgtgaagtttgatttaattataaaaaataatgtatgatttgattgtttaaataaagggcgtgtct

SEQ ID NO: 245960 - DNA, 318 bp, Gossypium hirsutum
gacgccacgcgtccgcccacgcgtccgcaatgctgctgggttttgcctcaggatatggcttgcatgcgatatttgcagatgaggcatcctcggaaatcagaatttaagatagtttggcatacaatccggcatatatggtaaagcttaaataaagttggcttttttttttttttttggtttgatacccttcaacccagttcataaactacacgaatgcattctatccgaatgcatatgtaaatggtttgatctttttgatgtctgtggaacttaaatttattggaataaagctttggtattatttggaggttgaccttt

SEQ ID NO: 245961 - DNA, 452 bp, Gossypium hirsutum
ggcgtgtgctacacgcatcggaagaatgtgtagcagttaatgacggagctgtacttgtacgtgctgagacttgtccagacttgaaaattggaaatgatagaacagaaatcatagatggtggcatggggggacttgatgggaaaactgcaaagcttgcttctcctccatgtaaagaattagtgaagactggaagcagtattcctggacctgacacggacaaaaaacaaaaaagatgccatatggagccagttgtgaacagtatctcaatgtctacgagagaaggtcttaccgattcagggctgagtccaccttcgacaaaggctggtggagcaactgttcagattctgaagagacctaactgtggctttggggcatttctggggaattctgccacgaagaaaaaatctgatataggtaaaaagaacgaagagaacaagttggagcagatcaga

SEQ ID NO: 245962 - DNA, 176 bp, Gossypium hirsutum
gctgggttagggtttagttttaggcctattgggtttgggcttgtaaaattatttgctggggtattatattttatttgtttatgggcccgggcaacattgggcttgtacaataccctcatcgagtctattgaactgcttgacctgaaatatttcatttgggcaaataataataatat

SEQ ID NO: 245963 - DNA, 254 bp, Gossypium hirsutum
gccacaaccggcttctggattatcgtcggctttactagctaaatatccagacatgcatcaggtatcgcagaacgcctcaatcacatatataccgtccatgtatattcacaaggatcaacacgcacttgatgtcacgaaatcgactatagactcatattcagcatcacttgatttgccaacgacccccaaagtcatggtcttgtaacacacttacacgagacaaacctattcattaaaatccactatcattgaac

SEQ ID NO: 245964 - DNA, 234 bp, Gossypium hirsutum
gcgactttggtctttaaattaattgcgagatttgccttctctatacatactggacctagaggttcttaaaaacacaactttcgttgttagctgcttgcatgaaaattatgtttcacaaaaatcaaaatctaaacaaacaacaaaactccattacaattgataaacaaaactcagactcactaaagaatccaaacttacaaattctacctctctaggacaaagctagcttatatc

SEQ ID NO: 245965 - DNA, 260 bp, Gossypium hirsutum
tgcagaaggggctagttgtgagtgagtcacctatgtatcttgatatagcgcccaagatcgtgaatgtgaaaacgagtccgaggtatattcaccaaccaaggttcatcgattgctgcacatttgaaatgtgaggacttcttaaagccgaataccgtcagctttaggttttatatgttgctacctgtaccttgcttttcattttcttgctttttgggaattggaataattttcggggccttagatgaagttcatcattccga

SEQ ID NO: 245966 - DNA, 113 bp, Gossypium hirsutum
  unsure (1)..(113): unsure at all n locations
aanggggangcctctaaacatgcgaaggcttgtgctacaaatggagaggaaacgttttagggaagagtagactatgagactgtgattgccgcattctgacctcgggctaccat

SEQ ID NO: 245967 - DNA, 158 bp, Gossypium hirsutum
acgttttatgtttggctcggctcgttcgggtattgccggtgaaacttgtgcgatttgcctagaggattataatgacggggagcttcttaaagtgacttcttgtcaacatgattttcattcaagctgggtggagtcatggatgactaatggggggacgt

SEQ ID NO: 245968 - DNA, 440 bp, Gossypium hirsutum
gcacctcggtctcaaacgcaaacaccccttttcatggcttccttacaaggtgccctaccaagtgtgccgccttcttctggcctattacgcacttcaagcctcggtacaccatcatcagcatggatgccacctcaatctttaccttacgcgtctggaattccatcgcagtcactgccctatgcttcagcattgccacaaaggccatacttgggagctcaattacccggtaacttgctgtcgtcgagccatcaagctggaggcattggcagtgaatcatcctacggtttcataaacactgaccaacacgtggcccgtagattcttagcaccggttaccccacagtctttctcttctgatcgtaggggcaacccatttggctgaacatgaaataacaaaggttccccaaaggtcatttttcgttaagcatcgtaccgttgcta

SEQ ID NO: 245969 - DNA, 394 bp, Gossypium hirsutum
tcgaccgacccgtccgactttactaagagcataatcctaatctcattatcaatgtctactacgccgaacaaaatcacgtcaaccgacggttgcgataggcgccaggctactcgacttcaacgtcgtgctcctgcttgcttacacatcagttcggctgctagctggaacattgcaatacctctctcgtctccgctcgcctgttcgcctccttcgattgatcggaggaccaccgatagaacagaagagccaccgcctcgtcaagaacaacagcagaggcaaatccagaaaacggagccggaaaagcttgtgttcaagatgtggcagcattcagcggcaccgctttgttatgaaccggcatcgatagtaccgtcgattgtgccggattatatgtata

SEQ ID NO: 245970 - DNA, 260 bp, Gossypium hirsutum
gtcggcccacgcctcccgattaaacccgggcttccttatgatcccattttcagtctatgcccgaggaacccacagtttgaatttggttttatttcccccccccttttgcaagtttcatttattcattcattcctcattgctctagggttccctgtgcttcttcctccctttcaccctttccttaatttctctccccctctcttttccattttcaaaagtaggccagcctggttcttgtatcactacttccattcagtggg

SEQ ID NO: 245971 - DNA, 398 bp, Gossypium hirsutum
cggtagttctgatgcataaaagaaagtgacagtttacctcaagaatacaacctattgtcgttgcgggacgaattgtggtcaatacgagattctggtgagttttcgatacttcattttgaactaacaacagacattatagagtattcgaggaaccattgtatactttcttaaaagaatgcgtggaaaggctgtaataattcaaacctaattatgtagattcaacttacactgttctttgcatcatttttactgaagattctgcttcattcctgttaaaaaaatacaagattacaaacgcgggcaatcaacgatatgaagacattttctacgtcaactaaaatcagtctacttccattaaacgcctacattcataactgaaaaaaaaggtgggtcttttt

SEQ ID NO: 245972 - DNA, 398 bp, Gossypium hirsutum
  unsure (1)..(398): unsure at all n locations
aaaaaaaaaaaaaaaaaaaaaaaaaaattttaaaaaaaaanaaaaaaaaaaaaaaaagggggggttttttaaaataaatgcgaaaaaataaaaaaaaatgtgataaaatatatattaaaattttataaactttttttttacaacataaaaaaatataaaaacaataaaaattaaaagggccgccctttttaaagaaccaaatttttcttccccttttttgcaacttttaatttttttttttgtgccccttaatttaaattatttgccccttttttaaaaactttttacttgaaaaacccttgcctttcccaaatttaatcccttttaaaaaaatcccttttttcccagttggttttataccaaaaaagcccaacctaattccctttccaaaaatttgt

SEQ ID NO: 245973 - DNA, 374 bp, Gossypium hirsutum
  unsure (1)..(374): unsure at all n locations
gaagcaaccaacaactttgtggtaccatttcctaataacagttttggagtaataccgcctatggtagcttcatttggaaatgccgaatctcaagcacgtgaagtttctcgcctttcaagttttgttgttcctcatccatttgacccagcaacttattatgcccaattctaccgttcaagtgttgataatgatggtcgcgtntctccctttgcttcttctggagttgctgcaaagtacaatgggaacgtttcagttcttccttcacagacttctcagtctcaagagggtggaaacttaattgtactgaccacaacaagttcaatttctgtagtgactcaagctgctgggatgatgcaaagttctttggctgtgac

SEQ ID NO: 245974 - DNA, 298 bp, Gossypium hirsutum
gcgtccggctatgcgatccccctatctgaccaccacacttctttatgcctccatacgaaattgattgtgggggggctaataatggagtatggtcagtctactattataagcctcacctctaatggaatgtactgtattctcggaccccatctaaagcttcaattttgacgaagaagagatttttctatgaatacaaaaagaaggtatgcttgcttttttattatattatgcataaaacatgtggcccacctaaggaagacgaaacatcatgcacatacaaaagaaacacaaggcgttc

SEQ ID NO: 245975 - DNA, 213 bp, Gossypium hirsutum
ctcgtcggaggggttctgattccggaagcatggattatgcaaactctgatgcatggtctgccgcatatagcactgttgcagcaggggctgcagttgttgctgggcttggcttattagcatacttgaggaaagctgggaattagcatcggtagaaacttcatcccatatgtaactcaaaaatttgaaggttaaatgcaacaactttctttaggt

SEQ ID NO: 245976 - DNA, 279 bp, Gossypium hirsutum
gtttttaggttcgattgtatgttgttttattgtatgtatttaacaaagtagttaaggtctagcgagtgttcaactcatatcaatgatataagttcaagttgtaaattcaaaaaaaaaaaaaaaaaaaaaaaaaaaaaaaaaaaaaaaaaaaaaaaaaaaaaaaaaaaaaaaaaaaaaaaaaaaaaaaacaaaaataataaaataagggtttgcaatcaaagaagagctaagctatcaaaacggggccggccgcttaaaaggatccattctttctcaccc

SEQ ID NO: 245977 - DNA, 345 bp, Gossypium hirsutum
cttctcccatcactggttctttgttcctctgcttattctttgttcctctgctggtgctggttctttgttcttctgctgcttctttgttcctcttctccaccaccgagatattgaaaggcaataggcctagtactcatttcacaagagatggatggttgaaaataatgaccaactttgagaaagaaacgggcaagggtttttcacaaagacaacttaaaaataggtgggatgccctaaaaaaagaatggaaagcttggaagaaacttaaaggcgaagatactggtttagggtggaatcctataaaaagaacccgtgatgcatcggatggatggtaggagagtaggc

SEQ ID NO: 245978 - DNA, 218 bp, Gossypium hirsutum
ttttccttttgacgactttgatcgctgttatcttgaacacgggcaatgtgttccatgtagcatgctgaaaataaagaacagttgagaatgtaagccatggatgttttttctatggttctcttttttgttttggtggtgatgatgaaatgctgtaaaaacgattatgtaaatgcgtttattgctactgatttgcattagaatgtagtgccattgcgaat

SEQ ID NO: 245979 - DNA, 190 bp, Gossypium hirsutum
ctgaggctaaaagaggagaaatggacctcataagaactgagatcattgccaagactcaatggggaattgctaggctctttgcaggatcaaataaaggagttgattcttcattaaggattggaagaaattgaaaacttatggtggttattagtgaataatctaattaattatatctgcatgtatagatatt

SEQ ID NO: 245980 - DNA, 270 bp, Gossypium hirsutum
cttaactctaatttttcaccatcatgacggagatgaaggtttgcatggacaacatctacgcaggaaagtcatcgttctttgaggactacacaacatccagcaaatgtatgttttggcttgatgtgatcatccaatttaaacactataggtataaactgttaattgtgccataagcggattacaagatcgttttttcttgttagtctacgtatgcacacatgttatggtcagtttgccatcattttcaatggtcaagcttgttttgctcgt

SEQ ID NO: 245981 - DNA, 460 bp, Gossypium hirsutum
gtggatggccacaaacgatattaaagtgccctccttccgaagtcagttcgagtaacggtgagacggttcaaaaaaggaatcaccttccaagttcctctgcttgtgtaactacagagaaacaaaaatcaatgtccaaaactaatttgtgttaccttgttttattgttaattctattgccttcttcatatttccttccgttagtccttgccaaatctcgaaatccgatcacagattctgagattaagaaaaagaagagtgaatgttatgctgatatcgacagtggactgtggggtgggcactgcaagtcttcatcaatagcaaaggagaattgtgccttaaagtgcctttctcctgcttgttacgagcttatatatgaaagtgatccgctcgaagaaggagagaaagattatataaggagccaagaattcaagtactgtatgtataagttatcattaggaga

SEQ ID NO: 245982 - DNA, 239 bp, Gossypium hirsutum
tgctttatctattattgcattacagatgtattgatgtaacaagttatcaagggaagttgagatggttattgttgctgctctcattgtgatcttgatatatggtatgaaccagtacacaccaacccattgttcattaggggtaaaaaaattacggttaatggtgttcaatcagttttatcaagctttgtttgttggatgctttttggcaggcaagtctgtttaatgtcgaatttgttgaa

SEQ ID NO: 245983 - DNA, 223 bp, Gossypium hirsutum
  unsure (1)..(223): unsure at all n locations
aaaaaaaccaagtatataggttgtgatggtaatgagttttatgttgcttactcatataagtgttttgattgaagtttctaacgaagtaaacttgcattcttactatcagaaaaaaaaaaaaaaaaaaaaaaaaaaaaaaaaaaaaaaaaaaaaaaaaaaaaaaaaaaaaaaaaaaaaaaaaaaaaaagcaaaancggggcggtcgttttaaaggaaccaaaat

SEQ ID NO: 245984 - DNA, 284 bp, Gossypium hirsutum
cccacgcgtccgcccacgcgtccggttttgattgatctatgatgtacatctaaagctagggaaccatattttacagttgtctcccggctttgaattcctccattgaaaaatttcaggttgcgttggatatgtaggaaatggctgcacatatttatatcatagttgtcgtcttcttcttttttctcctttcctggaaagttaatacaaaatctgtatcttatttatttgtatagttggtactgaatatctaaaactctttgttatgtgatatgtatttgattact

SEQ ID NO: 245985 - DNA, 302 bp, Gossypium hirsutum
  unsure (1)..(302): unsure at all n locations
ataccggggccgacccacgccgtccgttcattcaatctctggtttcaaattgtttccttggtttttaagatgaaaatgaaatttgtgttgttgtacttctaaaatacgttagtagggtaagttattaattggcatgctaccgtaagatgtcagaaacaattgcttaccttcaaagagaagcttctgttgtacttgtgaaaatgctgtgtggctttcttttccctttatttgtttatgatgcattgtctattctatcttgtagaatcttgaattatactatttatacttgttgattngacaaa

SEQ ID NO: 245986 - DNA, 308 bp, Gossypium hirsutum
attgtattgagtatggaccgcagagtgggggtatggaacgtataaatcatctcagttttgtgtcgttgcataggtctgccggtgaagccgtctgtacaactcattttcgtgttgattattacgagaaacattgatgtattgtggaagagattttgagtgtttactttgtagtttgcaacattatatttgatttttttttttgaaataatatatttggttttgatatagaagtcaaaaaaaaaaaaaaataaaaaaaaaaaaaaatctaaaattataaaataaaaaattataaattaaaaaatataaaa

SEQ ID NO: 245987 - DNA, 205 bp, Gossypium hirsutum
  unsure (1)..(205): unsure at all n locations
ttttagttctggtattttgaaatactgtttctngcactctgaattttcattgatgtgctgggaattagcgacatcaatgtgtattttcagttgatattatctactcttcttatccacttccaactatggatgttctcttgttctgttataccgctttctgggactctctgtttcagcaaaagcatacaaaatggtgttcataaaa

SEQ ID NO: 245988 - DNA, 371 bp, Gossypium hirsutum
ggttgaaaaaaaaaatagaaatttatttgaaaaagaaaaagaaaaagaaaagaccaaactccattcgctcttcattgggattacttgccctcgatcggggaattatcaatgaaatgataaatcgaatggataacgaccgttctgagcattaaaaagaaaagactttggtttgaaagtttcgaagtcaaaagatttcccccagggcatatcataactcgggtttatgacatcaatattaagagggggaattggattaaatttattctctgtaaatcttcaatttcaatggcaggcccaccttcaattccttgctttgggggattttggttctttttaagctccttaagatgaccttagatctttcacaattt

SEQ ID NO: 245989 - DNA, 290 bp, Gossypium hirsutum
gctatgagttcacacagagaacaggggactctggatgtgtgcttccgagacttcatttacgattactaagtgcagttaatcgatcagaatctttcagcatgttgaatccatatttccaagtggagcatctttacataatctttgtaccttgattgtataaattataatactaatagaataaattgcggatgtgcatttctgttctaaaaaaaaaaaaaaaaaaaaaaaaaaaaaaaaaataaaaaaaaaaaccccatttttttaaaataaaaaaaaattatatttaaaaa

SEQ ID NO: 245990 - DNA, 165 bp, Gossypium hirsutum
  unsure (1)..(165): unsure at all n locations
ataggatttagaaaaattttcgaagatcaatcaagccgccatcnaaacggcgtgataatttattgggctacaaagcaattacaggcacaaaccaatgtaaagattaattttttttaccttaggatgattgtatgcatatagttcccacagtgaaaaatgagttgc

SEQ ID NO: 245991 - DNA, 149 bp, Gossypium hirsutum
agacttcatctgcgttagtaattacagttagtcgggcagaatcttttagcatgttgaatctatatttccatgtggggcttctattctttgatttttggaccttgaatgcataaattataatactaatataataaattgtggtagtaaat

SEQ ID NO: 245992 - DNA, 177 bp, Gossypium hirsutum
gttggttttaatgttccatctcgttggaacatgttattatttccagtatgtacctgtgacgatctgccactgccgcccccaggactgtatttcaagcatttgggtcttggttgataatgttaggtttgctgtctaaaagtgaataattaattatattgactattaatatggcaagtc

SEQ ID NO: 245993 - DNA, 169 bp, Gossypium hirsutum
gggcttccctcttaccgaataaggatttttaaatcccaagatcatatcgaatcttaagcaggcgagcatagcataatctcgatatgattttaacttatatatatatatatgtactcgtactcatcatatattgaactttattcaataatttagcatctattttacacac

SEQ ID NO: 245994 - DNA, 378 bp, Gossypium hirsutum
agaattttcaattaaaatcttctttatcataatcgtatgcaagtgaggatagaaaagatgtgtaaggatgaactcaaaactcaaccccacccaaagttcttatcattaaaccaagatattgtgaagaataagaagggtgaagatacagtgtatctccatcagaacttcgtcgccggttgcatgtcgcttgtcggccacttcaacaaacaaaatttctcaattccttttttttttctctgccactttaatgaaacataattatagatggtgtgtgatgtttctggggttatcctttttgtcactttcattgagtcaagtccaactttttcaaacaataaattttccacgcaatcaaatgatttacacctatttacgctc

SEQ ID NO: 245995 - DNA, 340 bp, Gossypium hirsutum
cccacgcgtccgaaggtagagaagacatgttagctgttataggcctaaattctcaaaaggactcgactttggaaccttctcatcagttacagcaaagtcttgtactgcactcagacttcagtgccaactccaacgcatgtcatggttttgggtgctattgattttcttccaaaagaggccaagttggcggatagttcaatcgctttacattctggaaatgcaatggctgtggagcctgaaatggtgtcacatgcggtggcaactaaagtcgggcttcagcggagttcctataatgaaccgaatttccttccatttgcccctgatcttaatgtgagatttc

SEQ ID NO: 245996 - DNA, 126 bp, Gossypium hirsutum
  unsure (1)..(126): unsure at all n locations
gtgaacatgtgcttttgtatgtctcgctgctttcgtgttagaaccgttcaaaggatgatgtgttgggtggatatatntttccaataattacgagagataagtgtttgctgcggtactttgattagt

SEQ ID NO: 245997 - DNA, 491 bp, Gossypium hirsutum
  unsure (1)..(491): unsure at all n locations
tcgtcccactgcgtctntngtggaaatattgtggaaactcgtatccttatagctttaccgtagcggtttaatgaacgtgtgcttgtgacatttcaacacgtttcaagtccctgattcaaagcattcaatcgaaaaccgaactgtttgaagggtccaaggnngtgcaaaactacgtaaagaaccgatgtcgttttaccgtaatctccttcaagnttccagttattttcgagaggattagcgtgtaaggacacaaaggaaacgggtagaagaaagtagaattacgatgatgatannatgatgatgatgatgatggcacttacaacgtgatcatgcttagttgacgaatcatgtgaagaatctcattaagaatatctttggcgcattcaattcgagcctgatataagactgcaaatgttgtcatcaaagaattccaggaaagggaactcanaattgaaccctctagaacccagctgatctttgaacttttaaca

SEQ ID NO: 245998 - DNA, 282 bp, Gossypium hirsutum
cccacgcgtccgatctcgttctcgttcattatcggtgaattctgattgaaattggattgagctgcgatgatcacaagattatctcttttagctgattgtaatattttcttagcatgaactagagtttatattcacattttgaccaatcatgcatggtagttttgaactttagctggattataacatcaactgctgcatcatgattcatcattatggcttgtacttcataattgaatccttgaatttatacccaaaaaaaaaaataccattataaaaaatata

SEQ ID NO: 245999 - DNA, 423 bp, Gossypium hirsutum
gaggagtgcaatgagcaaagacgtggaattcaattagccggtgaaaggggaggatgcgggggtgccattggcagcggtgttaataacttcagcacagtcatgaaaataagcacatatattttcccttttgtaactttttatttatttatttacattgccaaataatgtgatacgtgcatacatatacaatggtggcatcaagggaattcattgttgcgtatagaaatgttcaaagtaggaaatgggaccggattcttttgtgccctggcaccacacgtggccagttgtttgaattttattttgtaaaaataaaagttagtcagcaccatatgatttgttccattgtggttgggtgggttcattgttaatgttgtgacttattggctatgtggcatcaaactacatgcgactgctttgctagtc

SEQ ID NO: 246000 - DNA, 428 bp, Gossypium hirsutum
  unsure (1)..(428): unsure at all n locations
acccacgcgnccgaaatcatgctagcagcccctgtattagtagggttgcctttagcctaccgcctccaacagtagaatttccagaatccagaaaccatgtgtgcagcctcaagattacccctcatacttggatctcagcgaagcaaagaagaacccgtagcaaatgttgaaaaagaacgggtgtacggaggaacctggtgacgtggaggctgagcgcaagggtctgtcgtgtgtgagaccaaccctggtgccgttctagcttgttccagaatcttctggcattcacctgaggctgaaaccatttttgggcctcgattttgggctacatttagggatagaattgggttttaaaatttggtgggttatgaattattttggtacatgtaaaggaacattattgggctatttagtctctagtttttatttat

SEQ ID NO: 246001 - DNA, 359 bp, Gossypium hirsutum
accttgcataatataccatttgaattctttttagatttcatagctatctaaggaatgcgttcattgacttttgttagaactatggtggttccattgaactgcttcatccatgagaggttgagaaaaaaaaaaaaaccattccttgaatcagcaatgtaaattgtaaattttgtatataatatttttcttgtaattttgtatatatatattctctttccataaaagaaggaaatcaaatatatatttaaaagctttgtaacttttatgttgaaagtgtaaatgggatattggtaatattgcctaacgtcaaaaaaaaaaaaaaataaataaaactaattttatataaattaataaataaa

SEQ ID NO: 246002 - DNA, 229 bp, Gossypium hirsutum
actgcgtgaactccaggtgtgccatatttttatattctcatccacatcgagggtattcggtagtatttgaaactctctggttatacatattagtccttgtagctaagaaattttttgaaattttccagaatgtatacactatctttgagggtatagctatactccatagctaatagtaaaattacttatagtcgttttgtaaagcgtaaaataaatgataatggataag

SEQ ID NO: 246003 - DNA, 418 bp, Gossypium hirsutum
cccacgcgtccggatctcgatgatgaacattgtgaaagacgagggggttagtttggaggatctgcaaaagatgttcgccgatatggtcggcagcggagatggtatgagcttcaacgtcaacactgatctcacggagacgaagaaggcgcatttcacggcatctaagacttaagaacaaatgtaaacgcgaggtagccattagcattcaacctccctttgtcttaggtaatccaatgagcttgtaaggcctaatttccttcattagagaaatagagggtttgtttagttttagccaattaggaccttgtggaacttgggaatttctgaacctttttaaaatgattttagagaaatcggtgtgataattggcattggcatcaatggtgtgtctgtctttagctcttttactttttgctgc

SEQ ID NO: 246004 - DNA, 291 bp, Gossypium hirsutum
tgaaggccgaagaggtgaaggtttcatattaacgtcacttgcacatgggttagtctccgtaaatatgtaacatttactaggcggtttgtatttggaatcggcttataataaactgtaaagttccagggtttggactgagttgcagaggctgtaagattgttgacatatacatatatgaacacatacgtatatctatatttgttgttcagttatcagtcaatgtaatgttattagggtattaacataataacacacgcaggtatagacctctttttgatttctgactttgat

SEQ ID NO: 246005 - DNA, 204 bp, Gossypium hirsutum
tcgtctcgacttttataaaaaacttttttttttgggtgttgtgtctctgtcaatggctctggctcccgaggtacaaatgtgggaaaaaaaaaaagacttaacactttttcgtggtctagaaagtcagatattataatattaccgataaaggacttcttttatataaaaaataacattctttcggtggctttggcacctgtcaat

SEQ ID NO: 246006 - DNA, 441 bp, Gossypium hirsutum
  unsure (1)..(441): unsure at all n locations
gattcttcgtacttcatggaatgtaattacagcaactacaaggtatggaactaaggacatgagatatatgatggaataaatcaagaaaaatgaaaggccattgacatattccaaaccagggaaaaacaaaaaaatttgcaaaagcatcatttaaaatttctttttacttggttgtctctttataaaattttatgccctttgcacttttgacctttcagtgtctcacactctttctccctgcaaaccaggctcaaaatgatgtgaaagagttgtagtttcttcagtggacgatgtcagacttgtggagaccttcagctgagtgaaggtcaatgaattttatcatcgactntggtgtggaaggttaatcttatctggtcttagtcctcattctcctttntttttttttctactttgcttacatttngtttctcaaccgaatgg

SEQ ID NO: 246007 - DNA, 198 bp, Gossypium hirsutum
attttcagttggaggtttccttgtttatgttgaagaaatgaaatagaaaggttttgcagggtgggttaaagttgaggtcgcaaatcattaatagtagggtcgattattttcattttatttttgggaaatccattaccatatggaaggaccaaattgtttttgttttgattcgatattatgcacggagagatttattgc

SEQ ID NO: 246008 - DNA, 251 bp, Gossypium hirsutum
gctgaatcagattccgaatcaaaactaaatgaagatgaatcacaacctaaagccgaagcagcagaagaagaaacagaagcatgaagctagtactggaatactcattgaaccttcaagggaaatctttaaaacgcaggcaaattttaagtctaatgagacgtagggagggtcttgtgtacggcgtaattttttttcagggttcaaattttcaccattgcatagcaatcgaaatcaattggattcattctttc

SEQ ID NO: 246009 - DNA, 274 bp, Gossypium hirsutum
aatgcttctccaggtgtggacaaaaagcatccacctcatctcctataaaaggccaacatttctgataaaaaagagcaggaaaaccatcttcaccaggtgccttcgtaggatgcattccaaataaagcctcccttcttcttttgtgtatttcgctataagattcctgttatcatcctctgagatacaccgctcaattccggagcgtatacgctcataattcgtttgattttctgacaagaacatttcttggaaatatgattgtacaatttgctcc

SEQ ID NO: 246010 - DNA, 105 bp, Gossypium hirsutum
cccacgcgtccggaactttcctactttggttcataattacagattaaagtgtgtatttggaaggcataatgccaaaaataacccctaacatttgactgattagtc

SEQ ID NO: 246011 - DNA, 379 bp, Gossypium hirsutum
ggagaaaataggttttgacctatgtgaattatgctacaattctccggccacaatcccaggccgatttagggagcagcataaaccagatcatcaatttaaaattgtacagccgttaagcatacgggaccttatgctaagactgaactctgaacaatctgatgatgatgatgatggtggcttagatgcttcggaacatatggatggtgcttctcatactcctggtatgcaagcggatgaaagccatggtgtttctcaagagcctgaagatatttcgcctttgatattttcagttgatgtctccttggatcacgaggataactctgaggatccaagtgataatatttcatcaggtttgacttaaaactgtagacaattgtga

SEQ ID NO: 246012 - DNA, 423 bp, Gossypium hirsutum
cccacgcgtccgcggacgcttgggtagcctatgatgcacgagaaaagacactttgtttgcgttcttgtcatagaagttactaaatggtaggcaaaggtgtacgaaagaatggacaatgttccaagatcgtttgactactgcagagagagcatattatgcatcactgggaattactgatccttacaatttaacagctaattaattaatggatataatatagtttttttttacaatagcattagagttgtacaagtcagtcacttctatatgtgacctagtaaactttgatttttggatacatgaaaaggcgactttgatcctatcagagcacatgcacaagtgttgtttaaaaaaaaaaatattaaatttttaatttattatattattctattatattttatcttttttttcttttttttttat

SEQ ID NO: 246013 - DNA, 294 bp, Gossypium hirsutum
aaaaaaaaaaaaaaaaatttttaaaaaaatttaaaaaaaaaaaaaaaaaaaggaaaaaacgggaaaatataaagaacccaaactaacaatcaataaaaatacctctttttaaatctcgcccgctccctcctaagtatccatttttacgacccctttcttacaacccaatactttttatattagtgtcccttaactacaaaaacctggcccattacaaccaacatttgttactcttaaaaccctgtcattacccatcttaatctcattttcaacaaattaccccttttcccattt

SEQ ID NO: 246014 - DNA, 417 bp, Gossypium hirsutum
  unsure (1)..(417): unsure at all n locations
cccacgcgtccgcggacgcgtgggtttgttaggtaaaatggaacaacctgcggcaccaagtgctgttcctcaaaaacttagtgacagagacagcagcagcaaagcgaagagaaaaattccaacaccccaggagctgatatcccattaccaaaaccaaggcctcgattcccaagaagcttccatcaaagtcattgaggatcttcaaaacgtggtgatgagggtcgtctcctccaactccaaacccaagaaagacaagttcttgatcgaaacttccagaaagattgacagtgtcaacaccaggcttgctgttgttgacatgaagctcgactccaagcctggttatttggagacttttgcaattggggtngcttctggtgctgcttttaatggaatttgcagtgttctgcctcatgtttt

SEQ ID NO: 246015 - DNA, 422 bp, Gossypium hirsutum
  unsure (1)..(422): unsure at all n locations
cccacgcgtccgcaaaaactctgccaagctgattggaatggttgtaaaagaattgggtcgtccaatcattgatgtttgaattaggtaacatcgttggccatctaaaattcattaacttccaaattttaattgattttttatagtatttgaaaatatgttccaccttttccacaccacctgcaatgtagattagcaaaagtaggcaggaaatttttaataattctccaaattttgattttaattttgttgggaaaatccagcaaccaaatttttttgtaaagtaaagggtcattnaaaaaaaaaaaaaaaaaataaataaaaaaaaaaaaaataataattacaaatattattataataaaaattttaatattataaaattattattttatttattttatttatattttntgggtttttttttt

SEQ ID NO: 246016 - DNA, 352 bp, Gossypium hirsutum
ggatcctcaatgaaaacaaaagactatgacatttatgggatatttaaggagattgataaagtcagagttggaaataggcgatgttgactttgtccaaaaaaaaaaaaaaaaaaaaaaaaaaaaaaaaaaaaaaaaaaaaaaaaaaaaaaaaaaaaaaaaaaaaaaaaaaaaaaaaaaaaaaaaaaaaaaaaaaaaaagaaaggaaaaaaaaaagaaagaatatattgttttcctaaaattaaaaaaaaaggcccccgttctataaactttgctaaaatgggtaaaaaaaaggacaattgggaaaaaccacgttttgcggaatataacggtttttacagaataaacccttttg

SEQ ID NO: 246017 - DNA, 216 bp, Gossypium hirsutum
ggaacccaagactaaggactgaagcaaacagtgatcaaagaagacgaggatgtcgaaccgtttgtgcaattctttttgctgtacctgattgtagcaggctttagtttctgtgttgtttgtgtcatgataccatgagctattcagatttaatctggccgtaacatgttaaaaagcactttgtaataactgaaccaattacagcagttgtttttgttt

SEQ ID NO: 246018 - DNA, 243 bp, Gossypium hirsutum
ttgagttgcactccatttttttttactcaattttcttagttaacccatagggaaaattacgaaagttattccccccaaaaaagaggagagaaaaaagaagcattattggtcaaaatcactaacaaagcaactaaaacaaatgatcttttccattgtcttcaataaatttgctttgccttcttatgtattgcattagtgtaattttcatttatataaaatatcgatcatggaaatctttatgtt

SEQ ID NO: 246019 - DNA, 546 bp, Gossypium hirsutum
  unsure (1)..(546): unsure at all n locations
cgnntccgagttgtatggacacccttcaatttcaattttaatttttgttttanntctctcaaatannaatgtgtgttagtttgtgtaannaatttctnntttcaattttatatnnntcagcttcttaatgctnnntttgcagcaccacctnnttctgcntnnctcagacccagtgaatgggggtaaagttattttcgatttcntttttgtctcttannattgannaatgantnnttcttattttattagaaatcaaggggttcnttaatgcncnncctcgaagccttatttcatatnnncggttggcttctttcggataaacaccgnntaagttcaccttctacntnnttctgtnntaaccaaagggtatttattatgctataagcctagngnnaaatagaaaagaataaatttgatacctaagtnngagttgatgaaaacaaannngtttctattatttaccttnnactttaggtgatccgaatgaggaattgttttaggacatgntgtattacaatgattgtgatatgcanaatatgcttatgt

SEQ ID NO: 246020 - DNA, 388 bp, Gossypium hirsutum
aaaaaaaaaaaaaaaaaaaaaaaaaaaaattaattttaaaaaaaaaaaaaaaaaaaaaaggaaggaaaaaaaaaaaaaaaaaaaaaaaaaaaaaaaaaaaaaaaaaaaaaaaaaaaaaaaaaaaaaaaaaaaaaaggggcgccctttttaaagaacccaattttacttccccttgcttccaactttttatttttttttttgggccccctaattttatttttttgcccccttttttaaaacctcgtgcctggaaaaaccctggctttccccaattaaatccctttgaaaaaaatccccttttccccagttgggttaataccaaaaaggcccgccccattcccctttccaaacatttccccacccttattggaaattggacccccccttt

SEQ ID NO: 246021 - DNA, 287 bp, Gossypium hirsutum
gggtcaggccgaacccggtctaacacctccagttgtgcccagttttggttaatattagacggagaaaaaccaaatagttcatctaggttttagagcagtagggaaaaaaatactgaataggataacagagtgagagaacgagttgaacgaacccggtttgattgtttccggttcgaaaggccaaaaaaaatagtttaaaaaaatttccaaggtgggtgcggtaggttttctatcatagggatgtaactgatttagagaggactttattgtatctgtgttattttttt

SEQ ID NO: 246022 - DNA, 298 bp, Gossypium hirsutum
cttgaagagtgggagaacaaagtacgacttttgagcaatttcatttgatttttgcgggggattagttagcatgctaggttatccatttaagtgatacttgattttcgcacgttttgatcgaatctaatacatgaatacatttagaagacagcttatagattcaagattgtggaaatgtacaatttgcgaaagttttctcattcatttgagaaacaaatgcagtagaaatatgtacaattgtagtttttggttaaagcagataaagtgaattttttcatgcctctctaacccggggatc

SEQ ID NO: 246023 - DNA, 293 bp, Gossypium hirsutum
  unsure (1)..(293): unsure at all n locations
ccagggttgactttaagtgccccttcatgtgaattgtacttttacttgtgtttcattgggaaccaaggaaggttcgttcttgcttgcanatgtagagttatttccctcttccttttgacagatcaaggttatgtaaagattgttaattgcaaaaagaaagaaagaaagaaacgctaaaataaataagcaaaaaaaaaaaaaaaaaaaaaaaaaaaaaaaaaaaaaaaaaaaaaaaaaaaaaaaaaaaaaaaaaaaaaaaaaaaaaaaaaaaaaaaaaaaaaataaaataataa

SEQ ID NO: 246024 - DNA, 424 bp, Gossypium hirsutum
caagtctttcttagaagcactttctgttattaacagagattcccgatctttgccaaacaagatttcccgatctttgccacatcaaagcttcctaaaggatgaaattgaagaagaggtggaatgtatactcagcgtgagtgctgagatgaaacaaattttttgggacttgcttcctgatcacgagttggatgaggaatttgctgatgcctatggggaaggtttagaaggaagtgatgatgatagttgtattgaggatagtggttgttatgaaaatgattggaaaatggttaataaggacttagagagttgtatgtcccattctgtcaagtcaattgagagagatgaggttatacaggacgtgaaaatggatccagaatattcctcgagtaatgcgaaaagtagcgaagataaaaacagagtaaag

SEQ ID NO: 246025 - DNA, 386 bp, Gossypium hirsutum
gtgactattacataattaatgtaaggaattgagtcagattcataatgaatgaaaagaaggtcctatttcgtttgcaaaaaaaaaaaaaaaaaaaaaaaaaaaaaaaaaaaaaaaaaaaaaaaaaaaaaaaaaaaaaaaaaaaaaaaaaaaaaaaaaaaaaaaaaaaaaaaaaaaaaaaaaaaaaaaaaaaaaaaaaaaaaaaaaaaaaaggggcgccccttttaaagaacccaattttacttccccttccatccaaattaaaattttttttatagggcccccaaaattaaattcactgcccgctttttaaaaactttggaattggaaaaaccctgccttacccaaaataaattcttttgaaaaaaatccccttttccccagttggc

SEQ ID NO: 246026 - DNA, 347 bp, Gossypium hirsutum
acgcgttcccacgcttccaaaagggtgcttttgggtttattggaatcaataatttgccccagtggtggtgtttggtgatttgtaattcgccccactaattccccattttaatgaaatttggaatttaatttcggcaaaaaaaatatatcggaatgaacctttgccctaatttaaaaaaaaatttcatgaaaaaaaattaatacccctctctttaaggaaacctctttaaaaaatccccacctttaaaaacccaaaaaatttaaaaaattccttataataattaaaaacctttctctcccttataaggacctaaatttttttcccttggggggaaacccaaatttttt

SEQ ID NO: 246027 - DNA, 265 bp, Gossypium hirsutum
cccacgcgtccggagttgtacaagggtaattcatgtattctaccatgtagctgataatagttatgagtgttattaggctagggaaggagaaatttatcaactcctggaaattctgaccaacgtacgttaaccaaaagtcgatgtgtcttttgtttaaatatcgatttaaaaccgacgcttagggtgagggttggtttgattgttagatttgtggcttaggtaagtacacgctaatttaaggaacggtgtgatcttttagcagttc

SEQ ID NO: 246028 - DNA, 393 bp, Gossypium hirsutum
  unsure (1)..(393): unsure at all n locations
ggtctgtattatacaaggagcatttatgtgttgaaactctttatacatgcatgcatacctgatacattgatcaataataaaccattttggggaaacccttgtngtnaaaaaaaaaaaaaaaaaaaaaaaaaaaaaaaaaaaaaaaaaaaaaaaaaaaaaaaaaaaaaaaaaaaaaaaaaaaaaaaaaaaaaaaaaaaaaaaaaaaaaaaaaaaaaaaaaaaaaaaaaaaaaaaaaaaaaaaaaaaaaaaaaaaaaaaaagggggggccttttaaaaaaacaaaattttaattcccggggtttggaaaaaaaaaatttttttttggggcaccaaaaaaaaaaaaaaggggcggggttttaaaaacgtgggaatgggaaaaaccttggggtaccc

SEQ ID NO: 246029 - DNA, 352 bp, Gossypium hirsutum
tgaaaagggacttgaattaaagcaaactcccagtcctgggccatctacacttggacaagggggtcgtgcttcatcatcaatctaaaagaaaaataataataagtcctcttttttaatgtctatttagtggtgtggtttgataagtttaaatgtcagtgcaactcgagaggtcttttgtttcagtgtgttttcctgttctgtctaacaatagggtgattgacacttcttttactttattattttaccctttactaccgaagcatggaataacagcaaatatgccaattgtttacaaactaataaaaaaaacctcatgtacggtaaatttatataaaattaaagctaaggtttt

SEQ ID NO: 246030 - DNA, 421 bp, Gossypium hirsutum
cccactccttcgaccacacatatctgatatcagatgccattgcatgtcatccatggggcgggatggtggccttgatgattcaagcactctcacaccgaataaattatctgtgggtcgtctaacaaaatcaaactttattcgggattggaacctttgctataatgattaaaattttacgtgaaacgattgtgtaccatgacttaaggaaagctttgaagaaatccccaacataaaaagccaaaaaatttaagaaatccataataataataaaaaccatatatttggtgattgtgatttagatgtattaattcagggagatccagaatcttaaaaagaaattcaacctgaaagtaatcaacttaagtgcagatgtttatgaattaaaagaatggaatagattgaggtttctggagaacaaaaa

SEQ ID NO: 246031 - DNA, 309 bp, Gossypium hirsutum
gtaagtcttcatttgctgacattgctcaaatagaatctgcaaaatctttttagtaacgtcggtattgaaggtattaataactaaaaaaaaaaaaaaaaaaaaaaaaaaaaaaaaaaaaaaaaaaaaaaaaaaaaaaaacaaaaaaaaaaaaaaaaaaaaaaaaaaaaaaagcatgcgacatcataaataaaaatataaagtcaccaaaattaaaataactgaccttcttttttacaatccacataactttaaaaaccctggcgatacccaaattaattactttggaaaaaataccctttttttcagttt

SEQ ID NO: 246032 - DNA, 361 bp, Gossypium hirsutum
aaaatatgaactttcaacaattgagtgcctacccatgtcttccatttctagtagtgaaagcaataaagatttaaatctattatctgtttcctggtattgtacaatttttaattgcaaacattggtaatgtaatttggagtctattctgggaaaaaaaaataaaaaaaataaaaaaaaaaaaaaaaaaaaaaaaagattaaaaaagtgagtaagtgacctaaacgaattatttgagaaaaatgaaagatgaataccaacaagggattaacatggatgaccaaaaaaccttatagaagtttctttcaagtgatggtttctttgaaggatgcgcgcgtttaccataactataaatattaacccc

SEQ ID NO: 246033 - DNA, 291 bp, Gossypium hirsutum
atgaaatgaaatctgtaactttaggtgattgctgttgaattagaatttagttttctgatgatataagatgttaatgggagaaagggtagaattagataaggttcttaagttgaacaaaagtggaagacgtgtatggtttccttgggtggggagctacacactacaggttttaaaattgaatttatgaacggtggatttgactcaaaaaaaaaataaaaaaaaaaaaaaaaccaaaataaaaaaaaaaaaaaaaaaaaaaataaaaaaaatgaaaaaaaagaattttaaaat

SEQ ID NO: 246034 - DNA, 247 bp, Gossypium hirsutum
cccacgcgtccgggaattctttgggctaacctattgctgttatttttgaaatgtaacaaaatgaaaatccgcaaactgatgaattgaaatttaataaattttcatttataatttgttttcgagaaataaaaaaaaaaaaaaaaaaaaaaaaaaaaaaaaaaagaaagacgggagaaaggaaaaaaacataacctacgcatgcaagcaacgaaaaaactatatatattgttgtacataaattaaaatt

SEQ ID NO: 246035 - DNA, 377 bp, Gossypium hirsutum
accttgagagttttcctgtctatagtttgaatatatctatccttttttttccctggggaaaaaaaaaaaaaaaaaaaaaaaaaaaaaaaaaaaaaaaaaaaaaaaaaaaaaaaaaaaaaaaaaaaaaaaaaaaaaaaaaaaaaaaaaaaaaaaaaaaaaaaaaaaaaaaaaaaaaaaaaaaaaaaaaaaaaaaaaaaaggggggggcccttttaaagaaccaaattttacttccccgtgttggcaaggaaaaaattttttttaagggcaccaaaaaaaaaaaaaatgggccccgttttaaaaacctgggaattgaaaaaacccgggggtacccaaaataaattgcttgggaaaaaaacccctttttccaattggggt

SEQ ID NO: 246036 - DNA, 303 bp, Gossypium hirsutum
aaagaacaattgctaaagcatggactgattcaaggtctggcaaaacaaatgatcctttgaagggttatcgttgaatcccatttgaaaactgagatgaaatggggttcgttttgggtattttagcacaatggtcttgtttttatgctttttttgtttggacttgtactgaagttgcagaaagatttgtttctggatatttttgttctcgctataaaaagtataattgaaatttggagatggttggatttcttaaaaaaaaaaaacaaaaaaaaaaaaaaaaaaaaaaaaaaacacaaacctaaa

SEQ ID NO: 246037 - DNA, 317 bp, Gossypium hirsutum
gaaacatttggtgattggtagttattaaaatctgtgtttcccttctaaaaaaaaaaaaggggagggaaaaaaaaaaaaaaaaaaaaaaaaaaaaaaaaaaaaaaaaaaaaaaaaaaaaaaaaaaaaaaaaaaaaaaaaaaaaaaaaaggggcgaccaaatttaaaaaaaaccagcctaccggccccccgctatgcaagtgcaaaactttttattgcctcccccaaaattaaatttttctgcacttgctttacaaaaacccgtttgtgaaacccttggctctccccaaattaattgcccccctccccattcccccttt

SEQ ID NO: 246038 - DNA, 230 bp, Gossypium hirsutum
cccacgcgtccgcaggaaggagaagacatttcttgcagagaataagaagtttatcaagaggcagccgaagtgaacacggattttctgtcaaattctggcgagggtcccgttaaaattttgctaaaaccgttttcattgaagttgcaataatttccatgggaaattagagtttgttttcttgagtaagaacagggaaatttacagaatccagactgatgctttattctctt

SEQ ID NO: 246039 - DNA, 341 bp, Gossypium hirsutum
  unsure (1)..(341): unsure at all n locations
cccacgcgtccgcatggatgcatgtggtgttcaatccaaagtactgagtgattgtctgaccaacttcggaagtgatatcagcaaatgccaattctatatggatatgctgcaagaatgccgcaagagctccggtgcgttgggcgcttaatgttgaaaatctaatatcccccattaaggtcattgcaatttaggagtttgagtaggcgtgtcctttttagtttgtctatattgatgcaaacaatgggtttgctggtgggaaaatggcactatttaggaaaactcactgctgtaaacttaacatcgcatatctaaattaataaataatattttttattgcnnaa

SEQ ID NO: 246040 - DNA, 259 bp, Gossypium hirsutum
ggttgttgatttcaaagcaataatcttgttggaatcgaattagatcgattaatatgatcgggtgaattgagaatcgataaatgtattaattctgacgaaaacattgaatttgagcgaattatttagaaccaccattgaatcaaaaatcgaaataggttgaacaagtaaaaaaaactaatggaatcggtttgttatatttattaactgttaacattttaattgaatttggaatgttcaattgaattagaattattagttt

SEQ ID NO: 246041 - DNA, 318 bp, Gossypium hirsutum
cccacgcgtccggatttgtatacaacagtgatgaaaagattgaagaagagtgtgcagagaaggaggattcatccgatatcatacgactcaagggattgccaacaccgaaaggaaagcacctgcggtttcctctagatgaggttgacgatgattgataactatctcggtgtagaggtggggatgttgggattcattttgttgtcatcccaatttgtttgttctttctggaaaaagaaaagatcacgaacgaagtgattgaataaataaaaattgatgcaacgcaaaaattcctcggaaattgaactaattaatttttac

SEQ ID NO: 246042 - DNA, 352 bp, Gossypium hirsutum
cccacgcgtccgggtgaagtaacttggtgccatgtgacgtttcatcattagcttggtgttgaggtatctttctgagatgcattgaaccttggtcaagtggtcttgcaagtgggaaccaggtcttggagggtcttccgtttggggccttgccttgggcctagctttccttggattagtcatgttgggtgctctggagatcatcttgagggttttggttgtccgttaccttctgcgatcaacttttattttcatctcaacaagaaccataaaatatttaaagatatcaacttttttaaatagtaaatgacatttttaaaattgtaaatgttaattatcttaaagtttgaccttc

SEQ ID NO: 246043 - DNA, 429 bp, Gossypium hirsutum
  unsure (1)..(429): unsure at all n locations
gcatcttgtattcacacaatcactatcgagaaacgaagaaaacggaattggatcgggggaagtcaaaagtagtcgagtagtcgactgtgttcgttgttaaccgagattttggaatcgtgtacgagctcagggatcatcagcaagcctatcacactatcgactgttttctttggtattttactaagttaaagtttgagcttatggcatgtatagtctggataaaataattgattttggaacttgtatgtatatagccatgcgaaaaatggcttgtctttaatcattagtatttgttttggtttttgtcttatgggttcttgattaagtgtttaactttataattntggttatggcttatttacatgtaaaatacggtagctatgttnntgtgataatatggtgaatgagatgatatataatatgagtgga

SEQ ID NO: 246044 - DNA, 208 bp, Gossypium hirsutum
attcatataaaaaaaagttttgttctctaagttacatttgcgttgtgagtagttgcatttggaatttgtatagtggattcatctgattccatataaaacattcattaaaaatctcaagggaggaggggtagcgtaattaatttatatatattcattgtttatataaaatcaatcttcatcattagttcaatggagatagtttgtattc

SEQ ID NO: 246045 - DNA, 232 bp, Gossypium hirsutum
aagaaattgaggcatcatttgaggcatccaaatttcttcctgtccatgcaaccaataaaagcgtggagcctgttgaagttatgcccctcttacccgattttgaacggtaccattaccagttcgttatggtggcattttataatgctcctacagctgactcagaaattcttagcaagctttcatggctctgtactttattaatattaattgaggtccatttttttaatgtttt

SEQ ID NO: 246046 - DNA, 293 bp, Gossypium hirsutum
aaaaaaaaaaaaaaaaaaaaaaaaaaaaaaaaaaataaaaaaaaaggggggccataatagggagggaaaattacgacgccggcatgcaacaaaataaatattttttaatgtaaccataattaaataatttgtccgccgttttacaacaacgcgattggtaaaaaactggcgtttccaaccttaatagccttttagcacatcttcctttttccagctggtgtaatataaaaaaagaccttaccaattttccttcttaacaaaatggtcagccttaataaagaatgggacgcccc

SEQ ID NO: 246047 - DNA, 432 bp, Gossypium hirsutum
cttaggaggaagctggacaatgatccccagcatcccaacccacagtaacgtatctacgccggccaatcaagaccatctatacctttcccctcctccaccctcacaacaacaacagtttcatccacaacaattccaacaacaacagcagcagcagcgtatgttacagcagcagcaacaacaacaacagcagcagcagcaagtgcagcagaatcagcaacaacaatcactagcttctcacttccatctcttacatttggtggagaatttggctgatactattgataatggaagtcgggatcaacattctgatgctttggttaatgaactgaacaatcactttgagaagtgccagcagcttttgaactcgattgctgcatcaattaattctaaatccatgactgttgaaggtcaaaaagaaaaagctggaggaaa

SEQ ID NO: 246048 - DNA, 304 bp, Gossypium hirsutum
attattttcatctgctcttggtttgtcgtttttagctgatcagtgttaaggtaaaatgctagtaaaaccaaaatttacaagtacaaaatttatatatctattttttcagaaccagaggtggaattgtgctgttcctttagagttgatatgaaattgtttttgttaactaatgatacatggtaatttgtgtattcttgtttatgttagggtttttttgttattatcatagttaaagactaatgatattatatgtacaaataatggacatgttataattattttatatgtatgtatgtatgtattc

SEQ ID NO: 246049 - DNA, 443 bp, Gossypium hirsutum
cccacgcgtccgaggaataagagcacctttatttttctagctagctttcaatataattccttgtcgttctatttgcttttaaaatttagcctctaattagatacccagttctcattttctctttaaaattaaccacaaaataagctatcatttgtcttcttgtcgtgtctgcctttttttgcttgtttccttttctttcttcccttatttgacgccctgtggagttctcttatctaattttttgtttatcaaaggttatggttgaaaatgtctcttttttattttattgtattgtttttgttttatttcttttagttttgtttatttaattatatctttatatttattttttttgcatttttttcttttttatttttttatattttttttttcattaactttttttttcttttttttctctttctttattttttttttttttt

SEQ ID NO: 246050 - DNA, 345 bp, Gossypium hirsutum
atgatgaggatggggagcatttgtccaaagagaaaaatggggttcgacctagaaacagaggacgagggaggagacagaaaaatcgtggtgccaatggacacggccatggaactacatcctcatgccatgccgtagaaccatcgaagccaccaccgggacctagaatgcctgatggaacacggggattcacaatgggacgtggacggtctccaatttctaaaccaagttaatgatgtggtattttgattatcatgcatatggtttcaaaggccaagtgtgaaaaacaaaaacccaaatggatttatctgtgttttataaatggtgatggtgttatcttttcttttg

SEQ ID NO: 246051 - DNA, 167 bp, Gossypium hirsutum
accaggcgttcaaccacgcgtcggttcacgcgtgcggccacgcgtgcgcaaaggaaatgtagtggctgtggttacaagatagcagcggaggacgagcaaacaaagggtatcacaggtggagactgtatctggtttttgtacaactaacaaagaaccgaactcggtga

SEQ ID NO: 246052 - DNA, 247 bp, Gossypium hirsutum
  unsure (1)..(247): unsure at all n locations
gaggccaataggattgaaggccatggggagtatggaaagtgattcagattgaagatacatcaatggcagtagcaggaccctttttcttttgatatttttgggggaagatttttggaattggtgttaacaagttggggaggggcgtctatgggtagttttaagtattatgtcaaagtgagccgatataatcaaaacttataatgagattattcaaaaaaaagttttaaaatggctaaattattcnnaa

SEQ ID NO: 246053 - DNA, 379 bp, Gossypium hirsutum
ggagatcggattgcttaagctggactgaccctgtcaggttgctgttgggtgcagatctaagctcgtggaagaacaagaactgaggaagagtatagcacgctcaagtctttacaaactgtgttctcgacaaatgccactgaaccaggtggtaagcttaaggagcacttacgaggcgaatgaaatctgctctacttacagtttatgtttttagtatatgtcattttattttattttattttaattttttttttttttttttgtatttttatttttttttctatttttcattttattattttttttaaattatttttttcttttttcctcttttttatattaatatattttatatattttttttttttctattttttttttt

SEQ ID NO: 246054 - DNA, 335 bp, Gossypium hirsutum
aaagtggctttcgctgttggtatgattgccttgcctgttgctgttcaagcccagtcccccgcccttgcccccaccacgaacgacggaacatcgattgaccaaggggttgcatgtgtattgatgttggtggcattgttgcttacatacatgattcatgttgcttacttatgcttcaacttttgagctatttgttacattgtcaaatttctagggagagggagggatatgctggatgatttgtaactatgcttgtaaaagtttaggcaaactcttgttggcttcttcccgtggataatttgataacttcaattttataatgtttagtggcattctca

SEQ ID NO: 246055 - DNA, 275 bp, Gossypium hirsutum
ggactgttgtagttgaatgttcataaatttgcaatcacgcgtgtagtatgctaacggtaacatctccagtcccttgttgtctggagcttgtgagtttgcatatgttgctaggggaaaacagagttctggaagtgatccctaattctttgaaggggattaaccatgatatgtttatttattaaatgcagtgttgttaatcattgttttgaacattcttaatctcttgaatcgttgacctctttccaactttttaataatatttcaagctctcttgt

SEQ ID NO: 246056 - DNA, 406 bp, Gossypium hirsutum
  unsure (1)..(406): unsure at all n locations
gtttcttgcaactcaagaaagctatgctcacccaacatacaaacagaaactgatcgaacacgatgaaaccgagtacaccaatatcttcggcagagcactctggcctggtgcaccgcagcgtgtcctgcgaacgccattcgtctgtgactggaaatccattcctgctcatgaaaacgaaagtaatcagcccatcatcggtcgatcactaatacatggcatggaaaccgaaatccaacgcttttctgcttcggatcccaatccaacaacaacaggtgagatcgaaaacatggcactttacgcaggccaaagtgtcggcctaatcaaagagattcttnctgctggagaagtagtgaagagactggttgaaggggctcaacatttgatccgncaaagatttaacgaggaa

SEQ ID NO: 246057 - DNA, 285 bp, Gossypium hirsutum
  unsure (1)..(285): unsure at all n locations
cccacgcgtccgaccaattggactgatcactgggattcccattaaagagagagagaagcagaattaaacataagaaagatgccatggttatgttgttccaaagctctagacaaacactagggtttcttctgtttttcatcctagttgttggttttcctttgggtacttttctatgttatatgttggtggtgttggtttaatttctttgggattgtaaataatgagcaaataacatacttaaacttattataatttcaatcttaattccaatttattnacnnnnna

SEQ ID NO: 246058 - DNA, 417 bp, Gossypium hirsutum
  unsure (1)..(417): unsure at all n locations
cggacgcgtgggtgcagtcataaacaaaagtagtgatggcttactggacaagtacaaaataccagataactggtggactcaggagttgttcaaaaacatggttcaaacggacgatgggcactggaagttcaatgacactgcctatgtgccagatccgccgagtgcttaattggaccggtcgatcatgtcaaataaataacatccttttaaatgcaatcatataaaaccagtattgcatctctgtcctgcaaagtacctctacttacagtcctaactcctaatagcaaattaaaacaaagttggacgttaaggtcgcttatcagcatagcccccattgcgtcggacatgattgtgctgtctgaactctgtgtgtttgtctacatatttncatgaantaaagtttgtgctttttttttc

SEQ ID NO: 246059 - DNA, 413 bp, Gossypium hirsutum
cccacgcgtccggtttaatacgagaaaattctgcaccagttgaagcagcaaaaagatgattcactgtgttccaaatttcacatgcagatttagcagagatgtatttggatttggaataagtgcaccttctggagatacgatgaaccgaggtggagcagacaacatgccctccaagaatccttgcagctcatatccttctattatcaaccggatatgttgcttccattgaacaaagtttccttcctctagcttcaacgtgtcatggtgaggcaaagattgaaccaagcatgcacttgaaaatgacggactcataggatcaacagagttagaatctgttgacggtgccataacacgaaaatggaagcacgtaccaggactaggcgactgataccatgtaagatactatgcaaaat

SEQ ID NO: 246060 - DNA, 336 bp, Gossypium hirsutum
ttccgtcgacccacctccgctcgtttggaaacccaaacaactctagatggaagatgtcaggaggaaggccgcgccttctttcctgaagggattcaacaagcctttttggctctataaggctcgatctctagctggaaagctggaaaaaagtattccccctccctttcttttaatagagatttacatacattcatgcatcatgtcttgatgttttccaaaacaaggaaacggaaatgagtgtaaatttgatattatctaatttttctttcttcaatttgtaaataaatttctgctttcattatattcgttcctttgccaatttttttgtgtaaattt

SEQ ID NO: 246061 - DNA, 395 bp, Gossypium hirsutum
tgaggagaacttttgtttggagttactttgttcagattgttcaaagccacaacttccgaagtgcggggtgagtcagaatggaataattggcatgtccagttcgttcactcttcaacaaactagcaatgttcatctccatggctagactgaaatatttcacatttttatggttttgaaatgctgttaacatgatgagttcctgataattcaaggcagccagaaagcaaaatataaagaatatgatctctctccatctttcttgttgactttttaatctgctaaaagttttagtcgcttacgggacttagcttgaatagccttggggttctctgagctaaaaggtcaggaaactgcacttttgcatgtcttgtccaagaaaaacaatctcgctttgg

SEQ ID NO: 246062 - DNA, 429 bp, Gossypium hirsutum
cccacgcgtccgcaaagtttcactggaaagcatacgactgaagtacaggaagaaaaagtaacgagaggaatccctaggaagagagcatgggatgcaaacctgaaagaaatcagtggcaatgatatccattgtgtaagggagaatgtagctgatgggacgagtcaaccggatgtcatacaagctgatcatccaatcatacgctgcattcccagatgaatatcttgacttgggttggtactacaaatagtattatacacattttaatactaataatttgaaaacactgtatgccttgtcagatacccatttggcattcggcgcctattcctaatattatattgaaaggaagaaaatattgaacggagtgcaaaatgtttttaactatttcataaatatgtatttattaataaaataaacttataaagtttt

SEQ ID NO: 246063 - DNA, 349 bp, Gossypium hirsutum
atgcattgtacagcacggtgaagaagcttgtgcaaaatggatagaagctcctcgtatatgccttcgtgcagagggcttcaatgtttgagatttgatacacaaagtttatagagtgaaaacatttagttacaaaaccatttacacatattatttgaaaaatctaagaaataaaggacagatacattttcttgccctattgatgttggattcatcccaactgttaaattttcatgtattttcctttgttatgaggctgtttagccttatctaatctcttggaacagccacaatactttcatttgtaactggtttgagttcagacattaatggtgataaaaatgcttcatgt

SEQ ID NO: 246064 - DNA, 288 bp, Gossypium hirsutum
cacttaaggttctgtgttcgagtctctgtaagcataaggattgttttaaaaaaaaaaaaagggaaggaaaaaaaaaaaaaaaaaaaaaaaaaaaaaaaaaaaaaaaaaaaaaaaaaaaaaaaaaaaaaaaaaaaaaaaaaaaaaaaaaaaaaaaaaaaaaaaaaaaaaaaaaaaaaaaaaaaaaaaaaaaaaaaaaggggggggccccttttaaagaatcaaattttacttccccgtgcttgcaacgaaatagtttttttttagggcaaccaaaattaaattaacggc

SEQ ID NO: 246065 - DNA, 135 bp, Gossypium hirsutum
gtaagagcaggcggcagtggtgggaatcagttgcattaaagagataatagcaagtcatagtaggaactattgttgtaacaaagatgatataatactctattcacccgtatcgaataaacttataggtttcttatt

SEQ ID NO: 246066 - DNA, 172 bp, Gossypium hirsutum
  unsure (1)..(172): unsure at all n locations
cccacgcgtccgcagacaacaaaaccctccctcggcattccgcccttgaggaataataatggatccataatcagtgatcccattctttctggggctccttagaattagcggaacaaattttgttcatcgcattttagttttataactaatcttttcctggctttgtgtnnna

SEQ ID NO: 246067 - DNA, 381 bp, Gossypium hirsutum
cccacgcgtccgggggctttgaaacgggtgtaaaatctcacataaaaaatcagagtggggcgccataaaacccggggtttgcaccaaacaccgccatacttcgtgaagacgccgaagactactgatgctgaaaaaggtcgtcgttgcatccatcaaccatcgctgaatgagtgtattaaccacccagcctttagctgaaataatctggtcggtcgtaactgacaaccttcgtagattatcaagttatataactatgctaccattctaatgccttggtttctagttgacgatatatcaaaaaggaaaaaaaatgtaaaagagactgtgaaattttagataaaaaaatagaaaaacggaaaaaagagagaatcatctttcatc

SEQ ID NO: 246068 - DNA, 204 bp, Gossypium hirsutum
cccaaccttccgcaaccacgacccgattcttttactctgtagcaccatctgattcaaccagcaacgactaatatatatttcattccaccgaccgcttaaaaaaaaaaaaaatacaacaaaaaagaaaacctacaactaactaaatttttaaccaaaaagatgattaacaactaaaccctcgcgatggccctaaaaactctcaaa

SEQ ID NO: 246069 - DNA, 147 bp, Gossypium hirsutum
gtcaaaattgacctgttacatataatattgaatttcttgattgttgtttgtgtttacatgtttttgtgatagaaagctactaatcgtatgttggtttcatgaactttgcaaattcagaatgtctcaatttatctcatatttactatg

SEQ ID NO: 246070 - DNA, 307 bp, Gossypium hirsutum
cccacgcgtccgcccacgcgtccgatttttttaatatagctactcaccatgctgacatcgttttggctttttccttttggattttcgaagtgacgataagaacaaaattgagtgatgattgtaaatttgagatgataaaagataacatttcgtttaaaaaaaaaaaaaaaaaaaaaaaaaaaaaaaaaaaaaaaaaaaaaaaaaaacccggaattaaaagaaaacaataaaaaatgtggagggtattaaaggggggagcgtaaaaaaatttggacggcgaaagcggagaaactttggcattggtaat

SEQ ID NO: 246071 - DNA, 253 bp, Gossypium hirsutum
gattgggcctgggcacatttgggtttatatattacccttaattctcctgactttcttggtgatggcatgcttttgccggccagcccaaatagaccttgggtctatttttcttttaagtcctcttccttttatcatttaagttatttaatcatttcttatcaaacaaaaaaggctatagaataaaaaaaaaaaaaaacggacaacaaaagcagaagatatattacataaaaaaaataaagagattaatgggggt

SEQ ID NO: 246072 - DNA, 360 bp, Gossypium hirsutum
ggcttttattttaatttattcggcttatttatttttttttaaaaaacaaaactactgcgcggccaaataaaaaaaaaaaaaatttgagacttcattggttcttagaaagagctttctgtgttgctgctgactgcttgaaaactgttttggtggcccaatgtatccaccatggccacctggaccacctgaatttcgacctccaccaccctagttatatgtctaccatattcatattccaacacaaatttctggaggcttgtctagcttctatctgggttgcaccttagctatctcaaatacatatttatctaataattgtttgcatttttagcacaatttatgtctattgaaactaatctc

SEQ ID NO: 246073 - DNA, 413 bp, Gossypium hirsutum
  unsure (1)..(413): unsure at all n locations
gtcgaagcagatgcacagataaaggacatgactttcattgcagaatacacaggggatgtggattacattaagaaccgtgaaaatgatgactgtgatagcatgatgacccttcttttagcaacaaacccatctgaaagtcttgtaatctgccctgataaatgtggaaacattgctcgctttatcaatggcattaataatcatacaccgtaagcctgtataacctatctcctttgtgttgaatactgtatctcaaaaaaaaaatcatattgctcaatttctgatatacataacctctcatcatgtagcctangctaaaactacacaaccaccaataacttacccttcatggaactctagctttacccggggtaccagtaggttttatgggaaccatacctgcttttgtcatcacc

SEQ ID NO: 246074 - DNA, 320 bp, Gossypium hirsutum
cccacgcgtccggaaatataagacttatttatctttacatatttctatcaagggttttccacctattttctccttgaattcgagtttcgagtaatcaatcattaatggaactgaatagcaaggttgatcttcaaaaaaaaaaaaaaaaaaaaaaaaaaaaaaaaaaaaaaaaaaaaaaaaaaaaaaaaaaaaaaaaaaaaaaaaaaaaaaaaaaaaaaaaaaaaaaaaaaaaaaaaaaaaaagatcaaaaaaaaaaaaaaagtggtgtacacttataataatagaaactaatgaaaatatggctaataaatttacaattt

SEQ ID NO: 246075 - DNA, 250 bp, Gossypium hirsutum
gtttgcttttctttatattcaatgtgctatattgtctctgactttgcctattgatgctgggcggtgactctagtaaccgtcaaacgagatttaagagctgacagctaaagctttaagttgcccttgtttttttgtaaaaaatgttggacaagggtgcgctagcccacggtggctattgatgctttgtcattcaagctgccaccgtgagcggcggatatattacataaataaataaagagattaatggggt

SEQ ID NO: 246076 - DNA, 300 bp, Gossypium hirsutum
cccacgcgttcgccctattggatgccaaacactcatcaacatcgatcacattgctcgaagatgggcaacactagaagtaagaaatactcccactaacataagagatcttttgatttttctcctccctctccaattgaataatttcgtcttcttcatcatccaaagaaagcaccgcaattgaatcttccattaagaatcaaaccaaaaagacaaccaggatacccaaaagaaacataaatgggataatggggtacaaaaaaaaaaaaaaaaaaaaaaaaaaaaaaaaaaaaaaaagaaagg

SEQ ID NO: 246077 - DNA, 365 bp, Gossypium hirsutum
agaaaacggagaatgtttggcagaaaaagaactacgatagtaatttccattaattgccaggtaatttccattaactcgaaaataaatcatcctagatttgcagcattggttcgttttcttgtttctttgtgtcaaaacaagaagagtgaaataaacctcaatctagttaaagcaagagcttgagttaaaaaaaaaaaaaaaaaaaaaaaaaaaaaaaaaaaaaaaaaaaaaaaaaaaagggaaaaaaataaaaaaaaaacaaaagggaaaaaaaaaaaaatgaaaagggataaaaaaaaggtgaggggggggtgaatttaatttattgggggggggttaaaaaagttgggagtgggaaaattttt

SEQ ID NO: 246078 - DNA, 379 bp, Gossypium hirsutum
ctccggaatgcctcgtcaatagctagattacgatgaggtttgaggttcgagatgatcggtttatggccggagcttgatggggtgaacttgaatagttgttgaataagtgaaaatagatgtgatgggatgagagttgagggcaataatgaaaacacagtaaattgttagtaagagaaaaatgtgtattcatttaattgttactactatatatttattgtttattataccaataataattaataaccaaatattatcatttaaaaaaaaaaaaaaaaaaaaaaaaaaaaaaaaaaaaaaaaaaaaaaaaaaaaaaaaaaaaaaaaaaaaaaaaaaaaaaaaaaaaaaaaaaaaaaaaaagggggcggccgttttaaaggat

SEQ ID NO: 246079 - DNA, 408 bp, Gossypium hirsutum
  unsure (1)..(408): unsure at all n locations
ggaagaagaggagtgaattgaaaggaaaggaagagaggggtcgtgttgcagttcacagggaagtcagaaaaataaagcaggaatcagattcccaacaaatcatggattgggcgtttggatttggacagccggaggncanacctgttcgacaccagctttccaggtctcccttggggttaaccgccccacctctctcatcacttggatttgatcccctatatatgtaatagttttggaatttggatgggaaagttctcatcataggtttaatggaagcctggctgacaggtaaaggacgncacaaccccatgaatatatcaattttaatggatttggttgcagtcaggttttgtttttcatttcttgttcaatctttgaatatgccaaagaaacaatctgatatatttt

SEQ ID NO: 246080 - DNA, 314 bp, Gossypium hirsutum
ctcgaatgaccagttcacacacaccgacaatttactcggctggaagagaagcgcgtatgggacgttgtcatgcgttaagttgggaaacaaggcgaacacataccgaggaccagggaagaggttcaaatcatggctgaagtccacatgccacggaactgtaaacagggtgacaacagcttgaagctaccgtcggcacattcaggttctggcatatatctcaactcaagtataacagacaatgacagatggaccggacagacgagcgcatagaggcgaaaaatccaattattgcatcacgtgatcttaatagcatg

SEQ ID NO: 246081 - DNA, 280 bp, Gossypium hirsutum
  unsure (1)..(280): unsure at all n locations
gcgggaccatgccacgccatatttcctctaccaagccacccacagacaaacgaccagccgagagtttacaatcctgtttcagctccaacatccacgtaacccaaaacacgcagacaacagcancaagcaacccacaacacaaccaggaccagacacaacgctcaaaacaaggacaacaacaatcacaatccaccctacacacgaacacaaccagcccccaaatccaaatattacactacctgatcttcataccatttactgcctctttactttcttatta

SEQ ID NO: 246082 - DNA, 225 bp, Gossypium hirsutum
cagaacatgactggaccgaaaagtctgattagtatgagtggatgaaaacagatatggcttgggtttatagatcaaaaacaccttgattggtgtttactgggcacaggccaatgtacagttctttaggtgctgatgatcaatttcttgaaacagtataaccccttctcttgaataacaaggtgcatctggtcctttattgacatgtacatatttatgtgagaacat

SEQ ID NO: 246083 - DNA, 426 bp, Gossypium hirsutum
aaaaagcgctgctatggctattatttcatgcttcacggcttgaaactgaaaatttaatgggcacttagattaaggtcgaatgagctaaaattggagaggcaattggagaacacagaggctgaaatttcttctttcaaaaagaaaatgtctagcctagagaaagagcgtcaggattttctatcaaccattgaagcacttaaagaaggataatttggaaaccctgttgcaagagaaggacatttaggctgatctagtttgttgcttgcagcatttgcagttaagatttgaaactgaagacaaagcaaggagacttctaagtaatgtgtcattgttgttgaaaccaaggggttattttttcggtattactcctgaaaaagtgattgccaaaaactgctgtttctggatttgtgtattttcctttttttt

SEQ ID NO: 246084 - DNA, 318 bp, Gossypium hirsutum
caaattaaattatacatttctaaaaaaatttaaaaaaaaaaaaaaaaaaaaaaaaaaagggggaaaaaaaaaaaaaagaaaaaaaaaagggcggccaatctaaaaaaaaccaaaactaacaaacacatacatacaaaaaaaaaaaaaataaaatggggccccctttttaaaaaacccaagttcacttccccacacctgcaaaactttaaattttttttcgggcccccaaattaaaatccttgccccgcattttaacaacgccagctcgggaaaaaccctggagtcccccacttaactccctttccaacaattcccctt

SEQ ID NO: 246085 - DNA, 328 bp, Gossypium hirsutum
aaaatcataaaattctttggagttgaataatgtaatttaaattaccaaaataagttcattgtgaggcaatgtaatcaacatcttaccatgtatcgaatatttgaagtatttcacacgatatctattttatgaggttgggtaaaaaaaaaaaaaaaaaaaaaaaaaaaaaaaaaaaaaaaaattaaaaaaaaaaaaaaaaaaaaaaaaaaaaaaaaaaaaaaaaaaaaaaaaaaaaaaaaaaaaaaaaaaaaaaaaaaaaaaaaaaagggggcggcctttttaaagaaccaaagtttccttccccgtgcttgcaacgtaatactttttt

SEQ ID NO: 246086 - DNA, 425 bp, Gossypium hirsutum
attccgagaaagcagatgagttgtcggaggaggacgatcgtgtatagtgctaccaccggggaagaccaaaaaaaaaaaatactcgaaatcatgctcaagtaagtctacaatgccttttctgatgctgtgaagctgccttcaactgtttgcatttgtgaagacattacccattttatcctttttcttttcttctttgaatctatccacgtggtatttagaaaaagcctttatgatgaaaaaaactgatagaataggggtagtaatattttgccccattgttgttcagttttgtggtgggtgtgtggctgactgtgttatactttaagatgatgggttagggacggtccaaattttctttaattgtaattttaaaacctcattatttatagagcatttgtaaattattataaccgttttttttgttt

SEQ ID NO: 246087 - DNA, 418 bp, Gossypium hirsutum
accaaatccgtcgccgccaccaccagcatgcccttcatgtgcttcaccttgctccagctggcgtccaccaccgtgctctggatgcccttcgccacccaaacaagtggttccttacttcatatatagctacaagaaccctccaccttctgagtcggccgctaccaacgcccactcacttttagtctccgccacacttgtaatcctttggggtactctcagcttattctctaattgaactacgcatgggggaggaaacatgcatcaagatatggttctatattcaaattgtagtttgtgtagtagactagtaataatttttttccatttctcatctgtgtatctagggtttaccaaatttgtccaagggcatcgatcaactaatctgcttagttggtgataatgtgctaaagctagaaat

SEQ ID NO: 246088 - DNA, 347 bp, Gossypium hirsutum
atggttttaaaagtgtcttaaaaagtgctttatttgtttttgaagcactttgagacacgagttgcagtgaaaaaaaaaaaaactatactttttgtctttccccatcttctgaacttttttaatcattctctctttgtttttttcctccttaatggagtttgtgttgtattgaatcatatacaatatgtattcactgaatcttgtaataataatttctgaacttgttatggtcaaaaccccaaaaagcacactatgaaggagctgaaatggaaattcagggctaaaaacggctgggggtgtggagaacaactgaacctgccacccttgcaattgtaaaatgattagag

SEQ ID NO: 246089 - DNA, 278 bp, Gossypium hirsutum
  unsure (1)..(278): unsure at all n locations
gccgctcgggcggaagctttgaagcaagctttgaaatgctggattaattactgttgttcgcaggggcgatcacaacatgcctgaatatatgcgtgtaatttggcgggtcatgtggcgggtcttgtggtggttcaatcgaatgagtaatccaaagaaggctcccaaacatgtgctcatacatatcttggtgcaaaacaacattgaaataaacatcangatatgcatgatgttgtgcatggtcctgaagannnaccntaaaaaaaaaaaaaaattttatt

SEQ ID NO: 246090 - DNA, 373 bp, Gossypium hirsutum
  unsure (1)..(373): unsure at all n locations
acggangcgtacggaaaaaaggaaaangnagaacngaaangtttaaagaaaaaaaaacgtttagaaaaagagggaaaaaaaaaaaaagggtgaatacaaacaaaaaagcgacaacaaaaaacaaaaaaaaaaaaaaatcacaaaaacgtttaactaatcatttacataataaacatcggaagcatacaatgaatgtgaaggcttgtcaaaatatatgtataatatagatattaatatgcagaaaaaatcaaaaaaaaaagtaaaaaaaagggttgtatttggaacatgataggaaaactgtgggaataataaaacaacctatgattgtactttgatataaaaaaaaaaaaaacggcattatctatactccaaa

SEQ ID NO: 246091 - DNA, 169 bp, Gossypium hirsutum
  unsure (1)..(169): unsure at all n locations
cacgccgnntccgcccacgccgtgccgcctcacgccgnntccgtatagtatcgctgagcctggcgcgctcnttagaggatctcaagcgttagcggtgacgctgtgcatgactgacgttncatagcttcttctattagtgtcacgctgaaattctaattcactcggcgct

SEQ ID NO: 246092 - DNA, 223 bp, Gossypium hirsutum
cccacgcgtccgggtgccccttccggcctctttttcgttcagggtgaacctgtaccatttgaatgaaactaaaaaaaaaagaaacaataaaatcccatcaaagtggtcgggaacttagttcacaattctctcttcatcatcgattacaataacaatgttacaacatggttcaacggatagggtataatgtttcccgtgggaaagttctacaatattttatgag

SEQ ID NO: 246093 - DNA, 386 bp, Gossypium hirsutum
cacagacacacacaaaaagaaaagttttttgatgttctaattctttcatgtctgtgttggatttctaaatattaaatatttatttaaaaaaaaaaacaaaaaaaaaaaaaaaaaaaaaaaataaaaaaaataaaaaaaaaaaaaaaaaaaaaaaaaaataaaaaaataaaaaaaaaagaaaaaaaataaaaactaaaaaaaaaatgggcggcccgttttaaagaatcaaaattatccaccccggccatccaaggtaatagttattctatattggaacaaaaatcaaaaccactggcccagattaaaacatggagaacatggaaaaaccttgcgatgcccaaacaaatttccattacaagacatccaattttgcccagttgatataa

SEQ ID NO: 246094 - DNA, 319 bp, Gossypium hirsutum
tctttgaacccaacttgagacgcctcccttcagattcatgcatgcattaaaacccatggggctgggtaatattattgcatctagtcctgcaaaagcctgcgtctcaaacggtgatgcaacgtcaaagtgaagtaccgatttagaagccaagatttctccatccatcgcacgtacaatcaaacctgaaacctatctgaaaagctcttggtagatggctggacacattctttggtcatcatgtttgagatctctatcaaaatcaaagctaagtattttctcatctaaacctttcaactccgaaacgtaactaattatgtga

SEQ ID NO: 246095 - DNA, 359 bp, Gossypium hirsutum
  unsure (1)..(359): unsure at all n locations
gctgtacgtgttatacatgtcgaaatcattcccgagcctacattaatcatctactcagtgtccatgtaatgttggcacaaattttgttggaaatacataacacccaccattttctagggtttttccggttgataagggatgccatcaatgcaggccgatttgaataatttcgtagggaatttgttcaatgatggcgctgaatttcttagatgatactctggtgataaattaagaagngattcctgggatcatttgaaaactccatttttttacttgtttcagaagaattaccacatttatatttttaatctccaaaggattatttgttacacggccagttgacccataattttcaagct

SEQ ID NO: 246096 - DNA, 300 bp, Gossypium hirsutum
catgtacagagcatgaatcacaacttcatgtacgctcccacaataatcatcgacgccgtgttcatttcatcttagcacataatatgaaccaaatacataacacccaccattttctagggtttttccggctgatattggatgccatcaatgcaagcctatttaaataatgtcccagggaatattatcaaaaattgcactaaatttattagattattctttggtgtaaaaaaaaaaagttatttttttgatcatttaaaaatcccattatattttttgattcataaaatctttctttttttt

SEQ ID NO: 246097 - DNA, 386 bp, Gossypium hirsutum
gtcagctaagagtgagatgctctgttgatttgcctgttaaattggataaagggtggctgattgaaactcttgctgtttccatccatacagctcatcaaccatggctactacattagaaatcaagtatctctgggctttaatggcgtttcttttgatggaaggtatgttgccttttgctgatatgatatctggttcatttcacacacaacgcatttgcagaaacaactaaacaagcaaagatacaagaaaatgtaagattttgatgtttgacatgatataatacttgttataagttgtaacttggaagagctcaaacgttacattactggttcgataaaatgattattatcgtacaagttcaaaattacgaagtaatgttctgattt

SEQ ID NO: 246098 - DNA, 406 bp, Gossypium hirsutum
gctcgtaccggctcggaatcgatttcttttgacattggtggttcttctcggctacgtgctcgtctctcatgggctcggcggtgtatttggagcagtaatcatggatgccaaacaggcttcaaccattgttactgtcacaatgctagcatttgttctaacaggaggatactacgtgcataaggtgccagcatgcatggcatggatcaagtacgtctctactacatattacagctacaagctgtttgttaacgtccaatacagccaaggcaacaaaatttcctcgttgttgggttgcctgcaccatggaagtaatagagttagctgcaagtttattgatcaagacatcgcaaggcaaattagcccgaaactgagtgtgggaatcttgcttctaatgtttgtaggatat

SEQ ID NO: 246099 - DNA, 274 bp, Gossypium hirsutum
cgacccatgcgtccggttgctttcgttaatctttgtaatggccgtagatggtgttgcctggctgtgaaaacatgtgtatctgttccatcactagacttgtgtgaactttttattccagagtatagtcatttcattggctgtcaactttcaatttcaaaaaaaaaaaaaaaaaaaaaaaaaaaaaaaaaaaaaaaaaaggcaagaaaaaaagaagtacaaaaaatacccctcttgccagctggcgaaaaaaataatagtgtagggtacaataaat

SEQ ID NO: 246100 - DNA, 385 bp, Gossypium hirsutum
tcgacccacgcgttcgtatagagggaacaaagaaaactaggaatatgggtaggaacacacactcagtttacaagggattgatatgctatgaattgcttagacctttgttcatgattaaagcaatctatggtcttttctgctctgctttataacttcttatacattgtgatagatcatattctcttcgacgatgcactcgaatcaattgaaaatggagctatgaagtccgaaagaagctcgaaatggttagattggtggccgataaaaaaaaacctctcatgctaactcgtgtttgctatatattatctatattagaaattaccaaagaagtataaaataggcctcaccatatatctatatgatttggaaaacatgtgttttattt

SEQ ID NO: 246101 - DNA, 424 bp, Gossypium hirsutum
atgacatatgggtaattggttgattttgaatttttggcgtgaccattggatcagtaaatacagggcacaactcaatcattacaatcaatcaaaggtaatcccaaatcatcacacaccattatattaatggtgaatcctaatggtgattggaattaggaaaacactatctctttattgccatcgtcgattataaacaaaattgtgagtaagcatccaccatgtggttgggatatggatgactttcccgaatgggtatggaataaagggcatagtttctctatgcaatttccttacgaggctttgactggtaatactgctagtggtgtagataaaatatggtagcacttatggaagtaccaagggtcacggcgtgttaaaacctttttgtgtcttggtgcatgtaatagtctccttacatgttaaa

SEQ ID NO: 246102 - DNA, 307 bp, Gossypium hirsutum
attgatgctaaaggattagtttccgggtcatcaaagcttcaagaattcttaaagtttgcggcgtcttccgattttgtgttgacagataaggtgtcgagtctctgcagtagagtcgaagcacttacaacccaatttcccattcctggtgtgtgaacaacaccgattcactaagtaatttttgagttattagaggctgagaagaaacgtcagaacaaggtgaaatctccaacacagattccagggtttatatttgaataattgaatgtattcacagatttatgaaaattttcaactgatattgagatct

SEQ ID NO: 246103 - DNA, 223 bp, Gossypium hirsutum
  unsure (1)..(223): unsure at all n locations
gctaaatggtggtggattctcatacgaacgttatatgctgtatcgtttgtctatcatgttggtacatattttccttattatgcggctgtttggcattgaggaaatgtgatctttttttaaaggtaaaagttnaaaaaaaaaaaaaaaaaaaaaaaaaaaaaaaaaaaaaaaaaaaaaaaaaaaaaaaataaaaataaaaaaaaataaaaaaaataactacaat

SEQ ID NO: 246104 - DNA, 408 bp, Gossypium hirsutum
  unsure (1)..(408): unsure at all n locations
cgtgtttgcagaaaagggctgacgttaagcttcaagaattgccggctgtgctcggcgcttgctgtgttttgcataatatttgtgagcttcgaaatgaagaaatggaacccgagcttaaaattgaaatttccgatgatgaagtcgtgccggagaataatttgagatccatggttgccgttcaagctagggattatattgctcataatttgcttcaccatggccttgccggtaccggttttctatagtgatttcattatattatccttagttaaaaaattttgtattttttttagtgtatagtccaataataataggtagataggcagattttgattgcattttttgggggtatggaataaaaaattctatttgactttttagttaaaaaaaaaanannnaannnnnaat

SEQ ID NO: 246105 - DNA, 371 bp, Gossypium hirsutum
tccacgcgtgcgatggccggctgcagtacttttaaaagtcgaaatgactttgatcaagtttgataaatgtaaagtgaggcctaaaaaaccaaaaaaaaagagatttttttaaacaaatttaaaatttaatttaagaaaaaggaatgaatgaaaaaaattaaataaaatataaaattttataaatttaaatgaaacgaaatactaaaatgaaaataaaattttttaaatgaattttttttaaaatcgaaatgagatttttttagacaaattttaaatgagattttataaattgaaatgagatattttttatcaaatttaaaatttaaattcgagattgatgaagctggatctcgtgttcgccttcgtcatgc

SEQ ID NO: 246106 - DNA, 390 bp, Gossypium hirsutum
  unsure (1)..(390): unsure at all n locations
tcgcccacgcgtccgatggccggctgcagcacttttaaaagtcgaaatgactttgatcaagtttgataaatgtagtgtcaggcctaaaaaaccaaaaaaaaagagatttttttaaacaaatttaaaatttaatttaagaaaaaggaataaatgaaaaaaattaaataaaatataaaattttataaatttaaatgaaaagaaatactaaaatgaaaataaaattttttaaatgaattttttttaaaatcgaaatgagatttttttagacaaattttaaatgagattttttaaattgaaatgagattttttttatcaaatttaaaatttaaattggggcatngacaattattactgttactggtacaacaaaccaacctttgtaatatgggg

SEQ ID NO: 246107 - DNA, 286 bp, Gossypium hirsutum
  unsure (1)..(286): unsure at all n locations
cccacgcgtccgcgtcagtatcatctgtattttaatgaattttgtttctttgggtattgcattcttatctaccgtagcttgcattggaatgtattgaagccccaattgttgttccggcatgtaactgcactgtgccaaggttgtaggaagcctcatccttggggggatggcatgaggttttttcttgttgattcatgtacatcaaaatccgcatcagctagtccttgcaactcagtctgatggcttataaactaaaggtctgttttaggccagaccgagttnttgg

SEQ ID NO: 246108 - DNA, 382 bp, Gossypium hirsutum
gtttccgttgatggaattgagctttaacctatgataaaaagctggaccggaacctttaggtgcataataatattgaatgccagtggttataaaaaaaaaaaaaaaaaaaaaaaaaaaaaaaaaaaaaaaaaaaaaaaaaaaaaaaaaaaaaaaaaaaaaaaaaaaaaaaaaaaaaaaaaaaaaaaaaaaaaaaaaaaaaaaaaaaaaaaaaaaaaggggggggcctttttaaaagatcaaagttaactaacccgggcatgcaaagggtatagctttttaaaagtggcaccaaaataaaattaacgggccggcgtttaaaaaagtggaaaagggaaaaaccctggggttaccaaaataaatcgctttggaaaaaaaacccttt

SEQ ID NO: 246109 - DNA, 402 bp, Gossypium hirsutum
gtccgacgacaatgacaacaacgaagtggagtacaatttttttcaaggcttagaagatgcattagcaaacactgcctggggggaagttccagactacctcaaatctattgggatccgaatagaagatgctcgtggaaaagctacggagttttttcatactggaatacaaattctggtctgtgctgtaattaaagagatggaagatatgtcacttgaggatttggattggggtacattgaaaaagtgggtagctgcgctgaattacgctaatgaacatggttttcaagtaggatttgctgataatctgttgcagaggaatgtggttgcctactttcagaaaaaggagctctcatagtttatatttaatcctgtatctaacattctgctatgttttaatgtctc

SEQ ID NO: 246110 - DNA, 287 bp, Gossypium hirsutum
ttccaagggaaggatacatggattctaatgtacgatgacgattatttctgccttcggtttaaatggtcaagaccttcaaagctaatcccccggagtacggcaacaatcgaatggataatcccatcatctctctcaccgatagtctacagaatcaaacatttcggtgcttctaaatggcttatcggatcaattcagcattatactggttcatcaagggctttttttgtggcgtgagaaaattataagataaagccatgtattcatgatatggcacaacatacccaaag

SEQ ID NO: 246111 - DNA, 365 bp, Gossypium hirsutum
  unsure (1)..(365): unsure at all n locations
tatgtttaaaaactaaaatccccttttcttaatactcattttttcagtcttaaaaaanggggggaaaaaaaaaaaaanagggggaaaaaaaaaaaaaaaaaaaaaaaaaaaaaaaaaaaaaaaaaaaaaaaaaaaaaaaaaaaaaaaaaaaaaaaaaaaaaaaaaaaaaaaaaagggggggggggttttaaaggataaaagtttacgtacgggggcttggaaagtaaaaatttttttataggggaaccaaaataaaattaaggggcgggggtttaaaaacgtggggatgggaaaaaccttggggtaaccaaattaaatggctttgaaaaaaatccccttttgggaaggtggggtaaaaggaaaaa

SEQ ID NO: 246112 - DNA, 294 bp, Gossypium hirsutum
  unsure (1)..(294): unsure at all n locations
cgcgnccggngggcggntcgctgcccgttacgtctcttgaagtccactttaccacacctttataggacgtggtgcacaaagnaagaagccccaaagcnaacacaagggtaccaccattttaaactagatgttcagtcacctatgattccaaataaacattatgtttttatataaggtcaaaaaaaaaaaggacaaaagaaggaaccaaactagacaagcgaagcgaggaaggaaaaaacaacggatcccaaagcctcgactccggaggacagcaagaccaccaagaacgaaaaa

SEQ ID NO: 246113 - DNA, 256 bp, Gossypium hirsutum
  unsure (1)..(256): unsure at all n locations
cggaaatnccggggcggcccaaggcgtccgcccacgcgtccgggacgtggacgtggtcgaggccgttgaatatgttgctttgtttccaaatggttgtgacagctggctgtgtaggcagctttgttatagtgagaatttgtgggcgatgctacgaattttaaaggaattgtattggtgttttactgttccgtgtgattattagcctgggttgaatagcttaatcaagaatcctgaggttcaccgctctttaattttt

SEQ ID NO: 246114 - DNA, 189 bp, Gossypium hirsutum
cagtaattagagctttttatgagtcgagttggatcgacccgaattagagaaaattacattcaaatagagttgttcatgagtcgagttggattaacttaaattagagaaaattacattaaaaaacttaaactcgactcttgaacaagtttaattgtaatcgttttcaacaagattgctttggtcgttttc

SEQ ID NO: 246115 - DNA, 247 bp, Gossypium hirsutum
  unsure (1)..(247): unsure at all n locations
tgcgtttattttccttttcacaggttttattgacgtggaggcgtatggagaagaagcgggtctttgagaggccgttcgtggaaacccncttctggctagctgcggcgctggtgttccagaaacctttaaggtttctggtgccttcccgatattgggctcactttggccatttatgaattgggttaggttaaagggtttgggtgaaatgggactttgaagtatggtcttgtttgggtgtttcgttttt

SEQ ID NO: 246116 - DNA, 343 bp, Gossypium hirsutum
tttaaggagtttgtcgttggggagaagattaaaagagaagaaagatcggaatcacccaaagccaatgaagccgttaagaaatgttcgggcgaataccaatacctaagccagtaattcaatccgtctactctcgatgtgcttatcatattttgtgatacttcgatcccgtttttgttgtctgaggtagaaacagtgacatccatggcacaatttgtgagcttgtgtaatgtttcctaatttggtggttaagatacacatcctatatttgtattttttacgatacagtctttactcttccaaaatgtatctttccttcatagtccatcagctatttatggttcat

SEQ ID NO: 246117 - DNA, 407 bp, Gossypium hirsutum
aagaacaaaggtggcaatggcggtgccgaatatggtggacatggtggtggtggtggtggtaagattgaaaggagcaagatggaatttatggttcaaccccaatttggatacatgcccgcttactcgggatatgagcacccgggctattggttccgttaccggcaccgctacttcgggtacctgccgggttacccaatatctggtcattcttctcaacacatgttcaatgaccagaaccctaattcttgggccattatttgaagaggaattgatttttaataacctaaaagtttatttttagggattgggtaattaaaaaccaaaaaacccggaggttactttggaagtcaaaattttgggttaaacttggatggcattttattaaatgttaattttagggttttgat

SEQ ID NO: 246118 - DNA, 382 bp, Gossypium hirsutum
cgatggagatgaagcttttaaccctccttatcctcttctccttctctgcatataccgcggccccattagtagctttagcttcatctccttccgagagtcagtcccccagctcttctgaagaccagccaccccaaacagtttctaaaataccttccaacgccaaccctaagcttaaaaaaatctgtcaagaagttaatcaccccaccgaatgtattacaacagctggtccattcctaggtgaaaatgctgatataactcccgtgactgttcttcaagctgagattgaagcaattgatagcaaggctaaggaagccttcgcaaaggctacaaagctcgcagcggatccctctacctcaaaaacccgcagtgttcccctaaatgt

SEQ ID NO: 246119 - DNA, 356 bp, Gossypium hirsutum
gccacgcgtcggttggactcggaagttgcaactatgaagaaatcgaagcagagagatctttattgagaaagatgttaaagaaagaatggagaagacaattgagacggttagagcgaatttaattccataggcagggagggcaaacccatcaatgcttgacaaagttgaggtggaatattatggaactccggtcagcttaaaggtttgctcaaatagactcctgagtcaagttctctattgattagccctttgacaaatcacttaaagctatgagaagctatgtaactctgatctggtatgactcaaacaatgaggtgaagtcattcgcttgtctctcctcaactgacaactgaaag

SEQ ID NO: 246120 - DNA, 399 bp, Gossypium hirsutum
ccggtggaattgggattaatttctttcacatgattggcgtttttaaagagcataggattgttcgattggtgaggaaattgaatgcgaagagaaatgatgatttttcaaggtttcgggaacttgagattctatttcttgggattaaaacgatagaatatattggctgatgtctaaaacaaaagtttgacaaggctaatgtacttctataattcatttggctttgtctgcctgatgggaaaataagtgaaagcaaggcgaaagctttggattttggcgtcataatccatttggctttgtttggttgattgggaaacaagagacaccgaagcaaaatctttggattttggctttatgtcattcggctttgtttagttgatgggggaaacaagaaaaaagcag

SEQ ID NO: 246121 - DNA, 169 bp, Gossypium hirsutum
ccgacactcaacaccaattcaagagtgaactaaattgaaggtaccggacgacgaaatacaacgatttgcctaggataaaccttgccttaataagctaaattgtagcgtagaaaacctattttaagcttggatgccaactaacaaaatagcgcttaccaagggttctttg

SEQ ID NO: 246122 - DNA, 235 bp, Gossypium hirsutum
accgttcgatcccggtcgacccacctccaagattttggaaggcttttataagaatgataatgtaagagaggtcggaaaaaaaggagaccctttaaaaagacatgtaaaaacaaacaaaaaaaaaaaaaaaaaaaaaaaaaaaaaactaaaaaaaaaataacaaaaaaaaaaacaaaaaaaaacaatttatttttaacgatagaaaaaaaactataatccctacggttcgcttttt

SEQ ID NO: 246123 - DNA, 279 bp, Gossypium hirsutum
cggacgcgtgggcaattttcaatgataatatatattggagcctattttggggtgagggtgaactaccacacattgcatgaaagaatggatggttttagggcagccttcaaagccatgttacatcagtaggtagagcaatgttgctcagttgtttttagttaagtgtctgatataatttgtgtctgatagaacatgaccattaacggtgcttttcccacaaacgtcactaaagaacatggcctttaaaaaacttattttaattaaataatatttatttct

SEQ ID NO: 246124 - DNA, 133 bp, Gossypium hirsutum
  unsure (1)..(133): unsure at all n locations
cgcgtccgtctgttagaacttttaagagcggctgncatattttgcctatttcccagatcggggggctagtttgaaacgatgtctaccgctgntaaagctgcttgttcttacgctgctttgattctctatgatg

SEQ ID NO: 246125 - DNA, 283 bp, Gossypium hirsutum
accggggcggcccaagccttccgaattttttaagaatggattattgtaggctttatgaaggcctattttggatatacttgatgtgagcaatttcaggactctgactgaaattgggaagaaaaagaacaaggctatgatgtctggactctgctcgcaaaattgtatgaattatgaactgaataatataatcatgcatgcaattgagaagttgtaaactgactagatgaaggcaaagctggtcttattgccgtgtcaaagaatggggaagtggcttaaggggcgg

SEQ ID NO: 246126 - DNA, 434 bp, Gossypium hirsutum
  unsure (1)..(434): unsure at all n locations
ccgggacggaaccgggncgacgccacgccgtccgcccacgcccgtccgtggtttccaacctctgcttgcggtccccnncgcccccgcacccggtggcagcgccttgcaggttctacctggagatgnctagctccctnccttctcaggcgcagcgctcctagtnncctagcagtgnngtgccgcacttgagggtctcggcttattggccgcagggagcacgcccgccgttgcttagnnttattttatgttctaaataccgatttatctcaaggggtgtctagcacgtggcttttctagggtttggatatcatcacgaaaagctgccttattaaattattttggtaatttgctaaatttgttttatgaataaaagaattggaaccggatggattgcatctttnaaaaaaaaaaannnnnnnnnaaannnnnnnnaa

SEQ ID NO: 246127 - DNA, 261 bp, Gossypium hirsutum
cggtcgaccacgcgtccgcccacgcgtccgattcgtacgcggcggttttaattaaaagagaggtgaggagaggaggatgttggaaaaccctacacccacctcagctgatgccttttctgccatcaaacgctatgcttctcccaatcaacgaaatcgttctctcggacgccgtaaatctagagatcggtttgattggactaacaatgtttatgggaatgattctcagaagaatctatgtgccacatttagatacatttattc

SEQ ID NO: 246128 - DNA, 243 bp, Gossypium hirsutum
  unsure (1)..(243): unsure at all n locations
atcatcactgcaatactaggggcaatnattttagcagaaaaaatccaccttgaaagcagccttttttctattatcataggcacacgcctctacacagtggtgtcggataaaaccatatattggctattcgcatttaacaattccattaacgaacccatcatgcacatttttagctttagtattgagtcaccaatattcaaattactgtccgtcgtttaaaaacataccaacttgggaaaaccc

SEQ ID NO: 246129 - DNA, 108 bp, Gossypium hirsutum
ttccggaaggtggggaaatttgacctttggcttttatttgtggatttctggcagtaaaaactggtgcatgacactgcgttttataaacttctagttcttttgcttttg

SEQ ID NO: 246130 - DNA, 301 bp, Gossypium hirsutum
ttttcaagctggatctatattatccatgtggaaaatcttttgagagttgttgggaattggggactttctttttgcataggaagtccaatgcaagactgaagttttaaggtgttgaagaagaagaggatgcattttgcctaggttaggtattgtgaataaaaatgaaagaaaaaaaaaagaatctgattgtcatttgtgtaaatcatgtcagaaggagaagatggtagggcaggctttgagagaactggttttaatacaaaattatttagtacaaaaagaatcatgagaatattcgagtggc

SEQ ID NO: 246131 - DNA, 268 bp, Gossypium hirsutum
  unsure (1)..(268): unsure at all n locations
gttgggagaaggttgtgatttttgccatttcctttggttggttgccctgattttgtgcaggtagatcatctgatgcatttagcattagctgctgccctttgtaatggttgattgccattctttttcaagcctattattatggcttattattatatctaaagattctcttcatatttgcgcttaaaaaaaaaaaataaaaaaaataaaaaaaaagcccaaataatccctannaaaaataaaaataaaaaaaataataaaaaataatttg

SEQ ID NO: 246132 - DNA, 230 bp, Gossypium hirsutum
aaggccatcactgtgcctgaattttggagtgaggaccattaagcagatgggagagcctggaagaagagtaaattgccttatgacaacaagatatttattaatgcttctttaccctgcaagtcatgaacaagttacctcttctcagttctcagagcagaagcgtgtaagatttgcttatcctataacattatatgtccaaatatgcagattatagaattgaataattctgg

SEQ ID NO: 246133 - DNA, 324 bp, Gossypium hirsutum
  unsure (1)..(324): unsure at all n locations
gctgcgcaaaattgcacgcgctcggatttgtaccagggctgaaaaataggcttaaaaccagcggggtcgcgatcgatatgtatccttatttccaggtttatacatactaaccctatctaaaatgggctattacactgtgatcgaccattatattaaaaaaaaaaccacattttttttccccacagaacagaaaagaaccgaaccgaattgatcctgnnaaaataattttaacttttaatgaagaanattgggaaaaaaactgaaattgaaaagggtggaaaaggggggtggcataacgtttggtaactccttccatccgctttc

SEQ ID NO: 246134 - DNA, 385 bp, Gossypium hirsutum
  unsure (1)..(385): unsure at all n locations
gtccttgggtatgcattttgttttctcacatcattttgtggttttacttatggagtgccccgagcacgtgtagttggttatctgtactcaatgttactagtctattgaattcccaggattaccatagaacaatatataagcatactatagattgaagagaggtttatcaattgtataacctatattcttttgtgtaataagcttttagacttttgttggaaaaaaaaaaaaaaaaaaaaaaaaaaaaaaaaaaaaaaaaaaaaaaaaaaaaaaaaaaaaaaanaaaaaaaaaaaaaanaaaaanaaaaaaaaaaaaannaaggggcggccggtttaaagagaccaaatttacttacccggtcttgcaaagaaataattttttttt

SEQ ID NO: 246135 - DNA, 229 bp, Gossypium hirsutum
gcgatcgggaaacggttttggttcgtcgcatgctccaggacgggttacttgatgttgtttgtttgaagcattagagagatgctgttggtttatggaatgccataggttttgtaaaactttgaggagtgtggaagtgttaaagttattcaaaattaacaagctcactataaagcagcaaatttatattagattcccataatatacttgctgcataaatgcctttgatttc

SEQ ID NO: 246136 - DNA, 366 bp, Gossypium hirsutum
  unsure (1)..(366): unsure at all n locations
cgtttttctattccttcctatataacatttaagtgtaagattgggtttggtctgtttggtatctgtcaattgccgggttttttcggactcgtaatgtcatgttttttcggatgtagtcgtaaaattgaccgacggattgggttgtgactgagggattgggtcgtgtcagtgagtatagttcggtttgtatcatttttttcgttttcttcgacgaggttcgtaaatgtgtatgaatattttcgcttagaatgattggaactaatcgaagcgtttgtagcatgatgtttgttgatgatgtcttatcttcgnnncnnnagangagactgcgttggaccatcaaacgaatctacataattatgaccctat

SEQ ID NO: 246137 - DNA, 397 bp, Gossypium hirsutum
gtctgtacctaactaaggaacgtgacttcatatataaccattcaaagctgaattgtggccgtgcactggtctaaccatgctgaagatcaaaaatgttaatggtccaggacaaggggtttatgaatgtcgaaatacaataatgactattgaaatcttcatttgcttcatcagagtaagcgtaccttttaagaccagaacaaccgattagcgtgcacgtgctcaaggatatatagacatctcacagtgcgctcgacggtgtaggtatgtgctaaagacacttgaataatgaactatgtcataaaaaggcgacgcaggaagtgaaaactcaatgctcaacgcgatagatcttaccgtatcgaatattgagattgcgcccaatgaacacatatgacacatg

SEQ ID NO: 246138 - DNA, 423 bp, Gossypium hirsutum
cccacgcgtccgctttctttctcatttggttaaccctaaatcccttacttcaaccaccaatttaccttcacaaacaacaacctgtgcattcaagtttgaaaggataggttttcagccttgagatcccctttcggtttcgatttcaacgaagcaaaaggaatctattggcatattcgcaaggtaagagttctctttctcttttttcctttgtttacaaacgcaatgatgaaagatcaaaggaaataaatcgcaagaaaatgaaaaaacttaaagaaaattaaaacagaaatcacctttaaaatctttgttggttttctttgtattcaatttgcattcgtaatcccatttacagtatattaatcggccttttatagccgaaccaagagaaaagggaaaagggaaaaaaataataaaaatgtaaat

SEQ ID NO: 246139 - DNA, 146 bp, Gossypium hirsutum
cttaatgaactgcaattaataagactgggtggagacacaagccttcgagagtgatttaggtaaaactatatatttggattgtaactttttgttgaatgtttgcagtagtaatagatttaaggtaattagcattgcacctttttttt

SEQ ID NO: 246140 - DNA, 128 bp, Gossypium hirsutum
gctttgtattcatacctggctcgtgtgttttcaaggatgtatttcacggcgtcatgcaaatttacatgaaatgcatgactgattcaagtccaatcagaacaaggaaaatggcactatgatcttaattc

SEQ ID NO: 246141 - DNA, 149 bp, Gossypium hirsutum
ggcttatgctttaagccttaaactaagttgaagaccgtgcttgttttgttgccatcagggtgagaacctgaattgagcaactctcatatgttctattcatgacaataccaatcccatagcattcaatggatataatgctttcctggcct

SEQ ID NO: 246142 - DNA, 276 bp, Gossypium hirsutum
  unsure (1)..(276): unsure at all n locations
nccaatacacaaaacttttgaatgttttctatatttccaatgctttacaatgaaagctacgggattattttattggtggatcattcacaaatgcaaatttatgtaaaatatttaagactttcataacatcaatagtgtatccacttaaaaccatatatttaacatcactttttttattgttcaacactgctagtttaataaatgttatggccacactcaagaataaagagattaattttccttttattcatactttgttttttgaataaactttat

SEQ ID NO: 246143 - DNA, 393 bp, Gossypium hirsutum
gatccctgacacaaaaggctgatctcaatctcggtgtttgggcgaaaaccaatgttgggtgcaattcattcaacatgcatcaaacactgaaaaccaattgctatccgctagcatcggaaggccttcgaaatatgtatttcccttacagtgaatttctcaaaaccgtccaagagccgacaatgagctcttatgcatgtccacttccaagaggtaatgtcccgtttaatgcttcctcaattaggacaggggtaggggttatcgtggatgggttcagaaagccgaatcaactgaatgagcataagccattggagaatattccaagtcctgcttcggaaaacaattcgaggaaccaacaagatgactccttcaaaagaaatgttgctggatgtaaac

SEQ ID NO: 246144 - DNA, 191 bp, Gossypium hirsutum
  unsure (1)..(191): unsure at all n locations
cccacgcgtccggggtccagctaaggtagctaggtaagataccagattctgattaaaggctgaaaaacatacgccaattgtatctacatagctaagtggaaatttcaccatataatgtacttgtgatagttcacttcagctaaatatagggagagagagtttacanttnaaaaacaaatataaacagataa

SEQ ID NO: 246145 - DNA, 355 bp, Gossypium hirsutum
ggtatgttgatatttgttttattgtttatctcccaatggttttttgcttcgtattcttattgatgaatactgccttgcttcttttatcatgttcttttggggtttgtaagattagaagatttgaatccattgctctcgttttagctgacgttcaatgagacgagaaagatatggattgggcttggcacccaaactgatccctttggttggactggggcctatggcgcggttttcgtcgtcagtgcgtttgcactaagccttgttaaaccactaagctttgttagatcaataatctgttatatttcattgtcacgaaaatttcccctttttttttgcttatcatgcattttgtgct

SEQ ID NO: 246146 - DNA, 434 bp, Gossypium hirsutum
cccacgcgtccgaaaaagcataattgagtattattatatatttaatttgattttaaataaatcattgcaatatatgtaaaagcaatttaaaatataaatttattaatatatgtaaaaacaatttttctagaaaatatttttaggaaatctgtcaaacaacagaaaatattttacacagattcatccaaacactagaaaagcaaatcattctcagaaaagtaaatcatttttcagaaattattttctagagaatattttactggcaaacaaacggaggtttgaatccaaccgcatatataaaagagataatatttcgatgcataggtctcatgcactatcaattaatactaagatgaaacatcttaatttgtgaaaaacaaaaaaaaatattaaaggatttaaaaataaatgtaaatacctttattttaaaatat

SEQ ID NO: 246147 - DNA, 416 bp, Gossypium hirsutum
cccacgcgtccgatctaaatgaagaaggtttaatgtaaaataatagcctgttaggaattggagtccacagacctttcaacatgagataaatttttcctgaagaaatggagaaataaggcgattcctttattagtagaaatttaggctggatggtatatacaaacgttatgctgccaatgcttatatgtgactattagttttcgcttcgtctttttaaaagtaaaatcatttttcagaaattattttcttgagaatattttactggcaaacaaacggagggttgaatccaaccgcatatataaaatgaaataatattttcggtgcataggtcttatgcactattaattaatacttagatgaaacatcttaatttgtgaaaaacaaaaaacaatattaaaggatttaaaaataaatgt

SEQ ID NO: 246148 - DNA, 321 bp, Gossypium hirsutum
  unsure (1)..(321): unsure at all n locations
cccacgcgtccgcacacccatgcaaagtttctatattttgggcgattcgaaaacagcgggtgaatacaacattgaatctgttgtctaggttctgctagtgaattcaatcagaaaaatgtttagtgcaagatttaaaaaaaaaacatgtaatattacataaggtggcctcttcttttctgtcaagtgttgattatagatatgaattcttatgaattgccttattaattttctttcatcagttctttccttttaactgtttatctgaacttgggttataataaaaaacctggttatatttcttcgnnnnnaaaannnnnnngg

SEQ ID NO: 246149 - DNA, 429 bp, Gossypium hirsutum
cccacacattcgattaattgaaaatttattttatattttattactaaaaaaatcaaagatgtggaattcaaaaaatgggcactccacccaaaaaattacaattttttacatttgttgacatcctacttttttaaaaattattttttcgaatttgcaacatccctcttcaattttcaattccttaatatacttcgcttgactatcaaaaattttttcttaaattgatcattttttgagaatcattaacttaataatttttttacttcctatatatgaaagtgttaattccctctccttttttaacaaataattttttctttcctttgtatccttccccttttatttaaacattaatggtaccattttaatttcttaaaaaaaaaaaaaatttttatgttttaaaaaaaaattaatacccttttttaaaat

SEQ ID NO: 246150 - DNA, 386 bp, Gossypium hirsutum
gctcctgctgttaaggtgttccatgcgctaaccggcattgggggcaaatgggaacttcgtggtctttggtggcccgttttttggatttcaccttaaagaaaagatctttaaaaaacaaaggataaaacttacctatcagttgaagaaatcaactggcctggagggttctaccgccaagatattgtatggagagcattttctcaaaagcaattttctagaaatgcttatgtcaacatcaaaatcctgcgcactacttttgactgaacatcttacagcaattggctcttacacccattgagaaatgaaattacctctatgaaagacttgaagaatatgtgactcttaaatatactacatttcctgaaaatacattgccctgtttctgt

SEQ ID NO: 246151 - DNA, 260 bp, Gossypium hirsutum
acgaccacgcgttcggaactggtaatggacttgtgaattatccttccttctttgatcctccatgtatgaactattaatggagttccccaatttttgttctcaaaaaaaaaaaaaaaaaaaaaaaaaaaaaaaaaaaaaaaaaaaaaaaaaaaaaaaaaaaaaaaaaaaaaaaatatatacgccaaaaaaaaaaatagataaaggttttagaagataattatggcggggggggggcacgttaaaaagggtaaatggatttt

SEQ ID NO: 246152 - DNA, 297 bp, Gossypium hirsutum
cccacgcgtccgaaaaaaaaaaaaagaatttttaattaaaaaaaaaaaatgaatgaaccttgcgaaggaaagataactatttaataaaaaataaaacaatacaaaaaacataaaaaaaaaaggggagtccgttttatagggtccaaaatcattcctaactccatgaccatccttaattttttttttgggatacctatattaaatggaactggccgaacgtttactaaaatttggaacggtaaaaacctgggggtgcccaattacattgagttgtaacaaatgcacctttactacatt

SEQ ID NO: 246153 - DNA, 289 bp, Gossypium hirsutum
atgggaattgattatttgataataataataaacaatatatttgacttaaaaaaaaaggggggggaaaaaaaaaaaaaaaaaaaaaaaaaaaaaaaaaaaaagggcagacaaagggaaggaaggaaaagtaaaaaaaacgaaaatgggggggggcggctctaatgatagccggacctaaattgacaggagagggccggcgatatacaacgtggggacggggaaaaaaggggcggacggaaatttatcgactgggaggacagggaaaacccgggggttgccaaaataaagg

SEQ ID NO: 246154 - DNA, 391 bp, Gossypium hirsutum
cccacgcgtccgcccacgcgtccggcaaaacgcgttgagcgagcattgagcaaaattgcgggcgcagatcgagagatcaataagaagtgcaagagtaacaacgatataaaaggttcatcgagttgggttccacatccaaagagtgggatatatttccccaaaggccatgaatgggtgatggatgacgttccggaccgggcggcttctttcagttcaagttactgggttcgaagcgtcgacggtgttgataaaccggagtcttcggttcatgatgaacactattcccatgcaaatatgtgatgatcaaacaaaattagtcatggagacaggggaaggggtttttatgaaatttgaataaaatattttggaattagaagctgcaactatcaat

SEQ ID NO: 246155 - DNA, 426 bp, Gossypium hirsutum
aaaaaatattaataaatgagatcgtaactttattttgaggagaaaaaaaaaggaatataaagctgttgaaaataaacaaaggatgaaaccttacacagcggaactacgggtagagatccttaggcaaattagaaggtagcgactgaatagagacaaaaagaggaaagtcgcaggcaacccttctcagccacctcaggacactgcgcaactgaagtgtgggttggacaagcgaacactatcttgccgacattgttccattatttcaaatctattcctttgtgaattacaatgatgaaaacgatgtttgagtttaattttatttgccaaactatgagttaaatcctataggttgggattacttcgatgaaactttaattgtctttaatggctgcagtataaatttgaattatatttactgtttcattc

SEQ ID NO: 246156 - DNA, 163 bp, Gossypium hirsutum
ggagcagtgataccatctcagttgtaccgcatatatatcattataatctcaaatgtagtaaaataaattaacagtacaatgacaacagctatgattccatatcagttgttgcctatcatgtctcagttttccaatagaattgaatgaagatccaccttccatg

SEQ ID NO: 246157 - DNA, 294 bp, Gossypium hirsutum
  unsure (1)..(294): unsure at all n locations
naaaaaaaaaaaaaaaaaaaaaaaaaaaaattaaaaaaaaaagggcggaaaataaaaagagaggggaaaattaaaaacgcatgcatgcaaaaaaaaaaaatggggtgtcgggtttaataaatccaatttactgtgcccgtgctttacaacgggtggtttttttataccgtgactttacttaatttaattggctggcgttttataactgttttgactgggaaaactattagttaacaggccttaatcgatttgcattcaaacagttttacaccctggatgtaaaatggaaaaggc

SEQ ID NO: 246158 - DNA, 134 bp, Gossypium hirsutum
cccacgcgtccgggaaccaagtttaaaactattttaagtgatcgtaattaactgtcaataagaagcccaagcaaaacattgcagcttcaccattttgtaaattttgatttcacatagtaatgtgtttatgattc

SEQ ID NO: 246159 - DNA, 335 bp, Gossypium hirsutum
gttctgtccactcttattttcctggagaaacttgtgtggtggagctcaagaaatggagaagaaagtgtgccttttgtagtttgcagcgatccttccatagatggggcacttgcttctcaagcttcaattcagtcatctttcgatgaaacggctcaaaatgaagcgaaccatgaagctattgtccggaatttgaggcacaaaagagtgttccttgagcagtctggtgctagctgcatagttatgccgtgccatatctcaaatgcatggcatgaacagatatcagagggctgctcactgccattttttcatattggtgaatgtgctgctaaggagct

SEQ ID NO: 246160 - DNA, 298 bp, Gossypium hirsutum
aattcccggcatgttattaataaaaaaaaaaaaaaaaaaaaaaaaaaataaaaattttaattttagggcacacaaaaaaaaaaaaagcgggggggaaaaacacaaacatacaaacgtaataactcttctataatgaaaccaaaagtggcgtcccctgcccgggttttaacatcctttgcgcctgcaaacaccctggcgattcccctcttattctcctaaaaacacatccccttcccgcgaggtggccttttagcaatgaggtaccccccgttcgcccttcttaacagtgccgcagtct

SEQ ID NO: 246161 - DNA, 315 bp, Gossypium hirsutum
  unsure (1)..(315): unsure at all n locations
cccacgcgtccgcccacgcgtccgcaacatcaaccaagttgcctccatagtgatggaagcagaaagtgagcaggaggcggcaaaggcggtggtggaagcggctactgcctcatggaaaaagaagttcccatctccaaaagtagatgactgcaccgtggtttgcctcttcttccacaagaagcaaaagccaagctaaatagttgtgtggtagagaggaacatatgttttcaaacacccgtttgtgagctgtgactaatttgttaaccagcgttaactattctatagattgagatgctttttggtcccccnnaaaaa

SEQ ID NO: 246162 - DNA, 348 bp, Gossypium hirsutum
cccacgcgtccgcttaggatttatatttgatttctttgatttcctttcaatttttgcccacccttttaaactggtattgggctgaccttaccaattaaaataaccaggatttaccatagtttgtattatggtgatcaatgtttccaaaattttagcacagggaggttcaagacatgtttgccatcacagattcagtctcttgcttaattaaatagtgcaatgataaccattgcaaattcacttgaattaaatattgtacacaaactgtccaagttgtaacggaagtgatattttggtgatatttgaattcacaccaattagattaataaaatcttaaatttatcaatc

SEQ ID NO: 246163 - DNA, 155 bp, Gossypium hirsutum
cgcttaattcagcccgtgttatcagttttctctctctttccttgggaagcatacccttttgcaagatctaagctttaatattgaacttgtaagaacttatcaaggagtactcgactttggccacgtgaatttggacattatatgatttttagatt

SEQ ID NO: 246164 - DNA, 314 bp, Gossypium hirsutum
gtcccataacaaaaactaggcttgatagtggcaataataacagtcattatgaagaatgttatacaaggcgggccaggatccctttccttttggcaaagaagaaaaagaagatcatggtggcatcatcagatcatcatcatcaccaccaccaccatcatcatgctaatattgctttgaagagaagcaagtcaactacagctcccaggagaggccggttcttggatggtgaagtagataatggtggaggcttcagtcccagaaaaagaagtggtttttggtcatttctctatctttcttccaagagccatagttcc

SEQ ID NO: 246165 - DNA, 268 bp, Gossypium hirsutum
  unsure (1)..(268): unsure at all n locations
aaaattcttgcgacatatataaatcatcaatttgttggcctgcnggaaaaaaaaaaaaagggaagaggaaaaaaaaaaaaataaatacggccggccgttttaaagatacacaaatttaataacgcttccttgcaaaaaatatagtttttttttagtgtacctttaattaaaattaattgaccaaagggggccccctttttaaagtggcaaacttttggccctccccaattaaattaattttttttttttgcgctttccaaaatctaat

SEQ ID NO: 246166 - DNA, 205 bp, Gossypium hirsutum
  unsure (1)..(205): unsure at all n locations
caaaaagcaggactagggttttttcctttttaaaaaaaacaagagtgtgttttcccttgtctagttgcgtgcttagatactaattaacatttgatttgtttacattaaaactctgaacttgcatttagctttgttgggtattaatttgtaagatccatgcattggttggtaaaaccaatcttttcaaaaaaggtactttttnttt

SEQ ID NO: 246167 - DNA, 350 bp, Gossypium hirsutum
  unsure (1)..(350): unsure at all n locations
cccacgcgtccggggttcgatggctaaccaatttgttagccaaaagcagcttgaatatgattgattaaaaggcaactacatcattatttttttttaattgagcaatgattcggctgagtcgacacaggtgagtcaacttagtggcgagggagctcaagcaggattttgtattgaggtgtcttaaaaaagatattctgttattggattggaatttggaagttaaatgtgcatttccattttctcttaaattgacgaggaaaacataattcgacaagattttccatttcagagcnnannananaaannnaaaanaaaaaaaaaaaaaaanannnnaaaaannnnnnnnnnna

SEQ ID NO: 246168 - DNA, 445 bp, Gossypium hirsutum
  unsure (1)..(445): unsure at all n locations
gtccggaacaatcgataangttcaagggctaataagaattcgtattcagtcattatgtgttgccaattaatgatgcctnntatgttatgaatgcnnctgggcagaccaaactnngcaagccaaagatgtnngattgannattttatggggacntnnttgatgggagctttccacaagagcttctggaattgggaaaangatctnctcnntgctgctttgcttgggncctcgcttctgaaaagatgnngtcagcctacgtggtcgatggaaaaggtgaaaagctctgaatgtggagggtgcgccatctgacttcaaggtttctggtgccgaggttattttggagcagatataaagagggtatggtatcttttgtttattccactcccaagaggtacgggggctctttgaggtaggaaaataaaatggttaagagcacttaataagt

SEQ ID NO: 246169 - DNA, 310 bp, Gossypium hirsutum
cccacgcgttcgcccacgcgtccgctttattttgttgtctgttacggataaaatataggcaggggtaaaagaaagtattctcaaaacagttgttgataaatgaatttcagatatgtaatgttggaagaattggcttaataataaataaatataaaaaaaaaaataaataaataataattaaaatgaaaaaaaataaaatattaaatgaacataataataggaaaagagttactgatgatggaataattaatgatggaaaaaagttaggattttggtattttttttttaattatttgggggggggcctttt

SEQ ID NO: 246170 - DNA, 254 bp, Gossypium hirsutum
cgttacgattatttattcaatcaattccatcgcctaaataatttaagtacatgttttgtacttttgatgtaaaagacatgttatcttaaataagtttacttttcatgtaaaagacgtgttgtctcaaataagtttcaaaatataaaatgtttgttaaaaaaaacaagattatgaattgaggtgtcttaaaaaaaaaaaaaaaaaaaaaaaaaaaaaaaaaaaaaaaaaaaaaaaaataaaaaattttatattgg

SEQ ID NO: 246171 - DNA, 198 bp, Gossypium hirsutum
atgcaggcatggatggggatttcattgtaaaccttgggttctgtaaaatttttctcaaaaaggtaccctatagtaggatatgggtggactggagattgatttaatttacataaaaaaaaattcataatggctgttaatttgagtagacaaaaggcatgtgaggaacagggttttacattatttgtgatctggttggtg

SEQ ID NO: 246172 - DNA, 402 bp, Gossypium hirsutum
gtggattggaggattatgccctgcatggtatcgaaaacccggatcttagatatgaccaaacattgagttatcctggccaagtcaataattccctaacgtgtgacgcagatatttctcagacttttggtgacgaggatcatcttggatattttgatggtgatcttcattcccagggccttggtttggaatcacaagcggatctacaaactgctgttgacggattccttgtgcaacgtacagttgctgacccagcgaagacgagatggaccaaggtttttagtgtactgaagtggttctctatcaaaagaaaagttaaagaaaaatttctaggtctgagatatggcactggactttaatacttttgcagctgcagtgggaaatagtaggggggagccaagtgct

SEQ ID NO: 246173 - DNA, 339 bp, Gossypium hirsutum
tattttttgagcgatttccttttgaaagattgatattgcgtctcctctcccgactctccagatgagaccattaagaaggagtcctttcgttgcccaaatacttctccagatatgatacatcatgttccatgaagttccccaagaaactaactaactgggcagccaagatttcagaaaaaaggccaatagggacatcatgaacctgaacctaaaaaggtgtcagaaatggagacatgtaacggatcctcccctaatttcaatttgtaaaggaccagcagatggaaccttttaaaaccctgttcattccatgatgtgaaagaattgaaacaaatacttttt

SEQ ID NO: 246174 - DNA, 374 bp, Gossypium hirsutum
ggtgatcaggcatgggagccctgttggatgtgaagcagtagagaaagcatatgaaggggaagatgagcatgaagagaatgcatcaatcaagagagaattctctgactttgatctccaagtccatgtggtcaactcaagtgaagaatttgattttggaaccaaaagggttgcttcttcagattcatttgaaactgaagccaaggaagaggttgaaaaggctgttgataagttccaaagtggacatgttagtgatcctgggatgaggagggctgagttctgggcttcacctatgcttaagcgctcgtgttctgatttggagaggaggaatgtgctaagagaggtagctgatcatttccctccatctcagtcatttg

SEQ ID NO: 246175 - DNA, 142 bp, Gossypium hirsutum
gaagaacaattgctgtggctagtagccggtactcttttagatcgtaaacatgttgcatatgatatgaatgtttcagaaactaaaatgctgcctacttgaactttttctgtgtaagttgaagtaccaatgcatgttcctctgt

SEQ ID NO: 246176 - DNA, 352 bp, Gossypium hirsutum
  unsure (1)..(352): unsure at all n locations
gtttaatctaaataagccatagggtgagaacttccatgtacctgtataggcaactgtggagaaagaaaatgttaaatatggcagatttatgaattgctcatcattttcgcaaaaaaaaaaaaaaaaaaaaaaaaaaaaaaaaaaaaaaaaaaaaaaaaaaaaaaaaaaaaaaaaaaaaaaaaaaaaaaaaaccccaaaaaaaaaaaaaaaaaaaaaaaaaannnnnnnnnnaaaaaaaaaaaaaaaaaaaaaaaaaaaaaaaaaanggggggcgcccctttaaaagaaccaaattttatttcccgtgtcttgcaaaataaaattttttttttgggcccccaaaaataaaata

SEQ ID NO: 246177 - DNA, 402 bp, Gossypium hirsutum
ctggactgtgcacggactctactggggtagctactcaatacatcgaccagctgtgctcgaggattccatccaggagagtatctcctggatggaaaagggattgattaccattcacatttctcatacttacagcatatcagaggccaaccttgcattctctgcactgagagatagaaaagccatagggaaagtgatgattgtatttgatgatatgggaaggtctaagctttaagcgattaggatttatataagcattccttgctgaagcgccgaatctagaaataatataatatggaaaataacgagggtgtcaatggatgacactttgtttactttcaggatgcagatgattggcatgtaaggtgttgataatgagggtttcaatgatgcactttgttacct

SEQ ID NO: 246178 - DNA, 260 bp, Gossypium hirsutum
  unsure (1)..(260): unsure at all n locations
tcgaggacgcgcccgcgtaaaaaagaacctgtttaaaagcatgattttttttatttgtaaagggcattgcttggtggaccttgatggggcctgtttgaatggtgaaagaacttcgcctattatctaaaaaaaaaaaaaaaaaaaaaggggggcccgccttcattccactccccggnnggaaaaaaccgtggggacacgaaaaactttgcctttgccgaacattaattattttgccggaggggnttaaaaaaaaagggggg

SEQ ID NO: 246179 - DNA, 372 bp, Gossypium hirsutum
aaaaaagaaatcctaataatttgaaaataaaactgtgaaactacgagtactaatacaactataggaaggattaaagggaaaaaaacctcatcaaagaaaataaaaagaataaacaataaagtaagaataaaattatactaagcacaataataatatgaaacctaataataataataataataacaaactagtaataacagtataataaaaataataaataataaataataaataaaataaaataataaatggggaggggccaaatggttgatgagggtcggtcgacgaggcatggggctccgacaacggcgagacgggtgacgacgatgaaaggccagtgactgggagaaaggaaaaggagaccgggttgat

SEQ ID NO: 246180 - DNA, 342 bp, Gossypium hirsutum
  unsure (1)..(342): unsure at all n locations
ccacgcccccggccgaatcgactcctccggtatctcctttttctggaggaagcagagagtcgtatcggtttcggagagggtcaacatcagatgcatacgagaaggggaaggagggtggaggtaggagccttgctcctccttacgacgtgtgagatgtgaacctctcctctcctctctgctgatcccccaattcgccgacaagtcaatattaatttgcatagtttctacgtttatacagctgaactttataatgttaattagagtttgcccactttgttttttttgcatgcatgtatgtatgtatttatgtgtacttgttttggcaatgtaactacttttntc

SEQ ID NO: 246181 - DNA, 235 bp, Gossypium hirsutum
tctcactccaataataaatgttatttttgttttaaaaaaaaaaaaaaaaataaaaaaaaacgaaatttttattaaaaaataaaaaaaaacaaaaaaaaaaaaaaaaaaaaaaaaactgccggcccttttaaaaaactcccattttacttccccgtctgttccatggactgcctatcataacaaagattttaaattcacttctctctccttacgttttacaacacaccaaaccgga

SEQ ID NO: 246182 - DNA, 411 bp, Gossypium hirsutum
gatatggagttttgattctcttctgaggcggaaattgttggtctctaaattaaaggttatactagcttataactggttgaaaatacaaatacattaaacataagttggtagttctagtgctatatcttggtcgcaattgcagacaaaagtaaatattgcccattttcaattaatcagagaacgagcattggtggcatgaaaaaaaaaaggaaaaagagaaagaccattatgagcaattgaagtttctccggatgcggcaaaattaattttgttttttgaattgagttatgagaatcatgtgctctcgatttatttttacccgaaaaccagatcttttttttatttttttgatggtggtgtagaaaatgatttagagaaatttcttttactaaattcctgagccttttcttt

SEQ ID NO: 246183 - DNA, 217 bp, Gossypium hirsutum
cccacgcgtccgtgtcaactggtctatggtctttttaatcataaaatcggtttattattgcatttgattaggaatttttgacccgtagtcaaattgacattgaagcaaaggggtctttcatcatcttcttcaatatggcttttaattactcttctttttttttctgtaataaatcatcaaattgcaaatcccatggaagttcagtattgggtttttg

SEQ ID NO: 246184 - DNA, 349 bp, Gossypium hirsutum
acacccccaaacgtggatcccaccgcatgcattaggttctttttgtcacattctggaggacttggccctatttttatccaaaaagggggaaagaatcagtcaatcttgcctcgctccagtggttccgttattcggtcaagaattactagttgtttccaaaaaagccatggtcgcccttccatgacacgctctaaatcatcctcatcttcaaaaattattgaaaacagtgtagatcagcgttggattttctgccggagttactagcgaactctttactgttaactggatcagttcttcttcaaaaagagctaattcattttctgcttccataccctcaagtcaccactcg

SEQ ID NO: 246185 - DNA, 274 bp, Gossypium hirsutum
gtccgtggctgaaggattctagccgggggcggcattttaggtatacaacgtatatggatgcactaagagagatggatgatcctcttacggaggggctcctgttcgccatggtaacttatcatacaggaatctgcgtgcctaggatatgttagacttatacctctaattggttattgacttcatttgctactggatccaaaggtgtttgactctggatattttcatcatttcaggcacgaatgattgatttttattacagtctgattatagtttt

SEQ ID NO: 246186 - DNA, 210 bp, Gossypium hirsutum
aaaggttgcatcaaaatagatagttgctatcgtacttcttgtgttctgtctctgacgtctgttatcacctaaggtagatggtctttcttccattccatcaatttctgctatgtaactgtggactcgttttgacaactctcgccctgtggttgttttccccttgtcgaaaccattattaaatttgaaaaccaaacgaggatcgactttttg

SEQ ID NO: 246187 - DNA, 363 bp, Gossypium hirsutum
aactcccaaacccactaaactaagagtccccaacatcaccggcgcggtgcacaactctagacccacctacaacaacaattacaaaagaccagcaacagccaccagcacctaaatcaacaccacctgatcttcttagcatttaaggatgttaatgttccaaaggggttgtagttttattactacttagtgttctttttgctctaactttaaggtgtttaaacgtttgttttttttctttttttgtgtatagtaggattggtgggggtattttgttataaaaaaagaagaagcttgtctttcatcatgctgtactgctagttttctcccctttctgttttgagtttatgaaacagctgttttatc

SEQ ID NO: 246188 - DNA, 280 bp, Gossypium hirsutum
cacaaatctagagaaaattttgaactgactaatatagtctttcctcttcattatgttcttgaatttatcagtttaaatatttgctattacttataaggtttattatatttataaataagaattttaattttattaaaaaaattggcttaaaaatttatttgataataaaagtcgtcatatttaaaaataaattttaattttattaaaagaatttaaataataaaaaaactaaattttatattgaattattttatatttaaattagtatgtttccgttaat

SEQ ID NO: 246189 - DNA, 234 bp, Gossypium hirsutum
  unsure (1)..(234): unsure at all n locations
cccacgcgtctnnnacattaatttaaagttttatttccagcttctggacaaaaaacatatgaaagaaaattttttttaatatattctcccccaactcaaaaaaattcaataaaaactaaaaaaataaacaaacaaacaaatattcataaccttacctgtcgcccttcctctagctatcaatctaaaccccccttccaagcaacgtaaaactttttttacatcctccccaaaatc

SEQ ID NO: 246190 - DNA, 241 bp, Gossypium hirsutum
acccgccacgcctgttgtcccgaagcaacctgaatctgacccaagtttagagagctaaccatttaggcttatttttctttcacaataggtaaagcatccttgattcttccattagtgcttcttctaaagttctaatcttcgtatattatgtacaaaaatggaaaaaaaatgcattggcccatgtggatatctgtgaatgctgtctataacttaatgcaattagcaagagtttgttcgtttc

SEQ ID NO: 246191 - DNA, 230 bp, Gossypium hirsutum
gttcgatcaatcatgttcttactataccctttgatttaaaatcattcatactatttacttgggggcgttgaatatataaccacagttaatttctcccatttgttcatatgaaaagcttgaaatctgtacaattgtcaattgactcttgctgttttttatattaagtgcaaaaccattagtttaaaaaaaaaaaaaataaaaaaaaaataaaggataactaatattaaaaa

SEQ ID NO: 246192 - DNA, 410 bp, Gossypium hirsutum
gtaattagtccatgttttttaaatcaaaggataaattagtcattttgttaaaaattttatctatttctattgttaaaaattgatctcgtatgtcagcataaggtacacatgacagatcacgagtagttgtctggttattcaatcagttatacaagtttttaacaatagaaatgaaaagaatttttaacagaaatgatcaatttactctttaatataaggtaaagagactaatttactcaattttttagtaacaggacaaaatgcaattgaatcctaatggaggggtgtccatgatactatactactatacttttacctagtatacatataaacggtaaaaaataatgtttttgatttgtctaaaaggttacagtgaatggtaccccttaccacaagagttgtttcaaatg

SEQ ID NO: 246193 - DNA, 408 bp, Gossypium hirsutum
gtttcctttggggcattggggatgttggggctcaatacatcacccatttcaccacaaacacacgccttcaatataaagattcagagcaagaatttataatcgattggaaaagagtggctatcaccagtatgtttggatttggctttgttggaccggctggacactactggtatgaaggcttggacagatttataaagttgaggcttcaactacgaccaaagtcggtgaaatttgttgctgctaaagtcgctatggatggccttatctttggcccctttgacttgttcgtgtttttctcgtatatggggctttccgctggtaaaagtgttccggaagtgaaggctgatgtgaagagagattttatcccagccttgattttggagggtggtatatggccgattgttcaga

SEQ ID NO: 246194 - DNA, 276 bp, Gossypium hirsutum
caaaaaaaaaaaaaaaaaaaaaaaaaaaattttaaataaaaaaaaaaaaaaaaaaaaaaaaagagggggggcaaaatttcgggggcctaccataaaaaaagcgggcctgcggcgtcaagcggactactattgtcgtcctcttggttcaacaccttggcctctgttttactccgcccttattcgaaatacctgggcgtggcccaacttcatcttcccgcagaaaatccgattttcaccaacttcagtcttttcgaggattccccctcttgcccccct

SEQ ID NO: 246195 - DNA, 131 bp, Gossypium hirsutum
atcaatcttgctctgaaatgtttcacaaattgtgtaaagatcatcacttgcaatgtgaatcaggttgtacataaccattgcacagtgattaaagaatttggaaactagaatgagttttagtgtctattttc

SEQ ID NO: 246196 - DNA, 408 bp, Gossypium hirsutum
cacgagcatcgtgcgacgtcgatgaagaaacgaagaagatggttaggtatgaagtggacatggcattggctttatcggccaaagggttcgcttggagccgtgccttgaaacacaagcttcgactgaactacaaggacgatgatcgtgtaggagatggtcatggtgagcccgtaacgaagaaaccgaaaaccgaacacgaagaggaagagaggatgatgtgtttgaggaagcttataccaggagggaaagagatgatggctgatgatgaaatgttgttgagtgaattgggaagctatgtttcatgtcttgaattacaggtgaatattcttagatcaatgcttcaaaataattaattttttttttaattttggaagttaatttctattgaggcatgcaatattcaatgtg

SEQ ID NO: 246197 - DNA, 127 bp, Gossypium hirsutum
ggaataaatgcctcaagttttttgtagggttgcatttgttgattcacccttttttttaatgactttctgaaagtacggatggccattgttggagtatttgaaatacaatatttcctgttttcttttc

SEQ ID NO: 246198 - DNA, 225 bp, Gossypium hirsutum
cccacgcgtccgatcgatgtccgtccaaattaattgagcttaatttggatgattaatgttggggttttgtgaacttatataatattttggattaagtatggcttgtaataggaaacattgtagtactataatatatattatatacatatatatgagaattttcaatgataattagctattgtaaataccctttgagatgtggataaataagcaatatctttttat

SEQ ID NO: 246199 - DNA, 400 bp, Gossypium hirsutum
  unsure (1)..(400): unsure at all n locations
agcctacctcaggcaataacaatgcacatgttgagctatgctggtaaggctgaaatgcaaagttctagtagctaaagatatcatccctgatccagagtttcttgctaaatgctttgaagatgccttgcttgaaatgaaggaggctgtattaaggaccaataaagcataggcaaaacaataattatttttttaaaactttaattaattagtgtacaagaaaaattcattacgaattttccatacataattacgtttagggtgtgtttagtattgcttttaagaaacacttttgagacaaaaagtatttttttgacaaaaatattccttaaaaaaatactntttgagaggaaaagtgtttttctcgagccaaaaatcaaactctttcttttatccttgttct

SEQ ID NO: 246200 - DNA, 357 bp, Gossypium hirsutum
  unsure (1)..(357): unsure at all n locations
acgcccacgcgtccggtcgatgctttacaacccgccaccaattattataaccctcagctgcagcaagaccagatagctcttcaactagtctaatgttatgggggcgtgcatggttcattgctgctgtttcagttttagtgaagaacatcttagcattgtgtcagatgaaagctactatataaggcaggaatattatgttaactttccttaaatggaggaccctagatctgatcgtctgccatgtttaagatgcgtagagtgtgtaagaatgataagtttgattttcagacaagaatgtcctcttccatttgcttagaacatgcattaagatcctnnnnnaaaaaannnnnnnnnnna

SEQ ID NO: 246201 - DNA, 414 bp, Gossypium hirsutum
  unsure (1)..(414): unsure at all n locations
aaaatcctacctcaggcaataacaatgcacatgttgagctatgctggtaaggctgaaatgcaaagtctagtagctaaagatagtcatgcctgatccagagtttcttgctaaatgctttgaagatgccttgcttgaaatgaaaaaggctctattaaggaccaagggagcgtgtgcaaaacacaatttcttctttgaaaaaacccctttccctgggcgctcgaaaaaaacaccacgcgtttccatacataattacgtttagggagagtttagtattgcttttaagaaacacttttgagacaaaaagtatttttttgacaaaaatattccttaaaaaaatactttntgagaggaaaagtgtttttctcgagccaaaaatcaaactctttcttttatcctttgtctaaaaanaaaaat

SEQ ID NO: 246202 - DNA, 213 bp, Gossypium hirsutum
gtggtctttctgccagcgggatactgatgatcatctcggcaacgtgctccgaaaaggtgggatgtgagtgcaattattaatcccatgccccattcttccgcatccaaaatagaacattggcaaattttcatacttaaaaggaatctatactttactaacatcgaaaataatacaaaaatgaaagataataaatacaaaaaaaacaaaaaatta

SEQ ID NO: 246203 - DNA, 309 bp, Gossypium hirsutum
  unsure (1)..(309): unsure at all n locations
cccacgcgtccgnaaaaaaaaaaaaaaaaaatatatataaaaaaaaaaaaaaaaaaaaaaaaaaaagagggaaaaaaaaaaaaaaaaaaaaaaaagggttggaagttttaaaggataaaaagaattaaaatcaaatgcttgcgacggggttggctgttttatagggtcaacttatttgaatgcattggtcgaagttttacaactttttaaatgggaaaatcctggatttacctaacttaattttttaaaaggaaatcctgtttaagccagatggtttaatagctaaaaggcttggacctttatcctttt

SEQ ID NO: 246204 - DNA, 286 bp, Gossypium hirsutum
ggagtctatgcgtgatatctagaattctgtcttctaatatggtcatgcttttgttgaataaggggtaaaatctaaagcattgtgccttgtagctttaaacagcacattctttctcacagataagcttgctcagatcttagatctatgtggtcgcttggatccaaaggctaaggatttgttgggttttcgactatcaactcttttcagttttttttttaatttcctcatagaagaatgtaatttctagtttgggaaaaaggatatatttggtgggttatcatttgaa

SEQ ID NO: 246205 - DNA, 223 bp, Gossypium hirsutum
ccttttctatctatctatattattctctaatatgaccaagatattaactggtggtatcaccaagctttttcctttattattaattggagcctggttgtgtcgtatgatattgggaggcatccatatggtaatgttaatatatgaattgggcaaaacccaatcttgatggacaaaaaaaaaaaaaaaaaaacaaaaaaaaaaaaaaaaaaaaaacaagaataac

SEQ ID NO: 246206 - DNA, 161 bp, Gossypium hirsutum
gtttcttctatatatgtaaatgaaagatttagagaacatttggaacagtgggtttctttgatttatagctacagtagtggtgaatttccttgctattaagcatggataatttaatgaactgtcttttgttttttctttactaaatgaaaatgattgtatcc

SEQ ID NO: 246207 - DNA, 351 bp, Gossypium hirsutum
  unsure (1)..(351): unsure at all n locations
attagattccacttgatgcaatttcggatttcaattcgagtagctaccgaataggacagtttgtatagtcattacaaataagcttgtattacattttttctggcatattgtccggattccgattattgaacgaaaaaaaaaaaaaaaaaaaaaaaaaaaaaaaaaaaaaaaaaaaaaaaaaaaaaaaaaaaaaaaaaaaaaaaaaaaaaaaaaaaaaaaaaaaaaaaaaaaaaaaaaaaaaaaaaaaaaaaaaaaaaaaaaaaaaaaaaaaaaaaaaaaaaaaaaaaagggggggcccttttaaagaaccaaattttttttcccgtttttgtcaaaanaaaaatttttttt

SEQ ID NO: 246208 - DNA, 411 bp, Gossypium hirsutum
gatttctgaagtggttctttccacttcctctctttttctttttctgggtttgcttattattaacatcaaagtttgtggtgaatcaagttgaggcgtctactaatcaggttctagactagcatatgccagtgtataatcttccatccaagatcctttgtcgggtgattaacgttcaactaaaggtaacttgcacatttttcttattgcaatttgaatgggtttcttttgtctatagggtttagttttgctaacgaaactaatatccttttgctgttaaccatttaggctgaaccagataccaatgaggtttttgcacaagtgactcttacttcctgaacctactgtaagctttggtctctactttttttctttgtaataatcagaatttaatgagaagttgaatttctcatg

SEQ ID NO: 246209 - DNA, 379 bp, Gossypium hirsutum
atttgttgagttgaaaaaacaaaaagaggtttagggttggagttcgattttagaacacactccggcacttaagttagactgaagtgcaaaaggctgcgtaagccggattttccctcacttgggttgtatagatccggtcggacacattagtggatgggacgatgttttcttattgaggggtttggtggttaatggtacgaaccatttttttttctcaagggctcaagctgtaagaagctggatatgatccgaaatatcttatgcaatgtcggttcgggttatcggaactgctgatttggactctgaatctaatgggcttaacagtaattcaaaagggaagacataatgatgttaacaagagatgactagattgtgattt

SEQ ID NO: 246210 - DNA, 200 bp, Gossypium hirsutum
ggggccgaccacagccttccgccaaggcttctattaaattttggaaaaacttttttttaaagggggccacaagtagctactttggtggaacttgtggaattttatggatccacactcgctatgtagccaatccaaataaaaaaggaacgaggggaagaatctacaaggtttccttttcttaaaaaaaataaaatatgaat

SEQ ID NO: 246211 - DNA, 245 bp, Gossypium hirsutum
  unsure (1)..(245): unsure at all n locations
gccgcccacgcgnccggagaaanggaagaagcccanaagaaccaccggggggnnaagcggaacgagggggcaagcgacggaangnacacagccggagaaaaggaaaggacgggaaggagagaaaaagcgccaaagaacacaggggccgaacacaccaagggagcggaaggagacacanaaaaaagacgaggaagagaacaccccaaaaagaggaaaagagagagaagagaagccaagaaggggag

SEQ ID NO: 246212 - DNA, 225 bp, Gossypium hirsutum
atggtcagaaaattacatttgagggactaagcttatgaggctccagatacaataactggagagggtgtttttgtattggaacaaaataaacaccccaaatttgataggagatttggggacgaactttatgttttccacaaaacttaattttgtctagaaggctttatttggtgtttaaaattttctcttatcttttcctttttattttctttcttatttttatat

SEQ ID NO: 246213 - DNA, 332 bp, Gossypium hirsutum
cctacgcgtaggtatgggaagagctgcttttaccaaaacgaagatggtgatgctacgggaagcgcaactcgtggagcgaccatcgagcacaattgcaggcaccaatcgggagatcaataataagtgcaagattaacagctatttaaaaagttcatcacattgggtgccacatacatagagcgggatatgttatccgaaaggccatgaatgggtgatggatgacgctccttacctggcggcttgtttctgtttaagtatctttgatcgtatcgattactgtgtttattaacctgatgattacgattatgatgacgactatttctatgcaatta

SEQ ID NO: 246214 - DNA, 421 bp, Gossypium hirsutum
cccacgcgtccgcccacgcgttcgccacatgttaatcgtactgactaccagttgatcgacatgtctgaggatggatttgtgagttggctgacctaaagtggagacactaaggatgttctgaggttctttacttgatgtgatctttttgaaacatatcaaggattttttaattttttgggatttgtttattgtttttattatttgaatttattttttgatttgcatccatttttactgttgtcattaaggtttttatattttcaaatacgtttatatttttttgttttttttcttatttttgtttatatttcctgtttttattcatatattaaattttatccattttaattttaacatacaaattcttttattgttaataaatatatatttttattttattttttttatattttttgtttta

SEQ ID NO: 246215 - DNA, 404 bp, Gossypium hirsutum
  unsure (1)..(404): unsure at all n locations
ttgatgggaaaataaatgaaagcaaggcgaaagctttggattttggcgtaataatccatgagggtttgtttgacaatttggagacctgganacacccattcaaaatctttacattattgctcaaacagtggaacaatatttgagaagtcgatttggttttatttattaatttcttgtttgttgttgttgtcataattttttgttttcacctgttttcttttttattctttttttttttcgatactttttattgtctttaatttttcaaagtactttttgaaatttaatggttcatttctttaaatttttctcattattttccatgattttttttatttattaatttttatattatttatatttattttttaattattttataatatttattatatattcttttt

SEQ ID NO: 246216 - DNA, 235 bp, Gossypium hirsutum
  unsure (1)..(235): unsure at all n locations
tggccgccctttttttttttttttttntttttttttttttnttaatgagatcgcgttgtttttctgttccgttgtgaatcattctgctcttctgttatatgattccgggtgtattttgaagatggatctgctcgatcctgatttgaacatgttagaattgaatgcaattaaatactaaaatttagcgttgaaaaaaaaaaaaataaataataaatatattaaatttaataaaatg

SEQ ID NO: 246217 - DNA, 412 bp, Gossypium hirsutum
cccacgcgtccggcagtatttgggtggaatacctaagtctcctgaagctatattccattacaaccgtgatgatctcaaaggattaccatttaaatttcctaaaaccgtaattcgtgatgtggtacgcagccccatggtagaagctcaatgttcagtccagctatgctttcctgtggtgttgaagaatggaacaatggtagaagagattcactgtgtcggtttcctgagcaaacttattgaaacaaaaatagtgcaggttcttcgtttcaagcatgggcagatctattctgcttgtgtttctgggttccttggtggcaataaaccttctagaactggtgatgttcgtggagatgtgagtataaacttttcttgtgatccagaaatctcctcaaagttggttgatcttgctttg

SEQ ID NO: 246218 - DNA, 385 bp, Gossypium hirsutum
  unsure (1)..(385): unsure at all n locations
agatgatctctttttccactccgacacgatgagtaaacaatgtagaaaggtagtagtagcttaggaaaactgactcaaagagattaacctcttaaaaatgatgcatgttttagaaaatcaacgaggggaagaagagattaaaaatcttattacgatatttgagttaaaatgaggtaaataagtgtttttgggagggttggatatgtaatgtacttactcatgtagttagcttagctatgtttaaagaaagcagcctatccctttttgttaaaaaaaaaaaaaaaaaaaataaaaaaaaaaaaaaaataaaaaaaaatttataaaaaatataaaatatttaaaatatttaataatttattttataaaaaaantggggcggcccttt

SEQ ID NO: 246219 - DNA, 348 bp, Gossypium hirsutum
gaatcgaagatgagccagttgattccgatgctgaggacgacgtttattatactgatgatggtgaaagaagtgagtcggattcaaacaaaaatagtgctgtggagaatacgcattacaacatgatgagctatagggcaagaggtatacagttttgctggtgaattgggtgtgagctgctaaacaacaagtgcataaattctcttagtatctttttaagatgtagacttattagttgttatttagataaaaaaagaatagtttgctggcaagagaaaaaaatgagtgacgcgctctattatgatttaattaattatgtctaaataaacaagcggtgtttttattaacaaa

SEQ ID NO: 246220 - DNA, 277 bp, Gossypium hirsutum
  unsure (1)..(277): unsure at all n locations
ggaatcgaaggatgagccagttgattccgattcttaaggccaccattattattcctgttattgtgaaaggatgagtgggatttaaacaaaaatagtgctgtggaaaatgcactacaacatgatgagctctatggcaagaggaatacacgttttcgctggcaatttggttgagagctttaaacacaagagcttaaattttcctttagtatcnttttaagatgtagtcttattagtttttaatttatataaaaaatgaattgaatgcttgcaagagaaa

SEQ ID NO: 246221 - DNA, 475 bp, Gossypium hirsutum
cccacgcgtccgcgaaaaagatcatccccttgaatatgctgaaccaagtttcaaaacaccctgggtatgatgactcgggtcttgccggagttagctcacagatcatataaacaatgggttttgggggaagttttatggagtttcctcttatttgttattacattttttaactcttctttaatgttttctatttttaaattttcttctttcttgcattatttatttggagactgaagtttattttatttttttttttgtattattattaattttatctttttatttttttatttttctagtttttgttatattatatgtttttattattatatgtttttatctatctttttttttaaattttattttttatattttcatatgattgctatctatattttcttttggttattattattatccttatttttttattctttattatcttttatatattttttatttatatattcttttt

SEQ ID NO: 246222 - DNA, 382 bp, Gossypium hirsutum
cccacgcgtccggattacatattttgtgtatttacatcatatttatataaattttgataagttcataaaaaaaaaaaaaaaaaaaaaaaaaaccaaaaaaaaaaaaaaaaaaaaaaaaaaaaaaaaaaaaaaaaaaaaaaaaaaaaaaaaaaaaaaaaaaaaaaaaaaaaaaaaaaaaaaaaaaaaaaaaaaaaaaaaaaaaaaaggggcgcccctttaaaagaaccaaatttaactaccccgtccttgcaacgaaaaattttttttatggggcccccaaaataaaatcaacggcccgggttttaaaaacgtgggaatggaaaaaaccctgggttacccaaattaaatcccttggaaaaaaatccccttttcccaagttggg

SEQ ID NO: 246223 - DNA, 145 bp, Gossypium hirsutum
cccacgcgtccggccaaccgcttccttactttgattctatcgtcgattcaaagcggtttcttattccatggcgtttcctttttgggccctccccaaaaccttacttcaaaccaggctaccttcttttctttttcaacccaccaac

SEQ ID NO: 246224 - DNA, 359 bp, Gossypium hirsutum
cggccgattcccggtcgcccacgcgtcggaaggttcttctcaaactaccgattgacgcccggggagcaagtgtgctgccacggcaagctgcgaatggagcccttggagaacaacctgcccgtcggcagacacacttggagtgcatcttcactacgacgcgggacacctttcgatacagccgtcaagattgtggtaatccgtgatatggagattctgagttgccatacatggtagtgccatgaaaatgaagcaaaatgtgtaaatttaatgattgattagtataatttggcatatatcatgaacttagttgctataatgtataatatggtattataaaccactttatatttatgatgcat

SEQ ID NO: 246225 - DNA, 143 bp, Gossypium hirsutum
gtccaaacatttcttaaactgacgattttttttacgagcatggaagttactgcagagggggtgtctcaaataatgttactagcgtcccattgtataaaaaccactccccaatgttttgtcacataatcaatattctttaaaaa

SEQ ID NO: 246226 - DNA, 116 bp, Gossypium hirsutum
gaataatgccaagcctcctcatgaagtttcttcggacgatcccaactatgattctcctgggcagaattttaagagaccatgcgaagtttttaattacatacatctccaacgaattt

SEQ ID NO: 246227 - DNA, 428 bp, Gossypium hirsutum
cccacgcgtccgctgtgttttaaaatgagaagcaaagctggaaatgggactatatatatatgtatagatggaaccggatttgaagaggtaagttgcttttgtcttttgttatatttccttttccatgtcagttaattacaagtacaatgttgtcccatgaactagtacatgttatagtgttgcaaattaatcactattatagtatattcaacttttagctgtcaaaaaaaaaaaataaaaaattttaaataattaaaaattatttaatattaaaaattattaatattttattttttattttaatttaaaataaaatttttattttatttttaatttatattattattttttattaaaggggcggggtttttatttaaaataacaataatttttttctctttgtttatattaataatttaattattttt

SEQ ID NO: 246228 - DNA, 324 bp, Gossypium hirsutum
cccacgcgtccggggtgacccttgcaaaggtgtaaagaagagcttagctgtagaagtttcttgtgcatgaagaaatgtgattaagaatggattattgggtgccagagaagtgcaagcgttggatcaaataagcttttcaacaatgagttctgatgataatgggaaaaagacgtctcataccagaaacgtgttcttgctagtactagagaaataaacattagtgtagtgtatcacttcaatggtatttctgcatcagtatatcttttaacaccgtaccaagaaacgatatcaaagtaaattttatcaatatatatctataatgat

SEQ ID NO: 246229 - DNA, 188 bp, Gossypium hirsutum
atatataagagttagtttaagtctatagaataactattatactacaactttatcgaaatataatcgtatgctgctccttctttccaaaaagcgtaaatgttctctactctaggccaacctcccaggaccgccaaacgtttgcaagttcataaatagcaatgaacaaaatttcgaaccgggcgccctta

SEQ ID NO: 246230 - DNA, 392 bp, Gossypium hirsutum
  unsure (1)..(392): unsure at all n locations
cttttttttaaaaaaacagaagctttaacccctctccctagggtttgattcaacatgcaggggcctaaaccatcatttatttgatggcttcggcgcgccaatggcgaccggaccttgtcaacggaggacacgcccacggagatcgggtacagggtacgttagcatcgtacggaggctgtgctggtgctggcgcgggcgtggctgctggagggtacggagcgaggctgggggttgtacggcgcctggaggctgcggtactaagcaagggctagggtttctgaactttggtttaagtattgggcctattgggccgtctggattttgggttagacattagtttgggctttgataggntattggtttataaaatgacacttaattattgagttttt

SEQ ID NO: 246231 - DNA, 397 bp, Gossypium hirsutum
ctcagtctcttatccgaaggttggtccggcagcccacatgcacgatcttcgttgtcaacaggtctgctgcagacgacacctttcagatcactttctgatatcagttctgggaacaattctatatatgagaataagaagtcctgtgacagagcgagcctttgcgatgatgtgctcagctcgactcttgtaagttcaactttgattccttctgtaatccgaagctaaagatgggaagttgggagaagaactaagcatggaggagagcttgattagaagaatctttgaagaactttgtgtttgtctaatgaattttcttttaatctttggttaaattttaactagattgttctttctttttacaagtagagaatattgaagattcttagctcatttggaa

SEQ ID NO: 246232 - DNA, 181 bp, Gossypium hirsutum
tatactctctattttcatccccagaatgcttctaatctcattcatatagtgccctaatcattatccttttttctcccttgatttttttttttttggttattctgagtttgtgtcctgtatcagtgtcgtattgcaaaaatgtatgagaattttgctataatatattaatggcacttgaagt

SEQ ID NO: 246233 - DNA, 454 bp, Gossypium hirsutum
cccacgcgtccgaactttatcagctctactttatttttataaacctactcaccctcccaagagaagagagaacttttctatactctcaccccaccaaaattcaccgaccttggcccgacaacttttcctcttttatttctcaaaaccttcaaaacttaattctcttaaattatatatattattatttcaaatatatacttttatttaaaatttccaaattatttttcttctttttacattaataatatttctttatataatttatatatattttttttttatttttatatatttttatatttttaatattactcttcatttttaattatatctatacttttgtgtataattttatatccctattatttttttaattattacatatttaaaatttccctaattatttttagacttttatttattttttcattttttttattatattttttattta

SEQ ID NO: 246234 - DNA, 427 bp, Gossypium hirsutum
tcctccccacatcgtccgttcctgaagattttttattacaggtttgctattcctatggggggggtattttttctttggcgattctctcctctttcaataatgtgtttgttaaatccttttgttttcataattatttttactttctaattatttttttcatttctttttatttttttttatctttattttatcttcatttatatttttattctttctttttttctttccttttatttttttttccttttttttttttaactattttttttttctttattttcaattttttttttttaattttttttttattttatttttgttattattttttttttgtttttatatataattttttttattatttatttacgttaattttatttatattttattttttattacttttttttttttttattcctttttt

SEQ ID NO: 246235 - DNA, 231 bp, Gossypium hirsutum
aaattgctgaagagtcgccacatgtttatcttaattttagcaggaatatgtaaagcctagagcattttgtagaaatcactctatttatcacttatgagcgaatgttgcccgttattttgtacttgatttgtaatcaaaacatgatacccattcttcactgattaaataaaataaaaatcgacataaaacatagaaagaaaacatgcgaagaagctgatctacaaatgagga

SEQ ID NO: 246236 - DNA, 247 bp, Gossypium hirsutum
aagccaccatatgatttatgtgttagtatctgaatcatcgagcggcggaactctgcgttgcagcatgttgtattgagaggagttcttgtttgggtttattgaatggaagagctaacctgaagaaagggcatgctcttgattttgagtcgatggtggtcttaatccccatatgcaaagatggttcgggaacaattagtcctcgcgtcctaatgctatatggaaacccaattgactgcaatttcccagc

SEQ ID NO: 246237 - DNA, 312 bp, Gossypium hirsutum
cccacgcgtccgtgccaaccccattgttactctaccattggtcattggaagcagatgaggaagttccatagtttttgactaccaagttctctctctctctttctcttttcttttttaaccctttaaccaggctttgtaagtttgtgtagtcaagtaggaaaaaagacatctttttgaatgaatatgcataaagcatcaggatccaaaaaaaccaacacgtatttttcacccattttgcttacattataaaaagaaccaggaaacgaaacaaaaaaatccaacagcaaggttaattgaaggtgatccaaaaac

SEQ ID NO: 246238 - DNA, 429 bp, Gossypium hirsutum
  unsure (1)..(429): unsure at all n locations
cccacgcgtccgaaatttgtcagctctaccggagggaatagaccgcctcaccaaccttagagaattgagaattggcggatgtccggagttgagcaaaagatacagagaaaatgggggtgaagattggcacaaaattgctcacatccaaaaagttgttattacggatgaagattgaggtatgtgataaaattgtaatttctctatcagattcgattccatattagagtagagtagagacgtggcttccataatagtccgttctaccagcatggttttggttagaaatttggtatgtttaaagttgatcaagtactcattgagttataaaacttgcatgaatgaaatgtgaagatggagatggaagaatgaancagaggttgaggcatggcacggaagacttttactttatttgcaagtgaagctttgcat

SEQ ID NO: 246239 - DNA, 407 bp, Gossypium hirsutum
cagatattaatgaagaaagaaacgaattctatgactgcgaagctgatgtctctttggatagagatggatgtttctgctacggagccgcatacagatagaaaccaagggggttcctcatcttcaaagaagaaaaaaagcattctgatgcaactgatcatttttcttcttcatttcatgatgctaccactttattggcggaaaacatgcgggccattggcgaacaaatcagtaggagtattgcctctgatatgatagttcaacaaaagtcagaagaattccagatcatccaagacatagctataaatttatattcaaccttatgtgaaatagaacgtttaacagtggatgagcaggtatcgagcattgagttatattccagatcatccaactcaaatgctcgttttctt

SEQ ID NO: 246240 - DNA, 423 bp, Gossypium hirsutum
gagaaaaagcagaagacaatcaagcagtctacaagcagaatcaggcttgccacgtcagaagcccaggcataaatctcacaatttgaggcaaagtgatgaccaattgagtgatatcagtagtgacatgagagatttgaatcaccaaggagatgatagttcgatgcaatctgagagcaatatgagcatggcctcctatggtgacactgaagtcactgctcaaagttatggcaagatagagggtacattctcccaagaacaggaaacgaagcagaaaaatccagcagcaaggttaattgaaggtgatccaaaagcagaacctccaagaactgccccggaacagcctagtcctgtctctgttctagatgctgcattttacggagatgaatcaccgtctcctgtgaagaaaacatcaaaagcttttga

SEQ ID NO: 246241 - DNA, 178 bp, Gossypium hirsutum
aaaaagtttcctcgggataagctctacccctgatttgtgacaaaactattaaaactaggctgaaagccatgtataaccccgttgaagctttttagtcattctgtttcttcaaatgaaatctctctctttttgtcaagtgaaaaataaaaaaaaaaaaaaaaaaaaaaaaaaataaaaa

SEQ ID NO: 246242 - DNA, 405 bp, Gossypium hirsutum
cccacgcgtccgccacagttgagtctgagtaatattgctcagtagttccattctgcttggttagtctacaccaagtgacaccctcttttatacctttgtcagccattgggctaaggtcaattggtaaacctaaaatctgaacttttgatgtcaataccagctgatgatcttcactaactctttcatgttcatcgaccaacacaatctatcgacacatctgagcaacatttgtttgtctgtttcattcttgcgtcattgctactttttgtgtttaaacttttctaggtttgtactgtaaccattacttcttgcaaatgttggctcaaattgggagaggccattatgattgcacttacaatgcagataacattgaattgcgaatggagagattattactacagcttc

SEQ ID NO: 246243 - DNA, 130 bp, Gossypium hirsutum
cccacgcgtacgcccacacatacgaaaaaactatattatatttaagcatttacaccataacgagtgaggttcacagtggctatgaaacactgaaccaatgagagccaatctttgtatccgtagcaaacta

SEQ ID NO: 246244 - DNA, 245 bp, Gossypium hirsutum
atcaattgattgtctattcttagttggttgatcagtaatgtattcttctgagaactggtagaatcttttgttacagtataggcactattctcttattttttaatgaagttgtaataaaagtttaaggttgttgaaaatcatttgacatatgaaatcattatctgagtactgtactggtttgatacaaaaaacattataaaacaagaaagctataaagctgacttacacattcattctgtatgaaa

SEQ ID NO: 246245 - DNA, 281 bp, Gossypium hirsutum
cccactcgtccgcccacgcgtccgaagataataaaaaaagaaaaaaaaaaaaaaactaagggggaaatattgatacaaaataaagaactataatattattatttaatagatatagtaataaaaggtctatggttgatagaattcatctgacatttgatatcatgatcatgtgtactgttctggtttggtgcaagaatcatttatattacagctgctataaagctatcatagacattcattatggctgtactaaatcttagctatcttggtttaaaaacaat

SEQ ID NO: 246246 - DNA, 426 bp, Gossypium hirsutum
acagccttccgccacaccttccggtgtgcccaagtgtctctacaaagagatgggcgctactctaagagagggggccccgtgtgttattatatcttgatgatgaacaaattttgatgtggagaggacgggattggaaatctatgtatggggacacttcttcaactttagttcctgttaaagctgacatttcaagtggtatagataattcagccaaatctagtgatgatagtggtacacctgatgcccaaagggtagtatcaagcccaaaaatgatgtccctctggaggcgtgcaatcgagtcaaacaaggcattgttattggaagagcttgctttgtgtccggatgctcttctggaaaaggtggaggaatttgaaggcatgtctctggcgatagagcattcctgtgaagcattagtcctgtccagcg

SEQ ID NO: 246247 - DNA, 294 bp, Gossypium hirsutum
cccacgcgtccggtaaaataagagttgctaactgagcaccagcagcaacctaatatacggagagaatatatggaggaaaaatgcttgaaattcaagctttaagagcagaaattggaaggaaaacaagaacagtacttaagcacacaaagaagaagcatgaataatagttgagagtattgatgaaaaaaatatgaattgtatttctttcatacatccatcataggcacattgccattacataaaatattaataaaacccaaaaatgattttcttatgaaaacattcaattatatc

SEQ ID NO: 246248 - DNA, 351 bp, Gossypium hirsutum
gcgcttcccatcaaattaatattctatctaccgtccactccagcaaggaatgataaaaagtgttgaggagaatctgattacagcaaagctttcttactatctcaaagccttctgtaccattttgattctgcataagacgatttctactgctactatcagtaacacgcagtatatagtctttcttgcactgatgttgccgtcgataccttctgacacattgatgctcatcctcttttccgctagaatcatggatgctcttatgttattggccctttctccggcagttaccgactacgatttcctccataccgtatatcaacactacatatcagatttatacgattatgtctc

SEQ ID NO: 246249 - DNA, 344 bp, Gossypium hirsutum
gattccacagctgccaattcagcagccttccttctagacgaagtcacgtctttgaaaggtggggaggtcatagctcgtgctgagcacgcatattctgttctatctgccccataacctggttttcttaccaatacagttcccttccctattgcccaaaccagcttgccgagcgagaaaaaacctgggaggccaaagcggtttaaaatgtgaatcaagtttattattacaatttcatatatcttcatagtgatactgattcttggccacactgtgtcgatctaaatgcctgattactatataagaaaaggaagaaagtgtttaatggcgttgagcatgtgattctt

SEQ ID NO: 246250 - DNA, 245 bp, Gossypium hirsutum
gatgcctgcttcgatctgtagaataaggagcagtcaaatggcaatgtggaattacagataagttattaatattaatgtgtgtgtgtttacaattacttctttttttatactttattactaaagaaatagtaatctagttctgtaatgaacatttaagctacaatgttgtattttgttctttgtattgcgagaaatatttacattagttaaataaagaatttttataataaaattccatttttttt

SEQ ID NO: 246251 - DNA, 304 bp, Gossypium hirsutum
gttaaaaccatcaccgaattatgtgaaatcgtcgatgctgtcctaaagatctgattgaatgggcccgcctaccttcattgcctacttctctaactaaattacttcgtattgcaaaaatagattttaaatgctctttgtgctttgtatttctcggaaatgagaggcttaatttttttttctattttacaccaacagatgaaggtgacagttataaacaaattatacatgattgaaatggatgaactagttataaccaaatttgatgatctatataaaaaatccaaacttacatacacatactttc

SEQ ID NO: 246252 - DNA, 340 bp, Gossypium hirsutum
aaaaaaaaaaaaaaaaataaaatacataaatttcactaaaaaaaaaataaaaaaaaaaaaaaaagaaaagaatctaatatcaacatgaatgattttaaaaacaaaataccttcattatcatttattccactacaaaaaaaaaatgaattcctttaatataaaaatatacgcgccccattcttaaattgatacattttttttccccctatcatttacaacattcattttttcaaatctcaccttaaataattttcagcgtccgaatcaaaaaatactggtgcctgtataatctacagactaccctttcttatcctgcttttcatcaataatcctttttcat

SEQ ID NO: 246253 - DNA, 195 bp, Gossypium hirsutum
ctatctataacacttccgttcgcattctttgtcccggatctctcttacaaattcacaccatcatacactcttcttttcttgtgagacaaataattcatccttatattactatgattgccgtacaccttttgcccaaattatattctcatttccacatatgatgttctttcgaaagcgtccattcctatctaacat

SEQ ID NO: 246254 - DNA, 372 bp, Gossypium hirsutum
gcgctttggcatacaagatcaactgctctgggtggaattgcttagagattaatgttattggattgcacagtcccagagtacatcatgatatgaatgtaacattaaatgcaacaaccccatgtatcgcattaacaaaaaccatagccctcatcttacaaatgattccatgttaaagcataaaggatgctccttgttctttatatcatgtaaagaacattcggttgtgcaatctcagctttgctggttttcagcatttggatcgcttattgctgctgtctttgtgatttacagactagtattgctgctttgttttttatcagtcgtttttaggagtcagattcgtttctctcacaaatgtaacttacaattgtt

SEQ ID NO: 246255 - DNA, 217 bp, Gossypium hirsutum
gtctcttttcatagcaactttaccataacatggcatcgcgtttaatcccttctttcaatcgggatggggttccataaaacaattcctccttctaaaaccacttcctgaatcttacttcccgagacaacctttaaagtgccttccaacacaatcaaaacatttactccttaagcccgatataatgacggaaaactcaccccgcttactctaacttaaa

SEQ ID NO: 246256 - DNA, 424 bp, Gossypium hirsutum
gaaccacattcctaccgtcaatggacctgactaacttgccctgcaggctcaacccaatatggaatcaaactccctattcattaatggctgcatcgctcctcctcgaacaagttcatgccatgttgcacatgctgagactcaaaagaagggccaactagataatgatggtaacactaatggagttccagttctgctttcatgcatgtgtggacaaacctgaacccttccctccatttatgcctttgcatctcattatttctgatgattcaattggtatgctttagaggttagggaggactaagctctattctctttgtcatatattactgtttgtttttcctttttcttcggtttttaaagcttaactgaatcaatgctttcatgaagctccttttcctacaaaatctttaggttttctataata

SEQ ID NO: 246257 - DNA, 337 bp, Gossypium hirsutum
cccacgcgtccggttttggaccttaagttgaaggctttcaagttttggaccttgggtgacatataatgaatatattatgtcccaaaagtaatttatttaagattgataatccttgaatatctttttataactacaattaatttttatatttgtattgtatatttaatttgggatattaagtgtgaaagagaaatttgagtgagttcattagtttagacaatttgagttgagctagttattaagcaattaaacttggtgtttataattatttattgtaattggaacaattgttatagataatttagataatttgagttgaattaattattgaattatt

SEQ ID NO: 246258 - DNA, 323 bp, Gossypium hirsutum
tcccatttcagacccacgcgtccaaaaattcgataaattgactcatcaaaccattttttaaaaccaaaacacaaaaaaaaaaaaaagaaatttttcaaaaaaaaaaaccccccatccatatacaaaaaaaatccttcaaacctacaccatcattcaaaccccccattcacccataccacctatccttctcttcccaacttccccattacttatcaaacccttttttacacctcccttcctccatcctaaccaaccccttcaaccccctcattcaatcctcacatttactatttcaacacaccatctctacttctctaaccttc

SEQ ID NO: 246259 - DNA, 297 bp, Gossypium hirsutum
cccacgcgtccaaaaaaaggtgatccatattgatgcatcaatgacaatccaccatccataggggtcggatctttttccacccggccctttttcaaaaactattaatcctagaaatcaggctactcaaaactactaggggccaaagtaaaagatatttcatattatgtgacagtatctccctataaaaatgtaaaaagccctgctttttatggcataaactctacatacttaaaaaaatcgaatataaaactaaaaatttaaagaatttaaaaaaaaaaattgaagaacacagtaaaa

SEQ ID NO: 246260 - DNA, 288 bp, Gossypium hirsutum
gcgtccggcgacatgaattctcggtccaaattttagcttcatttacaccacaacgctctaatagggaagaacatatgtatctgcatagatttctacaaaatgcatccattgctataaccattgcttattaaaaactaactaagacacaaaaaaaaaaaaaaatacaaacaaaaaataaccaaataaaaactaaaaaaaatgcataaaaccctgtctaaaaaaacataaaaccctatccatcattaatgcctttacatataattatttatttataattcaattaaaata

SEQ ID NO: 246261 - DNA, 301 bp, Gossypium hirsutum
gatggaacaatgctggtctcctgatcctgaatcaaggccatcatttaccgagataaggaagaggttgcgatccatgtctatgttgcttaaacccaagggacctcgtaatcaaccgaaacaaacaaggccataatgtcaacggtatgattcaacattatatgcaagcacctgttttgttattttaggtatacctgtaaaagcttaatgtcttcaacacaccatttgaagatgtgcatatgtagaggttgaacattgatagccaaatttttttcccctggtggataatatatcttcattgttt

SEQ ID NO: 246262 - DNA, 183 bp, Gossypium hirsutum
cccacgcgtccgtgaagttcttcccctataatgttttgaaaacagttacagaaacttatgtggagtaacatagtaatgtcatgtggatgtggttactgtattttttttggacttgacacaatgtcttggaatgctcagttgccaaatatgatatactgtctgtatcaaatcctttttttgttc

SEQ ID NO: 246263 - DNA, 162 bp, Gossypium hirsutum
gagccaacaaggcattggtgaacctggtaataggctgtaccttttttagccctactcggatgggttatcttgtaataatatgaagctaggttctgaagtctgcattatttcattgcaaaattttggtactctttgaatactacaaattctcctttcatattt

SEQ ID NO: 246264 - DNA, 378 bp, Gossypium hirsutum
  unsure (1)..(378): unsure at all n locations
ggacagggtaacacaaccggcgacggagccgaggagggaaagtgactgtgatggtaggcttcttttacaataggatttgtattcctctggcggtcatctcatagactgttgtagaattaaaatcttcaacttgctctttaatgtagcagtttagttagtttaactcttgttgagaggttgttggcatgccaatgaattaaacaacaggttgttaagacaacgatggttttgttgtaaaaggaggtggtatataagagcatgtggtcactacctctgaggctatcattttgtagtaacctataaaagtttgcagcttgtatctaannnaaaaaaannaaaatttaaaaaanaaaaaattatttttaaaacaaaaaataa

SEQ ID NO: 246265 - DNA, 261 bp, Gossypium hirsutum
aaaacagaaaaaactagtaataattttatgaaacgactttgattctaacctttaacgactctatggatatgtcaaaaacaccatgtaatgtattgacctccgtgggggttctctacttttctccattcacaaaaaaagaaacaatacaaagtagttgactacaaaagatacttaaaacccaaaggttggaaagtgattccatcatccaggtacattcatcataacccagtattttttcccaaacctcaagaattcgatcca

SEQ ID NO: 246266 - DNA, 422 bp, Gossypium hirsutum
cccacgcgtccgagcgtaaaggcactcctgctggtggtccacttgctatcccacataatcacgggttataccctacaacgcaaccaccgccaatggctgttggcctgccaccatccttcatccctaacggtgtagggatccacggcaatggccatgtcaatggagctgtcgggccttggttcaaccatgcttgatttctagggctacatgatgtatttctgccccatagagctggttaacatctctcatttctccatttgacgagatatcctattttttattttatttttctttttttggcatttttgctgctagaacttttggaagcacatctctgggaaagaaacaataaaaaggggggggggggcgcaaggcatcccattccccgttgaaggaaagggttgtgggtaagcatctgctga

SEQ ID NO: 246267 - DNA, 366 bp, Gossypium hirsutum
  unsure (1)..(366): unsure at all n locations
ctgactcgtgacatgttaaggcgggggactatatgccagtgggatacgggtgcagatagcggaggaggtactactgctctggatcctgaaacatgtataactgttctcaaagaggcgaacggcgctgtatatgagacactgttctgtttgaaaataactgcggtcattacttttatgttatcgatggaacacagttatgttaattttgggtcgaatgatggatatgatctgtgaaagtgcttggtgctctgtttccttccctgtaagggttgcaaaattgcaatgcatgccctttggttgtgtttgggaccagggcttttttgtcagattggaaatggaaaaaaggnagtgcaggtttattccaat

SEQ ID NO: 246268 - DNA, 152 bp, Gossypium hirsutum
tttctttctgtttgttcttcttctattattagtatttcttcaatgtttgtacggtaatggcgccgttggaatttagaaataaatacaattcagcagtatcaaagtgtaataacaaaatttaattataactcctttgacatctttatattggg

SEQ ID NO: 246269 - DNA, 225 bp, Gossypium hirsutum
ctctgaaaatgctttacaatctcattccaaagcaaagcatggcactcaagcgtaaaaagtgaaccggtttagggtcgttgtttgaattttgtttgtttctagaatggacaaatggacgtgactagttgaatgtagttaatgtagtagtacataattgccttatgtttgaagatggtcctttgcaaattaacaggtttataagatcttgtttgaaattgccagctt

SEQ ID NO: 246270 - DNA, 414 bp, Gossypium hirsutum
cgagtttatcttaatcgtgttaccattgattggtgaactctaattgtcaattgtttgatagatgaagggtataaagaagtcccttgtcgcagggttatatggttttcattttcaggatcaaattttgcacggggccgagacgaactaagaggacatatggtataggaaagaggcccctaagtttatagagtgtggattcgttggatttgtgatgaacaagttttgggttcttgagcattaagaatttaaaacagttgattattttgctgtctgtttgactgtgcttatgtctattaacctttgatacatctttagtggtctctaaaaagaatgcccgtgatgcaatttctaatctcctttggatacttttcagacttacattaaaacttcatgccaaaatttgatttgatgttg

SEQ ID NO: 246271 - DNA, 224 bp, Gossypium hirsutum
cctggattcatcatgtgactctatcgggtcataggttgctctcagagttaaactatatattatatattatactctttaaaattttaggctgtttgtggattgttgattgtataattgctttctttgattatgttgattttgttggccttccaacacgaatactcgccacaacaataccttgattaatctatataaatatgatgttttaggcccttaacgggatg

SEQ ID NO: 246272 - DNA, 339 bp, Gossypium hirsutum
tctaaatggactctagagtgttttgttagagaataaaccaattgtcgggcttttaaagcgttttaagttaatggttcctcactttactatgctacagtttttgtctataaatataattttgcttttgcaaaaaaaaaaaaaaaaaaaaaaaaaaaaaaaaaaaaaaaaaaaaaaaaaaaaaaaaaaaaaaaaaaaaaaaaaaaaaaaaaaaaaaaaaaaaaaaaaaaaaaaaaaaaaaaaaaaaaaaaaaaaaaaaaaaggggcgccccttttaaaggaccaaattttacttccccttgcttgcaaagtaaaactttttttttggggcccccaaattta

SEQ ID NO: 246273 - DNA, 408 bp, Gossypium hirsutum
agtgaagtagggtttagccaaagttagagggcatttaggtcatctatacagcccaccaccctcccctttttatatatagcttcgttgcttcggctacgatactttcctcaccggtttgccgcatattgtaattagtgggccctctagatttctgtttttccggccacagtgggccatctagattttgggcgcttttttttctctgtttttttactaatggcttaatagtacataagaccctaaattattccaaaataatcaatcgagtctctatgaactttttcatccaattacacctttgaacttataaaattgaccaaatcaatcctttgactgatattgaacattaatgatgtggcactggtatgctagaaaaaaactaaaaaaaatcaagaaaataaaatttat

SEQ ID NO: 246274 - DNA, 383 bp, Gossypium hirsutum
  unsure (1)..(383): unsure at all n locations
cccacgccgtccgatggggtataccggttgatgncgattttaaacggagntggagatcatgnaagatgaagtaactccgtttattagtcttgacggtaaggtgcctgcggagttgattatgaagtgttggccaagaagaactcttgggattctgcttcctttgattgctctcgcctgtttgctgttgagcttatctgccattgtgcataggaggaagagtaatgctgaattgttcccatggtcgaaactgcctacggatatccatgaaatatctccaaagcaagccaaactacaactatcaaacattgttacataaacattgtaaagatccaaatccactggctttataatatactattacaagtagctaggtggggcatact

SEQ ID NO: 246275 - DNA, 251 bp, Gossypium hirsutum
caggatttaggcgaaagataccatgtaagtatatgcaaagaattcaacagaaaaggaaatgattgaaatgaattgagaaaattgatttattattgtctattttgatacagtttatcaagtgtatttatatacaatttacaaagggaaaaaaaaaaaaaaaaaaaagaaaaaaaatataaaagataaaaaacttaaaaaacaaaagcatgcaaaattataggtcttatatagtgaaaactaaatttaatgcg

SEQ ID NO: 246276 - DNA, 243 bp, Gossypium hirsutum
gttttattcatcttttagtggcacaaacacaagcttacagcagaaaataagctggagcatcagaggtaggcactaaaacagagtggatcaacactgagtgaagaacaactcatttttagaagagttcatctcgttgtaaaccctaaataaaaaaaataaaaaaactgggacagcatatagaaactccatcttgaagaaaacgcaatgttattggctcacccaaatgtaacacaagcgggcggc

SEQ ID NO: 246277 - DNA, 207 bp, Gossypium hirsutum
  unsure (1)..(207): unsure at all n locations
tggctaagatggctatggcagacagtgatggatcgtcttggcagacgttagatatgcttattaatgaactatgcaacaagaagcaagacgtccgcctttaaaattgtgttcaattccacatcacacgtgagagtcgtgtacttctttcttttttgtgcgggtgtggtcctaatttcaataaatgaagatcagtgtttctatggcnna

SEQ ID NO: 246278 - DNA, 405 bp, Gossypium hirsutum
attttctctcaactgtctcgcagccgatcttcctaacctcccatcttccccatggctaccaaagaaaacttattctcttgctccgtgaaatgcgtaaaataaaacatgatttcatcctctttgaaagcacttaaaaaaaaacccttcaaaacattatttcatcctctttgaaagcacctaaagaaaagcccttctcttccacgagtccatcgaaaatatgaggttcaaagccctcttcgttgcgaaggttttaatacctgctgaaacaccatatgagacgctccgtgagctttagacctcgtgagctggattaattgagattctatacttgacgacatggatggaatattttttatttatgatgacaaaacatcaatagatggggattaagttaatttgcatatt

SEQ ID NO: 246279 - DNA, 321 bp, Gossypium hirsutum
  unsure (1)..(321): unsure at all n locations
gatgttacagcagtcgcaaaagccgccatcttagacattagttttctccttgtaagaatgtttttaacattgtcacatttaacattattgtaagaatattacttaatttattaattatatcatagatctttcgttgaatttgaagtcnactataaaaaaaaaaaaaaaaaaaaaaaaaaaaaaaaaaaaaaaaaaaaaaaaaaaaaaaaaaaaaaaaaaaaagaaaagaaaagaagacgacacagaaacaaagaagcttgggggtggatgttattgaagtactaatttttacttcgttggtctgcccagtgtgagcttttt

SEQ ID NO: 246280 - DNA, 407 bp, Gossypium hirsutum
caacacaaggtctggtggaccaaattctatgtcaagggaagtacaccataacaaagtagtaccggcatcgcctcatcaaaatgcatcaatgctaccaatggatggtaaccaggttggtttgaattcttatgggaatggaatcataaagacaaatgggtttcatgaaaagggtgtaaatgatgttgaaaagccaaataagtggagaaagcataggtactgttgctttggtttcaattcagggtaggtattagcctccacccctgaagaagactgaccttagatggatgaaagtaaggcatttcattttaataagacctaatagagtggattttgtaacatcttatacaataataaatcactcctagttttttcggtgatttttagtatatggtgtaatatgttgtaat

SEQ ID NO: 246281 - DNA, 410 bp, Gossypium hirsutum
ggaatcctgaaacctaatttacgtccaacaaccaaccaagcaactaaaacgatgaaaatgacatggattaaaactcaaccaattatgtcgagaacctcgacacgaaacttctaacaaacgaacgcctaccagaaaatcaacaaactaactcgaaatagcaggcgaaggaccaattttcttagtattcatgcctaagggaaagagatcaatgacaatttaacagaaaattcaagtgaaacagtcagagaaatcccaatttaaatacacaaatggaaaccaacagaacttcgtagaaacacaagactttatgataaaacttatacagaggtcttctaacaacgcattgaacaacttaggaccctcaattagttttggtaaccacatgtcgatcacaatcaaaaagaaaaatt

SEQ ID NO: 246282 - DNA, 441 bp, Gossypium hirsutum
  unsure (1)..(441): unsure at all n locations
cacgcccgtccgattggtctttggttttttggttgcgttnngtggtttgttcgaaggggttannagaagttatttagggaagggaaagagtggtttagggattgcatgggangagtanttaaggggtgggcggcacnagcagcccacccatcgggttattaccccgaacggtttgttacccgaatgaagnccgcctcggttattctggtacttgactcggagcgatggatgaaggctgaggaaagaaccgctgatctcattgcctgcattcagcccgattcaccctcggaaagtcgccgtaatgcggtcgcggattatgtacaacgcctaatcgctaaatgtttcccttgtcaggtgtttacttttgggtctgtgcccctcaagacgtatttgcctgatggggatattgacttaacagccttcagtaagaatcaaaatttg

SEQ ID NO: 246283 - DNA, 308 bp, Gossypium hirsutum
aaaaaaaaaaaaaaaaaaaaaaaaaaaaaataaaaaaaaagaataaaaaaatacaaaataaaaaggggtacatcaaaaaaaataaaccttaatgtctaccttaatgtgcggtttcttgtttttcgtgtaggactgtcccctgtaatggcctcctgaattatttctactgtttggttaccgaaaacatttatgtatcgcaactttttgaattgactgagtatacctatctgagcatcttgcttaataaataagaggcctaaatagctaatttttcaaaacattttcccactctgtatgcccttttggac

SEQ ID NO: 246284 - DNA, 330 bp, Gossypium hirsutum
cccacgcgtccgcccacgcgtccggtttgtttcaaggacccaccattcccgtgggctgcattatcattttccgcagttggtttccttgcactctcttatgtgtatgcaaaaagggacaaactttttagaaacaagaggaagcagttttgatagttaatgaagcaaagtctgtatcatttaaactcagtagaacacatttattcctgtgcgagtggtaagtcccaagattgaaacttagttttactccggactttctgaaaatttagggcaaattctgttttgttgattttcctaacttcataatctctcaactcatgctatattttcctt

SEQ ID NO: 246285 - DNA, 354 bp, Gossypium hirsutum
cccacgcgtccggagacggcaatgcaacgggttctaaaaaggcatatatcaacaggaaagccccctgatgttgctcaatggcggatagactacaatgaccgacccaatgcggaatttataatgaaatcaaagaaaaatgctgacttagtgatcaagtctattgacttcttccaaagataattaaacctgatgaaatattacattttgagtaatgggagatgaggggaaaatgtatgatttgagttggaaagatggcttcaataatagtgtcttgggacagtgttggaaattaaaattttatgtactttcactgttgtttcggtttaatgaaaacgacttgactgactatatgac

SEQ ID NO: 246286 - DNA, 129 bp, Gossypium hirsutum
ctcaattagttaagttgtgtagtttgtagcttgatgtttcagtactcatcaaagattctgtgacgcaagtctgtcatcttactttgctcctatctttagatgttatattttgctctggttttttgtggt

SEQ ID NO: 246287 - DNA, 441 bp, Gossypium hirsutum
  unsure (1)..(441): unsure at all n locations
aattncngggaaaaataatattaatatttaatagacatacatataaattatccaaaataatgaaataactttaaaaaatataccttctgctgctattttctacaaacttttgaattttaatgccatcttttttccgtcatgtaaataacaggtctatgaagctcatatgatatagaatcgtgtatatgatatatgcacaatattttcatttaaaagcacatttattatctctttttttccatcattataaataattttcccctttacatcttttcgaatctccatttttttcttttgcagttgagatgtttcagttttggattcaacttcttttcctttgcttgttactacaacttcaacagctcttttaacatataaacaaatatttcgttagtgtaatttttatatatcaatattaaaattacaatataatctaaatag

SEQ ID NO: 246288 - DNA, 406 bp, Gossypium hirsutum
ctgaatgattggttatttttataacttggattaaaaagattttaatcatcaaatccaagtgaatactaaatggaaatcttaagtgtgtaccttgtagcattgattttattagactgtaagttgcaatagtatttgctgaaattagagtaatttgaattttttatggaactttgttttgttgcttacagatttagtactttccaacaagctggttttgtatgatttggaaaatcaaaccattggattgagcacaattgtgagtatcatgttacttttcctttcacgattactttataaattttgtactaattagtataaatctcaatgtattattattgtttcttttgctttataagaggtgttatctctctacaattaccttagttagaaaatttattttatgaac

SEQ ID NO: 246289 - DNA, 175 bp, Gossypium hirsutum
aaaacactataacagattctgaccatgctctcctaccttcttgacctgtaagtccatttccacaagctcgaccgaaaaaaaaagacgctttcgaacttttttatctcatttcttttgtatctttgtgttgtgtacataaaaatttgcagaaatgaagtgtaaaaacattattctt

SEQ ID NO: 246290 - DNA, 299 bp, Gossypium hirsutum
cccttaccccctttcaaaacaatccagaagaccggagcccgtatcggaagctatgatgggtcatgatggaattgtttttgtttgctacaaactctggctcggggatgagaaaataatgttgtttttatgttaatgtgatactggtagcttgttattgcagtttttgaagccttgtccatatatatatattatgtcatgtgttgaacacttttgtttatttgaacacttttgtttatgatatttatatgttatatgatattcgagctttatattatattatatgaaaccctttcaatttt

SEQ ID NO: 246291 - DNA, 328 bp, Gossypium hirsutum
gccactcctacgcagaatactatggttgatttgattgataatatcacttatatctgcagggggacttgttgaaggactaattacatgtcttccaacatatactccatatgagactcgatacgaggtgtaatgctaggttaaatgatatgctttacgaagtactatacaacggtcaatgcgacagatgtagcagataatggaattcactgatgtcttcaataatctaatccatatgcagatctgcttgttcttgtgaaagtgcatttgaaagacaattgtaataccaatcattatgtgctcctatttgatccgttaaaagggcggccgc

SEQ ID NO: 246292 - DNA, 192 bp, Gossypium hirsutum
ccacgcgtccggaaaatcaaggaagatagatgcttagttctttgattaatcattaaagtttctgatgtgaacaaaaaaaacaaaaaaaaacagtgtatcggtggagttcttcgtttgtttgccatggttgatttgcaggattcctgcaagggagatatattagttatcataaaaatgtttatttcaatctct

SEQ ID NO: 246293 - DNA, 427 bp, Gossypium hirsutum
  unsure (1)..(427): unsure at all n locations
tcttatcagttctcgaaccagcaggcgtaccagctttcggggtcgtaatttatcttagagacagataagcanatattagagaattaaatgaatcaacaaatgctataatggcataattcaatataatttactttgtataaaaattaactgtttatatttataatgatataattatattaattccattcttatttaataaaaaaatttctacattttaatattattcataaaatatttttcctttattcttatacattataaatttttttttgaattaactattaaatattgtaaaaattataaataaattctaatatattttccttttccttaactaattttttatttttatttaattttaattgcagaatttgatgtaattataaaatattaattaataggatttaattttataaaattatttaat

SEQ ID NO: 246294 - DNA, 228 bp, Gossypium hirsutum
  unsure (1)..(228): unsure at all n locations
ctcatattattattatataaatcaaaagaaaattggtatagctttttctttcctgcagatgtcatttgcttatgaatttacattacatggcagctgctttcaaacagagccaacaaactactaagaatttacatttgcaccgcattcttttgaagatcaacattttacagatgtaacttttcataaaaagaaaaaagaaaaaaatttggaaattatgaatntaccana

SEQ ID NO: 246295 - DNA, 395 bp, Gossypium hirsutum
  unsure (1)..(395): unsure at all n locations
cccacgcgtccggaaggaacaaaaattatttagctattttggccgcaagattgccatgtagttactcaaagaaggcagatgctactgaggatttgcaagaagccatggaggtatttttctttggtcaaacatggagtgataagtaaagttttcttttgttgtttcaccactacggaaaattaaggtgctgttgtttttattattagactggaaataaggaggacattgaaataaggtagccaaaattttgtcacctgtcactaatatacttgtagagttcaatcaattcaacgccgcaagaaaatggaagcgtatgtataataactgtatttgtagtactgatttttgttatataataataaaaggaatatatgttcttttcccnnnnnaaaaaa

SEQ ID NO: 246296 - DNA, 272 bp, Gossypium hirsutum
aataaagggatcgatccttcgttgaggataggaagaagttgacatacatatgcgcgaatgtgtatgtatgtgtaggtttagggtattgacaatgaaacaatgtgggaaggtaatttaacttgtaataatagggtagtgagttgttgatctaaattatgtaaccggtacaatgcagtgtgaagatgactttcatgttgcgtaatgacccctttttcttacaactatgagactaattaattagctaatgataatttgggtgggggaagtttggt

SEQ ID NO: 246297 - DNA, 315 bp, Gossypium hirsutum
cccacgcgtccggagaaccctaatgcttgttctataatgtaatcaacaaaaaaatgttgggtcctctgttgatctccatgttcttctccttgttctgtttaatggctataaaagaaagtataatctacagtgaaactgtagaattttgccattttgtatttttctttaagatgttatatataattatatctaaaataatgatatagtttcaacttatttgttcccaaaaaaaaaaaaaaaataaaaatataaattataattatataataaaaataaaaaaaaaaaaataaatatattaatattttttttttatat

SEQ ID NO: 246298 - DNA, 307 bp, Gossypium hirsutum
gtggcacttatttaaccaatcaaaatggatgcccccacaaaataaatgacaatgcctggccaccatagcctcattttgcaaccttcaccacgaaatgttgttaaggtattcaatacatgatttgtttacaactaataaggtttgcactggtttttattgattattgtgtgggtgatttgctttaaactgtgattttatatatatacaaagtttagtagtatattggagaaaaaagcatgggaagatatttttactatcaaagcaaaatgattattgtggcccggcattgtaatttatttttgggggg

SEQ ID NO: 246299 - DNA, 132 bp, Gossypium hirsutum
aatatatgtagacataagttaaaatgacattgcgaatttgaaaattagctgcacccatttactcttttgttgttttccttgccctctgaacacatacttcattaagaaatgagaaaccctttcttctatctt

SEQ ID NO: 246300 - DNA, 372 bp, Gossypium hirsutum
cccacgcgtccggtttctttgcaggatgaagagctaagttttctgctgatggatatagtttagtcgtgacagttattgggaaaaagggtgagggtattgcaaaaataggctttagtttttcttcttcttcttcttcttcttcttttttttttttttttttcttggttgtattaaaatgggcgtagctttgctttcccttgcaactttctttacctattaaattagtgaggttgcagttcatgtttcatttggtgaccgagtaaatcttgttgttgacatatcttttttttcttctttctgctacttagaaagttgtaaaattttccttggttcctgcaagttttgtgatacttgattgcaagatcaattcat

SEQ ID NO: 246301 - DNA, 317 bp, Gossypium hirsutum
  unsure (1)..(317): unsure at all n locations
atttttattggcagggttctatcttttttgttatanaagggtgaaaattatattaaaaaaaaaaaaaaaaaaaaaaaaaaaaaaaaaaaaaaaaaaaaaagggaggaaaaaaaagaagaacaaaaaaataaaaacaagtgcaaacaacgggggcgtgccttttttagggcccctttttttttatctcttggccgtttttttaccacgttttttcgtggcacccccttgttgtaacccttctgaattttcaagtaactcgcctttcttaaccctgctgttttcatagcaaagaggcttgcaaaaagccccttttcaaa

SEQ ID NO: 246302 - DNA, 328 bp, Gossypium hirsutum
gttagatcatcatcagcctagagcttctcatcaaatggcaaacttgaattttagtgtagctgctgtattttgctttaagtttctttttcccttttcattgtagtcgaagacttctatcttgttttgatctttagttagaattacttttgaggtttggctgtaacttttaggcaattagtaatcgtacgctagattgtcgatcacctagagaggtggttgcgtcttttaacattctatgttttttttggcatatggatctcaagttcgtaggtaactttcaaggggtgccaatgcattataggttattgaacttcttattttatgcttt

SEQ ID NO: 246303 - DNA, 134 bp, Gossypium hirsutum
cccacgcgtccgataaaagtcaggcaaaagcaatacatgccaaagtgtaatgcctagcagtgcagcatagatgaaccgattaatgggaacacacaatcatttatttgacataatattacaatatattcataaca

SEQ ID NO: 246304 - DNA, 428 bp, Gossypium hirsutum
tggatttagtattcaagcaatacaagtagttccttcatgtctaaatgatgtggatcttaagacattgtctaagtagaacattttagggattgtttttgtttggattgattgaggtttttatagaattaatgaaaatgatgagtagctgtcctgtctctaaaaaaaaaaaataaatataaaaaaataaaaattaataaaaaataatttaaaaattttatttaatattttattttattatttttatttttttatttatattttaataattttttttttatttaaatatttatatttttattaatttttttttattaatatatattatttttttttttttgggtgtgtcgttttttaatttttttttatttttttttttgtgtgtttttattatattttttttttttaattttgttatataatttttatat

SEQ ID NO: 246305 - DNA, 155 bp, Gossypium hirsutum
cttccgtttgtcctacttttggggtgggttaaataacaccgtcgtagtcttaggtggccaatatttaccagattaaagtaatcattaaaattacatttattagctttaaaattatgagatggaatacgcatggtagtattatttatattaatttg

SEQ ID NO: 246306 - DNA, 422 bp, Gossypium hirsutum
gccacactcacacttttgttttcttgtctatatcagtagtggggctttgagtatcccttcagaataataacctctttaaagaaaaagcaatcaagtgtttggtaatttcaagtctttgggtctcttttgtctgtgattactacgcagcagaaatagttgtcagtagaaaccccaaaaaaaattattaaaggaaacaatatatggttgtgcatgcagtaactattacctaaagagcaaactttcttgggcacatggcggttccccttgtaattaatgaaaagctaaagacatattaccctctttttttatacattttacaaaagtcatcgtgaaacgggctatggttcaagttcaacattatgaacacgcagagcaaagtccctttaggaaaaggcaaattgttttgagagaaagaaaatgca

SEQ ID NO: 246307 - DNA, 299 bp, Gossypium hirsutum
cccacgcgtccgcggttttctactccttgtttgtcttttcttttgcaggtgtggtcagaggcgtggagggcagaaggtatgggcgatggtatgggacgcctgtttcaggtgttgtgcaccctgaggccagcacatggaggcagcggcgcaaggcttgtggagctagggttgaattgttgaaaagttttaagatagttgggttaggattttgacttgggcttgggtattgggttaatgggctgatctggtctgtattttgatttgtaaaaggacggtataaatggacattttgatttttt

SEQ ID NO: 246308 - DNA, 180 bp, Gossypium hirsutum
accacacaccatgcgagaaaggttcatatgaatactggcggaacgtttgacctatctgaaaatatgaatactatgggatgatcagatattatatgcacgcccgatggcaaagctgaagaggctcagataaatgcgtgtgctgtactctaagtatcatgtactttcttgggaatatcacat

SEQ ID NO: 246309 - DNA, 379 bp, Gossypium hirsutum
atccaccgatctgatgcagtgtactctggatgaagaaatgcctacaaaccggcttaattctcgttttcgtccctctactatgttgagatttgagatttcgacatagtagagagattaaaaccataatcatactgtcctcttatattagtaacaatgtccatgtcaatcgagttagaattcaattgacttttgtctgtaatatttgtacaaatttcattataaaaaaaatgttaacactatgttttgtacttatgaatagtgagagtaaacattgttcccaaaaataatgtaagtgaaaaatgtattttttatgctaattaaaaaaaaatattattattttttttattattttatttattattatatattattttttttt

SEQ ID NO: 246310 - DNA, 237 bp, Gossypium hirsutum
attgttcgaaggatggcaacatcttagaatgggcttcttctgagctattgtttggtcggtatttgctttattttaaaaatgtcaaaatttatcacttttttaacttattaaaaatttatttaaaaatatgtgacacactatatatgagtgtggatccaaatgaatcaataaatgcatgacaatcattcaagagttgaaaaaaaaaaaaaaaatttattacaaaaaaaaaaaattaag

SEQ ID NO: 246311 - DNA, 354 bp, Gossypium hirsutum
gtccagcttcaaggcagatatacttgacttttccagctgatagtactttcagagaagaggatgtgtcaaattatttcagcaaatatggacccgttcaagatgtgaggataccataccaacaaaagagaatgtttgggtttgttacttttatataccctgatacagtgaaaatgattttagcttaaagaaacccgcatttcggttgcgaatcttgggttttagtgaagccatacaaggagaaaggggaaatccctgacaagaagcaaccacaacaacaaaatggaaatggaaccctaactggttttgattctagagatccatttgatgttcaacttggtacaaggatgttttaca

SEQ ID NO: 246312 - DNA, 173 bp, Gossypium hirsutum
cccacgcgtccgcaaatctgttgtgatctcattctaaatggggccaacagtagctactttctaaaaattgtggaattttatggatccacgcttggtatgtagccaagcccaagaaaaaaggaacgaggggaagaatcgacaaggaatccataacaaaaaaaaaattgtgaatg

SEQ ID NO: 246313 - DNA, 147 bp, Gossypium hirsutum
gcagctgctaaagcgaaagcaactgtgtaatttactcagagtttaattcggttggtttattatcgtataactattcgtaaaagtttgtattaaaaaaatttggaatttataatactagtattttggtttcaatattttagggactgg

SEQ ID NO: 246314 - DNA, 278 bp, Gossypium hirsutum
cccacgcgtccgcccacgcgtccgcccacgcgtccgcccacgcgtccgcccacgcgtccgggccaagtttctgatatagtttttgacacagtacagggaaaagaaacaaaagctagataatttatggatgtatattgtatactactcttgtttcataagtaatttccaagcctgggagttccacaatggaaccctgcaacttggaaaataaacatgtttcaagacatgtttgagctccagtttcatgtttcccaaaagaaataaaatatttttttatg

SEQ ID NO: 246315 - DNA, 248 bp, Gossypium hirsutum
  unsure (1)..(248): unsure at all n locations
ccggnttggaagacccgggccgaccgacgcgtacgcccacgcgtctcgcccattcgtgacgttcatgtcttacgcccacacgtccagtcctcgcgggggggccatgtatctgatatagcatcagacacagtccaaggtaaataaacataagctagataatttatggatgtttttcgacaactaccctttgattataagtcacatccaagccttggagttccactatgaaacccttcaacttgaaaaat

SEQ ID NO: 246316 - DNA, 199 bp, Gossypium hirsutum
cccacccttccgaaaaataaaaaagggggttttagccttgctttttttccatcccaaaggggtggaaatgttgaacagggattactttatccagcctatcttttttgcctagtgtcggcttcacaatcggtggacagatacttgagcttccccctgagcagtacattctaaaagttggtgaccgagagctagctcaatg

SEQ ID NO: 246317 - DNA, 428 bp, Gossypium hirsutum
ggaagtcagctgaatcagaactaaacaaaggtaatggacgattaaagtactggttagacgaatgggtggatactcaagtcactaaaagtaaagaacttgaagatttggactcggtttggacctcgaatcgcaagcccatggaggaaaacagagctaaacatctaaggctgaagacttctccgagaccatatcattataattcggaaggattggagtctccggtagtaccagttccacgaagatcgtttcataagaagcagtgttctttgggagaagacaattcttttccaacctctcctgtagttccaccttacatggctgctacacaatcagcaagggcaaaagtaagatcattgagttcaccaaaggtaaagcctggaagttttgaaactcagtctgaaagctactcaccatataagaacaaactg

SEQ ID NO: 246318 - DNA, 347 bp, Gossypium hirsutum
  unsure (1)..(347): unsure at all n locations
agctgaagggcttgttcttactgcgtttattttctaaagctggaagttttatgtttagtttgttaaaaacatattatctatttcattttctgtttgtgttgtggcttggagacgaacgggaattcagcttcatttgaatgggcactaaaactatttgtgtcatggtttccgtgttcggatgttatggtatgctgtatcctatcctgtatttaacaggcaacgcttgcttgtgagctgagttacttttgtntaaataaaaaatttttaattttttatttattattttatttttttttttatatgtttattttatttttatattattttttattaatttttttttattt

SEQ ID NO: 246319 - DNA, 407 bp, Gossypium hirsutum
cccacgcgtccgatttccagccatgtcagccatcagtcaaagcttcgtcgcacaaacgacaacaatctcttctttgtcatgactggccgccatgaagtggaatactctctgcattctgatgaccaagaattcagaaagtacgcccagttagagtacatgccttttgataaccatcattctattgttggtgcttgcaatgggttgctttgtttgatggactttcagtttagtttcgatagcatcttcattttatgcaacccaattattcggaagtctattacgctaccaaaaccatgtttgtctagtttgccatataaaatatccgttgggtttggatttgattcagcgcaaaatgactataaacttctgaaaatcactaagaaaggtgtgctagacaagtatgttga

SEQ ID NO: 246320 - DNA, 245 bp, Gossypium hirsutum
cccacgcgtccgatttaatttttcattcatttttttccctgatgactgttattgttagtagacaagaggattacgaagaagagggtcttacactattgcatttaaatatgtgcttagaacatctgtttacttacaacaatttgtgcccaaatataaaaaaaaataataatataataaaaaataaataaaaaaattaaataatattttttttttttttttttattataaaaaaaaataaatatttg

SEQ ID NO: 246321 - DNA, 396 bp, Gossypium hirsutum
attttctgtgtccatcgatcatccatcatcggacggtcaaatgttgtagtggacgtttacggtgatccaagccaggagtaccatatagatggctcctatccccatcgttgctgtacaatctacaacacttctttagagagctcatcaaaggaaccaatggctgagatcaaaagaaaagtggacccctcaactcatgtgatgctgggcaaaaatgtgtttttgttgtgtcttaggccagggtttgacagtgcatttgcaatggccttagtcctcattcttgatcaaatgtttgatgatgctgatattgatgacgatgatgccaaagaggatcctactcatgttgcactggattctttctcttaactcgctttttactacttttttaaataactttaa

SEQ ID NO: 246322 - DNA, 250 bp, Gossypium hirsutum
gtaattattgggatatggaacaaagtaacttaatacaaagaaattttacatttgattttggaaaaaaaaaaaaaaaaaaaaaaaaaaaaaaaaaaaaaaaaaaaaaaaaaaaaaaaaaaaaaaaaaaaggggcggcaaaaaaaaaagaaaaaaggtgtccgttcaagagaatgcaaaataaaggggggtgtgttgtgaaagctaaatttaatttacggggcgccgaaataaaatgaattgactgggaaaa

SEQ ID NO: 246323 - DNA, 258 bp, Gossypium hirsutum
tcgacgcgttcgcccacgcgtacgatttatttaggcctcatcctagcttataggcattctgctttgaatgggatcacaccggttcctagtttccactatgagagattatacaagcatgttatcaggtagagtccaatactggagtacaagactgtcttgttcattaaggcagattatttgattgcgagatatttatacaaatgcattatccaccggatgtccatctttgaaaaggtataaatgtataatctttttatt

SEQ ID NO: 246324 - DNA, 292 bp, Gossypium hirsutum
cccacgcgtccgaaaaatcatggccaaagaaagaagtttatggtgttatctgctgaaaatctataattttacactataattgttggtctgtgattcctttttacactataattttagcgaatcaacaaattttgaatcttcatcttagaagttaatacgaaatttgctcatttaaattttcatcgcttatgattttgtgtaattagggaaaacagtaagatcaaaataatgaagaatatttttctttaactcaaattatatagaaagcccttggttttcaaaaaaaaaaaaa

SEQ ID NO: 246325 - DNA, 248 bp, Gossypium hirsutum
cacacgcgtgctcccactcgttcagacacgcatacggttcgatgcactgatggatgacatcaaggatgtctaggttcgttgtacatacatccataaacgtgtgtgttatgggatatgaacggtgacggaggaaaaacgccaactgagtatgctatgggacctgtaagtacaaaaaaaagatgattagggtaaggaggtactgaaataaatgtgtatgcctaaagctgatattacgagtcactatgaat

SEQ ID NO: 246326 - DNA, 369 bp, Gossypium hirsutum
ggagaaatctgacttagctaatggagatctaacaacactcgaaactccaaatgattggtttagggagatgcagcgaagattaaccaaagcttaggaccatttttattattctttctttgtgcaggcctccaaaactggaggcaatttgctgttgcaatgattctctgtaaggcccgagtattttccgtccttgacaggagaatttgggttaccaagtaacttttgtaaattttgtttctaagtccaaattaattcttaccgaggaggaatgtaggcatatttccactgcccctcaaaatttaagtctgttaggttggttattctttttgtagtccatgaataaaatgcagagaaatgccttcttttttt

SEQ ID NO: 246327 - DNA, 135 bp, Gossypium hirsutum
gctttggcgtctttttttcgaattaaaataaagattttcgtttggatctcacccttttagtcgttatcaaagaaaaaaaattatatgttcttcggattttctagggtttgtttctaagaattaggttgcatgatt

SEQ ID NO: 246328 - DNA, 196 bp, Gossypium hirsutum
  unsure (1)..(196): unsure at all n locations
aaaatttttaacggtgaggtaatttatatatcatatgcgtgactgtacaaatgttgggatggagagctgttgatgtagttgaggcctgagtttttgccctctcaatgtatgcttaatgacattttccccctaaatgcgcaattttctttgtgttnaaaaaaaaaaaaaaaaaaaaaaaaaaaaattttatttggct

SEQ ID NO: 246329 - DNA, 255 bp, Gossypium hirsutum
tccatctgggcgcggcccaagaccggttagacttgatctcgcgcatggatggctatgaagcaggagcatactacatcagcaggattgaaggtgatgttaaagaaaaaaaaaaaaaactcaatttatattcatatggtttttttacatgatgaattcttttattgtcaagtcttatcacaaggatggaaagaatgaaaaaaaaaaagggggggtggaagctgaattagacacatgacgggttagtttacaaagaaa

SEQ ID NO: 246330 - DNA, 314 bp, Gossypium hirsutum
  unsure (1)..(314): unsure at all n locations
cccacgcgtccgatgacaagatctaatttaggttgttatgcatgggggttcttggatgatacaaagaaatggcatgatttggaaaggttgattttatcaccttgtgcggttctacgttagatttactcagttggggaagtttttaacatattttgttctctcagatacagaaattattttcttacatctctttatttgttagagtgcctcaaatatgtagtacatgaaatcaatggaaattttctccattttgctgctcanaaaaaaaaaaaaaaaaaaaaaaaaaaataaaaaaaaaataaaaaaatataaaa

SEQ ID NO: 246331 - DNA, 325 bp, Gossypium hirsutum
  unsure (1)..(325): unsure at all n locations
ccctggtaaaggagaagcgccggtccttgctaacgagaggagagtcaggaggcaatatcacgattgaaggcggcgatccgtaagctataagcatactacgtatacggtatttgataactgtatctacatgtttttttaagtagcagctccggtatatcttacattattttatccaataaggtgtaatcatttaacgaaatgattacacatccatgtataaaaaattttagctgcatagtgcatataaataaaccatacgactcccttgttttgctaaanaaaaaaaaaaaaaaaaaaaaaaaaaaaaaattaatttattaataaa

SEQ ID NO: 246332 - DNA, 374 bp, Gossypium hirsutum
gctccttttgcaggctttcctcgatgatttttgggtgtaaatttaactaaaaacagattgcattttataggggtcttgatttgttgttgtctgagttcattgtgtaaatcccaatttttcctttagtattgaatgaggaacaatagtgttatagttaaaaaaaataaaaaaaaaaaaaaaaaaaaaaaaaaaaaaaaaaaaaaaaataaaataattatattatatataataaaaataattataaaaatttaattatattttaattatataatataatattttattatttattaatatttgggggcgcctttttttaaaatccaaatttattttccccgtttttacaattttatttttttttttttttttcccct

SEQ ID NO: 246333 - DNA, 408 bp, Gossypium hirsutum
cggacgcgtgggcggacgcgtgggtgcggatcattgagaattcggatgtaacattggacattgtgttcttcaactgtctagtggatgcttacggtaggatgggatgctttgcagagatgaagggggtgcttgaaatgatgaagcaaaaaggatataaacctgataagatcacatatagaaccatgattaaggcttactctatcagtggtatgactagccatgcaaaggagcttcgcaatcttgttgagtcagcggcagggtcatctttggggatgccaaagcctgatttccgacaaccagaatattacaggtcatattcctgagatctaatgtatattttcattttttcccccttatgttgtaaatgtacatcagcaccatgagtaaaatgaaatacagatcaccact

SEQ ID NO: 246334 - DNA, 378 bp, Gossypium hirsutum
agacacgtccgaggagaccattatgtcacctatgatgaattgctcgccacatcatcttgaggcggagctgaaggcgaatatcgagtcaaatcttaacttggattatatcatgccagtttggttggctagctatatttcaagctttacacccactgaaacatcctatgaggatacatataaaatgtgtaaactattgcttgccaatatccttaccaattcactcaatgaataacaaaatgaagtttttgtgaacacaattgtcatctcaagtttcgccaaagctagatcgatttatatacatatcgcttagctgaacttgtcatgttcttgattatacatagtgttatacaaaatcgcgttgaatgtggaaataataac

SEQ ID NO: 246335 - DNA, 227 bp, Gossypium hirsutum
  unsure (1)..(227): unsure at all n locations
cccacgcgtccgatgcattaaacttcctgtttacttcacaatcagttgaagttgattacaattagaaagaaaactattggcataagtaaatgaggagtaatcgtgagtttggtcttcctggttttaactcatggattgtccaaaaaaaaaaaaataaaaaatatattgttttttnataaaaaatatttaatttttaaaaataataatttaatatatttttttataat

SEQ ID NO: 246336 - DNA, 223 bp, Gossypium hirsutum
cggacgcgtgggcggacgcgtgggcggactcgtgggcggacgcgtgggcggacgcgtgggcggacgcgtgggcttctgtcaaaaaatctcatccatttctactgttaaaaactgatcattgtacgtgaaaatgaggtacatgtggcacaccacatgtaactatctggttattctataaaccatgttagtttttaaaaatagaaatgaatgaagtttttaatag

SEQ ID NO: 246337 - DNA, 195 bp, Gossypium hirsutum
cccacgcgtccgcggtaatacattcttagcttcatttttttttttttttttggtttaaatgaccttttggggttaacctgattcctctggggctgggccctccctgtgcgagtttttccaccgtctttaatgaaaatagagatggttttcatgctttaaaaaaaaaaaaaaatataaaaaaaaaaaaaaaataaa

SEQ ID NO: 246338 - DNA, 329 bp, Gossypium hirsutum
  unsure (1)..(329): unsure at all n locations
ccaaaagaggtgtgtccgattgtttctcggtcacttcaccacatacaaggacantgttggtactattttactatgtttcctacaatgacatattttacccgagtaggcaaatagttccaagaaattttccagcatgtaattataattttttttttggtagatctaggctccatagttttttgttgaaagctttgtagtcaggatgtaaagcattaattctaggttccatactttgtaatagttattgggctttcaaactgatgatttgcagctctaaaccctaaaatcagcgtgaggttattttttcaaataggaaagcatagaatttt

SEQ ID NO: 246339 - DNA, 228 bp, Gossypium hirsutum
gtacccttagcatggattttgctattttagtttattccctttccttaaaaagaaccaacaaaaagaattccatataaagaatatcccctatctttaatatgctacatgtttttattaatcgtttgggtctgtgataattcacaatcattatcgaatttaacaatattttgtatgatcgtattttgtttcgaaaaaagattatataatataaacttatttatatttaaa

SEQ ID NO: 246340 - DNA, 367 bp, Gossypium hirsutum
ccgtctgcctacaatctatttatcaagctatctaattaactgaaacttgatttaccccgcgtgcactcaacggttcatcttatctaccaacttacatatcttatttgaatgggacacacacattgaaacaaatgcttgtaatatctcaactctacacggaataaatccaacgtctcaaaactgggaattctgctgttagtcacatagacaccttgagcgctgctgtcaacatttggacccacttcccacgcatacatgtcagtcaaacgcctgatcaagctgttcttaaaatgaaaaattacttacgccttcacgcaggagagagacgctctgtgaaagatgggttatcttgtgcctaccaacgttt

SEQ ID NO: 246341 - DNA, 402 bp, Gossypium hirsutum
aaagaaatgaaccctctgctagggtttacatttttctctgccgctgcagtcaacaagggcgtgtcacggcgtccgtcgttgccccggtctccgattacgacacagaggggaaaaagccaaccacgtcaggtaaacccttctcttcttccctctttccctttttcgttttcgttttaatagattcgtataaaaaataacaaacaaacataaaaaaacgaacaagaacacgaagagagaaaaaagttatataaagtttaaatcaaccttttttatttctgtttctgccttttgatttttctcctgtgtgtaaaaaaaaaggggatacaaaaaaattggaatctttttacactgttttcttctagtttttgtccatttctatggtggttgtttcttttgcgccct

SEQ ID NO: 246342 - DNA, 301 bp, Gossypium hirsutum
atttttatacctcatggggggggggagataataatctgtttagatatagagtaagggactttgtttattagtttaaattttgttcctttcattttgttcctaattagtttaattaaggatcatcacgttgctgctaatatataacctgggaattaagagctgctttgcaatccaaaagggaatttgatttagaatctcagttcttctttgggatcaaaaaaaaaaaaatattaataaatatatattaattaaaaaattataaaaataaaaataaaaataataaattattaaaatataaatg

SEQ ID NO: 246343 - DNA, 406 bp, Gossypium hirsutum
cccacgcgtccggctagagtcttggttgccgctccatttcttgcctttgtaactactcatatattgtacctcaacttttatacctttgactatgggtggaacatgaaagtttgtgtagccattggggttgctcaacttctcatttgggcaatctgggttggtattactcaccatccttctcgctggaagttgtgggtggtggtggttggaggggggcttgcaatgcttttggagatctatgatttccctccttatcaaggattctttgatgctcatgctatttggcatgccacaactattccacttacctgcctgtggtggagcttcattagggacgacgcatagtttaggacttctatccttcttaagaaggctaattagtcccatgttaaactaacaatatttt

SEQ ID NO: 246344 - DNA, 259 bp, Gossypium hirsutum
cccacgcgtccgcaaaatcttctggatgaaagtacaatgatgtgtttcactgcaaaagccatatatatattcatcaaaaatcaaatggagtttcaatatactttttcatggtaatttatatcccttgtatatatgatgttatggagttaaattaccatgtaaaaaatctttggtcatggttctcaataattttatgcaatttttttccataaaaaaaaaaaaaaaatataaaaaaaaaatatatataattaaaattaat

SEQ ID NO: 246345 - DNA, 282 bp, Gossypium hirsutum
atcaagtagtccaataaccatgggactctttaaatgtctacattgatcctttcattagctggtgcaaaatgggctaatcatgaaagaaattttcactgcatttctgtagtggttgtggttccatgatttataggtttgaactaattgaacaacattccagtggcttttctgtttgttcagctctcctcgtgcataaccacagaaatatgattctaacgagcttctaccgattattgggataacaaaagattacagattttttaagaccttgagctaagtaca

SEQ ID NO: 246346 - DNA, 317 bp, Gossypium hirsutum
gtgatatgttacatgatatggggttaaaacttgtgtattctttggtagcttggactgtacatgtcgttccttcatcatcagaatttgtttaccaaaaaccaaattccctttgatacaactttgggaataatattacttggctagttgttcgatgacccaaatgttaaagttccaaaattacttatgatccgcttttccagacaaatatgattctaacaagcttctaccgattattgggataacaaaagattacagattttttaagaccttgagctaagtacattccaactgggtaggcagaaccaggtcaaggcaaa

SEQ ID NO: 246347 - DNA, 344 bp, Gossypium hirsutum
cccacgcgtccgcccacgcgtccgatcacgtttaatgtgcaaactatagaatgatataatgcctgctggttgctgcaaacagcggcaatccatgaagaaaagaaagagcgaagctcagccttagacatttgttttgcactcaatgggatgtatttgttgaaagtacctaaaatcactttcgtatattgttcttgttttcatatgtatttgtaaacaatttattcccccttgaaaaacctgttttaaagtcccaattttctttgtgcattaagtacatgtctgaccctgcctaaagtgtacccaaaaaccttaatcaagttgaaatagttaaaatgttttccccc

SEQ ID NO: 246348 - DNA, 413 bp, Gossypium hirsutum
atttttagaaataaatgttaggttaccttttctcttatataaaaaaaaaaaaaaaaaaaaagagaaaggtaaaaaaaaaggaggggggggccccccaaaacaatcaccaaacaaaacactaaaaaccaacgaaaatcatgcacccaaaaagccaattctatcgtaaaaacctgtgtctttttctaacacaatcaccccctggaagacacacttttggggcccccccccatggggccccacttttctcccccttccatcacccggctttacccttttttagggccccttaaaaaacttttcccccccctcttttctcaaaagcaaatagttgaaaccccctcgctaccccaccattaattccttggttaaaaacccctttttcccctcctcttttaattacacaaaaccccccc

SEQ ID NO: 246349 - DNA, 126 bp, Gossypium hirsutum
tgatgggctccatttctgatggaatttgtttgcttggaaacgtgactatagttatgtttcaacgtgcaccttttttttttttggtcatctgttgctctttttcaatgctgtggttaaatgacaatg

SEQ ID NO: 246350 - DNA, 356 bp, Gossypium hirsutum
accacgcgtaccgtaaaggttgggatttatgtattagcaccacaagcatgccattgcggcaggtgacatatactggggggtgtggaacatcaaatacttcactacactagcgtcgaaagcctaagggaaaatgctctaaaggtcccatcactttgcctacccttgtgaaacctccaatcaagttgccaccggttgttccttcaatagttaagccacccattgacctccctcctgttacagtccctacaattaacctccctccatagacggatccttcagtaactaagccaccaattgttaaaccctgcccaacaccaccaaccaaagacacttgcctcattgacacactgaaattg

SEQ ID NO: 246351 - DNA, 419 bp, Gossypium hirsutum
gaaacttaatgtaaaatagcttcaaataaatatataaatataaccattttaaaataagtcatgatagaagagtattatttaaaagtaaataaactaaatggactaagtatgaggttgaaatggaattaaaattcggggctttaattgcaaaatttacaaacaggttatagaggactgaaataagatgcgcttaaggcatgagggactgactgggcaatatccccgtcccttatgcgcgtcgttttttgcaggacccaattgaaacgggtttaaaaatgtcgcggtcaaaatataaaagggaaggacccgattgtacttcactgcagaagcgaaggggctgaacatgcaattagccccttctaacaaaacacgcaaatcctcagtaccactgggtcgggtcacgggtcaaacgccaaaac

SEQ ID NO: 246352 - DNA, 406 bp, Gossypium hirsutum
attatgaagtgctcaatgggcaacagttttgtaagttgaatcaaatccagagttccctgcagaacaggtatgaatttcaactctctattcttggctggaattgtagataagaagaggattcatgtaattttggtttttttataaacgattttctatttataacaaaatttctgaaaaaaaatgctacgtgtggttcaagcaacctataaattatctcttatctagggctataatcaagctgagttgatctcgaataataacaagctcaaactcaagcttgattaaaaacttctggctcattatttgtgattcaaacaatgatgctagaccgaatcggcctagttggatcgggaatcgatcgattattggtttaaagaaatgtaactgaattagttggatcgagatt

SEQ ID NO: 246353 - DNA, 252 bp, Gossypium hirsutum
attacgcatgggcgaacgcgtatgcggacttttgttcggaagcaatgacagactccttggcagacgcgtttacggacgcgtgggtgttattccctcatataaggcaccaaaagattgaacactgcctacttggctgagttataaaacaatgtacctgtatcaaaaacttaatgaaagaaaacattgccagctatcaaaacaatctatatatattatgttatgtaatggactaatgacgtttatcttgtatct

SEQ ID NO: 246354 - DNA, 240 bp, Gossypium hirsutum
gagaaacattgcatatgcaaataaagctaaacatgttttgtacttgtattgcagagaatatgtaaattaggtaagttattgtttgggagatgcggggcattgtgttctttaagctaactataatggttttgctttgaaactagtatatgtatgtctgcttaatgccaaaaaaaaaaaaaaaaaaaaaaaaagaaaaaaacaacaaaaaaaaaataaaaaaaaaaaaggctataataaaac

SEQ ID NO: 246355 - DNA, 203 bp, Gossypium hirsutum
  unsure (1)..(203): unsure at all n locations
atggagaggaagaaagggatgagacagaggttcacgagggcggattcatgganaagttccgtttcatggaggatggtgttgagtttcaagcactttaattaaattttcaactttgttcttaatttgtctgttgttttttttttaaaatttttgttgttatttgaaaataaaagtttgtactcataaaaataaattagtttatc

SEQ ID NO: 246356 - DNA, 416 bp, Gossypium hirsutum
caattccgaaggttatttccctctgcatggagcagaattgaacctctctacagtcaagtgcctcataaacgtcatgctggtgcttgtcttgactggtgcattcacatttttaacctttttctcttccatttggtttaagatttttgtatcgttatcttgttcctatatggtttcggctacttatttaaacatccgtccagaacctatcttcaactttgtcaaaactagtctttaaacctaatttcttccaagttattattatgcaacttcgataggtattcattcacaagcagcatcaagaagtgcttgccggaaaaacttcatttgacatgacttccagcatcatcgaaatgggaaggttcatgtcgggagcttaaatagcttgtggcctaacggagaatcttcggggcgtcaaa

SEQ ID NO: 246357 - DNA, 349 bp, Gossypium hirsutum
aaagctctttcgtaataaataatatacaatttattcaaaaaaaaaaaaaaaaaaaaaaaagggaaggaaaaaaaaggaggaaagagagaaaaaaaaaaaaaaaaaaaaaaaaaaaaaaaaaaaaaaaaaaaaaaaaaaaaaaaaaaaaaaaaaaaaaaaaaaaaaaaaaaaaaaaaaaaaaagggggggggcctttttaagggatcaaattttacttcccgttgtttgcaaaataaaaattttttattggggcccccaaaataaaatcccggggccggggtttaaaaacgcgggaacgggaaaaaccttgggtatcccaaattaaatccctttgaaacaattccccttt

SEQ ID NO: 246358 - DNA, 335 bp, Gossypium hirsutum
caatatagaatttctcgttttgctatatgatattatagtgtcttatactgtgaaaattggactattgacataagttacctgaagattagtgttcagcggcttacttaattgttgttattgcataagggcaacttatggtggattggattctttattcttgagtacaatattttgtattaacagtttcttttaacttgacagcttattttctaaaaaaaaaaaaaataaaaaagagaaaaataataaaattaaaaaaccgaaaaaggatataaaaaaaaatctacagaacaagaaagagatcggaactaccacacaaaagggggggcggttttaaa

SEQ ID NO: 246359 - DNA, 358 bp, Gossypium hirsutum
  unsure (1)..(358): unsure at all n locations
actacgcgtactgtttcgtatgaagggcttttgatggaaagataaacgctgccatcactggtggggtaatgaatagtctacatgagacaccatcctaatgtctattgccaagggatganacacatataagtactatcaagtcagagcatcataacgatctccttgctatggagcattttaattctggtttgtgttggaagtaaaaaatcaataatgtgatggatgttgtaaataaatgcagtgttctggctttggactgcctcttgaaatctggaagatttgtatgtaaagctaacaatgtacctgtatgagaactggtaaaaactgcaatcataaattcggtcttgcttgcttgtta

SEQ ID NO: 246360 - DNA, 397 bp, Gossypium hirsutum
gaaacttaaaaagattgaattagatcctcctatcatcatttcacaagctaacctgtaaattggcttatttaaccagtgagatacaacgtaatgacactcttgtgcgaaaaaaaaaaaaaaaaaaaaaaaaaaaaaaaaaaaaaaaaaaaaaaaaaacaagaaaagaaaatgatatatacagaataagaaaagaagctctactgaaattacgcacgattcttctagcaggtgaccctcacgtaacaactgatgttgtactggtgttgatataatttgcaaaccttacttttattggtccttttaaaatagaaaatggggttttattaattagatcgtctttaattaagatactcaaaatttatggaaggaaaattgtttaaaaagttattaaattttt

SEQ ID NO: 246361 - DNA, 402 bp, Gossypium hirsutum
  unsure (1)..(402): unsure at all n locations
gtggtatgtaagagtcgtgatgcttagatttagtcagtaaatgtaaaaaagacgatctagagggatgtctttggaaccgtggtagtagactcgttttgaaccctgttgtgcttttcgacattaacgtaggttataatgggagttttgactaaaaaaaaaaaaaaaaaaaaaaaaaaaaaaaaaaaaaaaaaaaaaaaaaaaaaaaaaaaaaattaaaataaatataaaaaaaaaaaaaaaaaatttataaaaaatttaattttttaatattaatattgatattttatttttgtncnaagtacttgatggacttggctttattttagttttgggattggtgctagtgctgctcttgagacggtataatacggggcttatgaatcaaagacggagtaccgatat

SEQ ID NO: 246362 - DNA, 242 bp, Gossypium hirsutum
cccacgcgtccggaaaaaagtgctaaagttgggctgtccttggcactcaagccctaggcagtggcggaactgtttttgttgtgtcagatggaaggtgggccttaattttgattggtttgaggactttggagaaaaataatgtactttcatggattataaaaataatgttattggcaaaaaaaaaaaaaaaaaaaaaaaaaaaaaaagataaaaataaaatgaaaaaatataaaaaaataaag

SEQ ID NO: 246363 - DNA, 405 bp, Gossypium hirsutum
gtgtttaatttgtcaaacaatcagttttacggaactttggatttttcgctcgggatgttcaaattcattgatgtatcgggtaactatttgcaaggcatagttaatgatggtgaaaggaatgctagtgttaacatgaattgcttttatcgaccaaaccagaggagtttggatgattgtaggatcttttataacgaaagagggttacattttgataattctggggcaccaccatcaactgctgcaaaatctagttctgggagccgaagatggatatttatcttggccggagtacttggtggacttggcttcattttagttttggtattggtgctagtgctgctcttgagacggtataatacggggcttatgaatcaaagacggagtaccgatataaggcctgttcgg

SEQ ID NO: 246364 - DNA, 114 bp, Gossypium hirsutum
cccacgcgtccgtgttaattatagttcataatacttgtagatatttgaaatcttagcgtaggtttttcgtttgaacatatttggatttctctccgacagctgatttgatacatc

SEQ ID NO: 246365 - DNA, 316 bp, Gossypium hirsutum
cccacgcgtccggaatgggtgaggaaacgcttgatacaatgaacctggatttgaatctgggtcctactcctgagacagggtcaggttcagtgtctaatgaaggtttgggctgggatgcttcggttaataatcggttcaataggattagagaagctgttcggcgtcgacggtggagatggcagcaggttcaatttcctgctgcaactcagaacctatctgtggaattggatcagctcatggtgaatttggacaatgcatgtacgttacaggcaggtgagggcagcatcattccagaggaaagaacgagtgatgtgcc

SEQ ID NO: 246366 - DNA, 330 bp, Gossypium hirsutum
ctccttttgtagagagttttaccatgtctgatatagaaactgcatgtacaaccagagcaaaggcttaaaaagggggggaaaagagaatagttgtccccatcccatcccaacatgtaaaggtttgtttagagaaggaaaagaagaagaaagtaatagaaaaatgatattgggtgctgtcgttgttgttgtcaatattataaggtagctgattcatctaatttaaaagttaatacttgggatagagttgttgtgagatttatatctctgttatttttcggacatgttcaccgtattcgtcctacgtaatctttatttgttttttttcttctt

SEQ ID NO: 246367 - DNA, 276 bp, Gossypium hirsutum
  unsure (1)..(276): unsure at all n locations
cccacacgttcgttcactctaccgttatattttaccaaccgccangcccaacccccgcctgctttaaaagaacgcggggcctcccaaaaacactccacaacccctcctaccttataaatgtatcactacaccacaaataaaatcacactgaacctaacactttttttttgttctacaaaactctatatacagatcacaaacttatttaatcatcaaatattcaaataaacccttgctcaaaacctcatgcacaatttatatataaaatacccctca

SEQ ID NO: 246368 - DNA, 363 bp, Gossypium hirsutum
cccacgcgtccgcccacgcgtccggtaattgtagattgttgatcagtttatgttctgcagcgatttcccttttgtacttgttgttatgcttacctcatttttagttcatattctaagcttttgatttgactttggattaaaaaaaaaaaaaaaaaaaaaaaaaaaaaaaaaaaaaaaaaaaaaaaaaaaaaaaaaaaaaaaaaaaaaaaaaaaaaaaaaaaaaaaaaaaaaaaaaaaaaaaaaaaaaaaaaaaaaaaaaaaaaaaaaaaaaaaaaaaaaaagggggggggcccttttaagggaccaaattttacttcccggtgtttgcaagtaaaaaatttttttttggggcccccaaaataa

SEQ ID NO: 246369 - DNA, 337 bp, Gossypium hirsutum
cccacgcgtccgacaagcttttcctgcatcttggaacagaagtgcaactatcctatgatgcgtggctcatgcacggataatcgggaaacacaaattataaacaagtgagcatctgaagtgttaattctactcaatagaaaaagatgataatcttgctagactgccatccgtttacaccccaatttgagtagagcttaaaaacaaagcaatacacatacgtgctaaaaccaatacctagttaagattttaggatctgctttttaattttacaccatcttagtgctatctgtgtttttttttaaaaaaatgcttgcgatagcataaattattaacaata

SEQ ID NO: 246370 - DNA, 292 bp, Gossypium hirsutum
aaatctttagattcggtctgtaataaataactattatgatccatgctagcacattgtaatagtgtataggcactccgtactgagaaaactcccgaaggttcctctttccatacttggaaatcttcatgcttcgcttctgccaaagggatctgtaaaatctttttggcagtttccgtatgaaaagtactgttcactacaaaaaaaaaaaaaaaaaaaaaaaaaaaacaataaaaaaaaaaaaaactaacatatataaatgcaaaacaaaggggaagcgcctactaaaaggggg

SEQ ID NO: 246371 - DNA, 389 bp, Gossypium hirsutum
tgaaaagatgggatcggattcttttcctaatcatcctagtccgtatggtatgaaaatttccgatgaacaacaaaagccttggctgcatgatgatgatagccatacctataaggcccttaagaatgaaaacttatctagaacttcaaatttgattcgagggtacaatgagtcctcgagtactgagagaggatcatctgcaaggatgggaaaggtggagaaacttcgtggagagtggaagacaaaaaaggagtgccctgttacagtaaaaaccgatctgaaaaacaaattgagagtctccaaacaagtcaatgttcaatatcctcaacaagaatttgcagcatatgcaccacatgctagattgcctttgtgacaaatcagactaaaggatc

SEQ ID NO: 246372 - DNA, 206 bp, Gossypium hirsutum
tgttcatccaaaattatggagaggtttcaattataaattcaagccagtggactatgtgcagattgaacgaaagcagcataataaggtgagaacattggaagagcacaaaaagttggtggagaagatcatataacgagacacataacgtagaaagaggatagaggcttctgtccttcattattgatgccgaaaaattgtgtctgatt

SEQ ID NO: 246373 - DNA, 430 bp, Gossypium hirsutum
  unsure (1)..(430): unsure at all n locations
cggacgcgtgggttatttttcaactactgctactagctgttacgaaccagatttcagcttggtcggctaaagctccctaaccaacctccttgaaaaggggcattacgggcagattattaagggtatttgtttcatggtcatggaaaggctgaactcaaatctgtaccttcagaactgttacataatgaaagagaatgagaggctgaagaagaaagcacaggttctcaaccaggagaatcaagcccttttatctgagctgaaacagaaactcttaaaggccaacaacaactcanagggaaaaaattcagcaaacactattcctgacctcaatctcagctccacttctaacccaaacccttttattctagcaaaacctgatccagcaggatacttatcatgacccccactttggcttttcttccttttcttt

SEQ ID NO: 246374 - DNA, 244 bp, Gossypium hirsutum
gtcctggcaatcctttgttgagcttcagcataccccgggacacttattaccaactacatgggtgactttatttttagagttgatgttgcccaactatgcacacaatcttaggccgatctcggcgtgtgtttgaacatgaaacctacgaatatgactactaccttgatgacaacatctatgtatactacaatgtgtgatgcatctataatgtagattgtacatttcttgataatcgtgagagagt

SEQ ID NO: 246375 - DNA, 416 bp, Gossypium hirsutum
  unsure (1)..(416): unsure at all n locations
caagaccttcgaaactaagcccccgaagtcaagcaaccatcgaatggacaatccctccatctgcctcactaggagtttacagaataagacattttggtgctgcgaaacggcttatgggatcgattcagcatttcacgggtacatccagtgctttcgtggtagcatgatgaaatagatcaaactatatgtatatacgtatggcagcttagatgtttcatttttgttgcgctttatatgtaacgagttgccattagattataacacgtcgaatctgtaatgctgaaactcttctagctcatttgatttccacttcaaaacatgaaatttccgatgaataaaaatctgtctttgatggttcanannaaaaaaaaaaaanaaaaaaaaaaaaaaaaaaaaaaaaggggccggccgtttta

SEQ ID NO: 246376 - DNA, 263 bp, Gossypium hirsutum
accgtggtggccggtagcagagctctagattaaaaaaaaaacctcctactgtttcatagttcagtgtttgtttgggaaggtttcgtttcacttaaacgtagtagctacaattgaggttttagtgtttgaggccacagggccattgaagaaccagtaaatgtagtaatttttgtgctcatgtaaaagaaatggcttatatcctagaaaatatagtgttaacactgttataaaattacactatgttgagataattttattttatt

SEQ ID NO: 246377 - DNA, 355 bp, Gossypium hirsutum
gtgaggaactacatgtttgggattgaacaaaatggtctttggttgcaaactgaaactatcggaagtgcttgtggtaaacggattggtgttaaccagaaccagttgaccaccagaagaattcgcggaagaaccaaaaataaaggctttctggcactctggtaaaatctctctctgtgtgggtagagatatttatacggccaataagagataatatatgtgggggggtgcatatggatgcacacaacgcggggatatatttggttatggggccccacacagattatagaaactctgatattgtgaaagagcatatagtaggctctctgaaagtttaaagagagctgactctcatact

SEQ ID NO: 246378 - DNA, 153 bp, Gossypium hirsutum
ctttagtggtcgcaatgtgggcaaacaagtggttgtaatcgccccgcaatgattttaatggaatatttgatacattgataatatataatttgatacattgaactatatttagacacattatcaataaataaattcataatatgaatttatgtt

SEQ ID NO: 246379 - DNA, 272 bp, Gossypium hirsutum
cccacgcgtccgcccacgcgtccgcttaaatatatcataatgttgcttttctttatacccgcccccctttttttgtgtcttgcccgtgttggtagttgatagctcactgtagctctggcagctatgttatcagaatggttttatgtggagacgttcttactagggaatggtattgttttagtattaattattattccagtggagctttgagctgcagcagcatgttgggggcgttaaatattacacaaaggaaaggaaaaactgtttttatg

SEQ ID NO: 246380 - DNA, 326 bp, Gossypium hirsutum
gggtgacttagggtttgtcttggtttaatattctgggcctatcgggccttgtaaatttgggtttaagttaaaattgggttttgggtcatggtttagttattggttttgggctgatggggttatgtagctgggcttgttgtttgggttttgggtcaaagcctgtaaatggactgtggttattttactatttatttatttattttatatttatatataggtttggggtttttaaaaaaaaaaagacttgtaatcaatgaatggaaagagcgaagggaaaaatacctggcacgtcagcaagttgaagcggtagattcaacatgaagcga

SEQ ID NO: 246381 - DNA, 415 bp, Gossypium hirsutum
  unsure (1)..(415): unsure at all n locations
gtaaaattaatgaaaaaaatccttttagaggcatgctccccaattagttgtttgctattgtttttcaatttttatctaggaagaagttacagcaggggagatcttatgaatgaaacattcatagtgaatcatttgcattcattcaacgagaaagatactgtacgtgaaatctctcctgcatagattttaccaagtgcaaagtctctatccttgccaagtcgaagctttagctttttcagtctcttctttcattcatgtgcatggttggaaaagaaagctgaagagtagggaactttgaaagacatgttgctgctggaagtttgttgcattgcagaccaatgctcaacacttcaaccgggaattgttagagacgatgaatgcgtcaggcanagtttttatgactcacactatagct

SEQ ID NO: 246382 - DNA, 359 bp, Gossypium hirsutum
acggttatatgccgcccgatacggttgtttttattgatgtaccccacttccacttgctatatagaaattgaagtattgaaggtgagtttgccaaaaaaaaaaaaaaaaataaaaaaaaaaaaaaaaaaaaaaaaaagagaaaataaagaaaaaagaaacaaaagaaaatttgcttataaatagacgtgctaaaataaacaataagggcaattgaataaaaaagaaagtgttggacaaacacaaaaatgtgaaataggaaaaaacctgggttgaccattataaaattcccttgcctaacaaccaccctatgtgcagtttgatttaatagcaaataggcctgaaaataaacgccctttcca

SEQ ID NO: 246383 - DNA, 362 bp, Gossypium hirsutum
  unsure (1)..(362): unsure at all n locations
cccacgcgtccggcactttggagaggtttgtttatcacattattcctataggatcagaggatggtgtttttgttagcataatttgagtcgtttctatgttgcacagtatagtgatgaaatgggtagtgagttggtactggaatcaattcttccttcgcctgtcttcggatgaaatcttcaactattccaactacctatgaattgagtattctttcaattgaaaagtgaaagtgagacttgatccgttggacgcaatattacaagtgttatattaggaattgggagatttaattnnaaaaaaaaaaaaaaaaaaaaaaaaaaaaaaaaaaaaaaataaattttaataaaataattaaaattaa

SEQ ID NO: 246384 - DNA, 365 bp, Gossypium hirsutum
gtcatcagcaagaaaattgggaacttgtggagcaatctgacagaggccgagaaacaggtttatcaggagaaagggatgaaggatgagagatacggaactgaaatgttggaatatcgatcttcccatgattcgacacctcaatagcatctgatgagttggtcgttaggaactaaatgatggggttgtcaaccctccctcgatgtttgtttgtttgttgttgttgctcaacttttcccttgaaaactttctgtatgaacagattatctgaaccctgcccctttgctcagactttgggtgatcagatggaagatctttgtaaaatgtggttatattaatctatcagaatgctagaagcttagaacagt

SEQ ID NO: 246385 - DNA, 285 bp, Gossypium hirsutum
cggacgcgtgggcttttatgtatcttattattattatttacttaattctcattggttgggacacgtcacttatgagttttaagtaattttattggttaggttattatttatttattttcttagataattttaaagagttttattagggttcaattactcttgtattttgcttataaataggcttgctttctacacattgagggggtggaataaaaagagagtatttgttttcttccaaatttgtgtgaggcaaattttttatagtagagtgattcttctcttgct

SEQ ID NO: 246386 - DNA, 514 bp, Gossypium hirsutum
  unsure (1)..(514): unsure at all n locations
cccacccgtccgaacacgtttaactccctttataatgcaacaagatagttgcgaccccaataaaanggccactcgtattttctaaactgagagggtggccatccaaaanactaacctatataactaaaatcttattatataacaaattttccaatcatagcaaccggagaatttttttttttttttttttttagaatttcttaaaatatatattttttctttaatactttttatatattatatttttcctatattctaacaccttttttattattttattctatacttttattattcatttatttaacatattttctaatttattataatcaattatattttttttttttttctttcacatattattttttttctattttttctaaatttacaatattattttttatttctttctttttattattttttttttctcttcattaatactctacttcattatttttaattattattttttattctttatattatatctcattttttctattatttt

SEQ ID NO: 246387 - DNA, 407 bp, Gossypium hirsutum
cccacgcgtccgaaaaggcattccagtattttgtgttatagtagtggttgggtattgttcgacaccaaaaaaagaaaaaaagaaaaaaaaaaaaaaaaaaaaaaaaaaaaaaaaaaaaaaaaaaaaaaaaaaaaaaaaaaaaaaaaaaaaaaaaaaaaaaaaaaaaaaaaaaaaaaaaaaaaaaaaaaaaagggggggccgtttaaaagaatcaaatttaacttacccttgaatgcaaaaaaaaatttttttaatagggccaccaaaataaaattaactggccgggttttaaaaactttgtaattggaaaaaccctgggttaaccaaattaaatcgctttgaaaaaaatcccctttttccaagttggggaaaaaaaaaaaaggcccgaaccaatcgcctttccaaaa

SEQ ID NO: 246388 - DNA, 343 bp, Gossypium hirsutum
gccacgcgtcgccacgcgtcggctaaacccaaagggtcaaactgtgcatttttggactggtgccgtggtcttgccccctaagtcagggtttggggctttcggatcatcgtgtgatggaaccccaaagatttgaagaagctaaagttgggattacagaattggaatcaaaagactacatagccgtcaagaggtgattgggagatgaccggcgagagggatcgaggtgagtgacaggggcgtcaaccatgatttcgtttgatgctcatgatgtggggttggtgctggggtggccaagaagacatgcatcaaactatcatgatctactagggagacctaagggctt

SEQ ID NO: 246389 - DNA, 166 bp, Gossypium hirsutum
cccacgcgtccggattcagtgtattattattcaaatgattgtgccatttttatgtctgccgtcataaaacatttgtcaggttatcggttccccatttcgggtgtgaatggttctatggttgatgtaaacgctatatgataatttgtaataataacagacatttgag

SEQ ID NO: 246390 - DNA, 327 bp, Gossypium hirsutum
aactcttgcatcgcaatatgaatgattttttaatttttgattcatgtaatgtatgtatgacaatataattaagagtattagggggtatagcaatggattctcatttcattggtttagttttttagtttttacattgtatgaaccggccaaggaaggttcaaaattacaaccaaatgttgctgttattcttacgttgtaactttctttattcttctgaatggatagtttcaagtttggaatcttttttaaaaaaaaaaaaaaaaaaaaaaaaaaaaaaaaaaaaaaaaaaaaaaaaaaaaaaaaaaaaaaaaaaaaaaaaaatataaa

SEQ ID NO: 246391 - DNA, 369 bp, Gossypium hirsutum
  unsure (1)..(369): unsure at all n locations
cccacgcgtccgcccacgcgtccgcttgattccatcgatgaacttcatatataccttattcgggattttggttttgctcaatagtgcctcctttgtgttcttgctgcacctcttgtattcattgttccttacgagaatgggaatgaaaacttcattgagattgccaagatggttcaagaaagctatataatggtgatctacgtttactcggacttttcgttaacatgcctgtatttgcttcatatttgaacatgtgtataagaatatgattattcaaatatatagaaaaagaacaaatgtacttgagaggttcttctattatagggaattgataaaattagtctctctattattaaatggatcnnanna

SEQ ID NO: 246392 - DNA, 338 bp, Gossypium hirsutum
  unsure (1)..(338): unsure at all n locations
gtttaataaagtttttttttttactttttcttttggttgtgtatagaggcattacgtttggcccttcacatcacattcttttcaactgttccccctctaataccactgtggtatagtggggtttgatacagagaatttacagaaaagaatagccttctttagcagcnnaaaaaaaaaaaaaaaaaaaaaaaaaaaaaaaaaaaaaaaaaaaaaaaaaaaaaaaaaaaaaaaaaaaaaaaaaaaaaaaaaaaagggnggnggntttaaaggataaaaaattaaaaacgcgtgcttgcaaaggaataaattttttttagttgtccttaaattaaattaaa

SEQ ID NO: 246393 - DNA, 213 bp, Gossypium hirsutum
  unsure (1)..(213): unsure at all n locations
aaaaaacatatacataccctaatttacacaacaaaaatttgtatttcaacantacctcacttcaatccacacctaaaatatcttcgcacacaaaaacataaaaaaaaccaaccaaaaaagcctctttttttaaaataaccctacttaccacccttctatttacacaaaaaactcctaataaaagccccctaaataaacctcactcccctcttt

SEQ ID NO: 246394 - DNA, 266 bp, Gossypium hirsutum
gcccggacggaccgggccgaccgacgcgtccgattgctacaaccctgcattttttgtggtggtacattcaattattccgaagttgatcaggggtggactccaattggtgacagcttgtgttctttatttgaaagattcaattcattacttaatggagtaaaaaaatgctaaaaaaaaaaaaaaaaaaaaaaaaaaaaaataataccaaaaaaaaaaaaaaaaaaaaaaaaaattaaaaaaattaatagatataatataaataaaaa

SEQ ID NO: 246395 - DNA, 332 bp, Gossypium hirsutum
  unsure (1)..(332): unsure at all n locations
catttttctttaggcatccttgttcaatcatttgtatttgattaatattcgaacatgagtattgagtatgagcatagcatgttttactgttnaaaaaaaaaaaaaaaaaaaaaaaaaaaaaaaaaaaaaaaaaaaaaaaaaaaaaaaaaaaaaaaaaaaaaaaaaaaaaaaaaaaaaaaaagggggaaaaaaaaaaaaaaaccaagngaaangaagaaaaacattaaaaaagattgttttaacattttttttaaccaaaattaaatcaaatcccccaaggatttgacaactgtggtgatgggaaaaacgtggggggaacaaaattaaattcc

SEQ ID NO: 246396 - DNA, 367 bp, Gossypium hirsutum
gcgaacttccatgctatatctcaagaggattaattttagattgcattttggtttatgtcgatgggcttggatctcggaaagttgactctttaaccatattttgttctttaactgagttttttcctttcttgaaggtagtatatatgtttgatctgaagttgtgaacagcatattgcaaaagcctgcagggttgcttggttggagttctatttgtgtgtttctggtacgattttgccggtatgattgtcagctttttcgaacaaactgactttagcttctcagacgaaaagatcaaattgggcggatgagggttcttttggccaatcataaattcgcttccccatctctaattccaccggagctagat

SEQ ID NO: 246397 - DNA, 301 bp, Gossypium hirsutum
ctttctctttggtcagtattgtagatcattaagatggagaagaaaggttttgtcagattgatgctactttttctgggtttttcttatcttcttctttcctgtgctgctgttcccagtactagaagcctcaaatcaaacaaggaactcccttcttctgtccaagatttacttgctcaggatgtaatggaattgagttatggagaattaaatgttgtaaattagattaacatgaaatggtattttgcctggattagctggatcttcattacttgataatttgaggttctaaacacacttaaac

SEQ ID NO: 246398 - DNA, 150 bp, Gossypium hirsutum
  unsure (1)..(150): unsure at all n locations
ccggcccgaccgacgcgtccgttaattacctcaactttcttgaaatggtcttaacattgagttatttaatttttactatggcgatgaaagggatgactatgcgttggacctagccctgngtgatgaataagctgcttacattacattagt

SEQ ID NO: 246399 - DNA, 317 bp, Gossypium hirsutum
aattagaaggcccgacccaacccacccgtccgaggacgcgtgggaaaaaaagaaattttatatttaaaaaaaaataacaaaaagacaaacgatgggataaaaaccaaagttacgtacgcatacatacaaaataaataactcttctataaagtaaacctaaattcaatgccctgccctttaatttacaacagtttcactcggaaaactccgacgttacccatctttaatagggttgcataacataaattttttgccaggtggtttaaaacttaagaagccggaaaccctcgcccttcccaaaattaactccttttaaa

SEQ ID NO: 246400 - DNA, 278 bp, Gossypium hirsutum
  unsure (1)..(278): unsure at all n locations
tggaattaaaggcccgacccaggcgtncggtncagggcttagcctggatcagcgaggttttatgttcatccgggtgacctgcacccttagccatgtatggcacgagagatacgaccaaactactttcattccatacctctcaccatatcatgatctctaacatgcatagcaattgtgtgaaatgcggatggactattaacaaaggacctttgatggactttacctgacgtactaagattgatcttgggtgtgctgcgcatgctgatgtactccattta

SEQ ID NO: 246401 - DNA, 162 bp, Gossypium hirsutum
  unsure (1)..(162): unsure at all n locations
acgnggaaccccatttggacaagacataaccggcgtaatttatctgcaccaacattagcagctgtagagaaatcaaatgaaaactcaagggctaccatttctgcaattcctggaaagctcgtaaacaagcatgaacttgacacggaaggagtcccacttttt

SEQ ID NO: 246402 - DNA, 311 bp, Gossypium hirsutum
cccacgcgttcgtccacgcgtgcgcgcgaagctagtgggtcaatgaagccgccggtccttgaacgagcgtgcttgaagcttggaaggcttgattcatgttcttgaagtgatcatgagcctaacagcattcacaacaccaactgtcaatctttcgtaatgtgcttaccttgataggtcatatacaacatgtatctaggtcattaagaagtattgtggcgctttagtgacgttttcaacatggcttacatgttttggatgattgtaagattacatatctgatggaaccgataggttacatacaacatgtatct

SEQ ID NO: 246403 - DNA, 420 bp, Gossypium hirsutum
atgcttatgaaaagaagaggtgttcattctggtttagtagtgaagggtgaagaaggtgccctctcggtgacaactaggttgctatcagcaagcacatcaaaaggacttcctgtgaaccattgttctggttttcgttcggtaggcatggaatcagcttgtgaagtggatggtgtataacgtccgagtttcaggcttgaggttaatgcaatggactatggttttgaaccaactgatactcccaagaaccaatagatcggtatcgaagaatatcgagttgggtttggcagctctttgaggtgaaaaagggccggcatatgaccggattgttttgaatgctggaattgtggatcatttactaggatgtgatggggcagaagacgttccttagctttggaaagagccaaagaagccattgacagt

SEQ ID NO: 246404 - DNA, 429 bp, Gossypium hirsutum
cccatacgaaaccatgttaacgtccgcttccattagccactcaacccccgacacaacgactgtcgccattctggagctggcacgggaaaaacgcctcttgacttttgccttacaggggtctctcaacccatcagcagtcatgggagtgagcttggaaagacagaaggcgataatggtaccatacatggaagcacatgtcccaaattaccacctctggatgcaagaccctgctctgcttcaagccaccggatcagagcccctctccctccaacaggaatacgatgtgcagttttgctggaaccaagaccctctcaagaaaactttcattattttggataatgagatggtccgagaaaagaatgttcatgtcaatcctcatgtcgaagccatggtcggagatgtgaatatctacatgaatgatttggatga

SEQ ID NO: 246405 - DNA, 370 bp, Gossypium hirsutum
cccacgcgtccgacataataagtcctaacgtgctagataaaatttaaaattagcggtactctttcggtcgttcaaactgaggccgtgggtgtgattggtttggatgataaatagaggtgagaaaaatagctcattatgtgcaaaaaaaaaaaaaaaaaaaaaaaaaaaaaaaaaaaaatttattataaaaaaaaaaaaaaaaaaaaaaaaaaataaaaaaaaaaaattaaaaaaataaaaatattttaaataataaattataaaaatatataaaaaaaaaaagggggggggccctttaaagggttcaaagtttttttcccgttgtttagaaattaaaattttttttataggggaccaaaaaaaaaataaa

SEQ ID NO: 246406 - DNA, 208 bp, Gossypium hirsutum
cggacgcgtccgtgaagcagaagtgtatcctactgatgattttagggggttaaatgactttggtatgattataaaaaagagaaagaaaagagaaaaaaaaaaaaaaagggcggacgaaaaaaaaagaaaaaaagcaaaaaaacacaagcatgcaaagacaaagctcttctatagagaaacctaaaattaaattcactggcgcgcgtaa

SEQ ID NO: 246407 - DNA, 450 bp, Gossypium hirsutum
gaaacaaatatgtttctgtttgggtttgtggacttaattgaaggctcggttagtgagacgattaagagggtgacgaaattacaggatgcacgtatacaagttgcgtatgagaagttgtttaccgatactgcgatcgagcaatacatctcaatggacttgggtagggaggttgacctcaatatgctaaagaaaatgtccaccgaatatgaagtggcgaagagaaaagccattgaagaggctggaaaggtggtggatgtccagaacataaagcatatatcagaaaacgaggaacctctaagcgaaatagttgaaaagatagatgcgagctggaaaaaccaaagagaagcattttatcagcggaccggattgacccctcaaaatcctgcagaaccacagcagctgcagttacaactgaaggaaggcgatgcagagaacaacgatgccgatgaa

SEQ ID NO: 246408 - DNA, 318 bp, Gossypium hirsutum
  unsure (1)..(318): unsure at all n locations
atattgttgacgaatttgacaagatcaactgaaacagcagtgaatttttctacacagacggtttgcttcaatggatggaggtgttgaggcaatagctagtcctaaaagaaagaaacctcgtactgggaaataggctttgtttttagatagctctttatcttggttttggtttggaattgacaagtcgatggtgttatcgtttcaaataaaaataataaatatttaatatatgaaaaataaaattaattaaattggacttatttttaaaatttaattattgaaaaaaataatatattaaangggggcggccgttttaga

SEQ ID NO: 246409 - DNA, 371 bp, Gossypium hirsutum
  unsure (1)..(371): unsure at all n locations
aatggcttgattataatgttaaagttagtttatgtggctatgacttaaacttattttggaagtatcaaatgtggtataatgtgtgctggatgattgtataatatggcttggtgatgaggtaaaatgatggatatgtatttggttgtaaattggctttataggttcggatccaaacggctagaaataatgcttatgattacatagatttgatcatgatatatgttcatgtggggaattaagtttcatggtacttatatgaggtgtgttggctatatgaatcaatttggaaactatttataaagtgttgtgtattcggttnaaaaaaataaaaaattatttaaaaaaaaaattttntttttttttttttataa

SEQ ID NO: 246410 - DNA, 262 bp, Gossypium hirsutum
  unsure (1)..(262): unsure at all n locations
ggtgttttagcttgtgtggtcggcatggtttttctgacccctttcacaccattcgttttttatgtaaagagtgtaaatttaggtgtcatcctattctataggcatttttcttagatgggattattccagttcagggttcccactacgtaagattatacagctatgttattaggtatagtccaatacgagactctttcgttaaggcccanaanaaaaaagaacaaacacaaactaaaaaacaagtataactgcacaaaaaata

SEQ ID NO: 246411 - DNA, 361 bp, Gossypium hirsutum
  unsure (1)..(361): unsure at all n locations
ttttgagtggcaatatgagtgatcacacgtacggccacccctatcctcctccaggtggttataggtataatcaagggccacctccaccagtaatggcacctcctcagtattatggtgccccaccaccgccacccaggagagaaccaggttttcttgagggattccttgcagctttatgttgttgctgtctcttggatgattgctgctgcgacccgtctgtgataattgtggactagggatcttacatcaccttactgtttatctaaagctttgacaacagtatgatttcatcacatgtatttatattttgcagatggagttgacaaatccatttatgtattgtaatatgtgaagcttagnt

SEQ ID NO: 246412 - DNA, 506 bp, Gossypium hirsutum
gcctgtctccactgctgtcgagtgttcttgtgattcgtgatctgccttcttattttctgcggcttgtgtttatctgagtggctgggtgtctcttaaaacttttcattgtcttactgatccttcaaattgttatttaatattatctttcttttgatttttttcaatattatctatatttttttttttatcttataaaacttttaaatctaatacatttcttattttctaaatatgaatatttatttttctatatttttttcttttcttttttatatttttattcactttttttttttattaaattttatttccttttttaattttttactcttcatatttctatatattatttttttatatttttttttttatttttctatatattattttttattatttattattcttttttctaaattttttttttttttttaatcttattttattataccttttttaaattcttttttatatatcttttattttttctatttaattatcttttc

SEQ ID NO: 246413 - DNA, 243 bp, Gossypium hirsutum
aagaaatcaccagttctgagctctcgagttgtgaattatgattcttgtggtctagttgtcttctgatgaatttgcctttgaacaatttaaagcgcctttacagtttcctttttctttttttcttatcttaccgccttcgatgaaaactggagaatttcattaaagccatgggaggtatttaggtctggtataatttgatattgggttgtcatttttagactaataagcatgacaattcgagcc

SEQ ID NO: 246414 - DNA, 410 bp, Gossypium hirsutum
  unsure (1)..(410): unsure at all n locations
ccgtccgcctcacgccgnttccgcccacgccgnntccggttgctcatatgtgtgacctttngnnctttcnnatatctcananntcgcgcctagtacntnnttcaaaggattgtgtggtgagtaannnagaagaaacccctttttcngnagttcccgagcattatcntnncgattcnncgattgggtgaggggattgatttctntnncagtgtcnnaatgggnngattttacctnnccgtctcnngtggtaatacccccctgttcaatcaaatagcttcnntccgtcgggaccaacacnnctcgagttagcaaggggtcactgtggaaaggatcanccaatgtcntggttcttgaaacccatctcccgatgtggaaaaaaganaagaagctcctcgaacctggttccgaga

SEQ ID NO: 246415 - DNA, 316 bp, Gossypium hirsutum
gaatctatcacttgaggcaccactcaccactttctcctctccccctgaaaacaacagcaaaaaaagccccttttattatccttttatattcttccatatctttcagatcatggagatcacggaaaagctgctaaagttgaagtaccccataatcgtaatactcactctttcgcttaccctttcagccctcatcatttttgcaccttcttttctcaccattttagcctacttttggcctcttttgctttccactgccctcttcctagttgctgtcatcttctttgggaaaacgtctgctcataccgccgcgtctgac

SEQ ID NO: 246416 - DNA, 337 bp, Gossypium hirsutum
gttcgtttatcgtttgcattaattcgtcgaccggcttgtttgctctgctttttcttttagtagtctgggtttttatttttcttatatttggtttttgtttttgtttttgttttttttgctttctattcttggtgcctttgaaacctttagaacaatttgcaagattccaatgtttttttttgcttttaaaaaaaaaaacaaaaaaaataaaaaaaaaaaaaaactaatttaaaactattatagatatacactgacctattactaaaagactgacatctactttgggaaaaacatttgctcataccgtcatgtatgactccgatccggctgataaggt

SEQ ID NO: 246417 - DNA, 451 bp, Gossypium hirsutum
aaggtattaaacgggcaagcacttgagcaaggacagtgtcagcaacagcatcaaaagatgatgaggatgggaggggatgaaatcaacgggggattgcttgatcaaacggtgcaggttgagttatcaaatatgcatagtagatcagataatggttttggagcgttggattggcaagggaacgaagatcaagggttgtttgatcttccgaacgatgttgataagacatattggagtcaaactcagtggactgatcaagatcaccatggcctctatctcccgtaaattacctctgacccttttttatcccacttaaattatttattaactacaaaattgaaatagagattaaaaaaatctcataaaatcaaagcttaaggcaggatttaactgttattttcgttattaattatgataatttcgtccaagtgtgtactttatacagttatatggg

SEQ ID NO: 246418 - DNA, 308 bp, Gossypium hirsutum
  unsure (1)..(308): unsure at all n locations
cggaanntaccgggacgacgccacgcgtcgcggtanaaagatannaacattaggattcaaggctagcgannnatgnnaatgtgtttataggcgcccttctgaccctgagggactggcgcctgaatgcgttcgtgtcgtgcacgaccnntgaaagtnncagcatgnnaatattcagggggattttcgaccgccctatgtccgnngctgaaaggtnattggttgannttagcatcannatccattgnntttaattctgggtcctcaaatgccttgaaaagggattctttttttccttnctcccaacctat

SEQ ID NO: 246419 - DNA, 341 bp, Gossypium hirsutum
aaaaaaaaaaaaaaaaaaaaaaaaaaaaattatgttataaaataaaaaaaaaaaaaaaattaaggaggggtgaataagaagggggggaatggtatataatataaaaataaaaaaaattaaatgagacaaagggggggaacgttttaaatggtaaaacttttggagtttttcaatttaataactttgtattttattcgggtttccaaaattaaatgtattggcgaatatttaaaaactgatggactttaaaaacatttgcgtagcctaaattattaattttacaaacaattctccttttcattaagggcttaagatgaagaggttacgcgcaaattgacctt

SEQ ID NO: 246420 - DNA, 148 bp, Gossypium hirsutum
  unsure (1)..(148): unsure at all n locations
cccacgcgtgcgtntatattaatctatgtgaatccaataatcgctaactgttcgatcctagagtgagcaggttcgcttacctggagcgagaggcctgtgacaagcttctttatgactcattcccatacatggaaatcgagaatgggat

SEQ ID NO: 246421 - DNA, 369 bp, Gossypium hirsutum
  unsure (1)..(369): unsure at all n locations
gaggagaatagtaacacagtgaattgcactaacttgtgggattttgacaagttggtaaacatgctggtcatccacaagagagattttgcatggaatttggttcttggtgtcaaaaaaggcttttataaatctggctattactttgttgtccacaattgcaaattagaatatttgaattcagtttgtttcatagattcatctgcttcatgttttttttttttacgggctatggagactaaattttttgaggtccatagttgtccctctcaatgatattacttttagagttttttctctcctaaaaaaaaactnantanaaaaaaataattaaaaaatataatttatataaaaataataaaaaagggcggc

SEQ ID NO: 246422 - DNA, 105 bp, Gossypium hirsutum
  unsure (1)..(105): unsure at all n locations
aattacccgggtgcgacgccgagcgcgtccgnngaagcatgtcggcacaaggtaccataggaagtatgtctctttctaactgnngttggcccaattgaaaatcat

SEQ ID NO: 246423 - DNA, 148 bp, Gossypium hirsutum
gccacgcgtgtgtctatattaatctatgtgaaccgaatagtatctacctgttcgctcctagagtgagcatgttcgtttacgaggagctcgcctccggtgacgagcttctttctgactcattcccctacaaagtaatcgagaatgggat

SEQ ID NO: 246424 - DNA, 372 bp, Gossypium hirsutum
  unsure (1)..(372): unsure at all n locations
caangttgaccagaacctcatacatgatcttcctctccgtcaaatcagtaagattatttgtgcggtgtttttcacagaagaagaggctcaacatgtttacattaactgcgctgtttcattcaataaatatttttacaacattcaaccaactatttaaaaatattctgtaacagtttcttttaaattttccccatgctgcaatcacttactttgatttctacttatttaaatactccctaattagccaatgtatcaagcatgtgttcaagcacccttttaaaacattctgttgccattgttggaagtacaattataacatagatctttgtgttttttatccaaatgttaacaatacattttaaataattgttt

SEQ ID NO: 246425 - DNA, 431 bp, Gossypium hirsutum
ggatgggataggaatgaatgatggcagttaatatccttataaaaaaaaggaaaatatagaggagagctgtttttactgaagaagcgcatgccatctcaagatcttatatgcggcattagcggatttataggtggaaaccgttcaacttatttaagtacatggacaatagttcatataatttcttttttatatttacattatagtcttttcttcattcgaatgtgctacatgatgatttatttttatgtttctatacttttacaatttgttgcctttttttatattttacattttttgactttcttttcttagattaatttttttgttgtataattaactatatttatcatatttttgactcttttactactttgcctgtttatcttcaatttttttagaaaaatttttttgaatttaccaatttttttttt

SEQ ID NO: 246426 - DNA, 154 bp, Gossypium hirsutum
cccacgcgtgcgtttatattaacctctgtgagctcaattttatctaactgatccatcctagagtgagcatggtcgattacctgtagcgagccgcctgtgacaagcttctttatgactcattcccctacatggacatccagaacgggatactttt

SEQ ID NO: 246427 - DNA, 446 bp, Gossypium hirsutum
cccacgcgtccgcttccatgtatctctgcactcttcttgcgatatctattcccgtcgactccttgctttcgtgaaagtatttattcttggaagaccagatcatcaacaaagcataacaaaaaagtcgacagtgttcatcggaaccactcgtaaacactcaggttagccattcccatatattttgactcatataagtaatgacccaagagagccgtaaatttatccagacctctattgatatagggtatgtaaagcccaaaatctgcccgggctcataccagcaaacccctccacttgcccacttgtgccgttgccccatgtgcgcaaccactcaacctcgcacgcctctgctccgcgccagcctctacgcatgcccatcaccgtctgcaccccatgcctctgtcacctccatcgtgcccatcccatgcaaagaaacaaaacagaaa

SEQ ID NO: 246428 - DNA, 337 bp, Gossypium hirsutum
  unsure (1)..(337): unsure at all n locations
acgcgtcacgcgtacgcgtgacattcacgcggtacgcccattcgtttcgaccagcgcgttcagttgaccctgtgagctgtggtaaagcaaggtggcgcagggcacttggccatacagaccatagtatttagtaggaccagcaaaaagaaaccagagtaagaaagaagggagccaaagaaaggaagggtgaagcccaaaaatagaagatgaacacaaagaaagaagcgtgatacccatagaagggaagattgaacaaactgaaagatganatgccttaaaaacaaaaaataactggaaaaaacccttactttaacccaactaaataaatattgggcgg

SEQ ID NO: 246429 - DNA, 317 bp, Gossypium hirsutum
  unsure (1)..(317): unsure at all n locations
tacgagaatgtactcaaattgttaagaccataaatgaaggaatgattgaggaaggcatatttggttgtattcttagtgttgggttacaggcttcacattgtaccatacgaagatcatataatttttctgctatcttattgttttgcactcagtggtgaaatagctnaaaaaaaaattttttaaaaaaaaaaatataaaaaaaaaaataaaaaattaaaatattatattaaatattaattttttttataattaaaaattatttaataatttattnttttttttattatttaaaatttttttttttttttttatatttt

SEQ ID NO: 246430 - DNA, 402 bp, Gossypium hirsutum
aattttcttgtatatttctattgtattagtaacattattgtctgtaatatgttgaccgatgagagtcttgtacccactctgaatggtatattcgctagttttgtcgcaagcccatatgagtctatcatcctccaccaatcgagagaggcacgcatatgatttctgtagtatcttcccttgagaaaacattgcccgttttggaagccatcaatctatcgatactgagatttcagatccagagccgactcttcaatcgactccatcttccagcatctttctagccgcaaatgtaacaatctgtttttagtcaaatcagaacagcagttttagaaccataaattcgaggttgaaatatttattttattattaatttgaagtctacaacatgatagtatgattgtg

SEQ ID NO: 246431 - DNA, 409 bp, Gossypium hirsutum
gtgggctaggaattgcaaaacataccggatatctacttgcatgttcagacaaacaacgaagatgccatcaacttgtataaggaatttggatttgaaatcacagagacaatcaagaagtattacacaaatattgaccctcccagactgctttgttctcacaagcgaagaaataacaattaaaagctggtaatgttatctagaggaattggttattgttatcttagtgaatttgatcaattcctacacttttgggaattattttgacgataaggatgctgtgatgcatgaatgacatgagatatggcgttaatgatgccagttatgattggtttttatcttttgagctgaaattttgttagtcttgttcaacactttcgttggtcaatgtgaccattgccagttaatgtca

SEQ ID NO: 246432 - DNA, 305 bp, Gossypium hirsutum
  unsure (1)..(305): unsure at all n locations
agacttatagnagatcttatttaaccgaatttaacnacccgcccggggcacccaacacaaggttaattttataagccatcaggccatttaaaacacactttaaaaccacatattcttctaaaccaatattaatatcctatctatcaccttttatttataaaacaatttcttaccatatatcttggttaacaacaaaattttttttcattcccatcccctatcatcattatcattaattccaaattttttcaattacatgcccttaaaaaatggtatattaatcactcactctaattcacttcttt

SEQ ID NO: 246433 - DNA, 329 bp, Gossypium hirsutum
agaagggaatggatcagaccctactgccaagaaaaaggctggtgggttgttgcaaaagaaagggaagtggaagtcggtttcggttggaatgatggagaagaatatgttgaaaatatgcacttattagagtttgcagtttgagtagaagaatgagtagcatttttcttgattgaactctttaagttggagagatttgttaggtcaaaagtacaattggatacggtggttgtaattttcagtctgaattgggaatcatgggcttatgatgatatcttggtatgcactctagaatcttttattcctgttaatatatagaatagttccctttt

SEQ ID NO: 246434 - DNA, 239 bp, Gossypium hirsutum
gaagaaactaagagcatgcaaacaccggaggttgggattgcggacgatgatggttccgcacggccccttgttccgcaggttggcccaacttgatggatcattcaggttagtttgattttgtacatttgggccaataaattgttacctttttactcgaatctctattaatgaccatgtcttggctgctttttaacattgtatcatttgtacatgattttaagttgtcaacaatagttgtt

SEQ ID NO: 246435 - DNA, 268 bp, Gossypium hirsutum
  unsure (1)..(268): unsure at all n locations
cacctccacccgagaaggtgtccatattgggtatcccacttctcgcagaagagaaaagcgaggtgatcttgttgaaattcttgagggcaanagatttcaaggtgaaggacgcattcactatgatcaaaaacactgtcagctggcgaaaagaattcggaatcgaaaccttgctcgatgaagatctagggaacgaactagaaaaggttgtttttatgcaggggttcgataaagaaggtcatcccgtctgttacaacgtctatggagaatt

SEQ ID NO: 246436 - DNA, 218 bp, Gossypium hirsutum
ttctgcgatataccaccactactacgagtttttaatataggggaatggttgcgggccttggtgaaaaataataataagagtaatgttgaaataagagattaaatataatgtgtgtatgttcctttatatttgttgtgatcgttgttgtttgtttgaaccatgtgttttaatacctgtatgggaaaatgttgtttaactaaaatgtacaatatttattc

SEQ ID NO: 246437 - DNA, 258 bp, Gossypium hirsutum
cgagaagttcaatacagactatggcagtcaaatactccgatgatggcatgctgctgcaaatggacttttaaattgttagttagtaacttccccagattttatattgatcagaattctattcagtttttactttgcattgtccgtttatggaaacttgtatatccatgttttttttttcgaagtgttctcagcaaagtctattaaccatacaagcattgaattgttttgaaatttatataagaattattactaatgtgt

SEQ ID NO: 246438 - DNA, 380 bp, Gossypium hirsutum
ctacatcaggagcattaccatctgaggcatctcttgacacaagtctgaaaataactccgaagatcactgtctgtgctgtgccacccctggagtttgcggagggttcccgaagttcttcctgaccaaggtctcatagctcaactttagacagacgaggatgtgagatacatatggcgaaactttctatatggcctcacttcgcatttgatatatacgttttttgtatgaaggaattgagatgttgcagtggtctttgattcaccgttttttcaattgtttaacactttactacgatcttccccatcttgattgatatatagggggttaccattgtgtattttaagccctttgagacttgatgagttgatggtctatttctg

SEQ ID NO: 246439 - DNA, 288 bp, Gossypium hirsutum
gttgccgaattgttcctttccctttcccgttttcggcctgcaccgccgccaaaagtgccagggttacaccaaattggttcccattttccctcttactcttgattccagttctacacaagccaaaaaaccctttggtcattggatcgagccacgggaaccattctgcttctaacttcttcgaactttgagaagactatgagtcaaccgcggtgacagaggagttggtggaggcaaacagtatgggcgatatgacaagtgtggctagggggtttctcttttcttttcttt

SEQ ID NO: 246440 - DNA, 223 bp, Gossypium hirsutum
  unsure (1)..(223): unsure at all n locations
aatcaatagtattgtgaagggggctcgttcttatgtgtcaaatgttgtcaatgctnatnaagttgagttcaatggtcctgtggatggcgcaaatacaaagcaccatggtattcggttttgttcnaggattgatctcaaatttttttttttgggtggggagcggatatttttttttgtttaatagggacaatttttttttttttatttttaaattcttatttta

SEQ ID NO: 246441 - DNA, 328 bp, Gossypium hirsutum
cccacgcgtccgcacagttgtgatgaagaactttcttaaggccgtgatcatgcctcggtgagaaaattgaaagcttaattaggcaatgtatatatgtatttttactttaatagtacttttgacatgttttgagtgtttaatcatgtatttcaagcacgccattttcaactatttaatcaatcacttttatttttaatgcttcaaaaaaaaaaaaaaaaaaaaaaaaaaaaaaaaaaaaaaaaaaaaaaaaaaaaaaaaaaaaaaaaaaaaaaaaaaaaaaaaaaaaaaaaaaaaaaaaaaaaaaaataaaaaggggcggccgttttaa

SEQ ID NO: 246442 - DNA, 391 bp, Gossypium hirsutum
  unsure (1)..(391): unsure at all n locations
agaaactaaaggagaaatttatgaatcctatttcaaagaacgtngcattggctttagctggggtcattttccaggctgtctggggcattataaatactgctgttaccaatcccttactcactgaaacctgtcaaaaggtaaagaacaaggatctttgcaccttaagccttggggccgaacatgccacccaagacgcaaaagatgtagctcgccctcgcattgatagctatcaancgtgcttccatccatgggcgtaactctttcatttacattaagaatcaatatcttttctggtttaattttggtacacttttccttcctttttctttttatgttttttttcgttatcaatttcttctttcttatttttttctgttttttatcttttttt

SEQ ID NO: 246443 - DNA, 415 bp, Gossypium hirsutum
cccacgcgtccggttatgctcgaaacttgatttttgagccagatcaagctagcctcagggaagctagcaatgaaggacagtgaggggagtatctgcagagctcgaagctgtcgggggtggacccgaagaagaagagcttattgttcgaggcgttagattctcgtttttttttcattatttatcctgaggattaaacgtctaatctatatgtagtctttattgttttcatgagactaatctttgatatttcaattttcatagtctaatattttctttttttttttttttttctttttttacttatttatttttttttgtttggtttcttttatttaatttattaataatttttttttattaattttctaattaattctttttttttattatatcattttaatttaatttttttatt

SEQ ID NO: 246444 - DNA, 352 bp, Gossypium hirsutum
atcaaatgtaatatgatatttatgtattgttagagcaaaaatggaaaggctgtttggcctgagtatatagcaatgtcatctttgtatactgtattttatccatttatgtaccccatctttgattaaatcttagattttgagggtatcaaatataattaaatttattttttcttaaaactttaaaaatataataattttatttattataaatattatttttttttttatatttaatttttatttggtctgcctctttatattttctaagtttatcattttctttcttttcttactttttatctttttttttttggtctacccttattttcattttttttcttcctttactttt

SEQ ID NO: 246445 - DNA, 158 bp, Gossypium hirsutum
  unsure (1)..(158): unsure at all n locations
cccacgcgtccgctcctacttaggatagcattagctngccgagacaactannaaggncggggtatatattaggttaagagggaaatcaacacnanaagatcatcactcgtatatatgggatcatttaataagaataacnaggnnnnncgaagggggag

SEQ ID NO: 246446 - DNA, 344 bp, Gossypium hirsutum
gatgagatgaaacttccagccaggatggggttatgggtcaagacctagcaaaatcctagagacgagaaatcacagggtttgagggtaagggggaattggtatttgtgggtttccatgagattttgctttttctttttgcctcatttctatttttacacaaaatgtaatcggaagcctgatttagaatgcagaaaaaaccagttaaaaaaatattactctttggttatacttttttgtccttcaccccttctgcatatacgtgtgtcctgtctgtaagaactcaaaatggctaaaatatctgcacattttgttaggggataaaggaacttctcaaagaattcagc

SEQ ID NO: 246447 - DNA, 288 bp, Gossypium hirsutum
acttgaaagctcaaaggaagttcaagagcataacataatcagagtctcaacccccccaaatgcaatcatctaaaaatcaaaggcgatatagtacctgacatattagagacagtacatctaatgaaatacatatccccggtccattactttttcttatgggctttaatgtgtgtacaagaacagaaattaatatgtactatagcaaggtgtttttttactgccaaaaaaaaaaaaaaaaaaaaaaataaaaaccatttaaataaaaaaaaaaaaaaaaaaaattaaaaa

SEQ ID NO: 246448 - DNA, 402 bp, Gossypium hirsutum
gaaatattgaagagggttcaaaatggtgaggtcaagtgcatgaggaggaacacgtctggggtcgacgacaaagcatgcctagagatgagtcactcattcaacgtggaaacagctacaggcacgggtgaaaggattgccgaaaacacacctttatcacctgttgccgaatctccgattaagaacgagtcccgggatacctttacttatgacaaagttattccgatggttgacaagggtattgatgcttgctggcctaaattgatggcagatgaaagttttgccatattgaaagatagttaccatatgaaggatgatgggaaggttgttactacaggaatgggcaacaatgttttcggaggaatcatggcatttgttatgggaatcatgactatgcttcgactg

SEQ ID NO: 246449 - DNA, 314 bp, Gossypium hirsutum
  unsure (1)..(314): unsure at all n locations
cccactcgtccgannccatataaccaaaatctatatttcccgaggaggaacacatctangcgcgacgtcttaagagcctagggatcagccaaacattcaaccccaaaacaactacatgcactgttgaaattattgcctaaaacacacctttatcacctgtttccaaatcttcttttaataactattccctctatacctttacttatgacaaatttattccttttgtatacaaatttatttaaactaacattcctaaatatatttcatatcaaaatttctcccatatttataagatttttaccataattaatttt

SEQ ID NO: 246450 - DNA, 431 bp, Gossypium hirsutum
ggggcgagccacgcgcgcgggaaaaagagaaagagaaagagaaaaaaaaatcctattaatctaatctcctcattcatgaggggcgccgcttcagccccccattcatccggtctaaactccaactacggcggagtgaaccaggatgcggcgtttccacctctaaggtacggcgtacagagttggggacgtggcatgtacggcggcgaaggcgcgcgcgtacgaaggctcgtcatgtgcggagagagagcgaggggacgtcactgctgcgacgctgggaacccttgctgctagggtttctgaatctttttctgttttgggctgtatgatagttgggctagatgttgggttaaaagtaatttgggccacattgggcccatgtacttggactgttcttatattggatttttaaaattattattatttatttgggt

SEQ ID NO: 246451 - DNA, 356 bp, Gossypium hirsutum
cccacgcgtccgtaccgatcagatctacacttaactatttgagttggtcaagttgatgagagaatctatcgtgactatggacgatgaatacttgaacgcaatacaaggagaaaaagggtttaaaatcataggtgagtacattaatcagcttgaaaccatgttttccattgaaaagccagatgtcttttcctcaacaagttgggtcaacatcaagtattacgaactcgatttcggatggggcaacccgcaatgggttgctccgttcggggaagccgtttctgagttcaataacattgtggttttcattgaaacatagtgttgcttatgcaattaatcttggataacattgtattaaa

SEQ ID NO: 246452 - DNA, 253 bp, Gossypium hirsutum
cccacgcgtccgatttcattggaaagtccatgtttttgtgacaaaagttttatactgagctccttgccttttatcataatagtgaactcatgtcagatattgtggaaacctttgatgataaaaaagtttgtccttgaagaaactgattgctgctgtgtatgaatatcaatgaacatatttatagcgtgattaagaccagaagtacaaaaaatggtgatgactggcaaaaaaaataaattataataaaataaaa

SEQ ID NO: 246453 - DNA, 359 bp, Gossypium hirsutum
tccggatagctccaacttcaatatgtattctttaacggagcaataactgtgcacggccgggacagtgcaagttagctgttatatcatctcaaacaaaacaaaacaaaacaaaccccatatgcaagctgcatttactctattaatactacatatatgggataatttctgactttggccataatgatcatattgaggcatgggtatatattaggttattttttttaacttttttatgcttcctgttgctgctagagtggtaaaaactggtatgtcttaatggttttggtgattccttgtaaaatattttttgatgcatacagcgataggattatttattatgaactattattagctattat

SEQ ID NO: 246454 - DNA, 413 bp, Gossypium hirsutum
  unsure (1)..(413): unsure at all n locations
cccacgcgtccggttctggtcccactattggtgtctgntacattgtttgctcatccgtgtgggtcattttcaacggggtctagtcttgncttaatgacaaaattgcaattctggttcaggtttgagtctcatatgcgggttcttgtttaggtgaattctgatcttttattttaaatccgttgactatgactacatcttattatattttttctagtttttatattcttgtttatttattttttttttatttttttgtttttttattttatttatttttttttttatatctgtttttttttctttcttttttttattttcctatttttcatgatttcttatttttttttttcttattttttttatattattaattttaatttattatttttttttttttaatacttaagtttctt

SEQ ID NO: 246455 - DNA, 321 bp, Gossypium hirsutum
cctactcgttcgggatgttatgccttttgtttaccccgagcccgaaaggcccagaatcacggtggatgaggcatttcatatgtggtcaaaattatcaaaatggctatacaaagatccctctattaatttccttggtgttggaagaccttattaaatactaacggaagtttttagcttttggtgattagaactcactagattcaccttttaacacattggagattaatgaaaaaacatctacatttgtttttttaaaaacttttttttttcaaattcaaattatattttaaaaaatttattttatttttaaagttttttttg

SEQ ID NO: 246456 - DNA, 243 bp, Gossypium hirsutum
  unsure (1)..(243): unsure at all n locations
cccacgcgtccggcaagtgtggagacaactgtacttgcaacccttgcaattgtaaataagagggggggaaaatgaacaacaaagagaagcagagaggcctttgtctttttaactaaataaattctattactttagtatgtatcagcaaatcttcatgaggatttggttcttaattatgtgtaatgtgggcttttctgctatgtcagaatgtattatgatatttaagaaagtttgttttctnna

SEQ ID NO: 246457 - DNA, 303 bp, Gossypium hirsutum
cccacgcgtccgatgttgtttcttgtttcggattttgttttacttctgtttgttattgggaggcaaaaacaaaagatcatgaaaaacccggatgattgtttttaacaagtttaaggttgggatttagcagaaaaatgttgctgtaatttgtgtgcatctatattgtatttgatttttactgttggtaaagcttatattgaagtgcaaaaccttttcatatctggaacaaaaagaagtaaatacctaaaaaaaaatttccaacaatttttctttgaatattggaagtccattggggaaaacttt

SEQ ID NO: 246458 - DNA, 232 bp, Gossypium hirsutum
cccacgcgtccgcccacgcgtccgtccacgcttccgttcacgcgtccgagtaggtacaagacaaacgtagtgtatggtggaagaagggtataataaatttctgcttcacgctttgttcattatctaataatgataatcagaaggacagtctggtttacgtatgttaaagaagtaatattagtgcaacatgttgatgcgtaacaacttcaaaacagttagcagttgttgggtt

SEQ ID NO: 246459 - DNA, 382 bp, Gossypium hirsutum
aaaaaactaaagaacccttatggtcctcatttccgcttagtaaccaggccattcaaaggcggttaaaccttcgcgcaactccgattgcggcggaatggaagaagatccggccaccaggtatggctagctgtaggaggtgcacacgcgtagaggcgcagcacgcgcgggggaggccctgggttcgactgcggcgctgctggctgctgaaggctagagttcgggtttgggtattttgggctagagttcgggtttaggtattgtattgggtattagattaaaaacgaattggggcatggtgggcccattgatttggactttggactttttaaaggttatttgggttaataataccggcccgaaaaataatggggcctaccataat

SEQ ID NO: 246460 - DNA, 290 bp, Gossypium hirsutum
cccacgcgtacgcttttggcaattccaatatttactgtcgcttctgaatcggcttttaccatgggcaagaaagtgatcacacgtttgaggagttcacttaagccaaaaacggttcaagccgttgtacgcttggatgataggatgcgagctaatgaattttcatcagaaattgtgtgcaaaaatgacgatgacgatgatgatgacgatgaggatgatgtctcttctgttgctttttaagatactctctttctaaatgtttaaaatttaatttagcttacaatttatatttt

SEQ ID NO: 246461 - DNA, 303 bp, Gossypium hirsutum
gttggatagcatttcagggtaactctgtcttaaccctggcaagtaggagaatcgaatttcatgttggagtgctagaccatggctaaaatatagatatagtagccaagattatataaagtttatatggtatgaaattgtcaaacgaccatgagatgtcataggtacagtaagtgaggaagaaaggaattgaaatgtagaatttaggataaggatataatattgtactctgggatgatgtcaaaatccattcatccttatccatctcatgttctccattgtcttgtaatctgaggatttctttgt

SEQ ID NO: 246462 - DNA, 380 bp, Gossypium hirsutum
  unsure (1)..(380): unsure at all n locations
gtcttcactgtctgttttggcaagtgggatctgtaaaattttttgcgcaatgtccatttgagaggttcgatccttggaatccaccaatcantccaaatagatatgttgttacctttctcaactcttcaacatatcccttgaatgagaagtccctttgcagcccagatactcttccaggggcaaaaacgcgagaaatcgagaagaaaagacagacgaaacaagaaaacctaaaaacttgctagaggcggcagacacaagcgtgctaaggtagcagactattcaaagtttcacttttttttattttggtgattatttatcttaataaatgattcatcctttttgtttgtcagacatatattaaaattttaaaattatgacac

SEQ ID NO: 246463 - DNA, 404 bp, Gossypium hirsutum
atgacaacggagcaaaagaagaaattgctgtgggggagcaagaaaagcactcctgcagaagagtctggtcatcgctgggatactgcactatttggtgatcgtgagcgacaagagaagttcaataaactcatgtctgaggttgccttggtacctatggccgattgtagggtgtaaaaggagatgtgaaggtggagcataaagccgacaatcaagatgcagagaagcagcgggagctccagctggatttggagaagcagtacacagccggacttagacgaagggatggtcgcactgttggattaggtctttaagcatcagaattggaaacttatggtgctgcggggaacttttttgtgacatttctgttctactatcttattctgtactcctcgaattatgcattt

SEQ ID NO: 246464 - DNA, 305 bp, Gossypium hirsutum
  unsure (1)..(305): unsure at all n locations
cggacgcgtgggcgtacacttgatccccgttcagaccaaagaaaatgcctccaaagggggcacataccaaagcgttggtttgtcataactctcccttctagacatggcacatacaggggaagcatgagattattgaattgaacaacacagacccgaagatgaagagcatgatcgcgagtatttccacatgaataaatgaagatcatctggaattctatgttctgtatgaagattgaattttgagtttgtctcgttgatttcatttatttctgttttgaaattttctttgntatctcttatttctc

SEQ ID NO: 246465 - DNA, 229 bp, Gossypium hirsutum
  unsure (1)..(229): unsure at all n locations
tttccgagttcgaatagagttcagttgaaggtagcagaaggtaggttgctcgtcgtgtatgtaaaccaactccctttatctaattcacatccgactgtaattttataagccaaatcccctacagttaataaaatgttatacaagtagatatgctgttaagaaaagtattcaaacgagttatattttttataaataatgtttttgaagttaaaaaaaaaaccanannant

SEQ ID NO: 246466 - DNA, 162 bp, Gossypium hirsutum
cccacgcgtccgatctgctcgtttgctgttgcaaataaacaaccatggtgaaaaggagcgtaaaccaaacaagatgatgaggatcaaacctgttaaaaaaaataattcttaaaagttattggaaccaaagaatggtattaagaaagatgaaaaatgtttaaa

SEQ ID NO: 246467 - DNA, 244 bp, Gossypium hirsutum
aagcgtgtgttactattttaatgtatatgacccacaaactattcaaatttacaaacaatttaacctccataagccatacgttaaacaaagacaacatttttttaaaaaatatttcccccataaaaactaagaaaactaatgttttccaaccaaactatttctcctctcatttcaatgtaagacatcccaattcatgaaaggccatttataaccaaacccatcccttcaaaaaccataaaaatct

SEQ ID NO: 246468 - DNA, 405 bp, Gossypium hirsutum
ctcagtggcaaaaatatacgatcgtggtcctatatatgcaatatatatacacatatatattatctgcaaactgcaatatagtattgaaaaagctacaaactggggaccaagtttggagtgtaggtgtagaaggcaaagcaaaaaccaaactcccagagcacagtaagctcatcttgtgaatggtcagtgaaactgccgaggtggccccaattccgtgtttgaaatgactaaacaatgagccaactccgagtaatgcatgtttccccacattgttgttcttgttgttttgccccatgtctcagttcttttatccttttttttttccctcagttttattattatttgcttccctttgcttatcttaattaatcgttatataagttgaaattttctctctcctttttt

SEQ ID NO: 246469 - DNA, 339 bp, Gossypium hirsutum
aaaaaaaaaaaaaaaacataaaaattttctatacaaaaacaacaatccaaaaaaaagaggtccggtcttatcttacctcaagctgctaacaaccaaacttacccactactttcacctaaaatcaccccactcccccacccttccatccaccctttcccgactacccctttcttttccacacccaatctttctttccactcatcctttttcaaaaccccctcacccccaccctaactcttcttttcgaaaccccttcccaacatctttacccaccccatacatataagttccctctcttttcttcatcctttcacccccaacctattttttttacccccc

SEQ ID NO: 246470 - DNA, 357 bp, Gossypium hirsutum
  unsure (1)..(357): unsure at all n locations
accaagcataccagtcccttgactctccatgtgttgggaaacgcgaaaggggcggtggctgtggttatatcgatcttgatattcaaaaatccagtatcaattaccgggatgcttggatactcactcacagtggcaggggttattctttatactgaagctaaaaaacgcagtatgtaagtaaagggaccattaagcaatagggataatatatatgtgggcacaaattcaacaaatattatgtgttttttagtgtgggattaggctgttgagtgaaacaaaattgaaggaagaattttgtaatttttgttgaaccaatgtcttcttttagggagaatttggaaaaaatttgattttnat

SEQ ID NO: 246471 - DNA, 263 bp, Gossypium hirsutum
atagaaagcactcttggtatgaactgtttacattatttttctgctggtagttctcccttgtttgtgtatttaattcaattctgtgtgctgatgattgccttttgaattcaatcttcatcttcaacattttatagttctcaatttgatctgttggtttgtagttcctttatttagcaagctctgtctatgtcttcattcttctcaaacatatttgtcctatactggaatttaaagaacatctttctgatttattggctaaggtt

SEQ ID NO: 246472 - DNA, 272 bp, Gossypium hirsutum
agattcttatatccgatccaggatagaagttcctgctatcttcctcaaaaactgcagtggagaccttgtttatgatatgtgtgtactgccacctgttatgatggccaagctctgctgactgcagatccattatagaagaagctgctaagcttgtagaggctggtatgcatacttggcgaataggttctatatatcatttttaagaaatgtttaagctttcaaatggcatgcttattaactcgctataattcgtggggtagcttaaaatgaca

SEQ ID NO: 246473 - DNA, 202 bp, Gossypium hirsutum
ataaaattataatctaacatccttttttttctaaaaacccttcctgaaaaaccgcgagcgttacttttttaatcagataggcctactcccatcttaaatgttagcaacccactccataaagtaatccccccagccacgctacagctaatctcagcacggaagccacttaaactagtactacaccttccccacaccattttcc

SEQ ID NO: 246474 - DNA, 399 bp, Gossypium hirsutum
  unsure (1)..(399): unsure at all n locations
cccacgcgtccgattatgttataaactctatattaggtgatccttttcttccatggttttcgtgcaattgattgcagggtctctttcatcccgatgaccggggttttccacagacggtgcatctagtcagttctctaaggcaaacttgtgttaccggttactactcaaacggaatatttttctcattttccgatggttgtagacttcactgtgtgtaaagcactgtatgcatgtacaaattatatattagcctctgttggaatttgcaattctaaaatacaatttaactctgttgtttggagacttaactatgcccattagttcaattaatgaataaaaaatagaaaaaacaaaattggtggttggcattgaaaaaatatatttnnataaaaaaaacaa

SEQ ID NO: 246475 - DNA, 330 bp, Gossypium hirsutum
gaaaaagttaagtgaaaaaaaaaaaaaaattttaattttataaacaaacaaaacaaaaaaaggggagaccaaatatgtgagtacgaaaaaataaacacaaaaaaccaaacgcgcgccccttttaaatatccctagcttatttccacatcctttcacctggttatccttttttataagtccacctatttctaattcaatgccccgtgtttttcactgttgaaattggaaaaaccatggctttacccaaattaatttcctataaacacatccccctttccccagattggcaaataacaaaaaagcccccacctatctcccttcccaaaattt

SEQ ID NO: 246476 - DNA, 246 bp, Gossypium hirsutum
cccacgcgtccgtaataatttttgtatttttgcttagagaagaaattcaaagtctagtgctgtagggttttgcttatgggttctggatttcttctactaggctactttttggtattattattgttatttcttggaaatattcaatgcaattatgaaacatcaaatttttagcttccaaaagaaaacaaaagaactgtaatcttgaaatatacacattattaagcctgaaaactattttaattgcag

SEQ ID NO: 246477 - DNA, 272 bp, Gossypium hirsutum
gatacattggtcactattagttcacaaaaatcttagcagagtgagcttctccattggtgagtcttttttatatacatatattttctttttctgacgatccttgtttctcagtgtgtacattgatggaataagtaggatgttagatgattgacatgtttggcaagcaagaaatatcttattgaagtaaatgatgatcgaacggttgatttttcaaaagttaagtttaacaaggttgtgtttgacagtatgaggtctatcacctcattcattta

SEQ ID NO: 246478 - DNA, 363 bp, Gossypium hirsutum
gcgcccacgcgtccgaaactgtatgaaatctctaaataatgtttgccatttcgcacattttatagaagcagcaatcaacgcccatttgtttgaaaaaaaaaaaaaaaaaaaaaaaaaaaaaaaaaaaaaaaaaaaaaaaaaaaaaaaaaaaaaaaaaaaaaaaaaaaaaaagggcgggctttttaaaagaaacaagctaagtttcgcgtgcctgggagggcaaaaaaatttaattgtgtggcctaaattaaattaactggccggcgggaaaaaacgtggggaatggaaaaacaatggctttacgcaaaaaaatttgttttgcaggaaatccaaattttgacagggggcgaaataattaaaagg

SEQ ID NO: 246479 - DNA, 396 bp, Gossypium hirsutum
gatcttgagtagttatattgcttgctagcattgtgccatatacactaaaatgaggaacctaaaactttttcttgtcactgcagctgtgatttttcttgtaagcaaccatccatttgaagcttctggccgggttctaaatgaatatgatcttatcctacagtctgtccagaagggagtaccaactcctggtggacacaatagctgcaccaatattcctggcaggaatgacccgccatgcatcaaccagaggggattcgcaggccgtgttatggctcctccacggctgcaaccgaacaaaaggattccgttcaatacagcagcctaatgtcaaaagaatccatttcgttccagctaggaaccgattagtactttattgatttagcttgtaatagtatg

SEQ ID NO: 246480 - DNA, 361 bp, Gossypium hirsutum
gtataattgcttggttccaaatgttggttttttttagcactcgatccttagtacatgttatataggggcaggataccactgaatatgggggccaaaaaaaaaaaaaaaaaaaaaaaaaaaaaaaaaaaaaagatactaaaaaaaagaaaaaaaaaaaacgaaaaaacaactgcaagaaaaacaaaatagaacaaagaaacaagcagactagtgaaaaagaaaaaaaataataaaaaaaagcgggcctgcctttaaaaaaaaaaaaggtttgaagaccagcctaaccactgtttaaccaaatacaagctgatgtagaaatggaaataaatggggatgggcataaaaatcaagaagtgaaaaa

SEQ ID NO: 246481 - DNA, 433 bp, Gossypium hirsutum
  unsure (1)..(433): unsure at all n locations
cccacgcgtccgcattagggtttcagcgctgcatctttcatcccctagggccgactcttgggtttcaccagcacataatgtgcctccgccaccgccgagacccaaagcccccttttttggttccgtttccatgcccaagggaccccgatgacggaaccgatgatgtaatcaggtaaactcttcccttttcttattttcttctgctaaaacacattcaaacctcgaagaagaggatctattcaaaaaaagaaaaggaaaatggaactcgaaatcacctctcgaaaatttcggcttgatttttttgtattttgtatttccgtgtgcttaatatgcgttcgtttgtattgcttgtgtccaaaaagagatttacagtcgaaaatcaacagctntatagccgaataatcaaaaaataaagaaaaatataattttttct

SEQ ID NO: 246482 - DNA, 288 bp, Gossypium hirsutum
  unsure (1)..(288): unsure at all n locations
cggaannnccgggctcgaatataagagactacatataaaacgggctgctggaaagccaaaacattgctgctacaaagtgtttctttgatctgcaaccgggaaaaccggaaactgcatcagaggtaaaaacttgtattcatttttactatccattgttttttgtttttggtggtattattgtgagaagcttatctaatgttgtacatctgttatactgtcattgtttcttcagttctgttggaaagccccaattagatttagtaaaaaaattgaataaatttgttctac

SEQ ID NO: 246483 - DNA, 376 bp, Gossypium hirsutum
  unsure (1)..(376): unsure at all n locations
caaagaaagaagaagtcattgttgaggcaaaaacaatggttgaagctgaaaagcaaaagaaaaaggaagaagaagaagaagaagaagatgagattattgttttggctgaaaagaaaagtgaaggagctaagaaagaagaacccattgtaaaagaagtgaaaactgaggcacccattgtttgatcatagggaaatgtaagggaaagtttatatatatatgtatgtgagaactaaggataaagaagaaaaacaggaggaggaagaagcaaaggaaactagcaacatatgtaatcataaactcacaatattttatgttgtttgattttatgtttatttgggaaatggagggaaaatgtgtttattttttgaaaaanaaa

SEQ ID NO: 246484 - DNA, 365 bp, Gossypium hirsutum
cgcaaatgaaataattcattatcaagccttaaatttacgatgccacagctcagcaacacgggagggcgcaacaataaaggacgaagaggaccataccattctaactgaaaaccataacgactcaactaacaaacaaaatcctatcactaaacacttttaaacaactacaccaactcttctattccacacaattgttaaccacacctactctatatacaaacgtaacagctaaccatccacacaacagacagaattcacaacactcaactgcttttcttatcttttctaaccatgccaacacaatacaaaaataccctcccttatatctcaaaccattcaattgaatgacaccacacaaataattt

SEQ ID NO: 246485 - DNA, 289 bp, Gossypium hirsutum
  unsure (1)..(289): unsure at all n locations
gggnccacccacgcgtccgaaaaaacgaacaaattaagcatcaaaccatggatttcaaaccccatttttaatccccaccggcgcggcgaaaataaaaagggtgacaggacccaaccagcctaaaagaaaacagaaccaactcagcaaaaagaacccaccgccaaagaaaacaaaacccaggaacccaatggttgatcatagggaaacgcaagagaaagaataaataaaccacataccgacaaccaaccataacaaacaaacaccagaggaggaagaagccaagcaaact

SEQ ID NO: 246486 - DNA, 329 bp, Gossypium hirsutum
cttcggaaagtcctgatgcaagccaacaaagtttaaggttcttcaatcctgagcaccggcaatgacgacggaaatggtacacaaagttcactcctttaacctttcatccccggcttaatgtgctcgatttcatgttggatttgcctagatagtttcagatctaatcaaatagcttttattagaaattctcttcaacaacatcactctaaaaataagaaatatagatttacatacatgcacagtgcaaaaaactagattaagatcaagttattgcatatcttaaaaacacaaaaaaaaaaaaaaaaaaaaaaaaaaaaaaaaaaggggcg

SEQ ID NO: 246487 - DNA, 366 bp, Gossypium hirsutum
  unsure (1)..(366): unsure at all n locations
cccacgcgtccggctcaaggggcttgatatcgattacattcagcagcattacaccgtttaaagatggatgggatttcccctccaagaaaaaaaggagttataatgacgaacaatcaccccggatattaatattaatattgttatcaatcggcttatagtagtagtatagatttaggataattttcctttttcctaaatgtcggaatttgtgttcattgtgattacctctttgggatgcagaaaggttaattaataacatcatctaatccaaggctctttgtttgctcaaacnaaaaaaaaaaaaaaaaaaaaaaaaaaaaaaaaaaaaaaaattaaaaaaaaaaaaaaaaaaacaaatattataat

SEQ ID NO: 246488 - DNA, 328 bp, Gossypium hirsutum
ggaatcgggcgacccacgcgtcgttgtgcaaatgcacgagctcctcatttgggtgaaagggaaaatatttggatcggtcactggcattagcacctggaggtcatatgaagagaacagaatgtgtaacaagtttgtggatgattggacgaatgcccttagttcgactgtatgaagctgggatagccgctacagtggtttgggatcctgaatgcaccattaacaggcttacttcacttattattgctcaatccgcagttgagatcattgcacactgttcaatatcctgagttgtataatatataaattttgtgtacgctaaatgtgtttt

SEQ ID NO: 246489 - DNA, 396 bp, Gossypium hirsutum
  unsure (1)..(396): unsure at all n locations
aaaaaattgaatcaccttctgatttctttgatttctggtactggaattttgtagtgggcgtagtgtatattctgtgtgcctaaaaaaatttgcaggtacatcaatggcttttatagccagattcacaagataaataaaaataaaaaatatataaaaaatcctattttcctactgtcatctgctatgaattctgttattggctccttctggtgtgttcttttgcaggctcggttgtacagtggagcggagagacgtgcgaaggaggccatgtgaggagtcactcgtgggagccctaactctctggcttattctggcacgttccagaagcttccaatgctgctgaaatatttttgggtgtattggngcctgggtaatggggtatttgggctattttat

SEQ ID NO: 246490 - DNA, 340 bp, Gossypium hirsutum
cttgaaaacccatgccattcacggaagacatggttactttcttcaacctccaaacaacatcgggggcgtcgagtcattagaaatgaccctcctgtacctaagattagcaaaatttggtataaagtcccatgatatccggcagactgtaaatgtaatttttgagggcaattgtaggctccaaagtttcttgtaaatttcttttaattcggactgtattaaataatcattaggaacccgattagcctcttgtaatgatttataggcaccgctgaccgaaaacttaccagatagttcttctttgcacacctgtttcttgataataatcatttttatctgaaaa

SEQ ID NO: 246491 - DNA, 387 bp, Gossypium hirsutum
cgggcccccacgcgtcgtggtaaaaaatcacagatgctgctgttggcattctgtcaaatgcttaaacagcaccgcggcgacagactggttgctatcacacattcattaagactgaatatgaggagggtagatcgtttggatttttatgccggtaaacggcaatgcgctcaagagctacactcagagaaatgaagactactactatcgaaagggaactcggttgtcggcagagaaatgaatacttgggttgaaagatcatatactgcaactgtgtaatacacacactaagtattagcttaaaatagaacaattttttttaaaaaagaaggattacagttatgtacatattatatagtactaaaattgctatgcaagaaatatcttatg

SEQ ID NO: 246492 - DNA, 386 bp, Gossypium hirsutum
caaccaacagcctgtacggtaaaacatcttttttgttcgacatacatacgtatatgaacatgtcttgtcttgttgttcatataacaatgcgaaaataaacagtcggggtttgcttccttagaaaaatgaccatgtagttgtatttgagtgcattgttggactaaacgaaagttttaggttttatagctttttggttcgtattgtttgctctttttatcattgaacacattgttatggcagttttgtttgctaaaaagttcttcatcagacaacagctgaacttaaaattttctgtgtgttacattttcttgctgctaagtatttttagatgagacctggtatgctggatgtaggaaacatggtaatctgaattctgagttgtcaat

SEQ ID NO: 246493 - DNA, 336 bp, Gossypium hirsutum
ctggttttgagaaaagcagtcccgacgcttcagagcaggaaccagctgtgttggtggatagtgaaatacccggtggagctaaactgctagagaagttgcagggaagcatttcagttgatgaaaaggtgttcttggcagcggcggatgctgtaaaaacagcaatgtgcaatttgttaattaagaagcaatattctgatgagaaacgagagttcagaaagcgaacaagaaatgataggaaaagcaagcagtgattcagtgtattgattgacaatgttggtacatgtaacattagttatatgggaatctcccaatctatttaaggcattgcaaaaactt

SEQ ID NO: 246494 - DNA, 400 bp, Gossypium hirsutum
ctgcattggacggtttcctgtattgcaagcaccatttcgctcaattgtttaaggaaaaaggcagtggcagtcatctaactaagacatcttcgatgaagagaagcccctcgggcgggaaattcgatgctgaatccgattcggaaccgaaattggaagataacaaaaccggaacggaagctcaacctgatcaatgaaggaaatatactttgatttgaaccttcatgggacaatatttgtggtttaaaatctcagtatatttttggtgtttgatatttatatatagatatatgcatgtgtcttgatttagtcccatgaagatgttcaatgtggggactaaaggtgttgtttgatattttattaaacattaattgttgttttaaattatgtgaaaaattttatc

SEQ ID NO: 246495 - DNA, 447 bp, Gossypium hirsutum
cggacgcgtgggtagaatagttcaatagtttcattttcttggtttttattactgtactatgcagctcctttgattctaattgctattggtgtaaatgtgtgacatatttgtgcataaatttgacactgttagcctagtggttgtgccgcagtaatcccaaggtttgtcattgtgatactgctgcgcctgaatattacatttggagtatacaaagattatccaaagatgatgctcttaaatacactgtaaatgagtgtaaggttgagttaaagcctccttattctgcttttgggtagaggccttttgcgatgacaactttgaggtcatttctaatgttctctgtttgagttgaggtcatgtgctactaatgtttcatatatgtatgatttgagacacaatggcatttgtaattgagcttgagatctttggttgtgaatgaaagatgca

SEQ ID NO: 246496 - DNA, 195 bp, Gossypium hirsutum
cccacgcgtccgcccacgcgtacgaccacgcgtttgcccacgcgtccgaaaaaaaaaaaaaagaaggggaataaaaaaaatgaaaagaggggcgcccactatactaaattcatggcctacgtacgcattgcattccacagctttagttcttctgtagcgtcacctaaaatcaaatgactggcggtcctatgacaa

SEQ ID NO: 246497 - DNA, 235 bp, Gossypium hirsutum
agggataggaggtggagctggtggtggaaaaggtggaggcataggagcaggtggtggtgccggtggtggcgctggaggcggtgctggtggtggttttggaggtggaaaaggtggagggataggaggtggagctggtggtggcgctggaggcggtgctggtggtgtttttggaggaaaattaatagaaaaagcatatgactgatttatgtctgctatatttggatatgtggatgta

SEQ ID NO: 246498 - DNA, 315 bp, Gossypium hirsutum
cccacgcgtccgcccacgcgtccgaaaaattttataatttaaaaaaaaaaaaaaaaaaaaaaaggaaagaggaaaataaaaagggggaaaaggaaaaggtcggcccctctttttaatccatccttacttacgcttccatgcttcctcctacttttttttttttttcacctaccttaatttatttggccggccgtttacaaccaactgcctggctgaaccatccctttccccacctaatttgccttcgcttgacatacctttttcttttgctggcctttttactaataggcccgcccggattcgtcttccttacaa

SEQ ID NO: 246499 - DNA, 294 bp, Gossypium hirsutum
cccatactttctttaataatttccctttctagtttttattattacgaacgcaaccaatactaatacgggacggcacactattgagaacaaaatacacatactttaacacaatcttcatgcatacttttatattatctctatctctaagactatcaaaataacagaccacaacaataccctatttcctgatgccttaggacactacatgacccaattcattcactttacaaactctgtagcacttaaaataacaataaatttatatgccgatacacatgatcaactaaccaccaa

SEQ ID NO: 246500 - DNA, 423 bp, Gossypium hirsutum
gtgaacgagaagagaaagagaagaaagagaaggaggttcgtgaaggaggagaaagaggctaaaaaacgtcaacgtctagccgatgatttcactagactattacatacgtataaggagataaccgcttcttctgactgggaagaatcgaaaccactttttgaagaaagccaagaatacagatcaattgcggaagaaagctttaggagagagatctttgaggaatacattacacacttacaggagaaagctaaagaaaaggagcgtaaacgagaggaggaaaaggctaaaaaggagaaagatagagaagagaaagataaacggaaagagaaggagaaggagagaaaggagaagggaagagaacgggagagggaaaaaggtaagaccgaagtaaaaaagatgaaacagatagtgagaaattagata

SEQ ID NO: 246501 - DNA, 419 bp, Gossypium hirsutum
cccacgcgtccggaaccattcccggatgcctggaacaatcttgttttactatttgaaagaaacaggtcatgtgatttgccatctctttcgagtgaggaacaatttgatttcttacaaccatttgaaagaagtgattcccaggtaatttttgtaactacagaagagtagaattagttcatttaagatgcaaatatgtttaaggcttcatatgctaatttgtctcatccgtatcatgtctgcttttcatgcttgtaaattaccatagggcatagcatatggagtatatgaagaattgacttttgagttgcaaaaacatacttatgatgatccaataaaataagtttgtctttgaaatcaccacagctagatgttttctgattgctttctatcaatttgaatgctgccaatcttactcgata

SEQ ID NO: 246502 - DNA, 371 bp, Gossypium hirsutum
cccacgcgtccgcgatctgttagggttttggagaaacaaatagatattgaagagaatgagaacgaggaagaagaaaaagaagaagaggaagagaagacgggggaggaggaagaagaagagagtgaagatgaagggactaaaaatgtcaaaggtagtagtagaaaggggagttctaggaaatctggtcgagattcggctgagaagaaagaacacaagacatgattgatgaaactggtcctaattcgtatttgtatgaagcttggctttgatttttatcacataatgatgaactttgttgttagaaaaagaaaggagaactgaaaccggttgtgtacatataaatacttaagaagtgaaacaaaataatgttt

SEQ ID NO: 246503 - DNA, 340 bp, Gossypium hirsutum
aagtcttggtgtcatggttacttaaatatgggattttcggattcagggaaatgaaaaaaagctgccctggcctattagtagtataccgtctcagtcaacctgaaggtattaattttcttttcgacacgaagtttataacattacaggtattgtgtgataaaaatgcaaaagaatcaaaggaaaacttgtaaatgactcttgtaatcaatttcatatatattatgtaaagtattttttattaaaaaaaaaaaaaaaaaaaaaaaaaaaaaaaaaaaaataaagaaacaaaaaaaaaaaaaaaaaaaaagatatataaaatcaaaaaaaaaaataaaaaggg

SEQ ID NO: 246504 - DNA, 440 bp, Gossypium hirsutum
  unsure (1)..(440): unsure at all n locations
accacgcgtccgaagatgtaccagatgtgatgtatgatatgaagatgggaacaaatatgggaacatgtccggacataaattcccagataatctatgggacaatagggggtccatttggttttaaaaaaaaaaaaaaaaaaaaaaaaaaaaaaaaaaaaaaaaaaaaaaaaaaaaaaataaaaaaaaaataacaaagacataaacgatgctacatcatcttctcnttaaaggggggggaagttgggggggcccctttttaggttccaggttaaggcaccgggaaatcccatatataggttctcttaaagggaacccaaagcccaattttttgccccgtttttaaaaggaaaaccctgggaaaacccatgttattccccagctaaaacacctcccttaaaaccccttttgtcaaagcggggaggccagaaaaaaggcccttt

SEQ ID NO: 246505 - DNA, 190 bp, Gossypium hirsutum
gctacaactaatcgcccatcataactagatgaattcatatttatgcgtttcccccaggctttagagattggactacctgaccgcagggagcggtgttgagattataaatgtgatatccaagggagataatattttattaagcctctacatactttacttatccagttaatgtgaatttactttattttac

SEQ ID NO: 246506 - DNA, 106 bp, Gossypium hirsutum
attgaaaatcgtggatagaacaaaacaaacaaattagatgccacattatcatgtatcagatttaagaaatcaagataatgagaaagtaagccaataagcttgtttc

SEQ ID NO: 246507 - DNA, 196 bp, Gossypium hirsutum
cggacgcgtgggagaacctatccgattattatttaatcatacttgccaagaatcctttttttgccttgcagagcaatctacaataaattatctcaaaaacttgggaaaaaaaaaaaaaaatattaaaggtatttgattaatggtaatagaaaaggatgaactcaaatatgtaccttaaaaaactgaaacataatgg

SEQ ID NO: 246508 - DNA, 347 bp, Gossypium hirsutum
gatgtttcgtacctaatttgcttgcattgaacctaatatattatctttttgttggcttaaaaaaaaaaaagaaaaaaaaaaaaaaaaaaaaaaaaaaaaaaaaaaaaaaaaaaaaaaaaaataaaaaaaaaaaaaaaaaaaaaaaaaaaaaaaaagaaagaaataaaaaaaaaaaaaagcataaaaaaaaataaaaaaaatttagaaaaaacaaatttgggtgcgccattttaaaaattttaaaatcttacccccttttttgggaaataaagattttatttttcccgcctctaaaagtaataatagccccccaataaaaaacacttgagtgggaaaaaattttattt

SEQ ID NO: 246509 - DNA, 351 bp, Gossypium hirsutum
gaatgagggaggagctgcttcatcaagccaagctgaatgagcgtctcgcgtaaattctgcgttggtgtcgttgctgtttctttcttcttcttttttcccaactattttaagcccgatttgttttaattagactcaagtggaactgtggttgaaaaccataatattgcctttgatgatgagctggataaccccatgacatgccatggacgaattgttgtttctttctgcttcataaatgccatcactacctgtttgaaaaaaaaaaaaaaaaaaaaaaaaaaaaaaaaaaaaaaataaaaaaaaaatataaaaaaaaaagaacagaaaaaaacaaaattatattagacaaaa

SEQ ID NO: 246510 - DNA, 309 bp, Gossypium hirsutum
cggttataattgaagtggtcaactatcgattctgttgttttattatgtatccatggttccaggtgcttgcatgcataatggttattttgtttgcgttttcttttttcaccttggttctactgttctgagtttttgacatgggtactcaacgattttacatactgcgcctgcgaccttatgatcattagctcatataagtctgctgcatttactatgtggttggcaatgtagggtcccttcctaacaactatggaagctgccagtctatgtcccattgtcgcaaccaatgtgtgtaaacccatttgtgac

SEQ ID NO: 246511 - DNA, 329 bp, Gossypium hirsutum
ataaaacatgggttgtgttacaaccaagtgattggatttgcttcttactactgacgttgcttgataatgaaatgtgagctgattgtgattttgttcaaaaaaaaaaaaaaaaaataaaaaaaaatataaaaaagaagtaatgaaaagaaaggtgatagcaagtagaagagtcaatgtttacaaacaagaaaggcataaaaggtactgtggttgaacgtcattaaagtacaaatgatggccaacgaaaacctattttttaagaaaaaaaaacgactcttattacattcgaagatttttgtcatgctatagagaaagccgcttagggagtc

SEQ ID NO: 246512 - DNA, 411 bp, Gossypium hirsutum
  unsure (1)..(411): unsure at all n locations
gacgttttgaagagtaactgccaaaattcgatggtaagttgattctgtgcgggcacacagtgtattgaaaatataatttatgagattattgaggtccaaggaattaaaaattagatagctgcatgtgtatagccaagctgaatgagctttcatatgtaccaacaaaagaaaagtaggaattgaactttagactacaaatggatcaaaaaagaatataaaatgggcccctgagagcttcttttatctgatatacatttcttgcttgaatgtacataatatgaatttcattagccgaattggttgtaggtctcttccgaatccatgaaatcaatgggcaaatacttttctctatttgaatatacatggntatgtagcttgtnnaananaaaaaaaannaaaataaaataaaaa

SEQ ID NO: 246513 - DNA, 358 bp, Gossypium hirsutum
gtctcactgctataaatccagggagttaattatgttcattagacgaagctatagtgcttcgtcatgtaagggcctttgcagacggcgagctgagattttataagtcaatgggggctttcatcggtttgaatcatctgtcaactgcgttattctggtctttgggcgttatatccacaacatataacattgcatgtatgattttcaggtaggtatgatgctacgagatcaatgtatcagaaacgtttgtattattattaacattgtcctgccaataccatattagagaaatccattaattgcttaacaaaaaggtgaacttgtaagaaccaagtctgggtcaaagaattaataaactcat

SEQ ID NO: 246514 - DNA, 418 bp, Gossypium hirsutum
atttttgttattactttcgttcttgttattccttcttttctgagatcatgttgcaatactgagattagtttgaatttcaaggtcccagtgcagctgcatctagacctactagcattgctgctagtgaggctcatgaatctgaagctaatgttgatcttgtacattcatcggaggtatgattttgtgtatatcaactactgtattctacttagcatcactgaagctgttattactaaatggttttggtaaaatatagcaatgtttggcatctcctgtgaatgttgctttgattctttattttgcttgaagtatttctgtttggcatctatgttctaaacatatttagacatggatgtgaagatatgaacttccaaggatcctcgaaaataaaagaaaaaacatacctgtgtcagacaca

SEQ ID NO: 246515 - DNA, 446 bp, Gossypium hirsutum
atgagaatcaagtttggcctcaagagaagctccattataatggaacaggttcggattatgatgcagtcatctctgatgaacctgagttggaagagatgctttcagactgaacagaatgagttccttcttgaaattcctcgccctttctcttggccatctgaggcagtcataattttgcgatgataatgcaaaccctgtctattaaaaccccaggttatcaatggttgcgtgtgggtgtgtttgtttacttgagttttagatttgaggagcattcaactgataatgaggcatacaatagacagcaggtcaaaagatggaactttctcccctttaggttatgtttcatagcataacaaagggtcctcaatccaaataccatggcatgggaaaagaaaaggttgaaatgcagctgtggttgtactgatactggtttggttttgcatttt

SEQ ID NO: 246516 - DNA, 338 bp, Gossypium hirsutum
aaaaaaaaaaaaaaaaataaaaaaaaaatataatttttttaaaaaaaaaaaaaaaaaaaaaagaaaattttaaaatattaaaaggtttttagttgtttgggaattattttaaggggggcggccgtcttaggggttccatgtttttttttttcttttttgcggctttatatttttttttttttggcgcctattttattttcacggcccgttgttttccacccttatttcctggaaaacccttggctttaccaactttattgtcttcgaaataaattccttttcccactgtgggttttattattttgggctcttttcctttttttttttttccaattttt

SEQ ID NO: 246517 - DNA, 363 bp, Gossypium hirsutum
gcaacaacagcatttcacatccagcagcggtcctggagattccccaggaacaagccgtggaaatggtttatggagtaggtcaggcgcatcaccaatgttgcagctgcatcttcactcggactattcaccggtttgggttctaccacttcatcaggagcctcttctccagttgattggagcagtggtagctcaatggggcaattggactataccaatatcgattggagcttgaatcgagggttgtcttcttcgccaagtcctggtggaatctggttaggatcatctacatctccgatgaagagcattcacatgtattatcctaacacaaacggattaagtgctaaaccagcaatgagattgaca

SEQ ID NO: 246518 - DNA, 290 bp, Gossypium hirsutum
  unsure (1)..(290): unsure at all n locations
tttgtatgggcctgggcaaaaatggtccattatacttctagccctaaaatctagggtgttacagctacaccaatcctgtcttccacattttttatctttagtcccaaaatcaagctatgccattttgtttttatctttaataaaaccaaaacaacataaaaaataacaaaaaaaatgaaaagaaagaaaacaaaaactctgggggaacataagcaaaccattattacatatcgntccctgaagccgttctggtttgccttacattttttacattttttaatttcttggtg

SEQ ID NO: 246519 - DNA, 400 bp, Gossypium hirsutum
  unsure (1)..(400): unsure at all n locations
gccttggaagagagtgaatttgagctagcattggcttgcttagacaaatttaaaagcataattggtaactgaattttgatatcattacctaccttctagttatcactttcacaacaaagccataatggaaaaaaacccattccttaccataggaacattcttcataaagctgtagttacagcaagctgttaaaaagacgggtgtttaaagaaagttgttcctcctagaagttgattcttatttgctctggctattgctttatagccataatgaaaaaatcattccttaccatggaaacattcttcataaagctgtagttacagcaaactgttaaaagacaggtgttcaaagaaagttgttgttttcaaaatanaaatttttttattaaataatttatatt

SEQ ID NO: 246520 - DNA, 369 bp, Gossypium hirsutum
aggcgttcggttacgcgttcgaatggcgaaactgatgattacccgtgcgcacttcttatgatactgcttttgagagccaccggaattttactcccaatgtacatgtaattcgatcaattacagccattcgaaacaacattcgacgacgacgaccacgacaacatcatgattccgaggagattgccatgtctgaagacaatgatgatgattgagcagcagcaacttcacattgcccgacagatataatcttgttgtatgttcttaaatcaattcccacttttaatctgggcattactttgatgcccatcttgtccaaattcctcaattttttttggcatcaatgggaaatatcgtgaagtatttatttgc

SEQ ID NO: 246521 - DNA, 413 bp, Gossypium hirsutum
gctagacggagcttaccttcataagagagatcttagattttacaactctgagatgcatagggctgcttttgcattgccttcgttcctgaagagggagtgaggctactatgagactccgcagccccggaacaagaaaactgtctcctaaagcaaatttgtagaacttgcaattgtttactttttatcgtaagcttataaatacttgtattcgagacataggcagtaaataaatgtgttcaacatgcaagtgaaattggaaccattttagtatgtatttacaggtctaatttcagggaatacgtagtataggacttagccttatgggttgtgtgacgcagcaatgtgtttgcttgatgataggtgcttcaaatgtctttcaagtcagtggtctgaacttgacaacattgaaacac

SEQ ID NO: 246522 - DNA, 270 bp, Gossypium hirsutum
cccacgcgtccgcccacgcgtccgatatcttgacatcagaagctgttgggaatcgtggtaagaacttagttcaaattgaggtttatgatctacattgtggatagactttgtccaaccaattcaactggtatcgaagaaagattgaattgatgcaatatccgttgaaccaataaaaagccgattgaatcgggcaaaaaatttgaaaaaaaataaaaatcatttggactgattttaagttagtttaaatatttaattttgttgctttagttt

SEQ ID NO: 246523 - DNA, 341 bp, Gossypium hirsutum
tagaatttgaggcaaagtcatcaacacacggagcatggtatgatgttgatatgtttctgtctcaccgagttaccagttccggtgaaactttcgtgtagatttgtcggatttggagctgaggaggatgaatgggttaacgtaaaaaaggcagtacgaggacgatccatcccatttaatgttgtatgaaaaagccaaggcttagcactttttcaagtagagtgttatttaatgttgtattccatggtcgtttatcttagtcggaacttgaattaggtgttattgaaacaggattttgtagctaccttgtgtactagcttttttaatcatgattgttaattatt

SEQ ID NO: 246524 - DNA, 245 bp, Gossypium hirsutum
  unsure (1)..(245): unsure at all n locations
attttcatcaaaaaaaaaaaaaaattaaattttaaaacaaaaaaaaaaaataaaatgtgagtgctaatctttaaaaaacaaataccacatacttgcgnttctataatattaaggaactgacttgaaaaatacaaatttataagcctgtatacttcactaacaaggcttttcttaatgtgatgaggagaaaagggcgcctctttcatgatgtcaattctttttgaaatctttatccctgctttaat

SEQ ID NO: 246525 - DNA, 399 bp, Gossypium hirsutum
cttgcgtgccaggtttgtaggattatggtgtctttccgcacctttcctgttcgtcttttctatcgaaataaaatgaactgccaaacttcctttaattttcaataaagttggaagttttgatcttaaaatcaatgaacgttttggctttgtttaaggttggtagatgctgttaaaattctgggaaagtcgaggccatgtctcatatcaatatctaatagttttacgtcattgattcggaatccaaatgcggtacgtagcaattagttatcgcagcaggcttgggaagtgactactgaaacggatgaagatacgagctccaaataatactcgtgtaaaagcaatttggtaacagagaaataaaagaaacttcgcaataagcttcaaatataatgcttttat

SEQ ID NO: 246526 - DNA, 415 bp, Gossypium hirsutum
gagaattaaagctgaagctaaagctcgagatattgaagctgcagaagcagccaagagaagtgcaaaagcggctgtctcatctattcttccatctaattatttgggaagaaagaagatgaatctgactcaaccgtggcaaatgaaaatggtgaagtgccggatgaagatgagagtgaagggtctattgaggaagctaccgttatggagtcggtttcagattcgaatcctgttgatgcaaagcaaccattctgatagcaagaagtagctccgttgttttgaaggataaggtaagatctaatatgttcatttatggacttaattttatcagcttgtgtatcttgaattaggggattaaagaaaattaggttctagagtcactctctgatttctaaatattgatgggcatactggttga

SEQ ID NO: 246527 - DNA, 212 bp, Gossypium hirsutum
cccacacatccttacattcacattttattttataaacaaaccgccaagcgcagagcggggcgttaacatacactagaaatcacttccactcatgaagtacctcaaagacacccaaaacctttgccttcatgatcaatctcagaaatacaatcaacacacaaagttgaacgtgtcattggtaactacattgcatggtcaaggttgatctcata

SEQ ID NO: 246528 - DNA, 377 bp, Gossypium hirsutum
  unsure (1)..(377): unsure at all n locations
cacagactgttgctggctacgtattccttgtggttgctacctctatcatgacaaattgggcccttgcaaagcaccgtcggttgaagaagctattcgacggtaagatggaaggccgaagtacccccgaagatgggttattcttcctccattcctgtagaaaggatcgatgagcatcgtacttttcgagatattaaatttacgacgttgaaacatggtttccgagttcattgaaagatcaattcttgttagattatggaattttagtatgtgggcatgcattaggatgcttttttgcttatgtaaaatcattgccggtttaaactattgctgttggttattatttcaattgatggatnttcattttcttattttaaatc

SEQ ID NO: 246529 - DNA, 404 bp, Gossypium hirsutum
ccacacctaacgaatagacatactatatatataaatgtgtgatacatggacacacatccatgatcaaggtacagatatgcagaaaagcaacattcggcattacgtgaaccgggaattgccgcgctaggaggcctcactaacaacactactaaaggcgaacttcataagaagcactggctcatccctatatatacccgtttagtaagagcggacagcagcacaactcgtacctaacatgctaacaccacggtgatggtgtttaggcaaggcatcttcctgtatcaacatatgcataaatagatcctcatctctgtatagcataacagtaaattaaagtcccctctttttttactttagattttcatgtctcccccaagggaaaaggttatgttttatttggggcg

SEQ ID NO: 246530 - DNA, 158 bp, Gossypium hirsutum
  unsure (1)..(158): unsure at all n locations
cttnccaatattcccggttcctagaaatgtatacttttgttttgagcccggccaccagaggcaagggttaatttttcatcactagacctggttgagacacaatatttgcgactttaaaaaaaaaaaaaaaaaataaaaatttaattatttatatattt

SEQ ID NO: 246531 - DNA, 326 bp, Gossypium hirsutum
  unsure (1)..(326): unsure at all n locations
cccacgcgtccgattttttcttcttaatagtaaaatactcctttttgctcttctagggtgttgacctcaagcaaaacacgccgtcgccagaccacaccatatcaggtgaccggtaacgcgcgaaaggctcccgtttcagacgaagaacctgatcgacgaaggctaaacaccgaggtaagtaccccttttctttttatttatttcttttaaaatagatntgaaaccaaaaataagaaaaagatcgaaagaaaaaaaaagaaagagatagaatcaaaacaccttttttttgtttgctttattctcgatgctggaaatcatcttttgct

SEQ ID NO: 246532 - DNA, 242 bp, Gossypium hirsutum
gcttcacagtgtttggaagtaaaggtgatttggtgttcagggtagatacttacatggacggtaacaagggtgagatccttctcaaggatgccactgcaaccatctctttaccattcgccgcaagaaaatgatcctgggaaatagctggttgatttacaaaggcgaacgtaccttaacgaatcccctactttgtgttacgcaattgatgtacatgttaaacaacaagtgcttggcttacgtta

SEQ ID NO: 246533 - DNA, 133 bp, Gossypium hirsutum
  unsure (1)..(133): unsure at all n locations
atttttgtaatatgcttaactagatttagtttaatgtgtgaccatcatttgtatgaaatggtgatctcattatctctgagcatcaaatggaaacccaagctttgagatttgactntagtaacattgaaaaata

SEQ ID NO: 246534 - DNA, 333 bp, Gossypium hirsutum
ctcgaatccagttggattctggaaagccattttccatggctttccagaaagtcatcttttatatatgccaaaacctacatcctttaaccctctccaatatttttcttcgaatcatgctcagtaaggggggctatctgaatatccaatatcctttttagatattagattgcatctatccttttgcttatatatgaaattttaagtgcggaaaaatattgctgaagtatttattgtcttcaattttagaagtatattcccctctcaattcggataacttgtaaattactgataatccaaaatcttatcacctctaaggttcagattgaacaaagg

SEQ ID NO: 246535 - DNA, 331 bp, Gossypium hirsutum
cggacgcgtgggttttaagtaaaagaacacaaaaacggttccagtctgccggttctcttccaaatctcctttttttttcgtaagtatagttttagtggtagcacattttgacatatcctcttaaaggttgaatctatagcgaaaattttcccttgtaaagggttgacaatgaaatcaatgatgatgatgactatgataatggtcaatctagaaaagagttaagaactgtattgtcactttcttttgttccatggaagaaagcgttttgtttgtattgctctgaaattcatgttataaattgcaggcaaaactcaacaattgagtgtatgac

SEQ ID NO: 246536 - DNA, 410 bp, Gossypium hirsutum
cccacgcgtccggtgaagattcttgtacttcttttgttctctcatctgaagcagcagtggcaggagctggatcaactaaagacatgcaggcccaggtgctgggcggtcaagctatgtgtcagcagctatacttgcaacagttccggatcctggagcgatggcagcagctgcgtggtacagagctgcagctttggctgtgaaggataaattccatccttcttttaactcgtctatcaataaatcagaatcataatattcatttgtagtctttctttaatcgaatctaccaaagcgttgcttttgtggttttagccttgcttttcaaaagtgttgtaaaaaagaaaatatgtatttagacttaaattataataaaaattttaaaattattaaattaagtaaattcaaattat

SEQ ID NO: 246537 - DNA, 414 bp, Gossypium hirsutum
cccacgcgtccgcccacgcgtccgcagaatgggatatgccatcatccatggttgtatccgagggtcgagagagggcacaaaaagcccgagtttgctgtagttgccagcgctcttgttcggataaaacacacaatcgtaagcaaaagaggatcacaaataatcacttgaggtcttggtttacacacatatatataggcaaactttttcagtgaattataggtaattttttctgtttgtaatataccatttctatgtatcagctaccttcggatatcctgtggctcaatgtgttcatagctccaaagggtaaagaggggtccgtttgtgtgttaaagggttaggggtctattctagtttttacatatgtatatatatacacatatcatgtatgtgtatatgtatgttctggatgct

SEQ ID NO: 246538 - DNA, 339 bp, Gossypium hirsutum
gccgttaaagaaaattaaaatgcatagctttgtatttccttttcttttgtttaaggtgcaatgcatagaaatgaaggatgaggtgttagatggagaggctaagtagttgcggacactttcggagagacgagtctgttctagcttcttcaccgtcaatatgaaatttcttgtatgcaagaaccaagctccattattttcctaaattgtatatagtttttgttatgtgccaattgcaaggtatgggacttgtattccgcataagaaaataaaagatttcctaatgaagttttaaaaatataaaaaatggttaatataattattatataaggggtataggtt

SEQ ID NO: 246539 - DNA, 132 bp, Gossypium hirsutum
ggaactaatcaagtaagtgaaatttcaatttttggccttagagacggcctttgttttaaagaaggaaactaagcttaaaaaataaaagttggcctgaaaagaaccaatccaatttgcttgtttgatttgctg

SEQ ID NO: 246540 - DNA, 261 bp, Gossypium hirsutum
  unsure (1)..(261): unsure at all n locations
ccgaccccgcgtccgcccaccgtccgcccacccttccgtagtctttgcttttgagagtaactttaaaatcctagcagccttgagtcctaacgagtccctgtttcaatgcttgnctttttagtttgtaaagtgcattgcttgttgaacttttatggtgcgtgtttgaatgatgaaagacctcgacatattttcttttaaaataaaatttattattttttaatgttatatattatttaatgtttgttatttaattattatttt

SEQ ID NO: 246541 - DNA, 324 bp, Gossypium hirsutum
gttagtgaattgcaagtaagctggtttgtatcagtaaaaaaaattccagctgatggcaaagaaagttgtaaggtgggggtgctgaagcggctgcaaacaaaagaaaacatgcagcccgcagcactcgagtcatatagtagtttcatttttactgctatgagaataagagagatttagataaaccaaaacaatattttcttgatctgcaatgtctttcttgtgtctctacgttaaataaaagaaaaggcaattgctttttttattatattactattattttaattatttttttatttctatttattttattgattttttgtatat

SEQ ID NO: 246542 - DNA, 226 bp, Gossypium hirsutum
gaaaatatagagcaagtagcctgaatagctttggatatcttgcacagtcttcaaaattgagacaattctctccatatatggtaacacaaatggcttcaattatttgtttttatttcttctctttttttttttgtgctgttggtcctccatcgcagtttggggattacctctgtcaagccaggagaatttgaaggaaaaatgataatattctctattgatttgattt

SEQ ID NO: 246543 - DNA, 303 bp, Gossypium hirsutum
gtcgcacgctcgaggaaattcaacacctttattgcccaatcggctttgcatgcaacacacgggccgggagaagtcgagtcaatgacatccatgagaaactgcgtctttgatggcgaggttctggagttgacaacttcactagcaacaaccggaatcaacacgcgatcagtctaaagtccgggttggggaggtgggcatactattagcatcgtgaaggtgtgtggacaatgccacctacttaactatgactcaccacgattgggacactacttgcagtgccatcggagagatgtacagatgcac

SEQ ID NO: 246544 - DNA, 341 bp, Gossypium hirsutum
  unsure (1)..(341): unsure at all n locations
gcaattcaaatagtatcttcgacaccagacatggcgaaagcagcgaagcgtttaggcgagttcgcggcctgtgcttggaagaagaaaaggaaaggcatgcaatggatgatatttccgctatctgcctcttcttccactcatctcaccatgaagttaatcttgtaacaacttcaaaatagtgtgtacttaaatgagcaaatggtggctgctcttaaagtttattacaactatattatatatttagttaatcagaaagtattcatttcatgctcatanaanaaaaaaataattaaaattttctaaattaatattaaaaatatttttttaaaaaatctatattt

SEQ ID NO: 246545 - DNA, 332 bp, Gossypium hirsutum
cagaacagctggaaaccataaaggctattgaagagtcatttccaaggtcccatctgttgtgtcgatagctattccccacagatttaaacatcattaagctatctgtattggatgttgctccttcacccatttcttcaatccggatttctttgccaatcttcatccaaggttgaaatatgacgttccagttcttttcctatcagtttatttctaaatgaccatatcaaccataacgcatagcagaaaagccgacactggtaatagttgttgttgttgaaaacccaggttagccactcccatgtattctgactcgtattctccatgacccatga

SEQ ID NO: 246546 - DNA, 425 bp, Gossypium hirsutum
ccacgcgtcgccacgcgtcgaaatctcaaagataattggaatttggagtgagcaagaaaaaggggtttgaaagaacaacagcagcagccatggcgaagaagatcagcgtaacaaagaaagccttgataccaggttcaatcaaaccctaagaatgtccaagggttcacaagaatgatctcctagttgtcaaagaaggttctacagaacgatgctggtacaagtgatgacatggacacatccatggagggaggggtcagaaatacaaataattgtgatggtaatacaactgttaataagttaacatcttcatcctcgaagaatgaggatgctgcccatgaagtccagaactctgcaatgggcacaagaactacagattctgccagggttacgaagttcactaaagagctctcaggacaaatggtcat

SEQ ID NO: 246547 - DNA, 436 bp, Gossypium hirsutum
  unsure (1)..(436): unsure at all n locations
accacgcgncgattttttccatcgccgcttgcatcgatgacaagtgtgccgcttgcaatgccgtcgcgggggagctagagattcaactatcgaaggaaaaacccaggaaccatttggatatgagacatcgtttggactcgaaaggtcaacgccaaggaaaggttattgattacaggatgagtgagcttagagctgttgagctattggatggactttgtgaaaagatgcaagattacactcttgaaaagttagattcatctcgacgtgagtggatcaaagtgcataattgggacatcctcactattgataagcaagaagctaaggcatactcaaaagatatatcctcttattgtggacggttactggaggaaactgaagatgagttaacagaattgataaagaaaggatccgttaagcaaggagatgtaagcaaagt

SEQ ID NO: 246548 - DNA, 419 bp, Gossypium hirsutum
  unsure (1)..(419): unsure at all n locations
acgattaaggtgttgtgcccaggtanataaggtgatggcacanaatcaanggaaaggtcctctncttccttctggtgggaagacaacctttatttgaggcacatgctcattgaaaaggcaccagaaagactttcctcactcaaccaacttttttctgtttgtttataatacagcgagctgatagtagcaaaaagaatgacttgttattttgcttcagtaaaggaaaggtgctaacatccatgtattaacaacttgataaccacactttatggaaatcaacctatcaatcatgcccctaaggatttgaccaatggtagtgtgtccgcatcgattcttacaactcaccttcaaaatcttttccagcaaacctcacttcaacagggtcttatcgtgaatttgttgaatagcttgcagtcagc

SEQ ID NO: 246549 - DNA, 373 bp, Gossypium hirsutum
cccacgcgtccgacttgcagcacatctcatacatcctgtaaaatatcacaagaccgcaggagaatgctcagaattctctaaatcagccttacacagtggacacaccgcttgctcgcacagagttctacgcgcaagattaccatagtaaccagtgatcgttccatatattaattcgatcaccattcccaacccttcacacaatcccttctgcaatcaactcacgtgcattgcaaatgcttttccaggtaaatgattgatcaagaaagacgagaagaatacctcatacggagaaaagagaaagccgtttattaaattgcaaaatcacgatattttgctccgattgacatctatcaactcggaacttgttcggagt

SEQ ID NO: 246550 - DNA, 129 bp, Gossypium hirsutum
ccttaaatcccctttataactcttcgatagggccccctaaaaacaaattacttgcccccgtttttacaaccttttgacttgaaaaacctggccttacccaacttaaacaccttgagcacataacccttt

SEQ ID NO: 246551 - DNA, 373 bp, Gossypium hirsutum
gatcctactaagtgcatgtaagaaatcttgttttgaagcactgggtgtggttgaatatttgagcatataacttgagagagaagatatttggtatggtagttaggctagtcctaagtcctaaccagtcatatatgagtagggttcttgtgatctcaagcaattatgccagtttgattttgcttatttatattaatagaggatttgctttgctcttgactatgtaaagaatattattagcttcactttaagcgattttcctcgtcaaagaaaaagaaataaaaggtaagcgccttaataataatcaaacctttcattacatgtccccagcttaagtccttgctttgggccctcgatgtagtggttatttaagtcc

SEQ ID NO: 246552 - DNA, 317 bp, Gossypium hirsutum
  unsure (1)..(317): unsure at all n locations
cggcccggaancccggncgacccacgcgccgcccacgcgtccgaaaaaatactagtccatgctttcaccattgtaccaatagtccaaaccgatactttttatgctacctaatgaaactctattatttttcaccatggggtttctactacaatcatgtatatattattacctttggctatggcacgtaataataagaaaagagtttaatgcanaaaaaaaaaaaaaaaaaaaaaaaaaaaaaaaaaaaaaaaaaaaaaaaaaataaaaatataaaaaataaatataaaaaattataaaataaaaaaaaaaaaataatt

SEQ ID NO: 246553 - DNA, 194 bp, Gossypium hirsutum
ggttcttgctagtttgtttaagtggcatgtattaggaaaggtctttagcattttgatattgttgtgaagatgtaaatattgaaagttgatatgtttatgcttgttgcttgtgaattacatttgaacttgtgtgcataactaggaaaaccttttgaaccacatataagtagatactgtacaaatctttttggtgc

SEQ ID NO: 246554 - DNA, 353 bp, Gossypium hirsutum
gccttcttttcagaactaggcaagacatcacgcgactcttccagtaagggtaatacatcttctgatcctaggaacgaggaagaacctgcttgggcaccattgcgtgataattacatgctaacaaatcctaagttgaagaactgggataaaacagctgaagcaggcatagctgatgatgctggaaggatgtctgaagatagtgggtcagatgatgattaatttcatccgaatttaagaagcttaaaggttatctcttatagttcggtcatagatataatggtctatttatcatctaacattataaatgagttaaaatcagaggcaaatggttctatttggctgatgatgcgttt

SEQ ID NO: 246555 - DNA, 330 bp, Gossypium hirsutum
  unsure (1)..(330): unsure at all n locations
cgaatatgcaacaacatgaatattcgtgagcgttcaaactaatagaggttatgcgggtggtgtaggaacctaggtcatacaatgtcgtcctatccacatcaaagttaaatattgttatatgtcttcatgggaattgttaaccattgttaatccaaaataaatttaataaataataaaaatatattaaaaattttttaaaaaaaaatattataattatatataaatattttaattaatatattttattttnttatataataattataatttttttttttattttttcttttttatatttttattaattttatatttttattatattttttt

SEQ ID NO: 246556 - DNA, 177 bp, Gossypium hirsutum
cccacgcgtccgcttctgagaccatccgggtatccccacttgttcacattctctcttaatagaaaaaggaaagtttgaggtggaggaagtctacaatttctctcaagatgatctcttgacagaagatattttgatacttgacacacgtgctgaagtgtttgtttgggttggtcaatg

SEQ ID NO: 246557 - DNA, 312 bp, Gossypium hirsutum
gccgggatggtacatagcatggttattacttaagatggagcattattttattgggtggcggtagattctcatcttagatgccaacagctatattccctttctgagaaaacaatcgtaagcatttctgctggataagaactgggctgtaactgctactgctataaactatttctacatgttaaatggcaagaaaagtttttataaaacttttgttccaactcaaatacttctgcttttattaaatattgtttcaaagatgaatcatatttttttgctacttttatatttctttttccttttttattttttttt

SEQ ID NO: 246558 - DNA, 326 bp, Gossypium hirsutum
  unsure (1)..(326): unsure at all n locations
ggcgaccacgcgtnggttacctttctctttacctttttatttattttcgtatatgaaaaaataaaagaactaagggatgaagaaaaatataaaatcaaaacaaagaactagatgaaaaaccctcgtaaataaaaaaacaacaatcaccttcgaaggttcttttagattaatagtctctgccttttgtttgtggctaaaaaaaaatacaaaggtaaatttctggtttttataaccgannntcaagactggttactcctatttttttttgtcgtttctacttgttcctctgttgatgcgtgtgggttttgtctgcaggtgtcagagag

SEQ ID NO: 246559 - DNA, 357 bp, Gossypium hirsutum
  unsure (1)..(357): unsure at all n locations
cttcatttcgcccaagaattggccattctaattgaatggcctattcttaaccactaactgctccctgcatttggccagggggtcaagggtcccaatgtcaattggaaaagatccggaaccacctgctatcaaaagttggctgttacatgccccaatgtcaatgatgttcggtaccaagactgcagtatgacatagaagtcatggtgtttgttgcatangngatgaactacgtgactgtctgcagagtgccactttatgtatcacatctaatgcaaacaccattatatgaagatgtgcatattgatgagttgctgtgttattatattatgcacttacgtatatcttaataattgatgc

SEQ ID NO: 246560 - DNA, 402 bp, Gossypium hirsutum
tgaaatcaatgattgggacctctttttcatgtttcttcaagaaactggatttggtttgctccaagaactgcatcatcgtttacgaatgtcatgttctgccagtttcttttgaacataacaggatccgatgaatgataatcaacaaggatgagtaacctcaggaagatcatgctggtgcatgatatgcaaaggcatttcggtcgaaaatgtttatcgttttcggtgaccaaatctggcttgactgactaactgttagggtgatttttgatgttgtccagcatcattcctagttatggaggaccatttttaaacagggccaattgtaggctttctacatgaaaattgctgcctttttcttcttgaatggattggtgatgtacatatatcattaccttagacata

SEQ ID NO: 246561 - DNA, 364 bp, Gossypium hirsutum
  unsure (1)..(364): unsure at all n locations
gacaagcaatgccctggctctcgtcaacaactatgcctcaactcaaagtaacttaccttagtttctcatcatacgggggaggctactacttctcatgaaaacactaaagagaagataagtataagctgaaagatttgtaagatagcaggttatgttgtgaactgtattgagggaatatcaaatttgtgtttgtgtgaactgttgtgtatatgtaatacaatatcaacttgtgaatcaaggtttagttttcaaaanaaaaaaaaaaaaaaaaaaaaaaaaaaaaaaaaaaaatttaaaaaaaaaaaaaataatgaaataatttatttaaaaaaaaaataaaattaaaatatattttaaataaggg

SEQ ID NO: 246562 - DNA, 411 bp, Gossypium hirsutum
ctctattttattctctgcgaattcattcccctgtttttcttttcttcttttttgaagagcttcatttccctttcaatggaaagcatggaagccaagctcccacaaaacccacctcataaaacacacaaacttgtcctttgtgcacaaatttgtttgagaatcgtggccatttcgactgcatttgctgccacatggacgattgtcaacgccaaggaaactgttgtggttttcggcttgcaattcgatgctcgatatacctattcctctgccttcaagttcttcgcgtttgcaaatgccatcgcatgtggtttcacttcgctttccttgatgttcgtgctcttaatcttccgccatggccgctttacaccttcgaacttcttcttcctattcctacacgattttgttatgatg

SEQ ID NO: 246563 - DNA, 213 bp, Gossypium hirsutum
  unsure (1)..(213): unsure at all n locations
gagagttagagacttaaaagaagaagtcgatttttgtgtgcataaaagttgtctccatttgtttaattactatgtacctttgagcttttgagggtagaataatttcccacanaaaaaaaaaaaaaaaaaaaaaaaaaaaaaaaaaaaaaaaaaaaaattaaaaaatattaaatatatttattgctttttaaaaaataataaaaaaataaaagg

SEQ ID NO: 246564 - DNA, 309 bp, Gossypium hirsutum
accaatcatcacccgattccatcttggactattcctatcttttcttttataattatcttgacccctttacccattctgaaaaatccaatatatacccaccaaagaaaaagcaagagcagtaaaaatccttgatcagcaacccataaggtttcttttctgtttttgtttttttgtcaatcaatcaatcatgacaggcaaagcctagcccaagaagcacactgccaaggaaatcgcatccaaaagcgatgccggcactaccaaccgaggttgtggccaggctggattaatttgccgtgcttgcgtggagac

SEQ ID NO: 246565 - DNA, 404 bp, Gossypium hirsutum
gctatgttatcgatacatgttagttccacatcaacagcgggccagacctctgctactaaggggttttgaacgcacgggattgatgtgcgaaaaccgctacagacccaactgactggtccatggtcttcgagggaggctagaaacaatttttatataaggtcgcatagtaagttcactatgagagactcactaccttgaccatatattacggggactggaagcaagtttcctacctttaccgactatagagccgatattaccttgcgatgttacttgctcttaagtaccgtaagctggccgaatcggtacctttggcagtcgaagagtaaattgaaattgaagttgccggggaaacaattgggagggatttccgagttcttgagaataatatttgttggtttggc

SEQ ID NO: 246566 - DNA, 396 bp, Gossypium hirsutum
  unsure (1)..(396): unsure at all n locations
gggcttcactcttgaatgactagtgattccaaggtgtaattatccgactaattgcaatgggggtttttcttttatgcttttaacttgagatctggatgctaaggaattgatatggtcaaagcaaatatgttatgattttggaagcaaatcttgaatattttgaagagttattgttgtattagcaaaaaaaaaaaaaaaaaaaaaaaaaaaaaaaaaaaaaaaaaaaaaaaaaaaaaaaaaaaaaacccaaaaaaaaaaaaaaaaaaaaaaaaaaaaaaaaaaaaaaaataaaaaaaaaaaaataaaaaaaaataaaaatataaaaattattnnggggggggactttttaagaaaaaaaaattttatgggggtggttgggaaaaaattttttttttt

SEQ ID NO: 246567 - DNA, 426 bp, Gossypium hirsutum
gattcggtgagctctaaatgaaccataaggagcagcaaaaagtccagcactgttctttagtactctttgcaaaaacccatattgcagggcattgtctaaagacatggtggctatcctcttctccggagcaataacgaggacatctgacgttagtggtcactcgcttgtgtctaaggttgactagtgtaggtatatagttccaggagatccgccatattgttaatgtaattttttatggtagttataaattccatagttttctacagaagtctttgattttggtctgtattaagtaaactattaggatccaagctagcatattgtaatagtttataggcgctccgtactgagtattctccggaaagttcttctttccacacttgaaaatcttcatggttagcttctaaaaaaaaaaaaaaagggcgg

SEQ ID NO: 246568 - DNA, 422 bp, Gossypium hirsutum
gagaagctgctttaaactgctgccttgaagagctagaagcaaaaaataatgaaacattactacttggaaagaaggtcaaagagttggaagataaactgcaagtagctgtgaagggtggtggaagttcagccgaattgaaggatggagtagaggtgaagtccagagatattgatggattaacattttcagcatcatcaaaacggaagagcaagaaaaagttggaagcagcttcagtgcaagctgcatcctcttcatcaactcctacccaccacgaggttgcttcgcccttgaccaccttaaagttcattttggatagcttttgtgtccgtaatcatcggtgttattctaggaaagcgttattagtgtaagtttttcgtgtttattggtttttctttgcagcttgcgtctaaacatataagcta

SEQ ID NO: 246569 - DNA, 233 bp, Gossypium hirsutum
aacatatccaaaaatgtagaatgtgctttacctagagcttcttcctaaatatcagttagtccttgatttttttttcagtatgtactatgtgttatcaagtagatttggagtttgaatatctacatctaaattattttcatttccaagcagagatcttttctgatcaattttcttgtaacaaaataaatagtatcattgtgtttgttattatagaattacaagagtcttgtact

SEQ ID NO: 246570 - DNA, 316 bp, Gossypium hirsutum
cggacgcgtgggtgaagagcctgaaaatgaagacgaagacgaagatgaagaagaatcgagtcagccaccaaagaagaggaagaagtaatcatttacagattctaagactttttttcggtgttcaacttcaataattcaagcctaagtttcctaagaattaagaactgaccacagtttttacctaaacttataacatgtgggacaagtcacgagagttaatggcttctaatttagttcataaatgctctttacagagaactttgaacctttataattttgtgttactttattagaaaaaatgaaatcgcattatggc

SEQ ID NO: 246571 - DNA, 325 bp, Gossypium hirsutum
ggagaaatgtttatagtttggtgttgaagggccagcggattgtaatttgaaagtgttattgtgggaagtgttgagaaagggagggcggagcctgatttttggctttgatgatattctcacatccatatctactacccatgacaatgacagaatgggagttgctctgatatttgtagctttgatgaccagttagttaaatattttagtaggtcgtggtttcaactgatcctagacttgcatttcatttctcctgcttgaaccaaataagatatgcttctcttctctttgtagacagccatggctttagtgttttgttttcctcagc

SEQ ID NO: 246572 - DNA, 342 bp, Gossypium hirsutum
cgagaaatcaaggaaaggatcaagaaaaccaaggatgaaaagaaagcaaagaaagccgaggtagcggcgaagcaacaaaagacgcagggcaaaggtaacattcctaagggtggtgcaccaaaaggtgccaagctcggcggcggcggaaagcgttgagtggctaggttattttcccctttttccctaccctgagaaaataggtagtattttcaaatttaatgaaagccttgtacggtatgaattggctttttggttatgttgatttttattttatgcttattatataccatgacctcatgttgaattcaagttatcaagtaattttatggattttttttcaat

SEQ ID NO: 246573 - DNA, 258 bp, Gossypium hirsutum
atccgtttgcctttgaagattcttaaactgtgttcaagcatttgttgttgctcgtcttgatgttattcgagctagaaatcatcaatggaggaaaagctggtatgcatcaaagcattttgttcacggtactagtggttctaggatggattccttctttatactgcttttactgttcagagatgaaaagaataaccgacttcgcttactgaaccgcactctggcaaatattcaattgacgtgcctgttatggtttatgtt

SEQ ID NO: 246574 - DNA, 169 bp, Gossypium hirsutum
cccacgcgtccggtaggttggctagtgtaggaatatagttccaggatatccgccagacagacagtagagtttttgatggaagttgtaaatcccataactttctctagaattctttaaaatcagtctgtaataagttattagaaattaaatcaacttcttgtaatagttt

SEQ ID NO: 246575 - DNA, 400 bp, Gossypium hirsutum
  unsure (1)..(400): unsure at all n locations
cacaagtttagctttgaatttgggatggattttgcttccttgttgactacaatatgtggttgattgtcattaatgtttaaggctttcaacaagttgccaagcatattaagtttgtttagattaggtggatgattaacatttctcttttgcttggattttcccatattgttataaattatgtgttcctgtttcttaaaaaaaaaaaaaaaaataattaaaattttattatttatataatttttaaataaataattttatatataaaattattatttttttttattaaaattttttttttttttatttttattttttttttatttttttttttttattttttatttttttttttttttattgntttnttntttttttttttttatatttttatttttttttt

SEQ ID NO: 246576 - DNA, 444 bp, Gossypium hirsutum
  unsure (1)..(444): unsure at all n locations
accggaatggnagggccggacccacccgtccggatcgcggggaggtggtgtggcccacgactcgtttttgcgcgacgtgcggagcccggaggcaggcttgcggcgctggcttccctgatgctgggtttctcatttccttttttgttttattggtatttggcctaggtattatgtgggcttgtgttttgttttgtatattgggctgagagatgtgggttaggttttgggtaatctgttgggctttgggtttgttttaaatttggtcctacagtagggttttggcattcttagctttgattgattgcttcagagtttgaggagtgaagaggtgaagtatgaaaaatatttttgcatgactgagaagaatcattcattagtggtagggtatacaaagattatgattttttgcgttatattccttcacactacttttttagatatgta

SEQ ID NO: 246577 - DNA, 375 bp, Gossypium hirsutum
  unsure (1)..(375): unsure at all n locations
gtgccaagtaggaaatggaggtgaaggagatgaatgaagctacttaaatggattgggacgtgtgtcatgaaaggaagtagtacaatctaaaactgttggaaatgccctgttgtcaagagagattcaattgttatgactctttttatgatgtttggactgtggagtgtcaatggcattttacgtttttgtctgtctctttttaaaaaaaaaaaaaaaaaaaaaaaaaaaaaaaaaaaaaaaaaaaaaaaaaaaaaaaaaaaaaaaaaaaaaaaaaaaaaaaaaaaaaaaaaaaaaaaaaaaaaaaaaccctaaaaaaaaaaaaaaaaataaaaaaaaaaaaaaaaaaaataaaaaaaaaaaaaaaacaaaaaanaa

SEQ ID NO: 246578 - DNA, 270 bp, Gossypium hirsutum
cccacgcgtccgcgtgattgcagcactggtgtgttctagaaacccctagtgctttcggctgctaagattcccctttttggttctttcgagtttgggccctttttgcaaatcgggcttaaggatttggtctttgggcatctgtatatgtttgggctattcgggcattagaccagatttgtttttttattattattttgggttagtgtttattaaaggttgtaaatggacaatttggactttatttaggtttatttgactggctatttattt

SEQ ID NO: 246579 - DNA, 408 bp, Gossypium hirsutum
ctcgcggccacctctcctccaccgtcatcttctccaatctgggggggatgcgagtgtatgtttgcgagcacaacacttctccaccagagagccagcacataaagacaaaccaacagaacatacttattagatcgctcatgcttaatgacaagaatggtgattccagttcaaaggatgtgaaagctgcagctgagggtcctagaaagagggctgctgaaagagtcatggatagtagggcttcagcaaagaaagccaatacacaagagggatcaagcagtcgtgctgagaaggactaccatagtttaaccgtagagaggcttcgtgcccttcttaaggaaagaggactttctcccaagggaaagaaggatgaactgattgctcgcttgaaatgtgtaaatggttcatcac

SEQ ID NO: 246580 - DNA, 177 bp, Gossypium hirsutum
tgccgttgagcctgaaatagcagaggagttctaggacatggtcgttgtggaatcggttagtaggtattgatcgttatattatccagttggttagagttcatttcgcatttgttcattggcaaggtaatagtatggatgcttctttggcaatggtgagttatttaaaatttggtggcg

SEQ ID NO: 246581 - DNA, 156 bp, Gossypium hirsutum
gccaaaggaagctattctctgctaaagcttcacctataaaattgtgtcagctgtatttgtgtgatgtaccaggtttatggaccatggattccttgcttgcaagatgcaggatcaagagaatttgttaatccatgttaatatatagattttgtcccc

SEQ ID NO: 246582 - DNA, 220 bp, Gossypium hirsutum
atttatttattattatgaggagcaaaggatatcgaagataatattattttaattaatagaggagcggtagtagtagatagtcgggatttagggtcattttcctttttcctaaatgttggaaccattattatgttccgttgttactctcttttctttatgcaactgagggaattcctctttttttcttttttaacagcataatagtaacaccagctttcat

SEQ ID NO: 246583 - DNA, 246 bp, Gossypium hirsutum
  unsure (1)..(246): unsure at all n locations
cccacgcttccgtgcgatttacttaccgaagggcaaatatgtaacatggagggatccgtgcagttgaccttgcatatgatttgattcaacagggagaaatgaggcaaatatgcaaatgttgtagtgaaatatttcgagagtttttaattttctgggtgttgatgtgtttatgttggagattcttgtttgctaaagtaacacgactttcgcatagacattataaatgcagagaaaggttagcngttt

SEQ ID NO: 246584 - DNA, 143 bp, Gossypium hirsutum
  unsure (1)..(143): unsure at all n locations
atttagactgtttatgttatgttgtagtataataatttgtatgcaaatttgtaagttatgctagtttggctctaaaacaaaaactcttgaacttcagcaagagctttattcagaaaataatcaatgaatattttttatcangt

SEQ ID NO: 246585 - DNA, 159 bp, Gossypium hirsutum
ggaaatgaaagagtaagaatgcatgatcttgtaatagatatggttaaacttatcactcgaaatttgtatgaatcataaattaacattgcacatgtatggttgggtctcttacactttttattttagatgaattaaaatgatacactaaattcactattc

SEQ ID NO: 246586 - DNA, 192 bp, Gossypium hirsutum
atttcctccaaagcttgtaatagtttattgtaatagtttataggcactgcgaaccgaaggctcacctgaatactcacctcaccagaccaagaaatcttcgtgaggtgtgcgtgctaaagggatacgaaggatttttccagcatcatctgcggaaaatttattgtttatgaaatctcacttccatgttctctc

SEQ ID NO: 246587 - DNA, 442 bp, Gossypium hirsutum
cggccttttccccagcaaccattgaggcctccacaaggccaaacacaaatatcgtttggggtaaataccaagtccgtgttatcgcctaaggcacaagaaatacctacagcagccagtctgcatcgcctatgattgtttggtttcacgtagctgtggcaactcgagaacaagctcaacaagcaacacagttggtttcatcagttcctacactgccatcacaacgggacacagatttcttctgctcgtaatcgccaaaaatcgtctctggtttgtggaagaaacgtgccttcaatctttgagcacatgcaccagccaccttttctacagcagatgccttgttattacaggagacccccatggaattttcaagggacgaggtttttgaggggaccagagctcttcatgtatgcctgaggaactaaagatattaattgtctgacag

SEQ ID NO: 246588 - DNA, 408 bp, Gossypium hirsutum
cccacgcgtccgctcgtttttgaagtttacttccaaggttacaggcaggcatcttggtgggagagacggacaacggttccaccattttcaattgggttcttgttcttgcaaggatttctggtgaagctcttgggacgatttaatctttgtcttgaaatgaacgtggtctctgaaaagacatcggggtatttagtggacaatggcaatgcgaggaaggctctgttagtcatttggtgcttgtgttatgttgggttcataatttaagcattataaattgctgaaattatcattctggttctgctgtgaaaggatacctcctatgttactgggatttggatacgagtgtctatacaaatatctgtacggcacaaaaatgtttgcatggtttttaaaaattgtagtaaaaat

SEQ ID NO: 246589 - DNA, 383 bp, Gossypium hirsutum
  unsure (1)..(383): unsure at all n locations
gcccacctccgcccacctccggctttatattataattcatatatcaaccaaancgcttgtaattaacgtatttgcttgctaatgcttcttttccttgaattggttgggtcagtcttcggcatcatttttccaagacaacagcgtatctctagggaagttaatcggatttagacaacacagagaggatcaagcattttctaacgcaatcaacggggagagagtatcctgatccaatagaagctactgtcgggatgtctcccgacgtgacaacaattgccgattgagccaaggattgcatcctcttatactagctcacttgtaagatcaacaaagcaaagcagtgaaaccatttgtgtttgaggttgaatctaccatgatttagt

SEQ ID NO: 246590 - DNA, 259 bp, Gossypium hirsutum
atttcctccaaagcttgtaatactttttctcaataaatcataggcacttccaaccggatacttactttaatactcaccttaccacaccaagaaatcttattgaggcatacctactaaacatatacaaaagatttttccagcataatctccagaaaatttattgcttatcaaatcatacttacattttctctcaagatactaaaaagaagacttctaaaaaaatcataaaatatttatgcttcatcttagaaagccaata

SEQ ID NO: 246591 - DNA, 299 bp, Gossypium hirsutum
ccacccgtccggaagtttttaatcccaactttctgctaagtctaaaaggacattttctgatcgacaaaaggttaggttcatcattgcccagaaatgtgaaacgtttaatgtgattattacaaataaacattacatatgaatggttttattttttttacatttttgtgtgtgaaatgaaatgttcggtataatgctgacttgtggatatggcatgatttgtggtttgctctctcgttatataattaccaacaattcatggattttaaaaaaaaaaaaaaaaaaaaagggggccccccttt

SEQ ID NO: 246592 - DNA, 349 bp, Gossypium hirsutum
gtttgaattccaagtgatactttgcactcttaaaaaaaaaaaaaaaaaaaaaaaaagaaggaaaaaaaaaaaaaaaaaaaaaaaaaaaaaaaaaaaaaaaaaaaaaaaaaaaaaaaaaaaaaaaaaaaaaaaaaaaatttaaaaaaaaaaaaagggggcgccctttttaaagaatcaaagtttacttccccttgcttccaacttattagtttttttttagggcccccaaatttaatttccttgcccgccttttaaaaacttcttaactggaaaacccttggctttcccaaattaaatccctttgaaaaaaatccccttttcccaagttggcttaataccaaaaaggccc

SEQ ID NO: 246593 - DNA, 398 bp, Gossypium hirsutum
agcatcaatcgaagatgaatgaatgatccaacctactgtgaaattcaagccgaaagcaggcttttatcatatcaggtataatttgagctttgccggtgatctctacctagttttgaagattctgcataataccctttttaagcaatcgtccactaaatgtgtatattatttagcgatatcgataccctttggaattagttgtatatttaccatataggctctttattcgcctatatatatatgtcacgggtgcctcttggttgagtgttgttttatgagcaggatatgttttgatgtgagaatatcgagttttccgatcctttataagtgaagcaggttgcttggctcgaattcgaagtcgaatatcaccctttttaaaggcaatggcagtgagtttg

SEQ ID NO: 246594 - DNA, 103 bp, Gossypium hirsutum
cggacgcttggggccactattttcatctattaccatccaaacttttatcaaaagtaagaaatgtgactgatttccattagggaagttcattttctttttctag

SEQ ID NO: 246595 - DNA, 415 bp, Gossypium hirsutum
  unsure (1)..(415): unsure at all n locations
cccacgcgtccggaaaatacagagtgcatgtatgcctttttcacatgcaaaaagcggactgcagctctaccttttattggctttgcttaggttctttttggaattagtataattctagtactccctttttacccctcgctttgcatcaagcttttaagattcaatgggctagagagccttgattatcacaaccgattgcggattttcatccatgaagtgcatttttttgggttttttctttctttcgtcttgcatcgactgcaaatgttgcctacgtacgtataaattacagtatgacagttgctctgtccatacagtttgattaatattacaggtagtattttctgcttntnanaaatatttaaaatataatatttttatttttaattattaaattattttttttttttttttt

SEQ ID NO: 246596 - DNA, 302 bp, Gossypium hirsutum
gagggatgcgttaattcaagaagaggttaaggagtattttcgaattgcgtgtatgtgtagcagtgaaggatcgaaagaaaggcccgcaatgatacaagttgtagagcttttgaatcaaatttcgacttgaattttgcgttaggaaattttcttcttcccttttataagaatgttgtattatttggttcatgattctatctctaattggggataggatcatgtgaattatgtaaatagcttatcatcattttggctaataatcaaatttccattaataatgttgatgagaatacattttctcc

SEQ ID NO: 246597 - DNA, 372 bp, Gossypium hirsutum
  unsure (1)..(372): unsure at all n locations
cccacgcgtccgcccacgcgtccgggattagcatggcaggactgagttcaaagacgggcgctcatctggctgatgcaattcatgatgcagttactcgtatgtcatagaaattgggcttagcacacacagcaggtcctcaatacacttgattgggaatcacatcaaatgagtatttgtttttcactttaccattcaataataactgtatttgaacaaaattgtagccctcaaaacactgaaagggcagaaagaaataaactcacttccacttccttaaaaaaaaaaaaaaaaaaaaaaaaaaannaaanttagaaaaaaaattaaaaaaaaaaaaaatatttattttttaaaaaaaaaaaaattaaaaataaa

SEQ ID NO: 246598 - DNA, 381 bp, Gossypium hirsutum
  unsure (1)..(381): unsure at all n locations
cccacgcgtccgcccacgcgtccgcttactcgttcgcccacgcgtccgcccacgcttgctgccactcgtccgtgaactatagatttgataacactgtttaattgtgctggagaattgtgttttacttgtaattaaagtgtgtttaattgtatgcttaaacttccatagttataagttttatgttttactccattttcaggttgttgggaaaaaaaaaaaaaaatataaaattatattaaaaaaaaatatatttaattaaaaaaaaattatatttttaataaataaaaatataatttttttttaatttttaaatatatganttttttttaaattaaattttaatttttttttttangttattaaatattttttttttttttt

SEQ ID NO: 246599 - DNA, 422 bp, Gossypium hirsutum
cccacgcgtccggaagcaaatggcggtgaagagaaaaagggcaaggttgaggaacaggggaacgagcagctagtgaaagacacttactctagtaaaaccagattatatacagatcagtgcactgcatttgcatcaaatcttaacattagggcaatagatgaagatctaaagcaattctttagtgatgttggtggagtcactgcgattcgaattctgcatgacaagttcactggaaaatcgagggtctctctctctgtctctctctgaatttgtgtatgccgacatgcatgtgccctcttaattatttttgtgtccgtcactgccatgttagaaatgaaacatgaagctgtcttcattagctgcttactagatgtcagtttggtgctcaagctgcactttccatatcacaatctttattaagt

SEQ ID NO: 246600 - DNA, 229 bp, Gossypium hirsutum
  unsure (1)..(229): unsure at all n locations
ttttcnnacaaaaaaaaataaaaaaaaagaaagatttttaaatcccctctaaactacccaacttacttacacatacattcttccctataacttttttatttttcaacctaaattaaatttactccccttctatttacacactaactactttaaaaaccctttcttaccccaacttaacaccacttatacaaaatccccttttcccaactttcctaatttccaaaaatcc

SEQ ID NO: 246601 - DNA, 442 bp, Gossypium hirsutum
cccggggcgagaccacacgcgtccgcccacgcttccggcagtttcctttgagtgaggacaaggaaagggaagttaagcagagagtgaaggaattggagcaggttcttgatgcattgaaggaagatttagaaccgctggaaaagctggttagggaagtgttccataggattgttcgaagccggactgaagggcttgattcttttgcaaggggacacaaccctgagtgaaacctctcttgttgtgttggttgatttacaccattagtgtcaaatgtgcaacttgcaaatatgtctgtttttggctttggggaagtcatggatcatgaagatgaagatggataaaagggcttgaggtatgcaccaccaaaaaaaaaaaaaaggggtaagaaggaaaaccataagaaaatagagatttgtttgtatttatcaccatatatcagtgt

SEQ ID NO: 246602 - DNA, 367 bp, Gossypium hirsutum
ccgccattttgttcaaacgaataatcaaatggaagttactaattaaagagctgctggtggttcatgattgagactgagtcctaaagcagttcaaatcggactctctgaaatgaagaatacacttgctatgttctgagaggtaatctaaatatctatatatctatgaagcatggacacggacacataatatgggtacgacacgatacagaacacggccacatggcaatttttaaaaaatgaggacacggatacggtaggatagcaataaaaaatattaaaaatattatatatatttttatgtgaaaatacttaatgtaaatgaaaatattgatatttttcattaatatataatcgacttttttccatt

SEQ ID NO: 246603 - DNA, 262 bp, Gossypium hirsutum
tttttgaaaagaacctggtttttattattaaaagggttaaagaatccctaagttggggagctttggtggggggtgggtggcaaggggaacctaatggcccttggattttaaaattccctttggtggatgccttaaaaaaaaaaaaaaaaaaaaaaaaaaaaaaaaaaaaaaaaaaagggcggacaatataaaaagatcaaaaataacatacacatacatgcaacgtcatagctcttgtatagtgaaacctaaattcaattcg

SEQ ID NO: 246604 - DNA, 360 bp, Gossypium hirsutum
aagaggctttattgatagcttgtaaaatacaatgttttatacacttttcatccccaatggtgagtgcaactttgtgtggatgatagcagccataaagctctgtttccagatggtggaaacctaaagcagtgctggcagcttgaaatacattggagaagattgagatgattcaatttgtttcatacttttctggacagaaagttgtcaaacagcaaaaggtaaacttgttcattatttgatctaaatgaaggaaatgacattcgagatgactagagaatgtggtgttttgtttatcacttctgtaaatatattttcagcagttgtaaaaaactccattactgaaaatatatgatgatcatt

SEQ ID NO: 246605 - DNA, 376 bp, Gossypium hirsutum
cccacgcgtccgcggacgcgtgggttgatgtactctttataaatttgatagaccaagtgggacattgagagcaatgatggatttgtagtgcatttcgcgagttaaaaaaaaaaaaaaaaaaaaaaaaaaaaaaaaaaaaaaaaaaaaaaaaaaaaaaaaaaaaaaaaaaaaaaaaaaaaaaaaaaaaaaaaaaaaaaaaaaaaaaaaaaaaaaaaaaaaaaaaaaaaaaaaaaaaaaaaaaaaaaaaaaaaaagggggggcccctttaaaagaaccaaagttaattaccccggccttgcaaataaaaacttttttttttgggcccccaaaataaaattaaggggccggcgtttaaaaacgttggacctggaaaaac

SEQ ID NO: 246606 - DNA, 168 bp, Gossypium hirsutum
cgtccgcccacccttccttccttgtctcccctaaatttaataaacgaataccaagttcgatttcatgttgattctgtactttaagttgaatccataatatagcatatagacatcgaactgaattgctgttgaacttcctagtaatattttcatgttcaagtttctttt

SEQ ID NO: 246607 - DNA, 327 bp, Gossypium hirsutum
cgtcggcccacgcgtccggccgaggttcaacgaaaatatgaagaactccagcaacaacttagaggggaggcagcagagagggaggcagcggctgcagcgagagaggcagaggcacgagcgatggtagcagaacagagcaaaaagtacgatgacctccagctacagcttcagcagatgatgcatatgtttcaacaatcgcaaaagccgccgtcttagacattagttttcttattgtaagaatgtttttaagttttgtcacgtttaacattattgtaaaaatattttaaattatactttatttattaattatatcatatatctttagtt

SEQ ID NO: 246608 - DNA, 261 bp, Gossypium hirsutum
  unsure (1)..(261): unsure at all n locations
cggtgagagaatcctaatcccccgagctacaacggaggcattggatgttcgtgagtaccctgtttacacctaaggttgacaaacgtgggcatgtaattctaggaaatatgccagatcgttattgcaacttttgtgggaagctgtaaactccatagtttgctgtaaattttttagattcggcctgtaataaataacttctagaatctagtaaagaattctgtaatagtttataggcactacgtacagaaaactctcccgnct

SEQ ID NO: 246609 - DNA, 266 bp, Gossypium hirsutum
gttaaccgggagcatcgggtcaaactcttcttcgttatcaaggtaatagctacgaatgttcatcgactacccggaaatggggtggcctttctttgaacaatcactgacttctcataaacagttagggtattctttgtgaaggctaggaaagatggatcttgatatttttatttattttccattatctaatttatgttatgtgtaaatatatgtttttataattgaattttatatttaataaatcgcttccaattgttattgatttt

SEQ ID NO: 246610 - DNA, 308 bp, Gossypium hirsutum
aaaaaaaaaaaaaattttttaaaaaaaaaaaaaaaaataaaggggagataaaaaaaaaaaaaaaaaaaaaaaaaaaaaaatggaaaatagataattaaaaaaattaagaatttaaataaagaaagagtaaaaaaagttacttgagggataaatggattgtggttttttgggagaacatttggagtttgctattttattctgtttgtgacggatctttcttttattgagatggagtaattaccaagtgttggattgttacatgtacttataaaagaacgtgagctgtgattagacaatggtgagacagg

SEQ ID NO: 246611 - DNA, 227 bp, Gossypium hirsutum
gttgctttgaacagttctatgtttggtgtggtcacactcacagattgatgatctttggttatggcggatgagtgactcatccaccattactacaagctttgttttggttggttttttttttttaattttttttccaagtcatcatatcttgtaggcctctccttgtatatgaattgtacaattgcaactactctgtttttataaatgaagcttgaaattttaccttc

SEQ ID NO: 246612 - DNA, 294 bp, Gossypium hirsutum
  unsure (1)..(294): unsure at all n locations
cccacgcgttcgnaaaatatttaaaaaaaaaaaaaaaaaaaaaagggggaaaaaaaaaaaaaaaaaaaaaaaaaaaaaaaaaaaaaaaaaaaaaaaaaaaaaaaaaaaaaaaaaaaaaaaaaaaaaaaaaaaaaaaaaaaaaaggggggggcggttttaagggatcaaagtttatttccggttgtttggaagttattattttttttttggggccaccaaaattaatttaatgggcggggttttaaaaacgtggggattggaaaaaccttgggtttcccaaatttaatggctttg

SEQ ID NO: 246613 - DNA, 331 bp, Gossypium hirsutum
cttagacattatctcatctcccttactctccctttattctccagccgaaaggctcatttcaacccaaccatttccaaaatctgatcgtgaccagcggagcaaggcccaccgacggtgtgaacgcgatataactccggtcatgaagacgcggaggagggcgacgtggtacgtgggtgcgaacgtggagcagggcgcgcgtgtatggcggaggcgatcgcggctgcggcgcaaatgaggcttctagtgtttagggtttgctgaaaagtgttttgggtttgcggtattttggggctgtttgggttaattgtttttgtaattttggaattttttt

SEQ ID NO: 246614 - DNA, 325 bp, Gossypium hirsutum
cccgagtatagtggaaaaatggttaaagtcaatcagtctgttaatttatccattatttgttcaagaataacattgtttcttttgagctatgcatgggatgttttcttttgatcagtaaaaataagcagttgtgctgatcccgggaattaaactactgtggtctgtgcccctgtgcaagtttgtattttaatttgtcttctgaaagtatataaaaaattttaatcttgaaattagattaattttaaatggaattccatgtaaaattctttataattcatatattttcagaaaaggaagcatgatggagatgaagatcttagtgatg

SEQ ID NO: 246615 - DNA, 299 bp, Gossypium hirsutum
tacctaataaaaaattattaaaaaaaaaaaaaaaaaaaaaaaaaaaaaaaaaaaaaaaaaaaaaaaaaaaaaggggcgccggttgtgacccacccgtcctcccacgcgtccgaccgctacttccaccatggcatggaggggctcaaaccttctatttagcgtctaaatctaatcataaatttaatgttggctattagagtttttttcggacttcacccttaataatttttttgccttttaatcttaccctttgttatcctagaattgggctatttgctctccaatttttttttcatttt

SEQ ID NO: 246616 - DNA, 256 bp, Gossypium hirsutum
cccacgcgtccgcccactcgtccgttttttaaaaaaaaattgagcattagttttttttcctataaatggaaacattaactcgttaaactcatttgtctttcggcattcctaatctacctttaatccacaaccccccccccaactaattatactcacttgtaaaatttgagtcatgttatttcttagttcacgctcaaaccctttattcttaagagtaatgtaaatgaggttattgacccactattacttctgttgt

SEQ ID NO: 246617 - DNA, 205 bp, Gossypium hirsutum
ctagttcttgataccgcagctagcttgtttgtttgtttggatgcttgatgtttacatatattgtttgatttctatatttgtgataaaacaatctaaatttcttaattataaaaactcattgtgagcagaatagtccagggaaaagggaaagttgtactagctgctgcttctttttaatttcatccatccactcaacttcataacc

SEQ ID NO: 246618 - DNA, 293 bp, Gossypium hirsutum
cttaataataatctcctgtcaactaattattctaaaaaaaaaaaaaaaaaaaaaaaaaaaaaaaaaaaaaaaaaaaaaaaaaaaaaaaaaaaaaaaaaaaaaaaaaaaaaaaaaaaaaaaaaaaaaaaaaaaaaaaaaaaaaaaaaaaaaaaaaaaaaaaaaaaaaggggggggccgttttaggggaccaaagtttccttccccgggcttgcaaggttatactttttttttggggcccccaaaatgaattaatggggccggggtttaaaacggtgggacttggaaaaacctgg

SEQ ID NO: 246619 - DNA, 260 bp, Gossypium hirsutum
tggaatttgatgatgcacggaacaaattttccttgtagatttctttcaaacttttttttttttacatttccatttaaccaagcccctctttacacaaatcaaagtaatatagaacgtgttttttgcaatctccttgattcagacagtaatgaggaagaaaagtaaaattcaaggttgttcatattgcttgttgataaaccttggtttatgtaatgctaaatttgattttttttccctaatgaaacaaccttttatgccat

SEQ ID NO: 246620 - DNA, 305 bp, Gossypium hirsutum
caacattacaacaacgttaatagagagcatatcaatcaaattcatcaaatctttcattcttatattctctttctttcttggtttcatgttttcagggcctttgtgttgaatctaatccaatctctgctatctttctcagccatctctccacaagcaataagaagaagattccatcccaatcttttcttaaagactacccatatcttcttcttcttttttgtcagaagaaaaaaatatatctgaatcccatattttgctgaagaagagattccaattctgctggtttttacccctcgacatgtctt

SEQ ID NO: 246621 - DNA, 297 bp, Gossypium hirsutum
ctaagcgtccaaaagtatagtttttttttatcatttattttaggtgaacggttgtagtagaagatctcatgggaattttgtttaattgatgaatgctactgtggtataacagcaaaaattgtgagagtggaggtgggggaaagaagatgaaagcaaaaagggaacttggtgatagtgtagacggggaacgagacttaaaatggcagagggttgtggattcaccatcttcacctcctgaagagtcacttgtgccttataatgacgatgaagatgatgaaagaagagcattgaatcaca

SEQ ID NO: 246622 - DNA, 151 bp, Gossypium hirsutum
atcagttttaatgcctggtgaggaaactcctactttcattgcacatcctactccagctctgctgccatgtccaccagaccgtgtcttgagacctctgcatcaacagagccaaagcattggtgtgccttcaagcttaagctgatgctgcact

SEQ ID NO: 246623 - DNA, 302 bp, Gossypium hirsutum
  unsure (1)..(302): unsure at all n locations
aagaaaggccctagtccatggttaagaatgtttcaaaatgccagagagtggtgctcatgatatggttatgagattcaaaggacaaatgagaggagttgaagtgtgattgatgatggatgcttcatctgagttaaactgttatattgaaatgcctggaaagcagtcttagtctttaatttagacataaagagtctttgctttgtgcaaacctcaggaactgtgtcttaatactatttcttcatcatgcccaanaaaaaaaaaaaaaaaaaagaccatgaaaaatgatgaaagaagagcattga

SEQ ID NO: 246624 - DNA, 309 bp, Gossypium hirsutum
atctgttcataaaaagagctgtttatgtgaatctatctgcagccatggatgatcggagcataaatcacaagtcatggatagcacagcatagagtttaatttataatccggagatagatataatatcattagactgttgcattataattttaattagatgagttagtagcggctggaagccccatctcatcagttttctttttattatatctttttttgttattgttgcttttgtgtgagctgttgcagaaactttggaacttgacaaactcattgttgaatcttgaatgcattcgacattcactggatt

SEQ ID NO: 246625 - DNA, 303 bp, Gossypium hirsutum
agattctttacttcggtgtctgttattgagaattttccttttatggctacttatgtggtgcgccaaactaattctgaccatgatgctatagtcttggataaaaaaaaaaaaaaaaaaaaaaaaaaaaaaaaaaaaaaaaaaaaaaaaaaaaaaaaaaaaaaaaaaaaaaaagaaaaaaaaaaaaaaaaaaaaaaaaaaaaaaaaaaaaaaaaaaaaaaaaaaaaaaaaaaaaaaaaaaaaaaggggggcccatttaaaagaaccaaattttacaaccgcttcctcgggaaaaaaaactttttt

SEQ ID NO: 246626 - DNA, 329 bp, Gossypium hirsutum
agagtgcagaaaactaatatggaaacagaaatccggcttgtgaaatttgggatggcggatgtgtggtggacccttctcgggactgctatcccggcagttatcgcagggcaagtttttagattgaggaaaaagcatgcctaagaacagagacttaagagtgccaggggaagggagatgtgctcggatgacattttcatttgatagaaattttttttttttttcatttttttttttttggtttttcttctttttttttttattctctctttttttttttttttctctcattactatttttttttactttatatcttttttttttttttttt

SEQ ID NO: 246627 - DNA, 237 bp, Gossypium hirsutum
cagcaattaagcatctcctacatgtttaatgcaatcaggagataataatcagtctcctagatgtttcagcataggtttctcaatcttatgtagcgttttttcttcctatggaaatgtaatgtaatgtattgtaggagagggcaagtagtagtattttctcttaggttcatttatgtggttgtagatttcacctttgtaacttataattaacaattgcaatcaaaacaaggctgcttg

SEQ ID NO: 246628 - DNA, 332 bp, Gossypium hirsutum
taaaaaaaaaaaaaaaattatttaaaaaaaaaaaaaaaaaaaaaggagggaatttaaaaaaaaaaattaagaaaaggaaaaaaaaaacaaaggaaacaaaagaaaccaaacgggggcaggcggggaaaataaatttagtaaacaggcccttgatttcaaaaaaaaaggacttaataaaaccacgtcctgaaaaaaacaaaagcggtgacgaaactaaattgctttgccagggaaaacattttcgtaaccaggcttttagcgattgggatagggcccgcttgccttgcctgactgaacatttgcacggccgggaaaggggaggcgtccccccc

SEQ ID NO: 246629 - DNA, 325 bp, Gossypium hirsutum
cccacgcgtccggacgacctcaagcttctccgaattctggtttcattttacagctgcaacaatttgaaaaaacccttcgaggtaaggaatatgaaaagactcggctcgatcggtctgcattagtttgtcggtccattttctccttcttcaacaaaaagcagtgagaagaaaggcctggctttttggcattgttacgatgcactcgataaagatgctagtatattgtgtgatggttaaatgtaatcaacatatactagccaaataaacatgatccaatttattaaactatatgaattggaacatacaataatagaatggaaatttt

SEQ ID NO: 246630 - DNA, 281 bp, Gossypium hirsutum
gccaatttgatccggtgaatggcggggaaatgactcagctggaatatcacaactttctcaagccagaggcagctttctgaagatttacatttatatatacatatttataaatatatgtttctctatcttattcggtcaaatatttggcatcttccacggtccacttcctcctttcccatcattcacttaatgcatttcccaatctgtaaatatatatttaagcgtagttttgtaaagttcgtaattgttcctaagaaaaagtacataaatttcagctgttc

SEQ ID NO: 246631 - DNA, 311 bp, Gossypium hirsutum
ggacttccaggtttagaagtgtacaatctcaaattttggtactgaggatcaattacccttgaaagactgaaggctgaatccagtgaagattggcagaagggacacactcttagaggtatgaagccaagatccgtcggaatttgcttataacacatttaaactgtctgattgaaaactccttacatataacaatttgtcctcgaaagataaagagttttctgtctttttgattggtcagtttatgcttttgtcttgtatatcaaatactggcggaggaatggttatggctgtgtacaactgcaactgaattc

SEQ ID NO: 246632 - DNA, 319 bp, Gossypium hirsutum
atgtattaaattacatattgaattaatgtttatgtgttaaatttaaattcaaagaaaaaaaaaataaaaaaaaaaataaaaaaaaaaaaaaaaaaaaaagaaaaaaaaaaaaaaaagacaaaaaaaaaaaagagaacaaaaagaaaaacaataaacccaaacaggaatgaatattgtaaaacatgaaaaaaaaaaataaaaagagaaaaaataagtaagaaaaaaatacaattccaaagagaaaaaaacttggggcggccccgattaagaactaccgattcttggccggtgtggggaggtccaaaaactgttaattgaa

SEQ ID NO: 246633 - DNA, 307 bp, Gossypium hirsutum
gttgccttctgattatgctcagggtgtggcaacattttccttggcaagaggagcaactatggataaagcttagtaacctgttttcttagacaaccaagtccaagtacctgtctactctcgatagccattggcttgaccggcggaaaacaaactgacctgccatacgtgaagtcagtagtgctatttttgagggtgaaaagtcaggagatagtatgatatatatccatagttatagcagctaatgggtgttagtaatgttgtcaagaacttaaaaagagaatcagtttctctgcatggttttatgagt

SEQ ID NO: 246634 - DNA, 305 bp, Gossypium hirsutum
  unsure (1)..(305): unsure at all n locations
attgaatcctctcccgatggttttaacatgcttaggcgtatgtatgaaaatgttcaggaaccatttatgaatgctacaactatggctggaaataatggaaatagtccgagctcaaacccatttgctgctctattgagcaatctaggtgattctcaagctaggagcttacctaacaacacttctacaaatggttctgaaaccactcatggacatacttccccaaacacaaatnctcttnctaatccttggggaaacactgttggtggcgggggcgcccagaccaatgctactgcaaggtcaaatcc

SEQ ID NO: 246635 - DNA, 311 bp, Gossypium hirsutum
ggggatgaaagtgaggagaatgctgatacaggtgggggtgctgataaagatggtgatggagatgatgatgcctagttctcacttgaggaaattatatgaccggtaatttgtctctccctctagggatttgatttgcaattctcaatagaattataaaattgtagtcattttagatgttcaataggtgggattgtaacatatgaggtagttactcttttgtagtaacttattgtggtatgcttgtagctgaagtttctcatagtgaacatcatgttgtttattcggcagaagtttcaaagatttgagtttta

SEQ ID NO: 246636 - DNA, 172 bp, Gossypium hirsutum
gggggtcgaaccaggcgttcgccggcatttaaacattataatgttcatgttttgacattaggtgccctgttttgcctttaaacctgacgcacttactgtatatattagtaggtcggtatgtaatttttgacttcgttttctttctttccctacatgaatgccatttgctttt

SEQ ID NO: 246637 - DNA, 326 bp, Gossypium hirsutum
  unsure (1)..(326): unsure at all n locations
cccacgcgtccggaacttttaatctggatccctgagagttattatttttgtattggaatttagattatctttgaactttataaatgcaagcttattttggttggtnaaaaaaaaaaaaaaaaaaaaaaaaaaaaaaaaaaaaaaaaaaaaaaaaaaaaaaaaaaaaaaaaaaaaaaaaaaaaaaaaaaaaaaaaaaaaaaaaaaaaaaaaaaaaaaaaaaaaaaaaaaaaataaaataaaaaaaaatgggggggccgtttttaaagtatcaaatttttataccggggaattccaaggttataccttttttaatggggccccaaaaa

SEQ ID NO: 246638 - DNA, 396 bp, Gossypium hirsutum
cccacgcgtccgtgggtctccatggaatcttcttttcgtttctcaactttacccgatggattgccctttgtgcatttcaaacggatttaactgaatgtagagaatggttactgcaattcttatttttagtgcttaggcctcattgaaacttcggtgctgaatatgttaaagcttttattgttcttgttcttcaaaaaaaaaaaaaaaaaaaaaaaaaaaaaaaaaaaaaaaaaaaaaaaaataaaaaaaaaaataaaaaaaaaaataataataataaaaaaaaaatattaaaataaaaaaatataaatttaaaatataaaaagggggggcccctttaaaaatccaaatttaattccccgtgattgcaaattaataactttttttttggggccccaa

SEQ ID NO: 246639 - DNA, 297 bp, Gossypium hirsutum
gcgtccggaattctggaagtatttccagcggtttttttatccaaagcagcatacgtaatccatgggcgggtttctggccattccggacatcaaatacaagctctagccataatggagctgcgggaagtaattccccacggcatgtgcatgacaacaatcattctatggcgtataatggacggccccctgactgaagtctgtaatcgtgtacacctgcagtgcttgggcaaaaattagttgcactgaatgtggattgagggatctaaaaaaagtctgaccctgtaaaagtgaataaag

SEQ ID NO: 246640 - DNA, 207 bp, Gossypium hirsutum
cacaaatcaacccctccccccctctctctgtagtagttgttgatcctgagattcaaatctctagggtttttggctttggttgttgttctattattaccttctgtggaactttagttagcaattagatttttagggttttcggtataatgtgaatataaatcaaattatccatctttttttcccttctactctttcattaatggtatt

SEQ ID NO: 246641 - DNA, 319 bp, Gossypium hirsutum
ctcactcttgcattctgttaagcattctgtgatgggctgcatcatgttctgcactaggaagtggactatggagatagttagggagatgcttctgagacagcttttaaaacacttgttaaagccatgatagaagccaatatagaattcaaagtatgcttaacagaatacttatttaaccaaatccttaacataataatacctaaaataaactattaaagaaactcccttatactgcccctcgatcctcaaatctatactaaaatctagaacaaaacctaaatcctatccctaatactatgttaaatatattcttaaaaag

SEQ ID NO: 246642 - DNA, 211 bp, Gossypium hirsutum
cttcaccagtatttgaatgtttaaattatggtcacttttctctttgtaacttctaactcttttgacttgagattcatttaaacatgcctattgttgtattaaaggtggatacatctatatacagatacaaacagattactcagctgacaagctttgaaattcctttttagggaatttgaaactgctaattgacaaaattactggttgatgc

SEQ ID NO: 246643 - DNA, 403 bp, Gossypium hirsutum
  unsure (1)..(403): unsure at all n locations
gccccacgcgtccggtttgaggtcgtcgactaggaaatatggtgttgtacatgagtctcgttagaattcactcttcttaatttcttttagtttggtgtgaaatgattttctttttattctttggttattattgtagtgtttatgaaaggaatttgtttttttgtttttgtttttatttactgtaaaggatttgtatgcatagattactttggttaatttagtattatcgagtttcaatccagttataaaattattaaaaatttattaaaaaaaaaaaaataaaaaaaaaaaaataatatataaaataataaaaattatatattatatattttttttanntattttttattataattatttttattttttttttttttattatattatttttttttttttaaaa

SEQ ID NO: 246644 - DNA, 336 bp, Gossypium hirsutum
  unsure (1)..(336): unsure at all n locations
agccccgcctaaagtggtggaggtgtctttggttcagggatctaagtggacctacttaaatttttctagtaaatttatattccactgcagttattattaattggtttaagatagggcgattatcattgtatcaaaatccaagttgttccttctgcctaatcccatgtgtaatctataacccttagagggtgttcagttttaccttttctttcttttcttttctttttttttaaaaaaaaattttgagttttgtnaaaaaaaaaaaaaaaaaaaaaaaaaaaaaaaaaaaaaaaataaaaaaaattttgagggccgtcctttttgaaggatcctttc

SEQ ID NO: 246645 - DNA, 421 bp, Gossypium hirsutum
cggacgcgtgggcggactcgtgggctgcgtatcgtgagcggtggtggcctcggctttctgggctcatcgcctcgtcatttctacccggagattagcaatggaggcggataaaactttatcgccgtcgtcggatcgagtgaatcgggagggactacagggtccaagggacgataattcctcttggccagtgggtaccgaaggtagctgctgacgcttatgtggcgcctaaatttgtcttggccgtcaagtaaccgtcaacgatggagcctcggtatgggacggctgcgtcctatggggcgatctcaacaagaacaaccgtggattctgctctattttgcaggaacgctgtgttattcacgccccttggttctcaactgcctggtttctggcagagacatcaatttggcgcatccttgttcta

SEQ ID NO: 246646 - DNA, 374 bp, Gossypium hirsutum
tttactttgaccaatgagccaattggggtctcttggtctgaagttctggatgctcagaagagttctggttggcattcttccacgagtgctgaaatggatgaagataaatggcccagcgatgcctctgttaaccgatatgaagctggttcagacatgcaggttcctgccccactggcaacatggtgcatggctgctgtaaacaccacttggagagcatgttgagaaactacatgaaccaactgggaagccattcagggaactccaatttttcattctggaggtttaggtcaaggaacgaggagtatcggttggggaaacagtcggggaacattccaggacaatgaaagcatcaactcatgcacttattggggaag

SEQ ID NO: 246647 - DNA, 146 bp, Gossypium hirsutum
caagccctgcttgtttgtatggaaaattatgtttgaaactaaaaaaagccctcccccctccaactcctgtaataccctctcgtttcctgtctaccgaagcccgggtgttttttgccattattactgaaagctttgaagacctttca

SEQ ID NO: 246648 - DNA, 250 bp, Gossypium hirsutum
gtccgcccacgcgtccgcccacgcgtccgaaaaattttttttaaaaaaaaaaaagagaacaaaaaaaaaaagaaaaatataaaaaaaaaaagggcccccaataaaaaaaaaaaaaagctaattaacacctcaatacaacaaacatggccgtcctaaactggaacccaaattcaattccactgctcatcgttaacaacattctattctgttaaaaccctatcttaacccaactgaattcgctttcaaaaca

SEQ ID NO: 246649 - DNA, 332 bp, Gossypium hirsutum
gtaagagtacggggctgtgtgttggcccttggcgtgaggcatacgaggactgcgtgctggtcgtacggcactaaaggctcggtgtggctgctgagcggcgcttagggttttccccttctcttttggccgaaaagagtttaggatggctaggcatagttgggctttagggtattgggcctatatttgggtcttgggcattggtttgggcttgcaatgatttggtttgtaaaaggacattaaaatgggctgtttgtgttttaaactttttgttattgattattttatattatgttttggtctataaaatatatatttatttttttattgtccgt

SEQ ID NO: 246650 - DNA, 217 bp, Gossypium hirsutum
  unsure (1)..(217): unsure at all n locations
ggtccgcccaacccgtccgcccacgcgtccggaaagctatatgaatcttttgttagaccattaaagggttcctttcctgggtcataaatggctgttcccagtcttaataactatttggttaaatactacaaatccagtactatataagtgactagggtattttcctctagcatatatatagcctataggcagtttcttttgaaccttatactactnt

SEQ ID NO: 246651 - DNA, 167 bp, Gossypium hirsutum
gtcctttctttgttatgtacaacatttgatatccacaagcccagatccaccgattttctccatcgacattattttttaattttttaattatttggttttgggtttcaagtgtactatgaggcaagtcctttaatccttatttctattaattccagttttgttcactg

SEQ ID NO: 246652 - DNA, 303 bp, Gossypium hirsutum
caatggcatatgtttttgcttaaacttaatgttgcaatgaattttccatagtctattatgaggattttcttgaatctaaaaaaaaaaaaaaaaaaaaaaaaaaaaaaaaaaaaaaaaaaaaaaaaaaaaaaaaaaaaaaaaaaaaaaaaaaaaaaaaaaaaaaaaaaaaaaaaagaagacaaataaaaaaaaaaaaaaaataaacaaaaattaaaaaaaagggggctgctttaaaaaaaatccaaactaaatataaccctgccgtccaacgatatactccttttttaagggacaaaaaatata

SEQ ID NO: 246653 - DNA, 414 bp, Gossypium hirsutum
aacttctttgtgaagattgtcaatgcgactgctcaggaccatctgaaaaagcagcaagataagcagcttgcgaagaaggtatctgcttcgagacattaagcttgcgaatttatgaagcgggtatactggcattcggtcatcgttttactttattattcgtttaggggtagtaatagttcactatatgttaccgctctttcataatttaccattaaagcaattccccaacaaaccattgcactatgtagtccccttatagagctttgtataaaggaaataggtacacagacaaatagaagctacaggtttttataattcctgtgtaatgctggcagtaatatttgtttttctcccattgttaagagctatttgacacttggaaatttattctttcgcaatgtaagacttcaaatt

SEQ ID NO: 246654 - DNA, 313 bp, Gossypium hirsutum
gattgacataacataatatgtatggttgcttttgattcgcgggttactcacatggttcttgatagcattgattactccgagtatgtacatcagcttacaaagctaatgatgaaaactaccacctgaacgtcatgctcaacaacacccactataccgaataagattatcaaaatggcatctaaatggtttcgctaaaaccccatccacggggcagtcctataacggactcaatcttaccaacaaccccataccactttgctcctaataaccagcctacaatacatgaaagcaccatgcccacacctttcaactt

SEQ ID NO: 246655 - DNA, 378 bp, Gossypium hirsutum
cccacgcgtccggaaaaaatccataactagaagtgaaaataatgaagcccatcattaccaagaatgttgcagttgctctatctttctttattttcctttctttcttccccttactaaacgctaccaaatactcggacatggtcaacgaaatctgtcctagtgttaacaacactaagctttgctccgaaacccttaagaatgatttacctgacgatataggcgccagcgattctttcattgtgagatttgtcaatattgctaaaggaaatgccacagaagtttccgctagcatcgacaagtcaatagggtcaggtggtgaaggaagtgtggaccttctggccttggaaaaatgccaagtagatataaaatctgcagtac

SEQ ID NO: 246656 - DNA, 270 bp, Gossypium hirsutum
  unsure (1)..(270): unsure at all n locations
cccacgcgtccggagctgactccatacagcttgaggtatgtattattttttctgtgacagctcatttgagtacctgtgtataaaataaggtagtcaacaatatgaggcgttaatgtttttaattgaattgttggattcaattcgnaaaaaaaaaaaaaaaaaaaaaaaaaaaaaaaaaaaaaaaaaaaaaaaaaaaaaaaaataaaaaaaaaaaaaaaaaaatttatttagcttttataaaatttaaaatattttcttttatgtgaccta

SEQ ID NO: 246657 - DNA, 232 bp, Gossypium hirsutum
atcaaatgagttcggaaccacgatataccatcagtatatatacactgctggtcagaacgaaagtagtaaagttgaaaagagtgtacagtgctacccttatctttgttttgaagttggtatctatcttgtacatgctaggttcttggcttcttgccttgtgtattcaagttttggttgcatatttttattgtgatattatgcctattttcttatataaacacagtattctctt

SEQ ID NO: 246658 - DNA, 376 bp, Gossypium hirsutum
tgcaaaggaaaaaaaatattgaagacgaaatagattcaaatcaccttctgattttttttgctggttctttgtattgaatttgtgtagtgtgcgtaaaaaaatatggtatggctattacatggctttcatagccggaaacagagaaaaatgaaaaagaaaatacaagtttcttgtcgtttttttttctttctctttgctgtgctggtgttttcgtatttgcttgcaggtacggagttcgctggcatgcgttggcccttggcgtggggcatacagaggcgcggacgtggtcgtacggtgctgaaggcgcatggaggctgggactgctgcggcgcaagcagaaactgctagggttctgccctgattttttgttttgggc

SEQ ID NO: 246659 - DNA, 438 bp, Gossypium hirsutum
ttccggttccctgtgtttgtgtttgtaagtatttgttccctagtctgttttcaaagaaattttggttgcgcattgtttaaaaaaaaaaaaaaaaaaaaacaaaactaaaaaaaaaaaataaaaaaaaaactatacatacaaaattaacacttataaaaaaaaaaaaataaaaaacttcaacttaataataaaaatacaaaattattttagggcccccccctttaaaaatcccaaatttacttccccttccatccaaagaataatctcttttttagggcccccaaaatcaatttccctcccccctttttaacaccctctaacctgaaaaaccccttcctttcccaaattaaatccctttaaaaaaaatccccttttccccattttgtttattaaaaaaaaacccccccccattcccctttccaaaatttcccccccctt

SEQ ID NO: 246660 - DNA, 313 bp, Gossypium hirsutum
  unsure (1)..(313): unsure at all n locations
ccggaattgactgtgctcacaatcccgccaatagtttggcccagctttgaatctgattagcttttgtaggttatatatnaactgtataatgtattttgtgggtgcgtcatccatctgatcaataaagcatanaaatttgtatccccaaaaaaaataaaaaaaaanaaaaaaaaaaaaaaataacaataaaaaaaaanaaaaaaaaaaataaaaaaataaaaaaataaaaaaaatacaaataaagggcggccgaatattttaaaaacaaaattttattataaaccttgtatttcctattgtctatttatctttt

SEQ ID NO: 246661 - DNA, 193 bp, Gossypium hirsutum
caagtactaagtttcattattctggggtgatcccaatttccaaatataaatgtaatatccctgtacagataatgaaaactgaaaagggcattctcatttctctttaatcaggttaagaaaatataccttcccttcctttaagccagggaaaaatacattcatatatactatttactttctctctttgcaagct

SEQ ID NO: 246662 - DNA, 271 bp, Gossypium hirsutum
caggattagagaggcgtacgatgtttccaggggatggagtaagtgtagataagggtaaagggggtaggaagccctggaaatcccatttcttttaacctttaacccttaaccctcatacctttgggtccataataaggtttaagaatcaagggccaagaccgggtaaccttattggttctaccgggataaagcttttactctgttctactatgttgaaggggtctggcccaatatatatatatgtatataatgaaggtggcaatgcatgaac

SEQ ID NO: 246663 - DNA, 303 bp, Gossypium hirsutum
acaaagatttactggggtgatgccagggataaaatatgtgaatctgttgcagagttgaagcttgattgtttggtaatgggcagcataggccttgccaccttccaaagggtcctgatgggaagggggaccaccattttgttggtaattccacctggccaagtaccattggttaaggatcccagtgcccatggattttgatctcagaattctgcaaaagtaatgttctttgaaaataatcgatgttccctgtttctatttctatgtgggggatttatgtatgtatgtatggacaccttggttctg

SEQ ID NO: 246664 - DNA, 251 bp, Gossypium hirsutum
cccacgcgtccgcgtagagaacttgaagcggccaaagagagttgttcaatgtggtagatgccatttattaggtcattctcaaaagaaatgcacaatgccaatttgaccctgatttagaatcttttttttgcccctttctttttagcctttgaatattttgtttttaagtttcaatagaatcagtaatgtgtttgtaatgttattgtatggttttaacattccagtcttagaataaagcatatcctctgctc

SEQ ID NO: 246665 - DNA, 241 bp, Gossypium hirsutum
atttaagacaggtatgcgtcggcgtggggacacagtttgatgaagtgggggttaaacttggtagtgcagggatgggagattggagtctatttataaaattagctaaccctacttctgtaaaacgaaaggtgaggggctgttctcactcatgactcgtgtattgcgcctaatagctaatccacttgtgaaaggtgtacactacatttcgtttaatcattgatttttttttcttttccttttt

SEQ ID NO: 246666 - DNA, 164 bp, Gossypium hirsutum
cggacgcgtgggctgcccttttcggtgagactgatgattgattgctacttaaatatgtaggttggtggcttttgaagcttttatggtttatgcattatgctcctggtatttgtactctgtatatttttaatttgaggaattcagtcttactgctcttttgattt

SEQ ID NO: 246667 - DNA, 446 bp, Gossypium hirsutum
  unsure (1)..(446): unsure at all n locations
gtacaccacaaggataaagtttttcaaggattacatttctcagttgaagaaagccattgatgataagtccaacttgaccggctattttgcgttgtcntttttttataactttgtatgtgtattatgatatactttaaggttttgcattgtttacgtttatttaacttttttattgtttttcattgttttttttttttttcataaattttttgttttagttactttgtattttttttttttatttttttttttattgtttttatttttttattatttatatttattttgtatttattttttattttatattttttttttaatttttattctttttattttttttctctttatcatatttatttatatgctttttttttttttattttttattttattatattttttataattacctgttatacttttataatattttattttttttt

SEQ ID NO: 246668 - DNA, 256 bp, Gossypium hirsutum
gcgatcccttatttcgttcgtttactcccccttagccttgacattgtcatatcacactagctggtgagctgaaattatacagcaccccgtctggaatcaacttgaggcttcctgtgcgattgaaatgcttggaattgggagatatatgtatgaaaacactaacgtacgtctgaagtgaagacagaaaacgctgtaaggaatcactattattatcattatgatcaccattatgagaggctcacagagattcattaga

SEQ ID NO: 246669 - DNA, 263 bp, Gossypium hirsutum
gttcgagcgacgcgtcacgtatatcgcgagcggtcgccctaatgaattattgtcctgtgattggtctaactataatgggtgctgaggttgaacttttttgtcacagatctctaataccaaattgtatcttattccataaatgtgacgatttgaaattattcatccctatagctatctcttttagctcaagttaggaagccaaaaagaagtgtaagagatggtggctttcctgtgcctacaaaaaagattactatataacaagg

SEQ ID NO: 246670 - DNA, 163 bp, Gossypium hirsutum
  unsure (1)..(163): unsure at all n locations
tcgcccacgctggtggattccacattttgtaacattgnnataanctcgggtnncagnagncaaggggggaccacagtaaaaaagccaacatagaagtaaaaaaacagaaggatcatactgtaaaaccatgttgtaaaaactgtaattttctgcccgcatgcat

SEQ ID NO: 246671 - DNA, 198 bp, Gossypium hirsutum
  unsure (1)..(198): unsure at all n locations
cgtcgtcaaggctctccaaccgctgttgaaggctccagtgccagtaccagcgctggagacgtaaaacagcagaggaatccaagtttcttcgccatttatcgaaatttcatcaacttttgatagtttggtttcgtaatcaaaatacagattttcatctgatcactaaatattaattatatacgtttttctaaannaaaa

SEQ ID NO: 246672 - DNA, 215 bp, Gossypium hirsutum
cgaaatctaaagtttgagcagagcaagcgtttctacatatcacattgtataggattggatgccgatgataaaatattttcttgacataacataactcaatgcatggttacccaaattataaagtaactgtttaagtaaaaaaaaaaaaaaaaaaaaaaaaaaaaaaaaaatttactttataatcttaaaaataaaaaaagaattaaaatgggcgg

SEQ ID NO: 246673 - DNA, 304 bp, Gossypium hirsutum
gacatttcttcatttggacttttaggccagatctctctcaatttcaatctttcagatctggcagctgacttttctcctagttcacgtttctttctgtcaatttgtatgggcacatgcatttgccctgtagcacatattttctgcgtgcatccatgtcttcattgtgagtccgttttagacattattcttgatttagccaatgttggaggccttttatgtgttccctatctaaaatattttctccaggtcataaacaaggactttgcccctgttccattagtttattcattcatgaaaattacaa

SEQ ID NO: 246674 - DNA, 454 bp, Gossypium hirsutum
ggagcaaaagaagtagttgtttggggaacctttatttcatttaagggaatttatgcacgtcgacgatgtatcttatgctgtggttttcttactaaaaaatcatatttgtttttaacatgttaacttagttaattaaaatatttttatctttttattgaatcatcatttttttttttattaatatttaggaacgttatattattttattttttaaaaatttaaatattattttaataaaatattaatttaattatttttttattattattattatttatatcattatattattttttattatttatctttatttttatattatatacaattattttttaattattttaatctatattttattttattctttatatttattaatttttaatttttaataatttaatttaaattttgttttaatacataataatttttatttttatattatatttat

SEQ ID NO: 246675 - DNA, 223 bp, Gossypium hirsutum
aaaaaccagtgataacggtagagaagactctactgcattaaagactacaaacgatgtgttggaaagaaggatcctgactctgcaatcgagattgtatctacaatgatgacatagagcttaagagcattgggaaaaaaaagtcaagggttgcctaaacagtgcaatgtaattactcgggtagcaattacactatctagtttatacaaaaaaaatttaatttttt

SEQ ID NO: 246676 - DNA, 397 bp, Gossypium hirsutum
gttatctctctttttaattttttttccaatttcatttcttcttattttgcagttagaaagcttaagaaatttagtcacatttgttaatttctttcatttttttatgaaacgtatggagttaaggaggtgcaaagagttttctagggcgaaatggaggaggaggaggagaagatggacaggtgacagcggtgaccgtggcagtagatcagttcgaacaaaggtgaagaagttgcaaaggctaattccgggtgcaaaagggttgaagccggactggctgtttctaaagacagctgattatatattgcagttgagattacaagttaatatattgcaagctctttccaagatttatggaccctcacattaatggttatgatattttatgtatattttgata

SEQ ID NO: 246677 - DNA, 377 bp, Gossypium hirsutum
ggaagggtcactgaggaggaagaatcaaatccaatcggttcgattcgaggggttcatggaggttggtgtctggtaaaatgtcttggggttacaatacattaagctagttgtttttaggttatgttactcttgtacttcacaatatctctttgtttggttataactaagtgaagtgcattttgtaattgaaatgccccaataataaactaggttgcagtatcgatccaatttcaactttttacattttcaatctgatctgatcattgttatgtaggggataaactcggttgagcaacaaacaagtaaaataacgaaaaaattgaaaagatcaaatatatatattttttgtaaaaaaatctctctaaagaggataaaaa

SEQ ID NO: 246678 - DNA, 245 bp, Gossypium hirsutum
cccacgcgtccgcccactcgtccggactctaatacgtgagtatggagggttatgatctggatatccgtgtaccggtatgcaggcatgagtatttcgagaaaaatgaggtgtcggagcaatatataagtataattaataaccattctttggtatagagatccctacaccccctttcatttctcgtgtttgtgcattcatatgcatgtattgtgtggggaaatgaatttttcatcgattagaaagtt

SEQ ID NO: 246679 - DNA, 399 bp, Gossypium hirsutum
gccaaacaagcagttcgagagaaaactctactcgaggaagcagaatcttgatttcgtatggaggctacagagcgagaagctcatttgatagctgaggtagaagaaagatttatgaaattaactgaaattcgagaggcaaagttcataaaaatgatggatgctcgtgagaaaaagtataaggctctcatcgatgagtgtatggcaaagggaatgtcaagtaagtccaagacttttcataataagcatagtaaggtgactattttataactagattgtcaataagtttattaatggtttaatagacattgcttgttgtaattgaatgctatgtccttatttgatgtcttcattgcttgctcaaccaataattagtagtggatgtattgatgaaaattcttt

SEQ ID NO: 246680 - DNA, 202 bp, Gossypium hirsutum
cttttttgcttatttttcgcttatttgtatatgtaaattggctgcagtaatctttacaacgttgtaattggtgtttggagttaatatcctccattgtttaattgcttcaatagcagctccatttttgtcttatggataaggtgtcattttcatttttgtcggaaagcctaatcagaagggacacctatgggatttgtctatt

SEQ ID NO: 246681 - DNA, 385 bp, Gossypium hirsutum
  unsure (1)..(385): unsure at all n locations
gctgggaaggttgccaaccatccttcaatccttgcagacgcttgaaatctactactgtaagagactggtagtttcaatttcttgttttcccttgctgcgtaaaatatgggttgaagggtgtgaagaattggtggatgaaggttctttgtccgtacagaaggttacctcctttaaaagtttgtgtgtttcaaatatttcaaattttaacatttcagcagagaggataatgttgaggtttgcaaactccgaaagattcaacgtctctggttggaaggagttgggatctttatcgcaaattgngttaagattagtcgggcatcgttttattagtattgcggattgtccccaattggtctctttggaaacagaggaggagagattgcaa

SEQ ID NO: 246682 - DNA, 324 bp, Gossypium hirsutum
  unsure (1)..(324): unsure at all n locations
gcgtccgnccaaaacaaagtgtgaattacgttgcaatatttcccatatgcatcataaaccaagggattgtgggactaatgcaccaagttctggatatttggctcacaataaaacaagccctcgcaaatggtgtccatgggtcaatagtttcctaaaagcccattacctttcatgtgaaggcctgcaaattcaagcccaaatctcaagtgaaaaaacaaattaaaaggttaaagtacatgagaggttcctgtattattagtctctggatcaatttagtctttatgatattaaaaaagaatcaactaagttcatcttaattttttt

SEQ ID NO: 246683 - DNA, 317 bp, Gossypium hirsutum
aattaaacagtttttttaatcttttaaaattaaaaaaaaaaaaaaaaaaaaaaaaggaaaggaaaaaaaaaaaaaaaaaaaaaaaaaaaaaaaaaaaaaaaaaaaaaaaaaaaaaaaaaaaaaaaaaaaaaaaaaaaaaaaaaaaaaaaaaggggggggccgttttaaaggatcaaagtttacttccgcttgtttgcaaagtaatattttttttttggggcaacctaatttaatttaatgggcggggttttaaaaacgtggggattggaaaaaccttgggtttaccaaatttattggctttgaaaaaattccctttt

SEQ ID NO: 246684 - DNA, 155 bp, Gossypium hirsutum
atcgaaagtattcatttaaataaaaattttaaaataaaaaaaaataaaggggaatgggtaattttgtggcggcttatatataaggactagttttgcggccgccgtcttagaagcccccagcttttctatgctgtcacccggcgttctctcccttt

SEQ ID NO: 246685 - DNA, 138 bp, Gossypium hirsutum
cccacgcgtccgctcatcttcctagtcccattatacgacaagttcttcgtccctggtgccaggaagattaccggtcacgaatccggaatttcgcctctacagaggataggctcgggtcttttttctctcaaccttttc

SEQ ID NO: 246686 - DNA, 131 bp, Gossypium hirsutum
cccacgcgtccgatttcaatgagcttcctctcggttatcgaaaaggaaatgatagattggttgctaggtgtgacatcagtaactataaccaatttatcaaagaaatagagattatctttgcattgatgatc

SEQ ID NO: 246687 - DNA, 219 bp, Gossypium hirsutum
cccacgcgtccgcctttctttcttttatttttgggtttgttcttgtaagagagctatatatgatatattattaatggtttctatatgaaggtgtgatggaaatgatggccacccctaaacaaacctaatctcttaagcctatgatatttttatgggattaaccccctccatttatgtcatccctgtcatgcaatgatattttttattcataatttatat

SEQ ID NO: 246688 - DNA, 404 bp, Gossypium hirsutum
cccacgcgtccgggaaacttcaaggtgcttacagaaagtggccagactggggtaacttatattgcagagtagcaactttaatgattttgtcaatggtagtttcatagattctttgccttcaaccacgaaggagatgactctgatttcatctgcagcatacctcagtcttcctcttgatgcgtcggctttcctttacattaacatactttgtttaagaagccatggattcaacaaatatcagtatgaaactgtctttttcttcccctgttttgtttgctgacaatgcagattgagatgccgtgaaagtgattaagggaaacaatttctgttccttgattggattacgccattgatactctttgataaaatctttcaatgaacaaagcatgattattttgatcaag

SEQ ID NO: 246689 - DNA, 417 bp, Gossypium hirsutum
  unsure (1)..(417): unsure at all n locations
tcgnttccgctctgggatgaacntnnttgtgatnatctttggctaggtatttgaccaagggtgctttnnatttgtttttacgcagtgcatatgtctatgctggacactatggagctaaaactaacaactgtgaaactatnntaaaagaactctncaatgaacctaattagagctcttttttttgagcgtttcggaaanntccttgagaatttaaatatttatatcnntctatgttcnntacacttccaagtgtcnnggcttatttcaaatttaatttannatatgtaattaccatannttttattcaattttttatnggaatatttannttaaatattatattnnattatttgtatattaagattgttggttttaaattatatttaattgaataaatgtataaagtttggagcttna

SEQ ID NO: 246690 - DNA, 234 bp, Gossypium hirsutum
  unsure (1)..(234): unsure at all n locations
accggtattgaatggccggaccgacccatgcgttttaaatgctctgatccgcgaacttgcagtgaagtcgtaaaacattatgactaccaaatctatgcagttgattttagacaattcctgctatgatagtttccctttagggttaattacactatcccctgattgatataaatataaattttaaatcataatttgaatgctgccnaaaaaaaaaaagaaaaagaataaaaatat

SEQ ID NO: 246691 - DNA, 215 bp, Gossypium hirsutum
cccacgcgtacggttctagatcgcgagcggtgccctttttttatgggtggtgttaattccggggttttttatataacggtatcggtgcatatatatatatagacacaccaaaagcctagctgcttagagaattatctcttaggctcaattgacgtaccatacgaagagtatggaaaagttctttgcgaagactaaccaattctactagatcgcaa

SEQ ID NO: 246692 - DNA, 184 bp, Gossypium hirsutum
tgaaataccggggtcgaccacacccgtccgccacacgcgtccgattttattttggtctcatcatagctgtacttttatagtgagttatattgaggtataggattgttgaattatgcccctttttttgatatctttgccactggttttctggcaaagaaaaaaaagtatagacacagatattgtt

SEQ ID NO: 246693 - DNA, 420 bp, Gossypium hirsutum
cggacgcgtgggcggacgcgtggggggataaatacggaatatctagagtcgatgaggacaggtttggaatttcccgattgttttgatggtagtaattcagttgagtggcagtgtggtaactccgaggatgttagagggttaaaatcgtcaagtgctaggctaaggtgcgacttctccgcccttaggagcctggctttctgtttaagattatacagttcctggtacccctcttgatcttaggcttcgcattcggtttacagttcttggggaagaaggaaaaaaccgaaacttagataactttcccattacggaacctgctagttcgtatgtatgcttgttaaagctgttgttgttgttgttgtaatgttcgtgacagtctataactgattgctattaataatgtcttggaatgtcgttttc

SEQ ID NO: 246694 - DNA, 197 bp, Gossypium hirsutum
cccacgcgtccgaaaacatcaccacatttatggattgagaaaactttattgttgttgtgggaggactactatgcttgtatgtatatgatgcgcctgcaatctgcttatgaatcttttactggatacatgaaatatacagattgctttcaaaaaaaaaaaaaaaaaaaaaaaaaaaaaaaaaaaaaaaggggcggcga

SEQ ID NO: 246695 - DNA, 433 bp, Gossypium hirsutum
  unsure (1)..(433): unsure at all n locations
cccacgcgtccgcaccaccatccaactacagctcatcatcgtcatcatcatcaccgtcgcgcgatcctctgattcttcatcaacggctgagattactcctgtgcattgcttttccgtttgggagagcagcttttccaatagagttgggaagtctgtgccgggccttgtcctggcaatttagtcatttccttatccctttctatgatcaggtgcagccgaatgtaggacaatataaaataaataaaaagaacttgttatgatcaaaaaaaaaaaaaaaaaaaaaaaaaaaaaaaaaaaaaaaaaataaaataaaaaaaaaaaattaaaaaaaaaaaaaaaaaaaaaaaaataaaaataaaaataaaaaaaatttantttattttttataattgggggggccctttttaggggatcaaagtttccttcccctttt

SEQ ID NO: 246696 - DNA, 388 bp, Gossypium hirsutum
aagcctttctgacatgtattctgggctaaataccttttatatttaacatcgggggattatcggcggatacaactattgcattttaacctactttttgcggattcagttctgggatctgtaagttggtttctaatatggttgattagcttgttatatttttgttgattgaagtgatgtttgtaaccctgggaacttggaggtaagtttttgtatttgaaatttggttacattttgtctttgcttaaaaaataggtaaataggtaaattagttgtccattgaaaaaatagaccacaaacacgcaactcggacgtttgacatgatcgatgacttctacatcggagatcttcaaaagtaatctacaagcaactatccactattggggtttgt

SEQ ID NO: 246697 - DNA, 390 bp, Gossypium hirsutum
aaaggcttaacaacagagggaattcaacactgcttctggagaggatatgtttgtgtgcggggatttgaccagaaatctcgagcaccccgtcctctaatggctagattacatttcccagtcagcagattggccaaagcaaaaggcaagggtgctggagaagacgagtaaatgatagcagagtcataagatccaaacaagtcaacattgaccaaataaccatgtatgaagaaatggaattgcattttacaccactgacttggcttgtagggaaatgtgaaattccttgtataacccataatggaaaagcatgtagggctgtatactgtttaacaaggttgtaattatttagtttcgtgctcaaattttgagcaatttttcagaaatcagttt

SEQ ID NO: 246698 - DNA, 259 bp, Gossypium hirsutum
cccacgcgtccgcttgaatcatggaaataccattgagctttattgatcagcgtatgatttggggtctccgtgtgcaggtataaataaatcccaaggtttcaagaagtgaatctagcatttagccagagatcctcgacttagcaatgtttgtataatttttttttaaaatatgacatgtacctaagttgagtcggtgatcatatttgtatttgaagcttgaaatggtaatttggaaatggttagatggtttatttgcata

SEQ ID NO: 246699 - DNA, 311 bp, Gossypium hirsutum
gccacctacgacacgcgtcgacaccttcgccacgcgtcgacatggggcggcgccttgttcacaaccatccataacggtttatgcagaatctaatagtcattgtatgaaactgcatccgattatctgtatatgcgtatggtataagatagctagcgactgaattcttacaattctggttggtggttacacagcatcatgtcagttttaactgaatcactattatgttaagttgatgcagtgtctagtgttacagactggaaccgattttacacattcaatgcacgcaaagcaatatagaataaacaagcctt

SEQ ID NO: 246700 - DNA, 184 bp, Gossypium hirsutum
ggattaatcatcattgttggcggtgaataccttggttacgaccaaaaatacagcaggtgcgggtgtataaaaaaacaaaatcgtgtaaattaggctagagtatctatcatatgggaatcttactatttcttccgcctgcaacaaattaatcaaagaagtaccgattttcttgttctatttcttt

SEQ ID NO: 246701 - DNA, 403 bp, Gossypium hirsutum
  unsure (1)..(403): unsure at all n locations
ggccgatgtaattttgaggttgggcttgtattaggttatttttttgaatttgggtcatgtggctgagctataggcctgttgggcctgttcttgtagttgggccactagtttctgtaattggactgtaaggactattataatattttttgattttttttgttttgttttttgtttgctcggaccagacaaatttggcccactacaagattatttatcaaaatggtatatttgatnaaaaaaaaaaaaaaaaaaaaaaaaaaaaaaaaaaaaaaaaaaaaaaaaaaaaaaaaaaaaaaaaaaaaaaaggnnnaaaaatataaaaaaaaaaaaanntaaanaaacaaaaatacaaaaaaaataaatattgggggggggccctttaaaagaatcaaattttacttcc

SEQ ID NO: 246702 - DNA, 225 bp, Gossypium hirsutum
  unsure (1)..(225): unsure at all n locations
gctcgtgtgtgcgatcttttaatgatctatcccaagtttggcggacatattttggaagcaagntctattcgaatgtntgcatgcggaaccacagtatntgttgaatgcatntcaatgtttttncccgagcaccgttttctttaggaatactcctaatagatcatagacattgtttgctgttgaatctcattgaaaatatatggaatttttttttgcaacggggcc

SEQ ID NO: 246703 - DNA, 432 bp, Gossypium hirsutum
cggacgcgtgggcggacgcgtgggtttttataggcatattacaaccgtatattttctattaggtgtctcttttattgtctgtttctgcgttgttttcttctgtctctgttgcgtgtttcttttgctttgcaggtgtcagagggttggtggtacgggcgacgatcgccggtagtagaggcggtggtagcgtgtggcggctggcttaggtagctttagggtttctgtttggctttagttcttgggctagtgtgctagttttttgtttgggctgttggtttaatttgtttttgggtgtaatagggtgtattgggtttgggtctggtattggttcattgggcccggtctaatttgggcatttacaccatgatttaagttctgcataaaagaatagaagaaaatagtaaagcactttcgttttaaaaaaaataattt

SEQ ID NO: 246704 - DNA, 400 bp, Gossypium hirsutum
gtccgttttcttcttgttcttaaaaaattatgatatggtatcatattagatatattacattaaactggagtttaaaccccatcagttttgttatagttattaagtttcaaacttcaaaaaaaaaaaaaaaaaaaaaaaaaaaaaaaaaaaaaaaaaaaaaaaaaaaaaaaaaaaaaaaaaaaaaaaaaaaaaaaaaaaaaaaaaaaaaaaaaaaaaaaaaaaaaaaaaaaacaaaagggggccgcaaattaaaaaaatcgggggctttttttcagagacctcgcgacttataaaccttttttaaggcgcaacaaaatttaattaatggcccattttttaaaaaccggggggctggaaaaaaccggggggttccaaaaaaaatcgtttgaaaaaaaataaa

SEQ ID NO: 246705 - DNA, 431 bp, Gossypium hirsutum
gttttcaatgcatagctgctttctgttaggcaagaaatctggtggaggggagagggtgggggaaagcttaattcatatatatatgttctcaagagcatgtgaggccgggctagttttatcaagagtgagttattcttcgaattgggataattcgagaactggtttactgttggtgaatttcccataggtatgctccacaattctaaaatatgctcaatgtgacagtgatagttataatccagttcctggtgtgatgcaaggagtgccttcttcaaggaattatagtggtggatttgcatccaagctcatggtaatcaggtttctttgcctatattcatatctgtatagataaaaacttgcttcacatttatcatgcttcatcacgttgtataacgcactggaagcttgtaagttatttaggctgaaatagc

SEQ ID NO: 246706 - DNA, 426 bp, Gossypium hirsutum
aatggagatgatgtttcaactatgcaactaccatacgcttgcaagcttttaatccaggaacggcagtcaatgaatatcgttccacgtttgaaattagcagaggcgaattaatggtatgttcagatgattttgtgttggtgtatcatctgaaaatttggtagctatacagcagatggttggaatgtttttgggaggaagaattctgcaccttaccgatatgctcagcatcaagtctgtagaaattgtggggaagtgttagaaatggattctccatgcatgtcactactattttcttttttatttttactgaaatcttagcttgtgctgtatgtaactcctcccaagctaatgtgattttgtattatttacttaaagtggtttacaaatataatcattttattattattattagtagtttcttaattc

SEQ ID NO: 246707 - DNA, 352 bp, Gossypium hirsutum
gggggggggaaattctgaaaatgatttgagatcatttcagaacatctctttatttaagtttttagaatttttaggccacatacggatactacattaatggtcactgacaaggcgcttgataaactccacaacaacattaactgaattgtttgaagcaagggaaatgaaagtatcgatctcattcgattcagccgagccaccaccggccaagtcggagagagccctaatgatgataaaaggaaccctttgttgcatacatatcagtgccactgctgcactctccatgtcgaccgggcttacgttgaactttttgtaaatgaagcttcgataagcagcgttgtctacgtaaatg

SEQ ID NO: 246708 - DNA, 438 bp, Gossypium hirsutum
cacacccgtccgcccacccgtccgaaccttcaaaaggaggaaactgcactggcagcacatccggtacatcctgtaaaatatcacaagaccacaaaagaatgctcagaattctctaaatcagccttacacagtggacacaccgcttcctcgcacagagttctacgcgcaagattaccatagtaaccagtgatcgttccatatattaattcgatcaccattcccaaccctccacacaatcccttctccaatcaactcacgtgcattgcaaatgcttctccaggtaaatgatagtgacatcaatcaactcggaacttgggcggagtcagataatcatctacactatcatcaacgcttgggtattttgcaactcatattttggaaacatggcatgtatagacgactttatgtattatggcgtaaacaaatatatagtatgtt

SEQ ID NO: 246709 - DNA, 350 bp, Gossypium hirsutum
cgaaaatagaacaatcttgtatttctagaacaaaaaagaagaagaagaagaagacgaagaaaggcataatttgtatatgtatatctgattcaactttcttgatcttgactattgactataataggaatttgaacctgaaaattgtgttggaacaagtttacaaatacaatcacctgttttgatggagattttgtaacatatattctgttttaaacaatctgactaccaatttccttttctttttgacaatatgattttgtgaggattccagaatctctgtgaacttgcggagtgcgattgttgcggtttaaccgaggagtgtacgcaagcttacatttgcttgccttaag

SEQ ID NO: 246710 - DNA, 285 bp, Gossypium hirsutum
ggatgcttacgggtgggtttgaagatgagaaaacactgtttcaccttcgtccgagattcggtggtggtttaggaggtggagctggatttggtgggggtgctggtgctggaagtggtggtggacaaggtggagggtttggaggtggaataggtgggggtgctgggtttgggtttggagctggaggtggtcttgggggtggtggtggagctggtgccggtggtgggtttggtggaggtgctaattgtgttgatgtattaatactggatgcatgaattcttgcaataa

SEQ ID NO: 246711 - DNA, 388 bp, Gossypium hirsutum
gaaaattttggagaagaggtagtaaaccccacacattgaaaggggaccatagccatacatgatatttggagttcaaaaaagggttgaaactgagtgcctaccagatttattattcatggtctaatctgttcttttttttttttttgcctattattgttgttattattattattatttgtttttaggtctaccctgtatgtacgttctggaagatttgtttgttttgccaaaaaaaaaaaaaaaaaaaaaaaaaaaaaaaaaaaaaaaaaaaaaaaaaaaaaaaaaaaaaaaaaaaaaaaaaaaaaaaaaaaaaaaaaaaaaaaaaaaaaaaaaaaaaaaaaaaaaaaaaaaaaaaaaaaaaaaaaaaaaaaaaaaggggggccctttt

SEQ ID NO: 246712 - DNA, 316 bp, Gossypium hirsutum
  unsure (1)..(316): unsure at all n locations
ttaaggagagatttgcttcctattgtagcctttcatcagttcataggccagcaggatatttatgattaatgttcctccccttgatgaaagcactctggctttttaaaataagaccaagcaaataaagagtaatcctgttcaccaaaaaaaaaaaaaaaaaaaaaaaaaaaaaaaaaaaaaaaaaaaaaaaaaaaaggnatccgaaaaaaaaagaacaaaaactggcgttcacgtgcttgcgacccaatctctctttcgtagtcttgcctaaatacaattttgttgtcggcgaacttaaatttcaatgaatgggaaa

SEQ ID NO: 246713 - DNA, 223 bp, Gossypium hirsutum
aacaaatttcgttgcatcatctccttcccctgcagcatctggtggcacttcagtcttacgagaggcttggcagccaagcccatggaattagaatctgtagcaaattgaacttttcttgtgacttgagcctctaagatgtgtattgcgagcttggcaacattgtaagccctttctagttcttcctgcttaatcaaagcgagaacatcggttctcaatttcatat

SEQ ID NO: 246714 - DNA, 405 bp, Gossypium hirsutum
gccaaagtttgtgagtgtcttctccgaagagtgtccgctaactctacaagcgatagtcccgggccacggagctcacttcttctcaagtcaagaacagcttacttgttttgattcaacacaattgcgttcaagcttttactctcgatcaaactggtgagcatggcgatggagcaagctttggttccccactcaatcccacttcaaaaagtgattagtgtttttttttggggcggggttaacctttggttgtaatttgtaatcctctttgccgtgaaagatgttcatctgtacttctttttgaggatcttttacttttacttttcatgtaagtttttaatccatctatttatatttttggggcattccagtacctggtcccgttgttacccaattttatcataaatc

SEQ ID NO: 246715 - DNA, 368 bp, Gossypium hirsutum
caacagcttccagttgatgtttggttcttcgttcgatctggcttcttttgattacaaggaagatctacaagctgttggggtcgataccatgccaaagcaggatgtttcaatctggttttgagtaacaaaggtcaggtcacaagtggtaatccccactaaggcctgccgacacatgcattagctaaaaaccttatgtttttttttttttttaacttggtggttgtatttatcttcatgcttgtagttgttagaagttggcaagttttatcaggtcttcatatgggctttcaataaaaacaaaaagtcccataatcttgcaactgatttacatagaatattactgtctcataaataagtttatatgtatt

SEQ ID NO: 246716 - DNA, 352 bp, Gossypium hirsutum
ttaacgttgattaatttcctccaaccgagtttgtgatgtattaatgtttaatagaaattaaggtggaacaggaaatgccgagctcatcgatgacgggactaatagtttaccttcattaatgtcggtgataaagtaaggtttcctgcgttaatagaagttgtaaaaaatttcttgatgtttacagttctggaaaacaagtttgtgtgtaacttttaatcaattttttcaatagggattatctttttcttaagtacttgatcccgcatgcatgcatgcctggtccaattgtcatttgtcttgagctcgacattcttaagacattcttaagttgaaatccaatgtgtttttcttt

SEQ ID NO: 246717 - DNA, 184 bp, Gossypium hirsutum
cccacgcgtccgcttttgtgtgaggaagtgtttgcgtgtaactcagtgggtgttgagtcaagaacgaaccgcgcttggagactccttgcatggatcgtatatcaggcttgtgactcaagtgcaaaatgtaagggtggtggttcgggtattgactcaggtcgacccttgagatggctcaacatgg

SEQ ID NO: 246718 - DNA, 200 bp, Gossypium hirsutum
tctgcctttcgtccatcacatattgtaaaccatccactactctcctagctctatatattattatccatttcctttcatatagatttatcttttccgtacaagttgtgtttcaaattttttataggcggaaaataccattggttaaaatcatttaattagcatttttttattattttttaataatgaaatggactacaagt

SEQ ID NO: 246719 - DNA, 129 bp, Gossypium hirsutum
ggaacataactttggttttggagttaaaatactccactcgtgatagtgttaaatattgtgagttgtcaaaaaatctgtgtatgatctacataagatgattagagtaaataaaaattcttttacggttgt

SEQ ID NO: 246720 - DNA, 358 bp, Gossypium hirsutum
gggacgcgtgggggagatgaccggcggagatggatcgcatgtggagtgtacaggggcgtcaaccatgatttccgttttgaatgctcatatggttggggtgttggtctgtgggtgtccaaaaaagacgatgcattcaaaactatcatgatctactaagtgagaggacccttaagggtgctttttatggcactataaccaccctgatttctatggttgtcgacaaatattaacaggactggggctggatatggacaagttatacaactctggccttttgccgatataaacaagattcactacatgctcaggtatggtcgagatgcatgattcattggatcttagagaggtgctgctgata

SEQ ID NO: 246721 - DNA, 226 bp, Gossypium hirsutum
cccacgcgtccgcccacgcgtccgagaaattaaagaaatgggaaaagaaaaagatgtgtgagaaaatcatagtttttaattttttattttttccactacttctaaattatggaagtaaggtagtaaaggcaaagctctattcttggagagatcaattttatgcttgtaataattgttactttgtttatagtataatatgaagtatagaggatggttttcttagcct

SEQ ID NO: 246722 - DNA, 270 bp, Gossypium hirsutum
ccacacattcggggggatttgcaatgtcatttatggggaaattatttgggggtctctaaaaaaggggatagggacagacaccatattttgtaaaatccctgtgtatatataaagggaaaaacccctttttacacccctttggggttttgagattatgatataaaaaatgttgttgtgtataggggagtacttggattaaaattcaaatttcggcaattggttcggaaaaaaaaagccctttttaaaagataaaattttaatttccctttt

SEQ ID NO: 246723 - DNA, 406 bp, Gossypium hirsutum
cggacgcgtgggcaattgcttgcctctacactttactaatagtgcttgctacatagaatgagagcaatatttggatttgagataaagaggaatgcaataaatttagatgtttttgctttgttgcatattcatcccgcattcttggatgatgctagatgtacagaaactttactccccttggtattgttatttctgcagttgattcaaaaaaaaaaaaaaaaaaaaaaaaaaaaaaaaaaaaaaaaaaaaaaaaaaaaaaaaaaaaaaaaaaaaaaaaaaaaaaaaaaaaaaaaaaaaaaaaaaaaaaaaaaaaaaaaaaaaaaaaaaaaaaaaaaaataaaaaaagggggggcccttttaagggatcaaattttacttcccgtggcttccaaattaatagtttttt

SEQ ID NO: 246724 - DNA, 373 bp, Gossypium hirsutum
cccacgcgtccgcccacgcgtccggattagtcctatatatttgttacggcaatgaaaaacaggttacattcacggaatgatgaaaaaaaaaaaaaaaaaaaaaaaaaaaaaaaaaaaaaaaaaaaaaaaaaaaaaaaaaaaaaaaaaaaaaaaaaaaaaaaaaaaaaaaaaaaaaaaaaaaaaaaaaaaaaaaaaaaaaaaaaaaaaaaaaaaaaaaggggggggccttttaaaagaaccaaagttaacttccccgggattgcaaggtaaaaattttttaaaagggcaacaaaaataaaataaacgggccggggtttaaaaacgggggaacgggaaaaacccggggttacccaaattaaatggcttggaaaaa

SEQ ID NO: 246725 - DNA, 256 bp, Gossypium hirsutum
cccacgcgtccgcggacgcgtgggtttgcaaccatgaatagaataacttttttcagcttatggaaatttccttgtacagtttaaatgaatgattgcaaagtcttccaaagtttagtttaagataaaaatgtgaaacgtgggaggaatgatccacagatgcaagaattgttaaaactaggttattatcttcatgtaaagaaatgctaatttagaatccttaatcatcttattctcaatttaatcttgtctgaatgtt

SEQ ID NO: 246726 - DNA, 423 bp, Gossypium hirsutum
tctacacttactgctctatgtgatttgggtttaaaccctgaggctttggctgctggggtcaaggaacttcagagagaacctccaccatcaaccctgttgtcatcttcttcatcacaagtaccttaacttcggattttgggtagcaataattaaaaagcgatcggctctgcatatcagttaggggaaaaatgaccaaacacaaaaatgacttgaaaaattataggttaagggcattatgttactttcctctgcgtcaagccggtatataacatttattactaaaactaattgtcttgtgctttatgtttgaagcaaaaatggttaagctcaagttttacgtagaattttttgtttacttgggtggtcttatttctctcaagttcaaatcaccttgttataaattattaattactagttcattgt

SEQ ID NO: 246727 - DNA, 292 bp, Gossypium hirsutum
ttttaaaaaaaaaaaaaaaaaaaaaaaaagggaaggaaaaaaaaaaaaaaaaaaaaaaaaaaaaataaaaaaacaaaaacctcctacataaaaaacccatcttttttatacacctcaatccaatttaacccttcacctccctacaaatttcattttcttttactacccccacatttcacttctccccccgccttttttccaaccccatatctgggaaacccctgcctttccccaacttattcgccttgcaccccttccccttttccccacctgccttatttccaaaaagccc

SEQ ID NO: 246728 - DNA, 359 bp, Gossypium hirsutum
tccggtcgccacgcgtcgcacgcgtcggcacaagctttactcggaccgactccgttttgccagcgacaacaactgcatcgcgtgagtcacgactgcgtcgcttggttagacgagtcaattctacaacaacgggtctgactcgctctgactcgctggttcagtcaccagtcggtggcgaaaacagtcaacagcgcgcgcgaggaattcgcgtcgagggcgccgctcctgccggtcaaataccggactggtcaagatctgagaagagtaccgagatatggaggagatcggaagcacatatgactgaaccgatgatggtcgaggagggtaggattcgctacgagtttggcaacaatgcagga

SEQ ID NO: 246729 - DNA, 427 bp, Gossypium hirsutum
gccccacccgtccgaaaaaaaaaaaaaaaaaatttaaaaaaaaattttattaaaaaaaaaaaacaaaaataaataaaggagggaatataaaaaaacgcaggcgtgcaaacaactaaactaaactatagtgacacacacaattaaattcaattgccacaactgtaacaacaaataaaaggggccggcctttttaaagacccaaatttttttgccccgtctttccaacgtattattttttttttggggcccccaaattaaattcccgcgcccgcctttttacaacggtggcccgggaaaaccctggggtttcccaattttattcgcttggcaaaaattccctttttccccggtggggtaaaaaaaaaaaagcccaccccttaccccttttcaaaaaagtgccccatttttttgggcaaatggccccccc

SEQ ID NO: 246730 - DNA, 266 bp, Gossypium hirsutum
  unsure (1)..(266): unsure at all n locations
gttccttttaattccttccagacttgactccaagagtgagaaagactggctaagcccccagaacaaggtatgttcactcaaatttgttactggaatccatttctttagatagaaatctatgatgtatatttcggacctagtgttcttagctcggtcacctttacaaaaattagatcttatccttgtcttagatggaatgatggtagactagattgtgacattgttaatagagactatagtttttggtccttgaatttgacagctna

SEQ ID NO: 246731 - DNA, 426 bp, Gossypium hirsutum
cccacgcgtccggttgctatgacaattatctgtgtggctactaataattgaaagtcaaaaggtgtttatcgaataataataatgttaaaagcttacctttgaaaaatcattttctttttgaaagtactaatcaggctacaccgtcaaagttggatggataaaatagaaatgactctgtttagagattgaattttaccctagccttttagattacaatgttcatgcacagcaatgacatgtataagcttcaaatttaacctttgagtctgaaacataaattcctatggcaaaactggtttcaactttcaagtggcaaatcatgactgcttcatgttcagcttcgactgttgtaaaatcagccaatgccactaaatttcaatttgtttttctgtaaagtttcgatgacatggacagcatatatgcctc

SEQ ID NO: 246732 - DNA, 194 bp, Gossypium hirsutum
  unsure (1)..(194): unsure at all n locations
ctaatactctaatactaatagaataggatactattaggattagacaagcatccatctgataagacgggcaatgcatatngaggcctgctcaatggggccttaattacatcatttactcgtggcgccagatctatacgctctaatactattcctgtactaatacaataccaatctaatactctaattctaataga

SEQ ID NO: 246733 - DNA, 333 bp, Gossypium hirsutum
cccacgcgtccgcccacgcgttcgattattagaacccatatttgctctacagatatctaggatgtgaactttattatacccattacaaagactagagtgagtagtcgcgattttgtaatttgatacaaaaaataaaatccaacatgtgaaaatattattatatactgtaaaaaaaaaaatgatttcacccttactatcatattatgtcttggataaaagattttaagattacatctaggatttttggcaagctgttaaagtgaaaaagattgatatggcaggttgaaattcttattgctggaaagtttgaatgcaacaccagattcattcatg

SEQ ID NO: 246734 - DNA, 298 bp, Gossypium hirsutum
cggctttctcttctgtttttgcttctttgattcagctaatagagcatgtaggaaccaaatttgcagttcaaatttgaagccatgctcaaaagtttttctctaaggctcattgctttgagttcattacaagatttccttgattaagtaaatgtattatatctgttattaccaagatttacttgattaagaaaatgcattgtataatttattaccttgcatatgtattatttattttaatattgattctaaatttttatttttagttaagtattctaactgttggattttgcaaaagaat

SEQ ID NO: 246735 - DNA, 269 bp, Gossypium hirsutum
ctgctattgtcgaacaccgcgtcgaactgaatcgtcattcttgggcattgacggaagatgtaaggactgtcttctacccaggaacagcagcggaggcatctgtcatttgcaatgactcttctgtatctaagattagctagattaggaatgaaatcccaggaaattcgccaaatagttactgtaatttttgaaggtagttgtaagccccatagtttcctgtaaaattctttaatttcgatttgtattaaataattacaaggatccgaatt

SEQ ID NO: 246736 - DNA, 115 bp, Gossypium hirsutum
agagaactcaccacataactccgctttccaagcttgaaaatcattatgcgcagtctctgcaaggggaatttgaaggattttctgaactatgtcctcagaaaaggtattctgaatt

SEQ ID NO: 246737 - DNA, 352 bp, Gossypium hirsutum
caaaaaaataaaggtgacgaaaagcgtgacaaaatatttctggtcttttttatttttttcttggctaaacactcatcgtcttctctgagaatcgatttcattgtcagatggcattgcgaggagtttggcaacttaaaaagctgattgtaagctattgtgattggggaggtagtagtaggggcatcagggcatttatggagtctgagttaccaacttttaaagagaaaaaccctcagctggaggtggttactgaactcattcgtgggcagcatccacatttgaaaggcttttacaagaacaaaacgaagcggtggtatgcgtgaagaatatgactcctgaagatatcccttct

SEQ ID NO: 246738 - DNA, 170 bp, Gossypium hirsutum
ctgtttccaatagctcctaatttagagcaaattatctaataaccaacctgataaaaatgatgctttgattggttcaaaaaccactaaaaagaaaaataaagaaggcaaaaaaaacaaaaaaactcaccgcaataggtgacgcttctaggttttattggatctgaatgaca

SEQ ID NO: 246739 - DNA, 306 bp, Gossypium hirsutum
gggtaatggagagggttagggaggtaggggagagattggggtacagagtggagagagggaaaagaggggttatggggttagggaaagggagggtggtagtggtggtggaggtggtagaggtcgcacaggtgttcgtattggtggaggttaaggtgatggatggtggcgtagagtttgaggaatggcaatgggtggatctgtgagccggccttgcaaacatttttgtttcttgtaataatggtgcttcacgctgatggcatttttgcttggtaatgtacatcgaacgtttttttttttacctctttc

SEQ ID NO: 246740 - DNA, 234 bp, Gossypium hirsutum
tgactaggccggcattggtttatgctacaaatattcaagaatccggtaaggttgcttggtgtatttatatatttcaaaatcggaaaggtgttcagttgcttttgatctaaagagaaacccttaaggtaagggtgctctgtgttttctttgtacgattgtaagcagagagaactcaaacttttctggctactatgaattatttgatagatgatcgaaaaaaaatttgttatttag

SEQ ID NO: 246741 - DNA, 290 bp, Gossypium hirsutum
cgttttatgcaacaacttaaaaaggaagaattttaatattgatcacacctttaatctctagtagtttggatccttttgaagttgttcggtccatgcttttttgttttcaagcgctctttctctctttcatgtcccctatcattacttgtaaacttcatatgtatctttgtcatcttttttttcattaagcttttaaacgaacagttatgccttttaaaaaggtatggaaaaaaaaaattaaaacctagaacttatatataattttgtggtccaggcccaaaaaccaaaat

SEQ ID NO: 246742 - DNA, 321 bp, Gossypium hirsutum
ttttttttttttttattttatatacttcaataaaaaaaaaaaaaaaaaaaaaaaaaaaaaaaaaaaaaaaaaaaaaaaaaaaaaaaaaaaaaaaaaaaaaaaaaaaaaaaaaaaaaaaaaaaaaaaaaaaaaaaaaaaggggggggcctttttaaaggatcaaagtttatgtacgcttgattgcaaattaatagtttttttatagtgtaactaaaattaaattaattggccgcggtttaaaaacttttgaattggaaaaaccttggttttacaaaattaaatggtttaaaacaaaatccctttttaaaaagttgggttaat

SEQ ID NO: 246743 - DNA, 310 bp, Gossypium hirsutum
aaaaaaaaaaaaaaaaaaaaaaaaaaaaaattttttaaaaaagaaataaaaaaaaaaaaaaaaggggtaaaaaaaaaaaaaaaaaaataaacggtcgtccgttttaaagggtcccccctttttgtacgcttccttccaaccttctctttttttctatagtgtcacttttttttagttcactgtccttccttttacatcgccgtgattgtaaaacctctggctttgcaaaacttattcgttttccaccttattcccctttcgccagttgcccttttagccatctggcctaatccctacgcgcttcccacca

SEQ ID NO: 246744 - DNA, 312 bp, Gossypium hirsutum
aaaaaattaaaaaaaataaaaaaaaaattttttttaaaaaaaaaaaaaaaaaaaaaaaaaggggggttttataaaaaaaataggataatctggcataaaatttaaacggtttgggcattaagaattcttccataccacgggacctggtctttctatattgacaccttattttagttctcgggttgttcttttttttggtgataattttaaaacatctggattggtttaaactttgtcttatcccacctcatgcctttattacattttggcttaaacgcattgaggctgtaaacctgttcgttttcaactgtt

SEQ ID NO: 246745 - DNA, 141 bp, Gossypium hirsutum
gttactcttatgaacacgcatacggacttgccgcgtttggtttcagaatgcacggatcacatgttcaatgttcgagggctggtgcctgatagaagtctcaacttataaagaatggaactttcaaactttggcggcctgcgt

SEQ ID NO: 246746 - DNA, 425 bp, Gossypium hirsutum
  unsure (1)..(425): unsure at all n locations
gttttttgtaaaaattcctatagatggtctgtaaagcataagttctaagacttttagtcaatatttgtaatagttgataggcgcttctgaccgtgaattcacccgaccgttcgccaccccagataagaaagtcttcatgcggtgtttgtgccagaggaattctgaggattttggtggcatcatcttccgaaaagatctgcagcaattgatgccaaccaagcaccatcttggactcctctcatcatatcactactttgctccctggacaaataatcttcctgatgctttgtaatacctccaacatacgagcattgtggttgtagtttttttgatagagcatntagctttagactctcccttctaaccaacgttgattctgcttttaatgctaaagagaaaggtggatcctctttaattcagttttt

SEQ ID NO: 246747 - DNA, 236 bp, Gossypium hirsutum
  unsure (1)..(236): unsure at all n locations
gtaagataggattttcgtttttcaatcaattctttgcttgcttaagaaccaacatgtaatattactgttcccgcatgagcaattagagaattcatcatttgcttgatctannnnaaaaaagcaaagagaggatcataatttgatgagtgaaaaaaaagccaaattttgggagacaaaaaaagaagaggaaaaaacaaaaaaaagggatgaaaagttaaaaggggcggccgctttaa

SEQ ID NO: 246748 - DNA, 226 bp, Gossypium hirsutum
atcgcgagcgccgcccttttttttttttttcttttggtctttcccttgatatcctgaaatctgcagtgcttgatactgttcatctgcctctctctttattgttcctagcttacatgaagtcttcttatgttctttcaacaagtgataagaaaaaagccagatatttgtataattcagcaatgtaagcaattaaagttaataaacatatacggagttaatatttccc

SEQ ID NO: 246749 - DNA, 414 bp, Gossypium hirsutum
  unsure (1)..(414): unsure at all n locations
cgtnnccgattaaacattnagatggaagaacannacttgtttcatatgttttatgtctaggttagaaacccttattttgagggcctgattagtcatttgatttaataggcgacagcgtatgtctttaaacttaactatttttagagctccgagntgatgtccaattctttgatgttagattganccattctcttcaaaaaaaaaaaaaaaaaaaaaaaaaaaaaaaaaaaaaaaaaaaaaaaaataaaaaaaaaaaaaaaaaaaaaaaaaaaaaaaaccaaaaaaaaaaannnatacatatttaaaatttaaaaaaaagttttttttacacttactatttcaaaaaaaaatggggggggccctttaaaaaaaccaaacttttttacccctgtttgcaaaaattttttttttttt

SEQ ID NO: 246750 - DNA, 312 bp, Gossypium hirsutum
  unsure (1)..(312): unsure at all n locations
gtttttcattccctaggtttatttaattgcagaaaccgtatcgaggtgatatcactatctttcaattttgtagtgaagttagcggtatctgatagtagctcgtgctgctatctagcttctattattcaagggagtatgctcatcttgctccaaatttagtaccatttaatttaactactataaccattaaataatgtaattgtacaagatactacagattacattttcatttgaatggttaaaatataattaagggnaaaaaaaaaaaaaaatgaaaaaaaaaaaaaagaaaaaaataaaaagaatgaaaaa

SEQ ID NO: 246751 - DNA, 396 bp, Gossypium hirsutum
ataatgtgggatttaggagaatattgttgagaacacaggctcttgtcttaaagaagcgaagcctaaggatgagtgaaaccttattgcgaggagttgggtttagagcaactacatgtatttcaagtaattaatattctgaagactgttgtagaattgaaataatttgaggattaatcttttcagaaaatcaagttgattggatttgttaaaaaaaaaaaaaaataaaaaaagaagacataaaaaataaaagacaagaaataacaaaaaatagataacaaggtcaaaggaaattcaatattctgaggatcatggcataaaagtgttcaaagataatagaaggttgaatcgagtcccaggaaatcatttggggggggccttttaaaagattcaaacttt

SEQ ID NO: 246752 - DNA, 436 bp, Gossypium hirsutum
gggattataggtgaagaggtgaaatttagataagatcatataactgctcagaattcagcctgtgacctgttggttggtttgggaagaagaatgatactatagctcataattgaatcacataaaagtgtttgtaaatataaatgtcattttgtttaagatgtttgagctaaccaatttaaaacactaattggagctttatatgagcattgcatggtttgctttataagtacttatctttgtcattaattaaactcaaccactgtgattttgcattctggccttaccttaatctactgatgactccgtatattttcaaaagcatatcgcttgtaattttgattggttggttgtagtgtaattactcttaaggttatacgttctctaaagacttcgggtaccttggaaatgttttaatgtgtgttttctgacgagtttt

SEQ ID NO: 246753 - DNA, 415 bp, Gossypium hirsutum
  unsure (1)..(415): unsure at all n locations
cccacgcgtccgtgccgaggcaacccggcgaatgctggttaggaagagattaagttcaaaaataaactatgatgcattggagaagctctttgatgacccggttacagagaaacccaagaaacaaagaatagaatcaaattcagatgaaaagggggagaaggcttctaaaattggcaaagaaggtgatttagaagatgaatataacgacaatgatgatgatggatatggaggaattttttacggtgacactgaatatgagtatgaggataattatgattacgatggatattgaatngtctnttatgtnggatttgggtgaattcttatattcagaactctactcgtagagcaaaagaaggcaatggcgttagtaaaagaggagttaaaactgcagtcaatagtgatagttttactc

SEQ ID NO: 246754 - DNA, 324 bp, Gossypium hirsutum
agatgatgaaagccagttcaagagcatactttgtttcaatgttattagaggcatgttaaaactttcagcggaggtcatgtaccgtcgccggatgcattaatccgtggaggaacaaaaacagcgctgtggccattttggttcgtgattgtgaagcttttgactggacaaaacaacttgactagcatcatgatctaacctaaaacctaaaatgagttacacaattgattgacttgacactgtatatttacatagcgttcggattaatgttttagtgtaatcgtatttgatgtgttatagaaatagaaatttagcacattaattcat

SEQ ID NO: 246755 - DNA, 352 bp, Gossypium hirsutum
  unsure (1)..(352): unsure at all n locations
cccacgcgtccgcccacgcgtccggttcttccttgtatctttgatggattgatttcttgtgtctctgcatttgcttccaaagcttatgatgaatgataagatttgaaggtcatgttatttgtcaactactatttctttttatatttaagaaataaaacttaatttttttgaaaaaaaaaaaaaaaaaaaaaaaaaaaaaaaaaaaaaaaaaaaaaaaaaaaaaaaaaaactaaaaaataaaaataaacataacataaaggaaaaataatataaaaaaataaaaattacaaaagttatataaaatagaaaattaaaaacantgggggggccctttttaggggttccaacttta

SEQ ID NO: 246756 - DNA, 290 bp, Gossypium hirsutum
tgctcacttacgctcacgcattcatgtttttcttgtatctatgatggattgattacatcgtgtctctgcatttgcttacaaagcttatgatgaatgataagatttgaaggtcatgttatttgtcaactactatttctttttatatttaagaaataaaacttaatttttttgaaaaaaaaaaaaaaataaaactaacttttaacaatatttgattaaatcaataaataaatttacttactatatatttaaattacttaataaattatatttttaaatttcttttattttta

SEQ ID NO: 246757 - DNA, 363 bp, Gossypium hirsutum
tttggagttctcgaattagataatcaagtttcgtgcatatggatactccaaataaatgctagcgttcatggtttccgtttatgtgaaaaggtttctatgggacgtaccttcgggtgacaaaacttgaagatgatatttaattgttggtgtgggagtactggattgttacaaatatctcacattttttgtgtttgatgaacattaatggggaagagcaaataagccaattccattctcttctcacaagtcgtcggtgatattatgcttctaataatttcctctcatttgttgagaaacttattgtgtgaaatttgttaaaccgtaattggaaattatataaattagatttctgatttttaattc

SEQ ID NO: 246758 - DNA, 415 bp, Gossypium hirsutum
gattatttaatgtaacaaattaatgagttcaccaccaatgtttacatttatgtatctactggcttcgttaaattaaatggtgtgagccaagttctttttcaaaaaaaaaaaaaaaaaaaaaaaaaaaaaaaaaaaaaaaaaaaaaaaaaaaaaaaaaaaaaaaaaaaaaaaaaaaaaaaaaaaaaaaaaaaaaaaaaaaaaaaaaaaaaaaaaaaaaaaaaaaaaaaaaaaaaaaaaaaaaaaaaaaaaggggggggcccttttaaaaaatcaaagtttaaaaccccttgattgaaaaataaaactttttttaaagggcaacaaaaaaaaaattaattggcccggttttaaaaacgtgggaatgggaaaaaccctgggttaaccaaattaaatggcttggaaaaaaatccccttt

SEQ ID NO: 246759 - DNA, 298 bp, Gossypium hirsutum
cccacgcgtccggtgaaaagtcaggagatagtctgatataaatacatagttatagcagctaatgggtgttagctatgttgacaagaacttaaaggagaatcagattctctgtgttgatgtatgagttgtgagcaatgtgaaataagatactatgttccatcttcatgatggacacaacccataatcaaacaggagctgcagtacttgaacaaagaagacagactgttgcgttggcttttagttaaacaaaagcgacacgaaatatgggctggaattccttaatgaagatgatggggaa

SEQ ID NO: 246760 - DNA, 304 bp, Gossypium hirsutum
cccacgcgtccgcccactcgttcgcccacgctttcgggtttggtcattttctctagtccttatcttgtgtgttaaatgggttcgcttaagtgctttgtaaaatgttctcttccaatttcctttgtaacaacagatttcatttacttttcttgcaagaaatatatataacagtatttctttttcccaaaaaaaaaaaaaaaaaaaaaaaaaaatatattggtgggtgtcgaaaaataatacaaaattaacagacgcgttccttctaagaataagttttttcttttgtgaacctcttatattaatt

SEQ ID NO: 246761 - DNA, 296 bp, Gossypium hirsutum
  unsure (1)..(296): unsure at all n locations
accacacattcgtatatataacactgaccgttttaagttttctttaagacaaactctccagggcgcttgcgcaatggagattggaacaccctaagtacatgcaataataccaatccctggactaatggtagcgaggtcttgctagatggatataacaacaaattttaggaaagtgctgtttggggcacaaaggaaaagcgagngcatataacttttttttttttacttcgagatgaaactgacatgcctcgttacatgtattaagccgacacagagtgtcaatgaaagcttacatt

SEQ ID NO: 246762 - DNA, 427 bp, Gossypium hirsutum
  unsure (1)..(427): unsure at all n locations
cccacgcgtccgagggcaccgaaaagtctgaaattggtcatttagtaaagagaaaatcagcaggtggacgagttcctagaaagcatatgaaactgcaatcacatttcccgccatgtaaatcaacaaaagcaaagaaatctggactattgtctaagaagactcggaagctgtcttcattgactggtcagaagataggtgtaggtgacaggaaaccggtaacagggaagcccaagggtcctgtaatagcttgtgttcctataaagttagtattcagtaggataaatgaagcagtgaacggctcagcacggctaacacaccggcctctaacatctcgcaatccatgagttggtggtgatccatcgtgttgtgaaagtggtggctgattcattntaaaactattgccgcagcttgcttgcattcattctct

SEQ ID NO: 246763 - DNA, 233 bp, Gossypium hirsutum
gttattttaacttatgttgacgacatttacaattctaaatagaactgtagacctgttgctgcaaaaaaaaaaaaaaaaaaaaaaaaataaaaaaaaaaaaaaaaaaaaaaaaaaaaaaaaaaaaaaaaaaaaaaaaaataaagaaaaaaaaaaaagggcggctcgttaaatgatccaagcgaatgtactcttaaaagcggaaaattgatttaaaaacggtgtcaccgaaatta

SEQ ID NO: 246764 - DNA, 329 bp, Gossypium hirsutum
  unsure (1)..(329): unsure at all n locations
caggagcatgtccttgaataaagtattttatttttattttaaaaaatgagaattgtaattctaggttgaataaaaaaaataactcttatgtcttcggttttttaacaaaaaaaaaggcttatattgttggagaatacaaaatgactttttaaggtttttattggaaacattgagagttaaaattttttgccagtgaatagtaaaacaccatttctttaaactttacctgaatgaaaaccaangggnaacggccggccatttttttaggaagaatattacaacccctcgaaataagaaatttcatgtggccttaaggtccaaatgtgctt

SEQ ID NO: 246765 - DNA, 260 bp, Gossypium hirsutum
  unsure (1)..(260): unsure at all n locations
tgaacttgatgtaattttgttattggaatggttatggaccctaaaattatcctagttcatgtcccatttaagggnaaaagcagcaatattcagacaaaatgagatagccgcctctttccctgaagccaggaggatatttggggctctagctgtcaccagccttatttcgaaattgcaagatgctggtatacaaaggcaagatttgtacaaaataattacagaccccaaccctgggtcgagggtggataaaccctttgaaa

SEQ ID NO: 246766 - DNA, 112 bp, Gossypium hirsutum
ggcacttcttttcatgatgagaaaagggattttctcaaagaaaaaggtcatgggtgatctcaacatggtgcttaaacggggcaaaatcggcggcgcccaaacccttggcaac

SEQ ID NO: 246767 - DNA, 390 bp, Gossypium hirsutum
  unsure (1)..(390): unsure at all n locations
cccacgcgtccgcttttttgccactcacggtggcttgcttttcaagatcttttaaaggggatgggcggaaacaacaatagggaaggtgacttgttagttacaggccctatgtaagggtgttgatcctgttcacccattaagtttctgtatccgtctaaactcttatagttagcgaagcttagctttagtcattgctatgtttgataggttgatatcgatgataactgagatatgggataggttgatcaccgaaaacgatcattggttatcgtgggcgagtcaaggtgggatatcgtacttntccagttctagagcagcttttgcttaattttgcaaatttgtactcgcaaacaatcttttccagcatttaccttaactgatatttgatga

SEQ ID NO: 246768 - DNA, 393 bp, Gossypium hirsutum
ccctgtcctaaaaacctttagcgctaacggttgatggataccaacgaatttaatgcgggggtgattaatatattgattcatgttatgtaaaaacaatgatacaggatttttaaaaaggtgtagttcctgttcacccattaaaataaatgaatccgactaaactcttatagatagcgaagacttaactttagtcattgctatgtttgataggttgatatcgatgataactgagatatgggataggttgatcaccgaaaacgatcattggttatcgtgggcgagtcaaggcgggatatcgtacttattcagttctagagcagctgttgcttaatttagaaatttggtgctcacaaaaaatcttttcgagcatttaaccataatgatattttgatg

SEQ ID NO: 246769 - DNA, 412 bp, Gossypium hirsutum
cccacgcgtccgatttttctggtggctgtagagtgagcttgctcttgttgagaggctgatcgacaggaagactgagagtgaggaggaattgcttgttacgattgctactgctagagaagaggtgaagcgtgttaagagatatgattctgttgttgataaagctaaagggaagcttgaggaggctgtaaatttggtggggtctatcattgatgctgagaaggctaaggttaggcaaagggagccaatcatttgaggtttttcttgtgaagggttctcgtgttggtattcttgaggtagttgattatctgtttgactaactctgtgttactgggaatttgtagatctgaataaagactagttacttggttcaattgataaaacaaaatatagatgaattaagtaaacaagacaa

SEQ ID NO: 246770 - DNA, 349 bp, Gossypium hirsutum
cccacgcgtccgataatagagtaaaattaacttgcttggaaaaaaaaaaaaagaaaaaaaaaaaaaaaaaaaaaaaaaaaaaaaataaataaattataaaaaaaaaaaaataaaaaaaaaaaaataatattaaaaaaaaaaaaaaaaaaaaaataaaaaaaaaaaaataaaaaaaaaataaaagggggcggcccttttaaaaaatcaaattttatttcccctttattgcaaaaaattaatttttttttttttacacttaaattaaattaattgcccgcgtttttaaaacgtggtacttggaaaaaccttggttttcccaaattaaattccttttaacaaaatccccttt

SEQ ID NO: 246771 - DNA, 156 bp, Gossypium hirsutum
  unsure (1)..(156): unsure at all n locations
cccacgcgtccgggttataataaatcttagtccttttgtttaacatttgttcaatgtccaagttcttcctattgctccaatatacccaaaacccgagactgcttttttttttaaaatattttattgcaaatgcaattttttttcnnnnnaannnaa

SEQ ID NO: 246772 - DNA, 318 bp, Gossypium hirsutum
gtttgaagatctgaacgtgctcggaaatggtgacggaaggcgtagtagtacatcaccaaacttgtcaggtagtaatacgcaaagtatggttggtggaaggaagtaaaaaaaagagtgtcgtagttttaagatttatgcaaaaggatatatatgtccattgtgaatctctggtgtaaatcacagtatctaagacatggatttgtttttttttttttagattgatttgctgtggaatttgtctttttagatttgatttgtgattcattcaaataaatgaccaaaaatatacaacatttaaaactgaaaaaaccattaatt

SEQ ID NO: 246773 - DNA, 248 bp, Gossypium hirsutum
gcaaatttctagggtttcttttgctgccacccaaccaccattgttttggtgatcaagagcattcaaacagtacccatcttcctcgttgaaggcgttcgaccatgcctagagaaatttggtacagagtttgttggcatgcgtacgggtagtggaggtatggggctgtttcttggttgtggcgcattagttattgggtctaggtattagtgttttaatttgggtcaaagcctgttaatagaccgttatat

SEQ ID NO: 246774 - DNA, 281 bp, Gossypium hirsutum
cccacgcgtccggaatacctcaagctgcaatgttatgtgaagatgatgatgatttggattttcattttaccccctaaaaaaaaaagttcaagtttgatgccataatatacttgaaaatgttttttttttttaattttagtttttatcttttttttcttttttcaattttatgttggattaggggttaaattatgatatagataatatttttgttgaaggttttaggggaggattgataatgttgtacgtggaaagtcaagggtgtggcttttccttttttt

SEQ ID NO: 246775 - DNA, 387 bp, Gossypium hirsutum
ccggattggaagggccgggccgagcgtcgcgtcacgcgtacttgataacctctaactgcaattttttgtcaagatgatgttgactttgcatgtgcgggttaccaaataggagagagaagttcaagtttgatgccataatatacttgaaaatgttctttttttttaattatagggactatcttgtatttcttttttcaattttatgttggattacgggttaaaccatgatataaataatatttttgttgaaagatataggggaggactataaatgttgcacgtggaaagtaactggtgtggctttccctttttttatgagaatgtctgttgaattattgacattatatctagccatacatttgagaacaccacttaatttttttttct

SEQ ID NO: 246776 - DNA, 334 bp, Gossypium hirsutum
aaaaaaaaaaaaaaaaaaaaaaaaaaaaaaaataaaaaaaaaaaaaaaaaaaaaaaaaaaaaaggtaaaaaaaaaaaaaaaattaaaaaaaacaaaaattacacaaaataaaaaaaacaggggcgccccatttagggggtccagtttacgttacccttccttgcaacgccatgtttctcctttggagaaccctaacttaatttccttggttttttttttacaccttcgtgtctggaaaaaccctgccgttccccaattaaatcgccttcctaaccttctccctttactaaagttggcttgataacaaagaggccctcccctttcgcccttccaa

SEQ ID NO: 246777 - DNA, 235 bp, Gossypium hirsutum
gcttttcttaaaaataaagaataagagaactccctcctataaccaaataaaacaattttatgtacctatttgataaagagaaaaagccaataggggcaaattcataaagtatttttgaattgccaatccaataataaatacgagtttgaacaattgctgattagtcaagaattacatacttttagatgcaattttaattattgtaaattatacatttactatttattggtgaatc

SEQ ID NO: 246778 - DNA, 264 bp, Gossypium hirsutum
agctgcatctgtgctatcattggagtgacatattagtagctttgattaatagtaaaatacatgggcttcaagaaatgcattgattgacgtgatgctaagatgatacgaatttctcttcctatatcatcacttgatttaatgatttacggctccacatgggatgctatactatgaagtggaacgccgtgcttattcaccaaggacccacacgtgatggagatcgcggaattcgccgtgggggagtgttacaagcaatccaatgtt

SEQ ID NO: 246779 - DNA, 394 bp, Gossypium hirsutum
cagaaattggaaagaaatattttaagctcactcatttcgaggaggcattcacaactcatcattggatggttcggatatataaactgaagcctccgaagaacaggattcgagggaaggccaaaaaatcaaaatcgaaaactagctcaacaacaagcagtcctaaaagaagtggaacgaaaaagaagaatccatggcagtaagaacacaaatattttataacaatggtgaaagcatcttgtacctaattagattggattccttaaggagccttttagagagatgatccaattattccaggcaatggtaaggtaattttcctcttaggtggaattccacccaagccattcaaggtaaaccaggtttggtggaccacctgactggatcgctttaatct

SEQ ID NO: 246780 - DNA, 399 bp, Gossypium hirsutum
cccacgcgttcgctttcatacaaaaaaaactacaaaaaaaatgcaaatcttaaaataagacgggtgaccagaaagaccatcacacctaaaaatcaaaagtaacaacaacgatcgacaacgttaaagcaaaaaatacaagacaaaggaaaggggccggccgttctaaagaccccatatttttttccgcgtaactgctagaaaatagcctttctttggggcgacacaacatcaattaaggggcccgcctttaacaacttcctacctggaaaaaccctgtggttccccaacttaataccctggcaggacatcccctttctcccggttggcgtatttccaaaaaggccgacaccgttcgcctttccaaacaattccccacctggattggaaaagggcaccccc

SEQ ID NO: 246781 - DNA, 339 bp, Gossypium hirsutum
cccacgcgtgcggccactcattcacctacactttcgctcacccgtccggtaaagtaggcggccttggaataccagatctagtgcctgataacacaccaacacctcggccgcaaaagcagacgatcaagggcgaacaaaatcgaacttaaatcgagggaagtccaaaataattgaatgggcgcctcgtttacatctcaaattcttacgagctatcttagctactgaaagctcggggatagtggaagattgtcaccatactatccaattcattttggtacttttgaaagtgtaaaccatttttagtataacatgtataggatagaaagaatatccctttaa

SEQ ID NO: 246782 - DNA, 407 bp, Gossypium hirsutum
accacacgctgctaacaagtccagctacagcgaaccaagtggctgagaatgcaaagaatcctatacagtggaaggcaaaattcgcagcggcaatggtgaagatggggcagcttgatgtcttgacaggatccgagggagagattcgagccaactgtagggtgatcaaaagctagagatttgaacacatcaaatgtgtgatgatgaagttaaaaaagtgaacttgaagctttttaaagctggatgtcacataatttgcaatagttaaaagtcataagcaccaaaatttggattagttgaaagcactatggttcgtaaaataggattatcaaggaaagtgacaaccattttcaataaaaaaaaaaaattttttttgaggttggcctataaacaaaaaaaactcttgtggg

SEQ ID NO: 246783 - DNA, 292 bp, Gossypium hirsutum
cttcatttgtaataataatacagttaggtatattaagatagatacccaatctttgtaggaaatttgttgtaactttatcacagggttatctccaatttagcattgggaggaacaaagaatgatctgcaagattgctgtttagattttctttatagatgtagctaatatacgtgtaaaactatgtaaaaggttccaagtcgtagcatgtgaaaatctcatgtaacttgaacgaagctgaaggtgaggactgtgcagtaatttatttataataaaaacttaattggttcaactt

SEQ ID NO: 246784 - DNA, 364 bp, Gossypium hirsutum
ttctttcttccttgtattctttttccctcctctatatatgttctagagaaactattatatagataattaaacatgggggtttctttgtcgtttaaaaccttacttagaacacttatagttttggggttcatcataattgggaccctgcagcaagaggggcaagtgaaagacttgggtaaagggaagtcgactttggtgcatcaacggttggatctctattacataagcagaagaagagtttcttatggaccggatcctattcataacaagcgagctggcaactcgagacgacctccaagacaagcttaggcatcaaagtatggggaagcttcgaatcaaccgaagtgctaaaagatgatggcca

SEQ ID NO: 246785 - DNA, 268 bp, Gossypium hirsutum
gccagctctgcaagccaaagcgtccaaaacaccgaaacactcggctcatcgtatgatctggatacagtatccactggcaagagtttctacaccggcgcattgcttccgcacccgcttcaccgcgcatcatcacttccggtcgatgccgtggatgtgtagaggctgccaagttttttaattattgtaaagtacctacctaccccccgcccccccccccccttcctccttacattgaaagtatgtaaaaggttccacatagctttcatgt

SEQ ID NO: 246786 - DNA, 255 bp, Gossypium hirsutum
cacaaaggaaagctagaggacttttacaggttatgaaaacaagtgaccaacttccatgattctagttctaaaacttcactcttttgcttgtacctatccgcatgcatattgatctgcacttcactcatgctaggcatatgataactatactaataccgatgtctttgctcgagaagatccaaatatcaattggttcctcctgttcgcactcacaagggttcagatgataaatgcttttcctgtgtaacacaggaa

SEQ ID NO: 246787 - DNA, 417 bp, Gossypium hirsutum
ttcggccaagccttcgaattccggctttgccttttgcggaaatgggtcttctatgttggagtggtgaactgcctatgacgccaagatttctccttccccattccatgctattagtcccgatgccgatctgaacgtctgactggtcaaaagctgcgttgaaatgaactgttgcccttccccttttgaacaccttgtgacacttatccgaagagtgtaaattgatttctattaaaccaaataaaccagagaccacaacagaatattcgaagttgctcatcatttccttgtccaaagattccagatttcttcatcatcatcatcaatagacagaccggcgaaatctgactccatggacaattacgtgagaaacagattaagagaattatttcagaccctttagatggtagccggcaaacc

SEQ ID NO: 246788 - DNA, 343 bp, Gossypium hirsutum
  unsure (1)..(343): unsure at all n locations
cccacgcgtccgcccacgcgtccgaaaagtaaccctttcaaagttactaataaatcaattcattacattttttgagtgaatttaagttgttttgtttatagaaaagaaaatgtaatgagattagaaccctccttcggcagcagaattttctatttaggttattcgggtttttttgtttcgatttttgggtatgttactcagagttggatgttgatgttgagtacgggtatatcttatttagttatgttcaaatttccttgtcaaacttgnnagtacaaatggcatgatattcattccggtacaagcgaatgttcaaatatgcaaggctcttatagaggaaaaa

SEQ ID NO: 246789 - DNA, 389 bp, Gossypium hirsutum
ataaatctgtagaattttgttaatgtactttctctttattaaataataatatcataaatcataagctgtaaattttaaagtattttttcaaactggtttttattttttccccctgatgtcccgatttgcatagtagaagaaacatgtactatacacaatcataaattcaaaataaaaacaaattccaatatccaaaaaaaaaaaaaaaaaaaaaaaaaaaaaaaaaaaaaaaaaaaaaaaaaaaaaaaaaaaaaaaaaaaaaaaaaaaaaaaaaaaaaaaaaaaaaaaaaaaaaataaacccccccaaaaaaaaaagggggggccccttttaaggatcccaatttatcttcccctgggttgacaagtaaaactttttttttggggcccc

SEQ ID NO: 246790 - DNA, 366 bp, Gossypium hirsutum
  unsure (1)..(366): unsure at all n locations
cccacgcgtccggcaaaatacgagaagctggttgacactgaagcaactcagctggatgagatcaatagtttgaaagtcatggttgcggacaaagatgaaaaaattcgcatacacgaacaactgtgccgtgagcttcagaaagaggcgaacgaattgaaagcgaatttagagaaaaccaagaaggaacatgatgtgaaagtatctgagctcgaggaaaagctcaaggccaaggaaaaggaagtaggcaaaatgatcaataaggttgaggagatggctaactcgatgacttgnngaaagctaagaaagctnngactacgctcggctccgcagttggatgacagcccanatactcatagatcaagatct

SEQ ID NO: 246791 - DNA, 413 bp, Gossypium hirsutum
caacgaccagcatgcctccatggaaactgaagtccattcggatgtgacattagaaaatgcagtgatacctaaaaaagatggttcatgcaatggggactgtggaagtgagaaaggcaacacggtaagcagtggtggctgcggtggttgtggtgctggatgtggaaacgtggtgaagagtggtggttgtggtagtggctgcggtagtggatgtgggggtggttgtggaagcatagtgaatagtggcggctgcggtgccggtggttgtggtgctggatgtggaaacatggtgaagagtggtggctgtggtggtggctgtggtggtggttgcggtagtgggtgcggcggtagttgttcatagcattccgtctttatagtatattacatagttatgaatatgtttctggtatatactg

SEQ ID NO: 246792 - DNA, 359 bp, Gossypium hirsutum
tctcaatctacttttgtctccatacaaagttgagaagcccctgagcatttgatcccttcacgggttttggtgggagctgttaagggttgtttattctaatggggaaaggttcaaaaaacaactgcaagtcagcatcccacaagctcttcaaggacaaggcaaagaaccgggtggatgatctgcaggggatgttcttggatctgcaatttgcgaggaaagagagccgtggcgttgatgttgcaatccttgaggagcaactccatcagatgctccgtgaatggaaagctgagctcaatgaaccttctccagcttcttcattgcaacaaggtgggagtcttggttcattttcatcggacatt

SEQ ID NO: 246793 - DNA, 408 bp, Gossypium hirsutum
caaaacttgatccgaattcatccaataaaacggattttgtgatgccacttctcggtgacaagaaagatccaaaaccattgggtaaacccaagaaggtgagtgcatctcctcaaaaggaaaaagttagtggaaacaatccaagtttaacttcaaacccgaaaagtgataaaacaatgaaggaaaataaggcgaagaaaaataatgtaggtggtggaaacaatctaaatagtgcaaacactgtgaaaagaggttatacaaacaaggataaggaaaagaagaagacgacaaagtcaaatgtaattggaaatgattccaagtctgagattgatgatacatgtgccggcatagctagtagatgtgaagatcaaaactctttgattgcatgcgttaagggttttggaactgggt

SEQ ID NO: 246794 - DNA, 422 bp, Gossypium hirsutum
cccacgcgtccgtttacatgcagagatttggtgtagtaccggtgccgggcattcctcctcaccatgcaatgtacaaagctgacaccggcatcggtgtccctgccagccaattacgtcgccaccctctcgtcgacttacatccggttagtagcttatactttgttatcaatgaattagttataaaacactgaaaaaaaaattaaatttcgaatcttaaacttaaacgaggattttagttatattttcaataaacaaataaaagcaaagcaatttaaaaaaaaaatttcttggataaacattaattcacatacttacgatataagataaaaattttaagcatttttaacaaaataaccctcaataattattattgacgttaaatctatgatttcatccataatatttatatctacaaattatgt

SEQ ID NO: 246795 - DNA, 376 bp, Gossypium hirsutum
  unsure (1)..(376): unsure at all n locations
atctaactcttagattttgctggtcccgaaaacacatactggtctgagaaaattaacgatctttttatcccaaccgtcaaaatctgaccagacccttgggctcattactgttaacagaccaggtcggcaccatgaaccaagggggcgtagccaccacgaacggtggctcgggaagcggctcagtcggcgttcagatccatcaatcccgaaggctcccggatttccttcaaagcgttaatctcaaggcctgtgcctgggggcaatgattgtcattggagatggaatgtttggcatttgtcacaatccatggatctgaaaggcaggcactngaaaggaaaaatgtttgcgtgaaaattattgttctgaaagccattaa

SEQ ID NO: 246796 - DNA, 404 bp, Gossypium hirsutum
ggtgagttttttatttaagaaaaactatttgctatagaaaaataaaatgatctgtgtggctggtagaacaaaaatgacatatatgactacactattttgccaaaacaagcacagatctatggttggagatcccaaaatgactggttaaggttttagttgcagtcatgttgagtcgactttctggccagagaatagtcagccaccattccgtacactgtcaatgactgtgcctcaatgtcaaactccagacaatgtttacagtatgatgatgacaagccatctaaataagaaattccagggggcctaaaggtcgagtcgtgctttaataagtcagtccaatgatggttttcattctctaaaccctactgaactttaaaatatagagtttctacaagaacttaatt

SEQ ID NO: 246797 - DNA, 428 bp, Gossypium hirsutum
tttaccaacttagacaaattaatcagatttatctctcgatctcatcgattaatctgggactaatgaattggtgcacaataagattaccttttggtatcatttgtccggatattcccttagaggcgtcaattcctaagtttctaggtctattcaatttagtccaatttattacaatttagtcctttgtctaaaaaaatcaacttatcctcatctctatcaaccaaccccctttaaagtttagctactcattctgaaaataaaaataatggacatggaaatgaaaaacaaagaaaccatcaaatttaaacttataaaaaatataaaattttggatttttatgcaagaaaacttaaagaacatgaaattaaaggcattcaaccaagaaatctaaagcaataaacataaaatgaacaaactttagatgattt

SEQ ID NO: 246798 - DNA, 433 bp, Gossypium hirsutum
cccacgcgtccgattaattaataacttaaaaggtcttgttgtttgaaaaaaaaaaaaaaagaaaaaaaaaaaaaaaaaaaaaaaaaaaaaaaaaaaaaaaaaaaaaaaaaaaaaaaaaaaaaaaaaaaaaaaaaaaaaaaaaaaaaaaaaaaaaaaaaaaaaaaaaaaaaaaaaaaaaaaaaaaaaaaaaaaaaaaggggggggcccttttaagggatcaaattttattaccccgtgtttgcaaggtaatattttttttttggggcccccaaattaaatttaaggggccgggttttaaaaacgtggggattggaaaaaccttgggtttcccaaatttattggctttgaaaaaaatccccttttccccagttgggttattaccaaaagggcccgaccttttcccctttccaaaaatttgcccaccttaattggt

SEQ ID NO: 246799 - DNA, 325 bp, Gossypium hirsutum
ggatgtttatttaaataagtctcgctatcttttatatggctttggctgatctatacagcctgagacacacaaattagccgtatgccttcccttttttgtgcatacaacacccatctactgtcggagatcccaagtgactgactaaggttttagttgccctcatggtaatcgactttttggcctgggaatagtcatccaccatgctctaaaagaaatcgtatcgtgagaccaagaaaatatctccattcagttctttcagctatgatattatcaagccgacattataagaaatggctctggacctaatgttccaatggatctttag

SEQ ID NO: 246800 - DNA, 201 bp, Gossypium hirsutum
aaaaaagccctctcccctgcactcccgaataccctgttgtgtgctgtctaccgaatcccgggtgtgttttgccattattactgaaagctttgaagacctttcctttggcgtgcgtgttgaaactggaaccttatgatgcttaaaagacgcataaacatcctgtttgtagaagacgtgttgctccactatctgaaaacatat

SEQ ID NO: 246801 - DNA, 283 bp, Gossypium hirsutum
  unsure (1)..(283): unsure at all n locations
cgtcattcatgccgctcgtaacaattactttgaagctgtaagtgtttgataagcattgcctcattggtggtttaggatatgggaagtgtcatcgacatttatgttcctctctttctatatatatgaattttaaagtaagaagcagaaagtgttgagtctgtaaatactttcggtgattggattttgcaccgcattcttttgaagatcaacattttacagatgtaacttttcataaaaagaaaaaagaaaaaaatttggaaattatgaattgaacaaannnnaa

SEQ ID NO: 246802 - DNA, 214 bp, Gossypium hirsutum
cacgtgaggagcttcgcggcgcaaaggctgggggctaaagttttctcatccgagaatgtggtttaagtgttgggccatgggccttctattaatttgggttagggtttgggcccgttttaaaaaaacttagatcgataaattttattaaaagcttggataaaattgggctggcagaatgaataatcaaaaaaaaaaaaaagggggaaggtttaag

SEQ ID NO: 246803 - DNA, 208 bp, Gossypium hirsutum
aaaaaagccctcccccctacaactaccgaaataccctgggggggcctgtactaaccgaagcccgggtgggtcttgccattattgctgaaacgctttaaaaaacctgtccttcggtgtgcgggttgaaactggaaccttttgatgcttaaaagacgaataaacattctgttggcagaagacgataacacgggcgatgggaaaacaaatg

SEQ ID NO: 246804 - DNA, 295 bp, Gossypium hirsutum
  unsure (1)..(295): unsure at all n locations
cccacgcgtccgggcctgcagagctggaatgtatgatccatcgaacaaaactcctgtgcaagattcatagcaatagtttattcagacagatagaactgggaagctcttttttgtcatgtttttttatatttatttataatcttgttagggaagggaaagaaaggggtaagtaaccccattttccttctcatattttgcatcattttcttctggtgggtctttatagggtgcagatttgagttacttgtaaactacatgcatcgatttgtagtacatataaagtgaggtgttgntt

SEQ ID NO: 246805 - DNA, 406 bp, Gossypium hirsutum
acaaagtcattgatagttactctaatattcgccagtatattttacgttggaggatggatatttttgcaaaggctctcaagtggatggcaatatcccactttagccaccattattggaagtgttgccatagttgttcacattttcattgaattcaccaaaatgcctccaccaaagatcaaagctactcaaatttgtacacaataatatctacattaaagcctaagtagtaataataataataataataataataataatgataatgatgatgatgatgatgtttccgagtcggttatcgaagtaactagagttgttggactttatgggaatgtagagtagatttcatacacatatatatataattttgcaggagagagcttagaaatcaatactcaattgtatttct

SEQ ID NO: 246806 - DNA, 290 bp, Gossypium hirsutum
cacgcgtccggtggctggcctacaacttttagaaggccaggccaacatatgatcacaacaactagactagatgtcaatgtaataccttaaagtaaattaatttcttttcttttctttaaaacactacaatgggagatccgaatgatttattcaaaagacggtgaaaggttgctttgagttcgcaagaaattctggcgtaccaccgtggaagaacctataaaagactaggggggggcggtcttaaaggttccaagtttctgtcccggtgcttgcaacgaagtatttttttt

SEQ ID NO: 246807 - DNA, 423 bp, Gossypium hirsutum
cttttttttttttttttttttttttttttttttttttttttttttttttttttttttttttacaaaaaaatttttaactaatcataataattataataacaatcgggagtaagccattattatatttcaaccggcaaaatagcaacacgctttcatgatataaaatcatcatcaccggcgaaattttaattaaaattaattaaaacaaaagaaattcccttctaaaaataagaaattaacaatgggcctaaaataaaaattatcaaatccaaatcctgtcctcccccgaaaggcagatcttaatcaacaaagcagcaaaaacgactgcgacctaagaaaagtgggggtgaaattagggggatatatgtgaaagtgagcatggatggggctccttatcttaaaaagatagatttggaggtgttt

SEQ ID NO: 246808 - DNA, 216 bp, Gossypium hirsutum
cggacgcgtgggcaagcagccatggatgggccttttcatggcaaccaaacaagggttcttcatagggtgagcattcgatcgagtcaaaccgcgtaaaaaaattttgcgtcgagtcgagttaatgaatactattatttatacttaatgttgtgtttacatggactgattatttcatgtacccgaaatgactggatcatgattgaaaaaaaaggagtt

SEQ ID NO: 246809 - DNA, 319 bp, Gossypium hirsutum
aaaaaaaaaaaaaaaaaaaaaaaaaaaaaaaaaaaaaggaaaaaaaaaaaaaaaaaaaaaaaaaaaaaaaaaaaaaaaaaaaaaaaaaaaaaaaaaaaaaaaaaaaaaaaaaaaaaaaaaaaaaaaaaaaaaaaaaaaaaaaaaaaaaaaaaaaagggggggcccttttaaagaatcaaagttaacttccccttccttgcaaagtaatattttttttatggggcccccaaaatcaaatccccgggccggggtttaaaaacgtgggaactggaaaaacccgggcttaccaaattaaatggctttgaaaaaaatccccttt

SEQ ID NO: 246810 - DNA, 223 bp, Gossypium hirsutum
ccttcaatcttccctggaaagcggccaactctccctcagctgccttattgtgctctgtttacaaatcctgcaaaccttccatattagccggagcaccaaaatggggacccaatttggcttttcccttaatatccggtctaattagaatatcactccgaggggtttgctgatttttcctcttaaccaccatccatgggctggaattcaagaatttttctttttt

SEQ ID NO: 246811 - DNA, 207 bp, Gossypium hirsutum
ctcaaccgtgctcacacgcgatcactacctgtgactgatcaacactatctgacccaccatgggtgacgagtagaagctactgccactgctcttacatgcgcctaatcgtgacggaaggacacggcatcgtcattgagactgcactgagctacaatcagaactgtgctgtcggacgtgctgcgggacaaaatgcgctatgagcgattg

SEQ ID NO: 246812 - DNA, 108 bp, Gossypium hirsutum
gaaacaaacccaaaatttggaaaaacagaaactgtttactgtatcatcagaatctagccaagtgattgcttgatactaaagtcaaaaacagaagctgtttgttgtgtc

SEQ ID NO: 246813 - DNA, 276 bp, Gossypium hirsutum
aatacgcaggttgctaggttgatggactctatatgatggaatggacatgagaggatgttgagcttttctcttatgtttcttaattggattggaaatatgatgcagtttttattgtaaaaccaattatttttttttttttacaagattgttgcaactcgcaagcgtgtttttgtatcttccacaaaaaaaaaaaaaaaaaaaagcaatcaagaatgatgtttggcttttgtaaaaaaaacaaccttacctacatttgtatgcaacagcataactctt

SEQ ID NO: 246814 - DNA, 384 bp, Gossypium hirsutum
gaaacacttgaaaacactgggcgctgcatgactgcacagctagaacactcgcgtctcgtgcgtgtgctaccacattttgtagccgttcctgacacgtgcttgtgttcgattatgtacctacaaatgtcatacgatatacgcaacataacagcgaaaaggcgcaacagacgggatggggagaggacttaactgtctatgagcacatttttattttcttctgcatgcttgccataaaaaagggccattccgatatttgtaaggaacaagtattcagaataaaaaaaaaaagggattttgcatgccacggcacattaaacaccgcgggtgttggggttacccccagcgtgaccccctcaattggcagggccctaacgcccggttctt

SEQ ID NO: 246815 - DNA, 280 bp, Gossypium hirsutum
aaaaaaaaaatacaaacaacaatattatataataataaaaaaaacaaaaaagggcggaggggacaaaacgctaaaggaatacgtacggctgcttgctaaaggtatggggcgggcttaataacagttcaaaacattcaaaggggcggtgccacataatagcgctttttgtgctgcgccgaaattgactaacttaggcgttgggcaacaaagatgaatgtgggaaaacgttggtttagcataactataaaggctggtacgtcttaacattttggtctcatgg

SEQ ID NO: 246816 - DNA, 394 bp, Gossypium hirsutum
gctgacacaggtgctcaggaaagaggtggtggaataatttgtttctttcaagaccaagccaccccacaccctgcaaatgcactctggtctcataagatgctaatctcaagttttgatcattattaattgccccgcaaggatcaattgtattgtacaaatatacatatatatatatatacacctatcgcctggcatgagctcgacactcaactgtttattttcatttttatctgccctgtttagaaaaccagtggttacaaagcaaggaaatgaaactttcctggaaacatgcagcggaatttaattatgtagtcagtgttaatctgcattcttttattcctagtatctgttataaaacaatattggaaagtatataatcagccatctatttcac

SEQ ID NO: 246817 - DNA, 377 bp, Gossypium hirsutum
  unsure (1)..(377): unsure at all n locations
ggattactggtccatgcagttgcttaatggagactaaacatggacattaatttattacagtgctattgcataatgatagagctggctatagatgaggttgaaaattggactttatattccaatatgttaatttggtttaagaatggcttgtagtaggatctcaatatagtgctaaatatatatccacctatacatacatatacatatgtatatgtatgagagctttccgttnaaaaagagccatcaaatattgtaaaggaccactcattcagaatagaaaaaaaaaggtgattttgaatcccaaagaacaataaaaaaaatattaagttgtgtatactaaaaaaaataaaagggggggggcccttttaaaggatcca

SEQ ID NO: 246818 - DNA, 391 bp, Gossypium hirsutum
ggtgtcaacaagaccccacgcccaaggcatatggtggtgcatgtaagatgaaagtggacgagagggttcctagcagccctagtggagtgatcgatgctgcatttggcagtgatagctcgagcgattcttggggcacggtgtccttatcgcctgagcagcagccaccttttaagaagagcagagcccaaaagcaagtaatgcgtttgccatcactcaaccgagtctttgtagacattgatggcagcccttcttaattatatctaccttctctctcttcctcgctctctacatctctttctttggcccaaaaagatctatatttattatgcttatgttcacttttggttcaaggaatcaaatgtaaagtaaaaaaaatgaaaaaacaaagtaa

SEQ ID NO: 246819 - DNA, 380 bp, Gossypium hirsutum
  unsure (1)..(380): unsure at all n locations
ggnnagnnggcgtccgctagaatcttcttaaatacaatatttgaatttgttgtacaagagcttggcattgaatttgattagcaacatctgttcactaactgttacctttctatatttgtagatggatcaaaagagttttcttggtagctttgtatttgaactatatatgtatttagtctaaatacaacttaattaaacataaattcgcaaaaaaaacatgcaacgcttgctgcaacaacctgaaatgggtgtgtgccccctggccctactgctaacaaaggaagtatgcccttgctattgccaagacaaagaatggcaagggcccttgaatcacttctttctatgttctaaaacacgcatcncggtcatgggattcattc

SEQ ID NO: 246820 - DNA, 340 bp, Gossypium hirsutum
ggaaaaaccaggaagtcaagtaaactctgcccgtaagaagaaaaattctgcagtcgggctgctgcaaatagatgatgggacgaagctgttcccgcaggctagacgacgacaagcttttcctgcatcagggaataggagtgcaactttcccgtgagtgtgtctgatgataaaatcatggctctgcatgacaaatgaaaaatgaattttgcgtttcatatttaaaattttgatcaatagaaaacgatcacaatcttgtttaggaaagttttaaacgtactcctattttggagacctactaaatacacggaaaaaattagtgaattaaatatattcgtattgg

SEQ ID NO: 246821 - DNA, 294 bp, Gossypium hirsutum
  unsure (1)..(294): unsure at all n locations
acattttgtttgtaattctatctaggctttagtcatgtatcttatacttgactcgttcaagcttttgatggtttttgaaccatgaacaataagaaatgaatcagatatgttgatgaagaattgaacatgtggtttctattggatttcttctgaaattaagaaatgaatcatttttcaaaaaaaaaaaaaaaaaaaaaaaaaaaataattaaaaaaaaaaaaaaaaaaaaaaaaaaaaaaaaaattaaaaaaaattaatactattaaaaaaaanggggcggccggtttaaaagat

SEQ ID NO: 246822 - DNA, 209 bp, Gossypium hirsutum
ggaacgcttgccgatctagcttgtaaaaatacgcgaataagcggcaggcatttggtttctgaaagtaacctaacgacttaacctattaaaaagagcgtacattattggaaataatattcacaatggaaatggaaaaagaacggcaagaagaagatgttattagtgctaaatattatctcctatacataattgcatatgttatgtatgaa

SEQ ID NO: 246823 - DNA, 192 bp, Gossypium hirsutum
  unsure (1)..(192): unsure at all n locations
tcggccacgcgttcggccacgcgttcgagaacctgtagtagggtcaactaattagttggtcaaaaactacaccctattttggaatcggctacttgcatatttgcatatacttaataataatctcggggccgcttcnaaaaaaaaaaaaaaaaaaaggagnattaaaaaagaggggnnaaattttgggggggg

SEQ ID NO: 246824 - DNA, 205 bp, Gossypium hirsutum
gtataaatctagtatttgctggaagttgtaagtgaactttttgggctatcttagtcttggatattatttgtcttttattttaatttatttgggtttattgatctgacttatttatttattgtaaataaataaattaaatgggcctgggcaaaatgggttatctacatattcatcaatgaaaaaataggtcatatttttcatatgg

SEQ ID NO: 246825 - DNA, 402 bp, Gossypium hirsutum
  unsure (1)..(402): unsure at all n locations
aactgatagcttaatatcttttggtatgttggttatctatatctcattaatgtgtgcctaaactttgtaaacctcgatctgatatgttttgtaaacatacatcacaatattaattttcatatagttcttttcaatgagaaattaataatgacgttgtagaaataacaaacttggatggattttaatccaaaacaaattaaaggattaattacatccaacattaacaatgatgtatcaatcagaatcagaatatgaaaactatntagaccaattaaatcggtttaaatttggattaatttcatctcagtattaatacgtttgcacaaaatatttaccaaataaaaggaaatcaatttttggtttatatgtaccaacctaatgcaacaagaagagggggaaaac

SEQ ID NO: 246826 - DNA, 419 bp, Gossypium hirsutum
  unsure (1)..(419): unsure at all n locations
aagtattgcgcaatgacggaaaatgaacaacactatctgttaggcaccgccccaccagacaaagttgattaactcgacccaccgctccttcatcctcttgaaaagcatcctcctcctcgtccatcaaattcaaattttccattgcatcttccatctcaccctctacaacttttcaaccaaacaagaaaagacttaaatcgtagaacaaacagggactgcaactagagaactgaagaatcccagatgcaaacacaaagaaacgtgccaataccggcagacagagaaccccgtgccaatacggcaaactctctaaaccatgatttaactntttctttgtaaattatctttgctttctatattttgactaattgtattctgaattacaatctttatctagttaatttcagttatattactgt

SEQ ID NO: 246827 - DNA, 340 bp, Gossypium hirsutum
gcttcagcagatgatgcacgatgtttcagcaatcgcaaaagccgccatcttagacgatagttttctcattgtaagaatgtttttcactttattacgtttaacattattgtaataatatttaaaattatattttatttattaattatatcatatatctgtagttgaaaaaaaacaacaaaacaaccaaacaaaaaaaaactaaaaaaaaaaaaacaaacacggactgcaactagcgaaacggaagaatcccacatgcaaacacaaagcatgcgtgccactaccggcagacaaaagaacccccggcctatacagctaactctctcaaccatgatctaacttt

SEQ ID NO: 246828 - DNA, 387 bp, Gossypium hirsutum
cccacgcgtccggaaggttttgttcgttgcattctcattggctttggtgctctcaatccaatacgtagtaggacaaaatgagaatgaggcagcatccccagaagccgtagggatatttggggctctagctatgaccagcattatttcgaaattgcaagatgctggaatacaagggcaagatttgaacaaaataataacagaccctaactttgtgtcgagggtggatacactcgttgaaaagtttaaaagctctgttggagatgattccgagaatgtggaagggccaacttctgccttagctgatgtagatactgatgaggttgcagcttccccagaatctgaagatgaaattgctactgaagttgctagtggcttgttgaaaatggc

SEQ ID NO: 246829 - DNA, 229 bp, Gossypium hirsutum
ccggtgtttttcttcaaattgtatgatgaatactgtgcctgaagtgtgcatatctgctctcaatgtatgcctgtatcttaaaaacatgatgaaaaaaaatggaaacatttggctgaaaactaacattcaaatcctacattatcttctttcccatcagctaaccttctaaatacgccattttatacaacaaaataaccggaacctgctgggaaaaaaaaaaattgaagaa

SEQ ID NO: 246830 - DNA, 155 bp, Gossypium hirsutum
cgcgtgggcggacgcgtgggctcttttctaattagagtaatgtaaagttgatggaagttcttaatttggcctattaaaatttaactgttatttcagtgcacctcttttcttcctcggttaccaacaattattacaaacaaggcaagagttgaatt

SEQ ID NO: 246831 - DNA, 428 bp, Gossypium hirsutum
  unsure (1)..(428): unsure at all n locations
tgataatatttagatttatgtaccaactatttaatagatacgaactctatatttaagtagagttagtatttattatactgatagtatactttttttattccacaagcattattnaaaaaaaaaaaaaaaaaaaaaaaaaaaaaaaaaaaaaaaaaaaaaaaaaaaaaaaaaaaaaaaaaaaaaaaaaaaaaaaaaaaaaaaaaaaaaaaaaaaaaaaaaaaaaaagagaaaaataaaaaaaaataaaaaaanannnnnaaaaaaaaaannaaaaaaaggggggcccttttaaaaaaacaaaatttttgttcccggggtatgaaaaaatataatttttttttggtgcccccaaaaaaaaataaaggggcgggtttttaaaaacattttgaacgggaaaaacctggggttacacaaaaaaaaaacccttg

SEQ ID NO: 246832 - DNA, 276 bp, Gossypium hirsutum
acgggctttcattttacttgcacgaaatttggttctaaccaaatcccaggttgttggaagaaattaactaaatttgtgctcgttggagacaaattaaattttagttttttaaatagaagaaaaaaaatatggttaatttataaaaaaatgggtaataatggaaagggtttaaaatggggagtatattgaaaacataaattgggggggggttttagaggattaattttttcttaaccgctcttgcaatgaaattttttttgtttggggttccttaaa

SEQ ID NO: 246833 - DNA, 167 bp, Gossypium hirsutum
gccacgcgtgctatttatttagggggcttaaacacaggactatacttgaccaacaggcaccattctcgtaaacatgcctaaatggcttgctaaaccctgcatacaaatatacagttcctgtatgaacatcctagcgttgatctgctcctatcgaacagaatcactca

SEQ ID NO: 246834 - DNA, 221 bp, Gossypium hirsutum
acgaagtcgcatgggcggacgcactgggcgcgacttcctcgggtttttaatgataatagagagcgtgtgaaacaggctgctttgaacctctattacaccagagatgctgctatgtactttcaaacttttgctaaaaggcgggctgataatgctctgtttctacaaattatgccagagctcaagaggccacgcgtttcatgatctatgatcatgctaaaatg

SEQ ID NO: 246835 - DNA, 350 bp, Gossypium hirsutum
  unsure (1)..(350): unsure at all n locations
gcgttgcttccatcttaaaacttcatttatttgcttagctgagttggcgctgctgctgtcttctagtacccctgcctgcatattgttggtccatcgcttgccattgctattgcttggtagtttgagtatattttcttatgtgcttatagcacttttattactacttctatgaccaacggctgtaactagcatttatatacttgctgattcttttntaaaaaaaatgaactaggatcataataagtgaaatcgaatatataaatgtaatgtttaaataaactttaaatgataaataaagctttttttgtaataaatttttaaataaaaattgtgaataaaaaaacaataaa

SEQ ID NO: 246836 - DNA, 315 bp, Gossypium hirsutum
ggaactgacgcgatctctcacggggacactatgcttgtggagtccaactacaggggaatcaggcatcatactggacgatcatggggcatgttctacattttgcctgcagacgagttgtccaagccaatgcacaccttgcacactgatgataaaacacaggacagttttatggtggctacatatcctgtgcgctgccgtgagctaagatcaggagaatgacctgtataccatggtgtacatcattatcgacttaaacactaaggtgaagatcgctatgaagcaattgagatctgaatgttctgacataaactatac

SEQ ID NO: 246837 - DNA, 400 bp, Gossypium hirsutum
  unsure (1)..(400): unsure at all n locations
cataaataaacctaaactattttatctgtgttttatcctatgtaatgatattatatgaatgaaaattacatgtttaccttacaaaaaaaaaaaaaaaagaactaaaaaaaaaggaaaatggaaaaagaataataaaaaaaaaaaatgaagcggaaagaaagagggaaaaaaaaaaaaaaaaagggggggggctttagaaagaataaaattttacgtgcccttttttgaaagcaaatncttcttcttttggggacccaaaataataatactgggccgcggattaaaaaagaggtgcttggaaaaacctggggtttcccaaaataaatggtttggcaaaaaaatccctttttgccagtgggggtaaaagaaaaagggccggaaccaattccctttccaaaaa

SEQ ID NO: 246838 - DNA, 223 bp, Gossypium hirsutum
tgcttttaaaaaaaaattaaaacatttgttttataaacaatataaaaataaacactaggggagaagtttaacgtatttctcctgcttcttcatgattcatgtcctgacagaagaattcaatgttcgtcatttagactcaaatgagcgtccttcgtaattaaactttctgacctgtaaaaccacaaaactcgcccatgctagtgtccattgtatgctatatcta

SEQ ID NO: 246839 - DNA, 238 bp, Gossypium hirsutum
cccacgcgtccgcccacgcgtccggccacgtgtacgtaataacaagcctaatgtagatcaaaaggtggacagatccatgatcgcggtcacataagacaggctgctatcacacttgtccttttgtcagagaaggggcctgaactgcgaccataatcacgaagtgctatcttgcactaaccggggaaaatgctacaaactgtcattgtgctgagacgcacatgaggtgatgcaactgata

SEQ ID NO: 246840 - DNA, 249 bp, Gossypium hirsutum
ggctctgggcagcttctggaatcgtcgatatttacagtgagtacggttccgttgccgggttgtaaattttgtgttatccatttagtttagtgaaaaaattgtacattataaatgtacacggatcaaaacagtatcccttttttaggcttaaattttatatattcgaaaagaattagataaattttaggttaaaaatatggcttttgggttcttaagaattcaataaaatccaccattttattttttctt

SEQ ID NO: 246841 - DNA, 407 bp, Gossypium hirsutum
cccttttcaatgtttataacccaaatgtggttttaattggttatgggaaacttttcatgttgtttttcttttaagttttgtttggaaaaatctatatcaaacatggccttgttgagttgaaactatctcatactctgtgtcagtcggattatcaagaaaaagaatacagttccacattttgcctgtaagagagagcagagcttgtgctcatttttggaccacccgcggtcacctttggagctcatagttatataaagcggcattaggtaattgctttggatcggaggattgggttccaatcgagttctttatcacggctaaacacggggaaatcaccatatgcctttcatgccgtaagtcacacattggcattatgtatgttgatgtgtgtgccagcatttgtttta

SEQ ID NO: 246842 - DNA, 407 bp, Gossypium hirsutum
tcttgatgtgccttcgttaaaaatacaacttttagatcttggcttttatagccctattacaactgttcattctcatttttttcgttttttgctctttatttctttgtattcttctgttgcttgcattcattcttctctgcaggtgtcagacgaggccgacggctgtggtcagaagcgtgcatgagtgagcctggcagcatgcggcgcttggaggcttgggggcaagcagcagctagggttctctgttgctgaaattttttaatttcctgggctagggtttaggtttgttgtgtttaatgtaactggactgattattttttggtaatttgggctgtttcgggttctattgggccccgtgcagtcctcttctctctagaaaacaatatttggaataaaataaaacttaa

SEQ ID NO: 246843 - DNA, 291 bp, Gossypium hirsutum
  unsure (1)..(291): unsure at all n locations
cccacgcgtncgtaacaatccaactaatttcttctaaaggaccatattgttttattttcgaattatattctctctttttctttttctttttttgttaatcatccttaagattataattttttttcatttgattataaaaatggttatgatttaatttactttattattatttcatactaatattagaagaaagaaataaactcacttccaattgcttatattttatggttcaatctatccccttttagcttggtttcactgcacatgaccgcgtgcacacgccatgggcag

SEQ ID NO: 246844 - DNA, 272 bp, Gossypium hirsutum
cccacgcgtccgcttttttttttttttttttttttttatattaaggttttttttttttttttttattttattttttttttattttttttttttttttttattttttatttaataaaaaacctttgttagatttaaaaaaaaaaaaatattaaaagggcggtcgttttttatgaataagcttatttactgaagcatagcgactcatagctgttgtatagtggaaaaaaaattgaattctgtggtaaaggttatataattaattgactgggaaa

SEQ ID NO: 246845 - DNA, 269 bp, Gossypium hirsutum
ggtacccacgcacgtttgaaggggacacattgcccttggaggtggcccatccaactcagggtcccaattacccaaaattaactgcagagtagacacaaccatgtggaaatattccccccttgggtggttaagggaaataaccgtttgaccaaggaccaggttggtttaaaaattgccaaattccttaaaaattaccaccccggccttgtggttaggccgtttgacaccaaaaatggccaaaaaccctattttctaactgcacatgaacc

SEQ ID NO: 246846 - DNA, 331 bp, Gossypium hirsutum
cccacgcgtccgcacgttttgtctcacacgttgttatttgaagatcttatataatacaaaatgtggataatgattcgtattacatatagtggctttgacaattcaatgcttgaagcgaaagatctaatgtaacattccaacccaccttgatcgacggcgaggtcctccattgtacttcacaaagagcatgtgataaccaggtggtgcaatgttgctgttcatgcgagttagaagaacaatgttgtttggatttagcgccacatatttgttaaatttcacaatctcaaattgaatcaatctctgaatcaatgcaacccacgtggtcacaaat

SEQ ID NO: 246847 - DNA, 143 bp, Gossypium hirsutum
cccacgcgtccgcttttgagtttgggctgttcgggctaggggtttatgaatttgggttgaaattgtatttgggctaggggtcaatgcaacatgcttgcaatcaaatcataataacggacgagaatggaattaaacttgagttc

SEQ ID NO: 246848 - DNA, 308 bp, Gossypium hirsutum
cccacgcgtccgccggacctcggatccaatgggtcttttaaacataattcccataccagtcattattaagggctaccgcacctgctgttgtttgaaatataggatatggtgataatctttatattattgtaaaatagaggtcaataaacttcccagagtgtaagatgcgtattatggcaggctgtcctggtactacataactatgagctgccttttttcaagttgagaagcttttctgagatgccacccgctgtaatacgttcagttcaaacaactatgctttggaaatacaagctgaactagcttca

SEQ ID NO: 246849 - DNA, 255 bp, Gossypium hirsutum
gaataattgatcatgtatgcactgattccttgctgaccagagaaaccagatcgcacgcacaatctatctacaggtgccaaagctgagagcaaaatgacggtgacagacttcatgctccaggctttcaacaccccttatgcattgtggacatgctaaccgtgtattggatagattatgcttattaggggttagattatggaatatttgccagactgtaattataacatttactggcaatctgaaacgtcatcttta

SEQ ID NO: 246850 - DNA, 365 bp, Gossypium hirsutum
  unsure (1)..(365): unsure at all n locations
atttggtgatagttgttgttgttgttatagttgggggggggggttgaatagacatgagcacattgtggaagattgagaggcaggcaatgctttgtttgggagggaagaatttgaatggaaagtgaatgaaaagaaaaaaagaaaaacatgagaaaagttgaaaaagattggggggggggggtttgtgaatttattgctggcagagagaaaaagatgaatattaggtagaacaagaaatatatatatggtttattatacaaaaaacatttgtacatatatctactattaggtattaattaattaaaatggttgacttgattatttttttnaaaaaaaaaactntaaaaaattaaaacaaaaagggc

SEQ ID NO: 246851 - DNA, 298 bp, Gossypium hirsutum
  unsure (1)..(298): unsure at all n locations
cccacgcgtccggcaaactgcttcattcagtttccaagccatacaggtctttcatataacccaaatttgtggtttacttgtaactttgcagtagtgtccaagactagaaaaccaaacatccgaacgtgactcaattaggcaaaaataacgaaaagtccattggctaatgatggattgaattgtccaatactttttcttatgttggcgactattgatgcatggtcttgttttattttattacatattcctctcgnaaaaaaaaaaaaaaaaaaaaaaaagaaaaaaaaaaagggaagac

SEQ ID NO: 246852 - DNA, 364 bp, Gossypium hirsutum
  unsure (1)..(364): unsure at all n locations
cccacgcgttcagggacgcgtgggtttggtttagaagactgtttagaagggattatgtgctttgaaaccctaaatcctacccataagaacacggctcttcgatgactaggacgacgactagttgttgggatcggattatgccactactggtgttgctcacatctctgtgattttcgacataatctgtcattttgtcgacccaaagccaggtgctacattgtctataacacccattgattgcacaccacaagatagtgccattgaacttgctcttaagattgccaaaatcaatccttaaagaacatngttctttgacgatagtgttcgtaacatccaagcctgaaaacatgtccgtcttcacact

SEQ ID NO: 246853 - DNA, 174 bp, Gossypium hirsutum
tatttttagttgattgagtcagtaaatattatttattaatatttacgagactattatagtattatgctggattatggtctaataattttagtcatgtggaaagctagtcaatgtacaaatgtatcagttcaaaagttagtggttctggaaattgaggtatcagaacctcgtttt

SEQ ID NO: 246854 - DNA, 158 bp, Gossypium hirsutum
  unsure (1)..(158): unsure at all n locations
ggccaaagttgtcatttgcgcttggctccaaatgattggtttggagaaggtggtgttagttgttgtaatatgtttttttgtttcttttgaactttgcttttttgcattgtaatttgaagaagatactaatattttttagtgaagtagtttttggncgt

SEQ ID NO: 246855 - DNA, 148 bp, Gossypium hirsutum
tgttgaagtacttgagcaaaatgtatcggtcactatgaaaaatattgaataacctttacatatccttggcaaggatgtgcaaatcaaatgaaatgtttatttacattaattgagtgaaaaataagataaagcgatggtcagtccgttt

SEQ ID NO: 246856 - DNA, 411 bp, Gossypium hirsutum
cccacgcgtccgcccacgcgtccgcaaaaatctcaaaaaaaaatttaacaagaagagattatattcaaaaagaaaaaaagaagaggaaaatggaggcaccaaagacgattctgtatgaaatggaagcaataagctaaagatctgtttgtgagagtcggaaggtactagaacgaagctatattcacttttacgaaatctgtttgatgttattgaggaagtacagatagcacggttagaaattaggggtctgattcttactagcttccgttctccatctggtacactattatctcctctttattatgtttcttaaatttgtggttgggatgcccggggctgaaattcttgctttgagaatttgacttttgattcttttctttatgaaaacaaagtagagatgatggatgaata

SEQ ID NO: 246857 - DNA, 353 bp, Gossypium hirsutum
atgattataaacaagggaatacttcagacaattggggtagatgtcggcaaaggtcttgacattcctctgtaaagattcaacccaaggaaacaagcacgatagctctatctaaatggcgctttattgtgaaccaagtaaacatatttttgttgtattaaaaatcacaacacgttatgtattccatatcttaattctgtaacacttttgactatcatatgaagtacttcacgtttgccgtgttcaagcttcaaattctcagttttgaaagtacaatctaatttttgaaatcataagcttttgacatgtttgtaaaaaaaaaataaataaaattttaactaaaataaattcggctc

SEQ ID NO: 246858 - DNA, 207 bp, Gossypium hirsutum
tcgattctcttttacgaaatttcctttttcattttggaggcttctactacaacatagggatggttgttcaggaggcttacgaacatatacacaaaggttttgataataaggcgggcatgacagaataacagctggttgtgttcagtttgcatggcgagttggtggatggctgttcttagaactctgatatgttcaagattgaaaatt

SEQ ID NO: 246859 - DNA, 372 bp, Gossypium hirsutum
  unsure (1)..(372): unsure at all n locations
aaagccaccccctggccctagaatgcctgatggaacgaggggattcacaatgggacgcggacagccactagtttctaggcaaagctagtgagctgtgcttttgcgtctggtataatcttgcctaacgtgttggttattgtgattgtggaattgtacagatgtggaaagctggaagcgggttttctattatatggtttcaaaggctaagttttgaagcccaaatatggattatttacttagtgatgctgttagcttatatttaagaactggcatcgtgataaaaataccacctacatggttcttgtttttggattatgttcatatcaattaaatttttagcgaaaataatttggctctttaacaaannanaaa

SEQ ID NO: 246860 - DNA, 127 bp, Gossypium hirsutum
tggaattggatcctgctaatgaccatgctatgaaggccattcgtcgattggaaccattggctgcagagaaaagattcaatttgctgaaagaggatgtaatgattaatatcctttgcttttcattttc

SEQ ID NO: 246861 - DNA, 228 bp, Gossypium hirsutum
caaaaaaaaaaaaaaaaataaaaaaaaaatttaatttttttacaactcacaaaaaccaaagggaagtcctcattcgtacaaaagccttctcctcttttaatgttacgtaaattaaattacctgtccgttcttttacaaccacaatactgctaaaaccatgacgttacccatactaaatcgatttggcctcaatccctttactttggactgcgatttactaaaaatgaa

SEQ ID NO: 246862 - DNA, 396 bp, Gossypium hirsutum
gcaagtggagccattgccggacacctactcgcaacatcaattgcaattctcggaggagcatttcttgccaactatatttctgagaaactggttggttatttgggcggagcgctttttcttgtgtttgcagttgccacattttttggagttttctgattgattatacagaacatagagcaaatgtcgggctaatttccggcgcaaatgttgtgatacaatgctgagaaaacaattagggtaaaatgttgcagttaggggtattaagaggctgccatgttagttcttagaatggtttattgtatttggaattatatgtggacttagatgatttctttgtagcttttagctaaatattgaagatatgattgacatgtttttgctacaattttcttcctt

SEQ ID NO: 246863 - DNA, 195 bp, Gossypium hirsutum
cccacgcgtccgtgtttttcctgtcttttgttatccttgggagcagctgataagaagcttttgttcaagtgagccaataatggccgaagtggaagaaacactatttattgttggggaaaggaacttggttggtctatgatttgtgttcctcatgctcactttttctgttgctaaaaaaactcatttttcttgttg

SEQ ID NO: 246864 - DNA, 373 bp, Gossypium hirsutum
aacacacgtccgggtggttatagtcttagttacatacctggttccgctccatcatgaggaccggatttcagaatggctgccgctaccttgcctgttcttggatcattggttggggcctccattggttctttgttttcttacatgctacaataagctacatatatgaaaaatgaacatgtgaacgaatgttatattttattctttttgaaagaaacatgtgatgaatactgaaaaaaaaattgaataaaatggatctttgaataaaaaaagagcaaaatattaattttaataaatattaaacatgcttttgtaataaataatttttctatcactagctaataattaattgtttattcccttaatataaaatgca

SEQ ID NO: 246865 - DNA, 365 bp, Gossypium hirsutum
  unsure (1)..(365): unsure at all n locations
aataaacacagctcgaagtcggtcatatattataagtggccgcggttcttgttggaggggtgcttgagtgaactgtgctcgaactgggagatcaaaggttgcctcctatgatgaaatttttgagaggtaagangncggacttccgcgtggatggcgggggttgtggccacccattaagagaagcgtcaatagagagaaaaaagaaaatattgttttagatgaaaagagaaaaagcatcaattaagatataatatatgtagttatattttgatgattttagctttaaaaaaatatgataccattgcttattttttttaaaaaaaatatacacattctattaataaaatattaatcattattttatt

SEQ ID NO: 246866 - DNA, 419 bp, Gossypium hirsutum
caataattaagggccattttcttcctcgttctctcaaataatttttttttacattgtccctttgatttttcttgtttaactaatttatctcttgaatttttcatatagctttcaatctaacatagttggttgcttgttttccgagattcaaccatgtctcggggtaaccagagagaacgagatcgagaaagggcacaagccagagcagcccacaaagccaaaggttccaaagacgatgggttaacccctgagcaacggcgtgaaagagatgcaaaggcattgcaagataagttggccaagaaagcggctcaagcgacggttgaatccgagcggcgaagtgggattaaaaacaagaaataacagtgggaagtgattatagattgcaggataaaagagagagtgtgattatattaattggg

SEQ ID NO: 246867 - DNA, 263 bp, Gossypium hirsutum
accacgcgttcgtataagcccaattttacctggccaacgactaaataaataagagcaaatgcctaatcccaaagccgggaacaacaacctacaggcccaaactataacaccggcctagcccggaaatgtaacactttctgaggaaccctagggttacacctctgcaccgcttcgctcacccacgtgacgtttggctactcttaaacaacctgtggcccattcccatgactaccaaagacctgtgaataggacaaaaggaaaca

SEQ ID NO: 246868 - DNA, 201 bp, Gossypium hirsutum
gccacgcgttcgaatactctgggagtgttttttcaatcacagtcttgtctagccgggacggggctgggataactgagatagaatgatcatatcatgcacgctggtgggcattgggatctcaagacgtgtactgaacactgttaaaattgtggaatgaggaacaggcaagacccagccttgaatcaagaatgacgaaacttc

SEQ ID NO: 246869 - DNA, 216 bp, Gossypium hirsutum
attacttggtaccataagaccccataactttgtaatgaaagtagatgaaatttcattatgtaatgtaggatccccattataataacccatttgtagccacttttaactgtgtgttaaaaaaaaaaaaaaaaaaaaaaaaaaaaaaaaaaaaaaaaaaaaaaagagggaaggctacttacaaaaattaaaatctgtattactagggggtgccacttt

SEQ ID NO: 246870 - DNA, 409 bp, Gossypium hirsutum
aagttttcaaaaagatcctataaattatatcaatttctctattgtttttcaaagttgcagcagatgattttcaaaatcagccattgctgatccaagctaggatgtgctttaacatatatgtatgttatatgtggtgtggttgaattgtcggatccattggtgcattcatcaagcaagtcaagaggcaaggagaaattgattagaagcgtcaatgtgagtgttctggtgtttggcttctagtaagtgtgatttcagatgttaatcaaaggcttaagaagtcttaaatgagattaaaggctttggtgtaagttttttttaccttttcttgtgttgagtaaagtatgcctatgtgatgctttgttgatgatgtgtaagtgtgtaaacttgtaagtaaatgtgatttaatata

SEQ ID NO: 246871 - DNA, 388 bp, Gossypium hirsutum
acgatgcgaaaaagatgctataagagatataaaggacggtatcgtggtgacaagaagcgggggatgtttgtgaaaagctgtccaagatggtccgagctaggacgtgctgacacatataacattgacctatgtggagcggttgaatcggatctgactgacacgcattcatggggtaactcacatatcgtggataaacaaggacattgcaaccacactcattgcttgaatccggtgtgattcccaaaattacctattatgacaaggattatcacaggcggtttcgaatgtaagttaactgtatggcgtgcaatttttcaataccgtatgaagaaacaaaagatatgaaacacatatgaatcttctgataggcgccttagcactgaccacc

SEQ ID NO: 246872 - DNA, 404 bp, Gossypium hirsutum
gaaggtgaaagaagccttggacaaagctaatattatcatgaaagatccatccaccacccccgaatacggcgagatcctctggacttgcgtcaagaacttcgaggacatcatcgactcggatcagaaagccatggaagccatcaccgagcacaacgccaaccacatcatcgaagaactctccgccgattccgcgtctgtgtctccctgcgaggacgagttggaagcggctaacatcgagtcgccggtgagggatatcgttaagtcgattcacaagacgattcgcatcaatttggccatcgctgctatagaggtccatttttgaaggcctgggaaattattattaatagggtattcctgggtcaatgtgaaagcggaatcatttggtgggaaaatatgatgacttt

SEQ ID NO: 246873 - DNA, 278 bp, Gossypium hirsutum
  unsure (1)..(278): unsure at all n locations
ggttcattaggtgttttgcttcttgtatccatggttgcttggtttgtgtatgtgtgtgtgtgtatagtgaaatgaaattattttaactagctttgttgtgttactgccatgttatataactgatgaatgaatgaaggaaagctctatttgccttttgctttnnaaaaaaaaaaaaaaaaaaaaaaaaaaaaaataaaaaaaaaaaattaaatttataaaaaaatataaaaaaaaaaataattaaaaaaaaaaaaantggggcggccgttttaaaggat

SEQ ID NO: 246874 - DNA, 325 bp, Gossypium hirsutum
aaaaaaaaaaaaaaaaaaaaataaaaaaaaaattttatattaaaaaaaaaaaaaaaaaaaaaaaaaggagggggtataaaataaaaaaagaggatgaaaaaaaaaaaataaataaaaataaataataaatataaatggggcggccgttttaaaggttccaacttttttttccctttcttcgcaagaaatatttttttttttgggccccctaaattcatttctttggccgtctttttacaccttttggattggaaaaaccctggggttccccaatttattccctttgaaaaaattccccttttccccacttggggtaataacaaaa

SEQ ID NO: 246875 - DNA, 160 bp, Gossypium hirsutum
ctgatacgaacaactacacgctgatctttgacctctggctccaaggcaagtattctctcaagggtggtcgtcaacttgcaggagccgacaatacatgctcgtctctgcaagctaaacaacgtccaataatgagtgaaaatctacatatgttggacgaaat

SEQ ID NO: 246876 - DNA, 455 bp, Gossypium hirsutum
cccacgcgtccgttctatcgatattttttcttgtatcatcaggagttttaaaacataaaagtggagtgaagtatatgccttcttttcaaaaaaaaaaaaaaaaaaaaaaaaaaaaaaaaaaaaaaaaaaaaaaaaaaaaaaaaaaaaaaaaaaaaaaaaaaaaaaaaaaaaaaaaaaaaaaaaaaaaaaaaaaaaaaaaaaaaaaataaaaaagaaaacagaagatagaaaaaaaaataaaaaaaaaaaaaaaaaggggggggccggttaaaaaagtcaaaagtacacctcccggggttgacaaagtttaaatttattatagtggtcccaaagttaaaaccatcgggaccggtttccaatatcataaggatataaaacccctgttccccccaaaaaaaaagatgttaaacaaaaatggttttcccacggggggtaagatcaaaaaaccccccccc

SEQ ID NO: 246877 - DNA, 375 bp, Gossypium hirsutum
cccacgcgtccgggaaggttgtttggcaaggaatgaccgaagaatttacaacgtctacaaatccaattgttagacagtttgcatctgggaatctggatggtccaatcagatattagaggcacatatatacgaaggtttcaaaagatcaaatttggtcattgaatttctttttagctaggattctcaggaaaattaagtgaaaaatgtcaattttgaatgtttggcattgtatttgcaggtcaatgttgttttagatcagtgtagctcttttcttttggggagttggttacctttgctattatctttgcaagtgttctttcctgtaaaagacacaattttctacaacagaaattaaaaaatcctgcactctgagaa

SEQ ID NO: 246878 - DNA, 371 bp, Gossypium hirsutum
cccacgcgtccggccccttaacatttgccatgtaagagacaataaacagcttggtttttgaaggcgttgagtaaatatggaataacaatgtgatttggaaccaacaaaaaaaaaaaaaaaaaaaaaaaaaaaaaaaaaaaaaaaaaaaaaaaaaaaaaaaaaaaaaaaaaaaaaaaaaaaaaaaaaaaaaaaaaaaaaaaaaaaaaaaaaaaaaaaaaaaaaaaaaaaaaaaaaggggggggccgtttaaaaaaatcaaagttaacctccccgggcttgcaaagaaaaaatttttttttagggcaaccaaaataaaattaatgggccggggtttaaaaaacctggaattggaaaaaccctggggtaaccaa

SEQ ID NO: 246879 - DNA, 173 bp, Gossypium hirsutum
catttgcttgggcggccgaatgccctcactttacctttttatcaaccctaagacaaaaaactcattatcatttttccactcccctactccgatgttaacttattctcttcgtcactcgctgcaactcctctggttgtgtcacctcctccttctctatcattacccctaattct

SEQ ID NO: 246880 - DNA, 482 bp, Gossypium hirsutum
  unsure (1)..(482): unsure at all n locations
tgaattncccgggntcgacgccacgccccgtccgcccacgcccgtccgnngtttccccaaaccaagtgggtttgattgtaaaagggggattcagctttactgggnnttgaagaacgagtgcgtggtgtttcttcttttnggaaaatgcgcggtaattgggaaaattgtgatngnnaaaattnngggtaacctggtctagaagtnnaatggtangnntttagaaagaaagaannngcgtggnngttagcnnagtaatanatgggtggatgaacnnctcacatgnnaatgacgannttatgtgcttagggggcttaganngattagtgngnngcaaaaaactttagtaatannattttgaagaggtggnngtgtaaaacaaaagttcattcaagggcattgccaaatatttgtgacntttttatttcttatgtaccgannaattgannattactgtnaatgataagaatattacttttaaatgc

SEQ ID NO: 246881 - DNA, 382 bp, Gossypium hirsutum
atttaattgagtttgagagaattttatcatttttattttaattttaatgttttattttaagttaggttttaccgttttcatggaatgtttaattatgaaatcatggtgcttggtggtgttatgagaaaaagtaaaaaaaattaatccttgggttggcaaataatattgtgggtttactttccgttaaatgacaatattatgtattagctttaaaaataaggggggcccgtttaaaagaatcaattttaacgtccccttcattccaaattaattctttttttttaggtcccctaaatttaaataaatggcccaatttttaaaaccttgtgactggaaaaacccttgggttacccaacctaattggctttgaaaaaattcccct

SEQ ID NO: 246882 - DNA, 371 bp, Gossypium hirsutum
  unsure (1)..(371): unsure at all n locations
tggagagtcaagttcattcatataaacttgattgccccaaatttgatggcacaaactatcgaggttggtggtaaaagatcaagtagtactttgaggctgagagagtagctgatagtgttaaggttcacattgtaatgcttcatttggaggggaaggctctaaattgacaccacttctacacttagaggcaaaggggttttcatttgctaacacgggatagctactctcatagcttgaaagaatgatttggatctaacttattcaaggatcgtatggtagatttggtctctttgaagtaggtgaactctgttgatcaataccatgatgagtttgtaagtttgttgnanaaaaaaatananatannnattntt

SEQ ID NO: 246883 - DNA, 400 bp, Gossypium hirsutum
  unsure (1)..(400): unsure at all n locations
gaaaacattcacaacatgcataactttgaaattttaaatgaaaatgaagaaacataaagaaaatcgtggaggtagcaaaaaaaatgagctatctgaaagagttagtcaataaaggagttagccaaaaggctcaccaaatagttaacaaaaaaaaatgggctagctaaaagagttggttaagaaaggagaaaggaaaaaggttcataaaaaggagttagccaaaagagttcgccaaaaaggagcacttagaaaagccagacaaaatgtgaattgaaattggaaaaaggaaaaggatggttaaataaaggctgtgggtaccttatatttgtagctctaactgtcaagttattctcctttgatatggaaaaaaaaaaacnnaaaaaaaaaaaaaaaaaatatt

SEQ ID NO: 246884 - DNA, 173 bp, Gossypium hirsutum
ctgatgctagactcagcactccgaaggtctcgtagttatgcattttaaataatttgtctaagtactattttaaaaactgtgatatgaactgttgtattaaatacatataagcgttatttagatttaggtttttgtaataccaagattttatatctgagaatttttacagaact

SEQ ID NO: 246885 - DNA, 298 bp, Gossypium hirsutum
  unsure (1)..(298): unsure at all n locations
ctcagcttaantcaacacttccaaggtttatttattatccattgtcaacaattttattgggtaggattttataaacagggagttcagactctaatataaaatacatataagctttatttacatttatttttttttaataccaaaactttatatctgatattttttacatatttttatttatattcccttaaatttttatctaatgttttacattattccattctttctttcactctcaaactaaaacataactatagtatggtttcaaaaaaattcaattcactattcatcttttaac

SEQ ID NO: 246886 - DNA, 289 bp, Gossypium hirsutum
gctcacataacatggtggatattgcacgatggctattctcgaataattacaaaactactgggtggggatgtcgtaacactttggacatttagagtgggatccgaaggcaacctgaaaaagtaattacaccaaatggcctttggaaaattaaaataaagaacaaccgtttaagacacgttttagaaaaattctgtttgtgaaaaaatatcctggcattttggtgaaaaaaaaatggcagatattttaaatgttatcccataaccacctgttatatagaaaggatctctct

SEQ ID NO: 246887 - DNA, 209 bp, Gossypium hirsutum
aaaaactgatgccgctgcatcttaagaaacatactcctattcttctactcgaccttttttctttttaaatttcaattttggtactttgttcactttgtatctgtttgtcaaatgttagtgcatcagatattgatccttttcctaaaaaaaaaaaaaaaaaaaaaaaaaaaataaaaagaaaaaaaaaaaaaaaaaaaaaaaaataaaaa

SEQ ID NO: 246888 - DNA, 332 bp, Gossypium hirsutum
cccacgcgtccggttcttctgggtgctggttttatgtccctcatggccaaatgggcttgatcattttcaaaaccatacggcgagtgaatttgatgtaataatattgggagacaaaaagaaaaacaagtgcaaaataattatctatgttgaccatatgttttgctgaaaacatgtttttgtatgttgatctttacattgctacagtcaccaatccaataaaaatcatcagtttttcagtattcaaaaaaaaaaaaaaaaaaaaaaaaaaaaaaaaaaaaaaaaaaaaaataaaaaaatataaaattttaaaatttttaatttttaaaaaataa

SEQ ID NO: 246889 - DNA, 314 bp, Gossypium hirsutum
ggaccagccgcgcgggcggtcaatgttaaaccattacttagctcttggacttttgtttcaagaagatatccaatcatcaaaaagctggggtcaaaccgagcagtgcgtccccacttacattttcgagcctcactgctaaaccataatcatttgctatcaccctaatgttcacatgacaaacagcataccctatatgatattctaaacaacatttcaataactgcttattgataaacgcaaaatatactattgagcactatagatttggggacaaactctctattatacacattttacatatattactaatcaca

SEQ ID NO: 246890 - DNA, 434 bp, Gossypium hirsutum
cccacgcgtccgttttgtttaaaaaaaaccctcatgctctccaatctctcactctccccttgcttgctcgccgaaatactagcaccactaccctccaatcgcacccagcgaaggccctccgacagtgactccggtcgtgaagatgtggatgcgaacgtggagcagggcgtgcgtgcgtgacgggagtgatcgtggctgaagattatggtgcgaatgaagcttttagggatttaagatttcagttttctaattgtttaggttagagcatgagtattgggcttacgtaaacgggccaaaattatttgggttattttatgcaattgggctggttaaaaaaattaggattggctgtttttggtttattttttgtatatgtatgggcccgggctaaaaaatgggtctacatccatcaatcgaggtgtctcccctccgtg

SEQ ID NO: 246891 - DNA, 364 bp, Gossypium hirsutum
cccacgcgtccggttccgtactacttcatccttcttcattgtcttcgtctagtgattcaccttatttgcggccgtggtatttgaatgctaacaaagtgatggcacaacatgaagatgatggtattacgaggcaaccggggtttaagtattcaccggtcgagggcggcgatatgctttacaaacgtgggatcattacttaagtaacgcttgagaaaaatattctgtaccacttttttatggtagcaatatggaaagatgtgcacataatttggaagactttcatgttattgattaaaagttaaattatgtatactttaagggatccaaaggaaaacctatatatatatatatatcaggtttcagc

SEQ ID NO: 246892 - DNA, 186 bp, Gossypium hirsutum
tatgaattcgtctttaggtaaatttgtttgtgattacaaaataaatgtcttcaaaatgttggtattttctcttcttcttttttttttttgttttttttttgggggggggactcaattgaaattgggaatccatattcttgttttgattcaaattgtacatcaataaaatctttgtggagtttaatc

SEQ ID NO: 246893 - DNA, 238 bp, Gossypium hirsutum
ataattttaccatatcctagtagtcggaaaactacagcggaaaaaagtagctgcaagtgcaacacttccctggcattctcgaattgctgtctgcatgaaattttgtagggcattgcttaattttgatctgaggttatacacaggtaaggttcgttgccgatttgccttatgtactcggatttggatgtgaatgttagatacggatacatgtccagcacgggtatgtttcattttgtcc

SEQ ID NO: 246894 - DNA, 393 bp, Gossypium hirsutum
  unsure (1)..(393): unsure at all n locations
cccacgcgtccgcacattcggagcagagattgcttttgaagtgctaatggaggatcataatgtttcagtgtaagctagtgtgtagaaagtaacaacatgccatacaatgcaattcaatgttttatgtcagttatttttgttgaaagcaactatttttgggtacaagtatggaaggggcccctcttcaataccaagaagttcattttagtcctctacattttggaaagcaacattttaatccctgtacctttggtttatagcaaaaaggtaaagaaaatgctagttgtgcttttaaaataaaaaaatattttttattaaattatatcttaataaatttttaattttttaataaatttttctatttttatttannattatttanttttttttttt

SEQ ID NO: 246895 - DNA, 167 bp, Gossypium hirsutum
caagtatggatgttattacaattaatggtttgagttcattcgatagatatcatgtctatgtgtatgcactttcaacttctccaagttctaggcttcatttttatgtaggtcggtgctttattcccgagtattttggggtgtttttgaattcatttcttaatctcttc

SEQ ID NO: 246896 - DNA, 391 bp, Gossypium hirsutum
  unsure (1)..(391): unsure at all n locations
cgttttgctaccaattccgctaccatgnttattactatttntgttgttattgtttggatattgtatanaatgttattttattgttaaattttgttactaattttagaggcaaanaaaaaaaaaaaaaaaaaaaaaaaaaaaaaaaaaaaaaaaaaaaaaaaaaaaaaaaaaaagaaaaaaaaaaaaaaaaaaaaaaaaaaaaagtgggatacgggcgacgttttaataattgcaaatgtttcatttaaagggaatgccactgaaaaatttttaaaaaagggaaaataaaaaaaacccttttctcacccatttaaaacggcaaaacaggaaaaaacccctttcttaaactaactaaattggccttaaaggaaaacccccttttgcccttttt

SEQ ID NO: 246897 - DNA, 378 bp, Gossypium hirsutum
  unsure (1)..(378): unsure at all n locations
cccatatcaatctcgaagaggagcgctcgttcacaagccttagcttctgcaacaaaagcatctgcagacgcctacataagggtattcctgctgagatcaatcgagagatttagagactgccaaagctgccgtaatgcaccacaaaaccacaataagtggtcaggatcctccggagcctccttgcgcagagggcaaacattgacaactcttagacttcgcttgattaagttattaaaatgaggcacataatctttaattaaccgccacatgtgtattttaattttagaaggaagtatatcccaaagtaacttgtagaactttttgtaattgtttgtagtattcgagttgtattcagacagctgaaattttcttgtnnaa

SEQ ID NO: 246898 - DNA, 389 bp, Gossypium hirsutum
cggacgcgtggggcgttaatgtaattgcttcatttcgttgctgatgttactgtgattcttaataggtgaaatgctctcaaaggatttgtatcaaaaaaaaaaaaaaaaaaaaaaaaaaaaaaaaaaaaaaaaaaaaaaaaaaaaaaaaaaaaaaaaaaaaaaaaaaaaaaaaaaaaaaaaaataaaaaaaaaaaaaaaaaaaaaaaaatacaaaaaaaaaaaaaaaaaaaaatgggggggctcattatgaggaccaaattttacgtccgtggattttaaatataaaatctttatttatttgaccataaaataaaaatggttgcgcttagtttaaaaacgttaatagtggaaaaaccttggcatacataatataattctgttagaaataa

SEQ ID NO: 246899 - DNA, 453 bp, Gossypium hirsutum
ttagaattcaactataagcaaaaaaaaataaaaatacatacaacaaaacctaggaaaatatttgggtcttggctttgaatattcttattttctcttaaaaaccgaaggattttaaagttgatttcagatccaaaaatagaaaattttgttaaaagcgtaaagaaagcatatgcatgaggcaaatatagcatatttcagaaaaaaaaaaaaaaaaaaaaaaaaaaaaaaaaaaaaaaaaaaaaaaaaaacaaaaataaaaaaagatcaaaaatacaaaaaaatagaaaacataaaacataaaaaaataaaagtagataaaaaaataaaaaaagggggggggcctttttaagggaccaaatttttgttccccgtgttggcaagaaaaaaatttttttttgggggccccaaattaaattcacggggcggggtttttaaaccatggggatgggaaac

SEQ ID NO: 246900 - DNA, 243 bp, Gossypium hirsutum
cgcggagactgctgctcgatttataaggaaaccatataaacaacagtctatctatagcctggatatggcacacattttcttgggtgtagaataaatagcaactgagatttccaggctcttatatttgcattttcttggtgtgccatatcattttcctattgtatctgttaaaaggcctatggtggtcgatcatctgctccaaaataaagcattccttcgttttttattgatatcattctagtt

SEQ ID NO: 246901 - DNA, 324 bp, Gossypium hirsutum
catggagacatgggagcaaagcgcacagatatggggcgagccatgcgcgagtcgatgatcgtgcatagtgcgtggaggctgctggtggccactgctgctgcgcgaaacatatgaaaaccctaggttttccgaaattgggcctattagtgttgggccatttgtaacttgacttgtattttgggccgttttatgttttatctttgaatatatatgggcccgggctaaaaattgggtctacaccttctatttaaataacaattttatagaggaaccaaaattcaattcatggggcggcgtttaaaaacgcccggactgggaaaaacc

SEQ ID NO: 246902 - DNA, 415 bp, Gossypium hirsutum
cccacgcgtccactaggacatgaattgcggcatgagtttcgcccgttgcttcaataacgactcaccgtaccctaacgagttaactggcgccatcctcggtggaccgaacaagcaagatatgtttaggaatctactttgaacgtgaacttacactaacccttccccttaccttaactctttagctgcggcaggttttgcaaaccttacttgcccaaagtattaaaccaaatcgcttattaaatcgcgaattggccccttttttttccccatgttggactaataaatggcccaatatactgcatgaaatatggaacgcatatagcggcgctttaaacacattttttatttcttttcctaaaggagaggcgaagtgtatataatatgtgataaaattctttaaataaatatatatttt

SEQ ID NO: 246903 - DNA, 451 bp, Gossypium hirsutum
cagatcacttcctccacatatacaaatcccaccccaaacacaaatatagaatacagattaacatacttaacatgctcgtatatagataacatatatatactctaacagaacaatcatacatacatatcagtgtcctattcaaatcagactatcaacatatcagatcacatgaattagggtttggttagcccttatcaaccctacggtaggtccatagttgactagacgacccatgtgaccctaaggaaaatttcagaattctgggcccagatgcctgtgtagcccacacacctagattggccttgcccgtgtggcccacatggcctgacccaaaacccatacgcctgtgtgggactacaaggccaatctggcctagcctatgtggcctaaacggcctcactcacaccgttacatggtcgtgtcttgagcacagccacaccttcgtcaaaca

SEQ ID NO: 246904 - DNA, 442 bp, Gossypium hirsutum
ccctttctcttattgcttatatacagtagataaaaaaatcaaagaaaatggaaataaaattgaaagaaaaatgaaactttaaatcaccttaaacaaatatggttgctatatctttctgtttgttttgatattatctttatcttcaatttttttgaaaaaaaagtcccaaaaaaaaccccatacaatgaaaaatttggaggctttatagccgaatacaagcagttttcctgctattttcttgctcaaatcgcaggtcgtggagatgtgaacggacgtgggcgactaacgaacgagctgggggtcgtgcctggtgtgccacgtgtgtggtggagaggcgttgatggtcgtgggtggagaacgtgggcacatggtggctgaagcgagtcagtttctctctttgctgaaaaaattttgtgggctaggggttttttaaaaatttggg

SEQ ID NO: 246905 - DNA, 328 bp, Gossypium hirsutum
gttgtactctaggattcttacttattgaggtccattgccgaagccttgtaccaagttgcaatgtgagcatttatgacaagccaataaaaataaagcacatatattgaataaaaaaaaaaaaaaaaaaaaaaaaaaaaaaaaaaaaaaaaaaaaaaaaaaaaaaaaaaaaaaaagaaagggagacaaaaagaaaaaaagaaaaaaaacgcgggcaaaaaaaagcaaaaaaacgaccaaaaagccacctaaaaaaaaaacaagaggcagaaggtgaacaaccgagaaaactggaaaaacccagaagttacccaacttatttgggttgccc

SEQ ID NO: 246906 - DNA, 383 bp, Gossypium hirsutum
  unsure (1)..(383): unsure at all n locations
gttatcttttaagtggacagggttttcaagttagtgggcacatcaaggtcactaacaactccatttgttttactggaaattacggattgaggtcattggatttattacttgtattctggatatttatgaatgaacaccactcgtgtctcagtttgaaaaaaaaaaaaaaaaaaaaaaaaaaaaaaaaaaaaaaaaaaaaaaaaaaaaaaaaaaaaaaaaaaaaaaaaaaaaaaaaaaaaaaaaaaaaaaaaaaaaaaaaaaaaaaaaaaaaaaaaaaaaaaaaaaaaaaaaaaaaaaaaaaaaaaaaaaaaaaaaaangggggggggcccttttaaaggaccaaatttatttcccctgttgttggaaattttttttttttttt

SEQ ID NO: 246907 - DNA, 424 bp, Gossypium hirsutum
cttgagagggaagtggctctttgatgttgctctaggatgcctcatgttccctttcgtcaaccaattatctcagttcaatctgaccttgttgccccttatgccttctacacctgtaaccctttcaagtgttgaacagtcaattttagcaagagatccagtagccatggcactatatgcgatagttgtttcgatttgtgctcctgtgtgggaggagatagtttttcgaggtttccttctcccttccttgaccagatacatgcctgtatggagtgcaatactggtctccaactgaatggtacaagcaacacgaatgcgattcagttgatccaacatggctccacagaactgctccactgtttgtgtttgtccactataccagggacattaaaagcaaccgaacggaatgaagattgcatgtccattt

SEQ ID NO: 246908 - DNA, 235 bp, Gossypium hirsutum
ctttcctttcctgtaattattattattatttagattaagtacatatggttctatcagtttgaaggcatttttattagaaattatgttgaagttccagcatgctaaatctggtgtctgcaaaagaagtgagagatgttccgagtttcgatctgtttgaagatttgaacttccctttgttactcggttgtaatttttgatactttggttcaatgattttctttcctcctttatttgg

SEQ ID NO: 246909 - DNA, 200 bp, Gossypium hirsutum
ggtttaaaaaaaaaaaaaaacaaaaaaaaaaaattataaataaaaaaaaaaaaaaaaaaaccgccatgggtgtggtaaaaaactcgagcgcgtgcgtgcccatacgacagctctgctttttcggtacctccaccaaaatcactttcactggccctccaacttcaccactgggactgccaatactttcccctaccccatct

SEQ ID NO: 246910 - DNA, 343 bp, Gossypium hirsutum
gccatgtctatggactttgtctgattaatgaatgattattagcacaaaaaaaaaaaaaaaaaaatgaaaaaaaaaaaaaaaaagaaagaaaaaaaaaaaaaaaaaaaaaaaaaaaaaaaaaaaaggatgaataaaataaaaaaaaaaaaaaaaataaaaaaaaaaaaaaaaaataaaaaaaaaaaaaaaaaggaaaaataaaagaaaagctacagaacatgaataaaataaaaaaaatagggggggtgttccgtgtaaacattaatttagttggaacaggcatataccaattaacacttaataatgaacatgaaaacttttcggaggcggagccagtttaaaa

SEQ ID NO: 246911 - DNA, 427 bp, Gossypium hirsutum
cggacgcgtgggcaattttgtgttgtaaaaggtgccaacttgtttattaccacacgtaaatcacccgatggcttttggattcaatggcattcggggttctgaagagatattggctggagggtggaacttggaaggttaatttacttttacaggtttaaaaggggggactggccattaacattaacatagaacagaagatgaaatcccaaaacttgtgttgtaaagacggattacctgctatgaacctgtgcctaattctggaaatattactcagttcagctgttacaaaatctgcttcgtttcagtcacaaggaagacgcggttgcaaagatctatgttgtccgaattctttacttctattgaagtactcgtcaacaactggtcttgtcatttgatttcgaaagccgataagaacatattttctggc

SEQ ID NO: 246912 - DNA, 412 bp, Gossypium hirsutum
cccacgcgtccggtcgtgacacaagccagaggatgtcgcgacacagccttgaagacacgcccaaataaacgaactgccctcagtgtcgcgacataggccaaagggtgttgcgacacctacgtgatgtggtcacttactggaccaggggtgttttcatctgcacaatgaactttaacgaagattagtcaaccattttaggtcaaggacgggttgctaaccctagacctataaatatgattgctcaaaatagtttagaggatagtttttccttagtttaattttactttcatttgagtttagatttcttttgcttgtaatctttatttcagtttttattctgttcttccagagatctggattgtagctttgtcggattcattgcggagtgttgtttgcacatcaatattatata

SEQ ID NO: 246913 - DNA, 288 bp, Gossypium hirsutum
acggcctctttgaaacatttccagtagccgaaattgttgttaatcaaccattattcaattataagaagcctcaattctgttgtttggttgtttcaccagaatctgtatttggttttgtaactaaagaaatgaaaataattgtattaaattaaaacattccttttgctgaggaaataatacaaggctcaatttctgtgtttaaaaaaaaaaacatacaaaatctttcatacctactttataaaaaatataaaagggggccctaaattcaaattatcttgcgcgtttttt

SEQ ID NO: 246914 - DNA, 318 bp, Gossypium hirsutum
cccacgcgtgcgaaaaaaaaaaaaataaaagatttatatgtataagcaacaaaaaatggctaccgaggccggctacttttatggggagatcatatttgtcatctcaatatgcagataagttgttgatttgaaaaaaaaagaaaacttaaaaaggaaatattaaaaaaaagcaatgtactaaaaaaactaaactaacaaagcatcagattgcgttttggaaaaattgcacaaaaagaaaaaaatgcacataccaaataaatcttaaaaacatttaaacatacttgaacgggggcggttgcgtaaattcaaacagcctat

SEQ ID NO: 246915 - DNA, 431 bp, Gossypium hirsutum
ctaaaataatggttagacatatgaaaacaatgtgcaaaaattaaggaacatttaacaaccataataataagtaattaccttattcaccaaccatatatatggttgtaatgtataatatatatgattgtaataataggatcctttttgataaattaaaacaatatatattttgctaaaaaaaaaaaaaaaaaaaaaaaaaaaaaaaaaaaaaaaaaaaaaaaaaaaaaaaaaaaaaaaaaaaaaaaaaaaaaaaaaaaaaaaaaaataaaaaaaaaaaaaaaaaaaaaaaataggggggggccgttttaaaggatcaaagtttacttccgctggcttgcaacgaaaaagtttttttttggggccaccaaaattaaattcactggccgcggtttaaaaacgtgggaattggaaaaaccttgggttacccaaat

SEQ ID NO: 246916 - DNA, 364 bp, Gossypium hirsutum
cgaagaaagagtctactggtatgaaaaaggtcggaagtgccgcagattggtccgctaactactaaagcgatatcagctgagcctcttgattctatccatcttaaattccgaagtttacttgattgaacttgtctgtaatttggaactaaaacagcattttaagcagtagtttgcttaccataaaaactcagcttgctatggtaacataacatggaataatattttcttgtcctaaattaaaaaaaaaaaaaataaaaaaaaaaaaaaaaaaaaaaaaaaaaaaaaaaaaaaaaaaaaaaaaaaaaaaaaaaaaagaaaaaaaaagaaaaaaaaaaaaaaaaaaattggggcggccgttttaaag

SEQ ID NO: 246917 - DNA, 239 bp, Gossypium hirsutum
gccacgcgttcggccacgcgttcgtccacgcttccggatttttggtcaataaaaaccatgtggagattctgtttcatagtcatgaaacttgcctcgttgtttctaggatgcccatttaagcattcaccatttattccatttagccatttaagcataagggtaaattgtgctatatatataaatatatttcgctattgtcttctaatgagtgtaaaaaaaaaaaaaaatagttctgaatt

SEQ ID NO: 246918 - DNA, 269 bp, Gossypium hirsutum
aaaaaaaaaaaaaaaaaaaaaaaaaaaaattttaataaaaaaaaaaaatataaaaaaaacggagattacttacgcgtgctttcgaagttcccactcttctatcgcgttactctaaattcaattcccctgctatagggtttccatcgtctcattctggtaaacccctttttttacccttcttaatgggtttccaccttatttccctttcttcatctgccgtaatcccatagaggccttaaccgctagcctttcccaacatttgccctttc

SEQ ID NO: 246919 - DNA, 143 bp, Gossypium hirsutum
gctggaggagttgctgtcatggaatgagctcatctgctttgcttcttttttgttgattagagataatagttgaaagaacgacttttacatgaactttgttttctatagatgataaagtttttgtgagggatagaaagaaaaac

SEQ ID NO: 246920 - DNA, 148 bp, Gossypium hirsutum
caagaagagaatacccctttgcatacaaaatttttatttaaaaacgacaacatacaacaaagaggcagggcatttttgacattgcgaacaaccaaacctactactaagtaacctacattccattccctggctaacatatctacaaata

SEQ ID NO: 246921 - DNA, 356 bp, Gossypium hirsutum
taagaaattaggcttgtggtcaaatatgtgatgtttagcagagtaaattccggtattgagatgagggttctagagtgtgtggcggctccttttgagtttctgccgctgctcatcgactttagtctgtggaatcagctcatacttcaattaaggtcacggtgcctatgtgcttgtattgttcatacttattacttattcttcttatttttattatttatcctatatgatttatcctttttttattgttggttgtttgtttttttcaattacctttgattttttttcttattactcttttatttttccttttggctttttttcttcgtcctcttttttttcccccactttttttatat

SEQ ID NO: 246922 - DNA, 342 bp, Gossypium hirsutum
  unsure (1)..(342): unsure at all n locations
aaaaaaaaaacagggccgacccacccgngcgtccacacatactattatctaaaacttttttatttacaaaaaacaaaaaacactctatcgctttgttttaattttaacaaaggctccaacacacatactaaataaaatatccctcacattcatatttcattcggatactaaacgaaattttgcccctctatatttccccatccaaggaacaaaactttaatattttgacctactatgtaatatataatatacctacttaaccttaattccccccctatcaataatgcctatattcaactcccctctctctcccaacttaaaaaaaaaaaaaaaaaagtcctt

SEQ ID NO: 246923 - DNA, 336 bp, Gossypium hirsutum
caaacatgatattttatcctctttgtttttcatacaactgcagactggtaatgaagtgtccctccattaacgttatacagtatgtggaagccaatcatttgagttttagatactgtgttctcccccacccaacccccctcccccccggcccagaaaaaaaattgtatttaattcgtagcaagttggggttctatctggtttggaccatataattcactttaggatacctgaaggtaatctcaaaatttctaaggtggcgttgggatctatatttcaaaatttggattaaatttcaaaaattatggtaattatttaaaaatatatgggatatttatt

SEQ ID NO: 246924 - DNA, 291 bp, Gossypium hirsutum
  unsure (1)..(291): unsure at all n locations
cnnnaaaaataaaacaaaaatactttgggggttaactttattttcagaaatacactacttgggcattcaaaattgtggatattgtttatcattattcaaaattttgtccaatcttgtttgtttaactcttctcctcttttataacctccaacttccacaccataattttttttttaggtccccttaattaaattccccccccctctttttaaaacgccgggatttgaaaaacccttgctttaccaaacttaattgttttggaccccattccctttttccaaatttcctttt

SEQ ID NO: 246925 - DNA, 321 bp, Gossypium hirsutum
cccacgcgtccgcccacgcgtccgtccactcgtacgaccacgcgtacgaccacgcgtacggccacgcgtgcgcccacgcgtgcgcccacgcgtccgcccacgcgtccggcgtgaggagatgtctagtgtgctccgcaagatgagggctcaccctggaggtggagaaaagaagaagtgaagctctctggtgacaagtcaccttgatgatttcattagaagaactttgttagcatatatttcaacttattggtttgagactgaaaactatgcactgaatcctcgttggttaattttataatgggtgctaaattcttgcggttt

SEQ ID NO: 246926 - DNA, 144 bp, Gossypium hirsutum
cccacgcgtccgcccacgcgtccggaggaacttgagtattatgatgcggaggaggagcacagagatactttatatgaatcagaatgagaagtgcttactgatccagggttgattggtgtgctcagattgcagccaagggtgatg

SEQ ID NO: 246927 - DNA, 345 bp, Gossypium hirsutum
cccacgcgtccgcccacgcgtccgcggactcgtgggcggcttttgttgagttttgtgacaggtttttgaagcataaaaggaaatttagtcaaagggacatagaggaatcctatgctaagcttcatagtggaagaagcaccattatttggaatcgtgcagccttattcatactgattatttttttgctataattttgtatatcaatattttcgccaaaggcaaacagactgaatagctccctaagttgtgtattcattgtagcaaaacctgaaataacttgggagctaacttgtaactaaatgtttgttcaagttatagctgcaataaattaatcattttttgttc

SEQ ID NO: 246928 - DNA, 347 bp, Gossypium hirsutum
cccacgcgtccgcccacgcgtccggacattattatcatataaaatgtgagaaattggagtttgtttgaaaaaaaaaaaaaaaaaaaaaaaaaaaaaaaaaaaaaaaaaaaaaaaaaaaaaaaaaaaaaaaaaaaaaaaaaaaaaaaaaaaaaaaaaaaaaaaaaaaaaaaaaaaaaaaaaaagggggggccgctttaaaaaatcaaagtttatatacacgtcaatgcaacgtaatattctttttttagggtgacaaaaattaaattaattgcccgcttttttaaaacgcagtaaatggaaaaacccgggcattaccaaattaaatcgttttgcaaaaaatacccttt

SEQ ID NO: 246929 - DNA, 348 bp, Gossypium hirsutum
  unsure (1)..(348): unsure at all n locations
cccacgcgtacgcccacgcgtacgaccacgcttccgattttctctttgtttggtatttctcggggtgcgtctaaacgtagaagttgtttaatccaattgaaaatttcaacgtttcgtctaggctagaaatttccaaaatataaaggttgcgattcaatcgaagcttacgctattatcttccctcgtaccactgaaggtgagtttatctgatttgatattttatgagaacatacatggctcacttctaatcggntgctgcgatttaaaaatttgctgtgtgtgtgagctttaaggtgccatatcttgaaacgtttttccaaaacaatgggatagttcttttaatgattt

SEQ ID NO: 246930 - DNA, 451 bp, Gossypium hirsutum
  unsure (1)..(451): unsure at all n locations
aattcccgggttcgatcccatcgcagtccgatgacatcttcttagctatgatgctgttgcataacatgatactgatgccttagcttcatttcgtagttattaggatagtgagctaggttcatgaagtatagttaggtagaagagagcctaagaataggttcagaagaggttagtttcatgattggcatcagttcataaagaaaaggcttagcattagtagttctttagatgatagttagatgccccatcggggagtgcaccgccctttgatgattgagtgtgagggggaagacatatgatggttcatgcgtacctatgcttgagattagtgaacncatgcttgatgggctttgatagctcgtggaaacatcataagtccttgatggcaaccatacagtgccagacacactatgatncctgcatttattatcgtcctgggacgtctgggacc

SEQ ID NO: 246931 - DNA, 271 bp, Gossypium hirsutum
aaccacccacacctacgcattcttatacctatccatttctccaatccattaattacacgtccctgcaaacttctatctgtatcgttttattcaaaaaacacccactaaacaaccaacaaaaaaaacctataacaatcttaaattaactacttaaaaatacccaaaattcaaaaacaacctatacttacaacaatcaatatattttatgcaaaatccaaaatccattttcccccttttttactaaaaaaacatcaataatactttttaataa

SEQ ID NO: 246932 - DNA, 313 bp, Gossypium hirsutum
  unsure (1)..(313): unsure at all n locations
accccactaaaggtcagctcgttcagcatatccagcaggcgctgatgacatggttcatataaacgcatgctcttcctttatttggtcgctttccaaatgtaattgaagaagtcgagactgcaattttagagccttctaaaatgttgttttccttgttagattgaagtgttgtttgcaagttttatctggataaagactgttagtgatttccttatttgctagcattttctattgtgtaactccttatgttatcacttgttactgttgtgttttagttctaattctaaatgaagctgttattgatatcnntnna

SEQ ID NO: 246933 - DNA, 208 bp, Gossypium hirsutum
tccagtttaagcccaaaaataatcatcaaaactgacagaattggggctaaaaccagacaagtgccacttatgggtttgggttcaaagttgaaggatttcttaaaataaaacccaggcccattttatatggtataatttactctttttttgttctctgctactgtatggtataatatataattagcatacacacatgatagaattaagg

SEQ ID NO: 246934 - DNA, 409 bp, Gossypium hirsutum
cggacgcgtccggcgaaaggaaagctcgcagatatagatggtatgaagacaaaaatgatattatggataaaagtatcatgcatcacttctgatggatcaaagctgtatgttagtgctggaataaccaaaaccaggaacagagatgcttatgaggttaatagggatggtataggtgtcgacaagttctagatttgttagaagtatgtctatggggaaaacctatgtatttgttttaactcctctctcatagccctttgaaccttttgtggtaaggctttttactctgttctaacattgaaggtggaaatgtcatggctcatattagttgtgtggaattggacattattaagggttaaagttgatattataccaaatttaaaagttatttgtaaatttttataattggtca

SEQ ID NO: 246935 - DNA, 267 bp, Gossypium hirsutum
gcttcaaagcacgagtcaggcgagggacatcagtgataagttcataaaaattgttctctgtaccttatatttgcaggtttacagtacatagatgcaatgtgagttatcgtagtgggttttggttttgttttcaatgcaattcatcagcacttggaatcgtaatgatcctctgaaattatatgggctgtattattgaacgagaagaattcggtttgggttggtttggttttcacatgctagtactaaaatagtgcgtttgccagtctc

SEQ ID NO: 246936 - DNA, 406 bp, Gossypium hirsutum
acgggaaatcattgttgaagaaaaccaagatatgtctggcgaaattgggggtggtgaaggtccagatgggattcataagagagataatgttgttcaaccaaagagaaaagtaggccggggccggccaaagggttcaaagaataagccgaaaagtagtgatgagaaacttggactgtcaagtgaacagcagacctttccagttaacattatagggggttattttgttgataaaggatttggtttagtgaggactgcccatgtaagggaggaagatatggtaatgcctgttgaagctgttacttgtggggatgctattgtcaagaagattgatggtcgaaggtggaatcgtggccgacccaaaagttcaaagaataagagaaaacgtccatatgtcttgatgaaaaat

SEQ ID NO: 246937 - DNA, 425 bp, Gossypium hirsutum
  unsure (1)..(425): unsure at all n locations
aattcccggagtcggacccacagcagtccagcccatcgcgtctcgctccatctcgtctcgagtgcctcctagaatgtactcnncttcaatcatacctagtatagcttcgaatagttagatatagtgaggccgatgaggtagcatatcataggcgtggagttatttcatccttatcagtcctnnctttttccttggaacaaagtgaaagcaagatgaagaatctacacaaattctgtaagtgtaatagagtaccctccaactaagagattcataggcctagatggagcttatatcttgcaagaggctatatatctatccaattcccacaagtttagctggtgtgcattctgtctgcattgataccatcagcaagcgacgatgcaatcagccttattacatctctctgttcgtgggatccttgcaaa

SEQ ID NO: 246938 - DNA, 312 bp, Gossypium hirsutum
  unsure (1)..(312): unsure at all n locations
gacgagttcgtcgatgctttganttcttattatcagcagcagcgccgctacagcggaaagcattgatcaactaatgagagggcaaatcaatatggtgttagcaattgacgaactataaacaacaacaaaaacaaacaaaaaaaaaaaacaaagactaaaacaactttacataataaataaaaaccaaagataggggcgggcgccttttaagagccaagcttactaacccttcaatccaactggataactcttctatattgtcgccgaaattgaatatagtgcccgggagtttccaccccgatgattgggaaa

SEQ ID NO: 246939 - DNA, 364 bp, Gossypium hirsutum
cccacgcgtccgcaggcaacaaagctgacaccaataatggaacaagttgttcatcagctgggagaatctcaaggagatgggttttcttgaaagattttctaaggagcaaaagtgaaggaacaaacaataacaacaacaatagtaagctgtggtcaacaatttcattttcaccagcgaaggaaaagaaaccagggagcaacaaaaccaatggtgtggttcatgaatctaagaacaaaaggccaagcaagaccaaagctgtgaatgggataggtaaaaagagggttccaccatcaccacatgacttgcactatactgcatataaaacacaagctgaagaaatgaggaagaagactttttgccttac

SEQ ID NO: 246940 - DNA, 369 bp, Gossypium hirsutum
  unsure (1)..(369): unsure at all n locations
cccacgcgtccggctgttctctctttactaggattatgaacttatgctacttgatttcttgtttgggtcgctatagggggatataaacttaaggctgtgttattcacttggtaaatagcatatgcactggataaacctccttttattacaaaaattttgtactattcttggtgttcagattttatcatatggtttgccttttgtgatgcaaaacactaatacccaaaaaagctaacaggcgaaaccgtgggaaaaataaaaaactgattaaggaatgcaccaacctaaaacctaaaatgggtcggccaggggggtggctatattgactttcccaggggggtttagaacccttgaaaaaaaaaaangaaa

SEQ ID NO: 246941 - DNA, 278 bp, Gossypium hirsutum
  unsure (1)..(278): unsure at all n locations
gaaaaaacttctgaatcgtgccaatacctctcaatccacttcttgttgaggatagtatgcatgtatgtatttcagcttttgcactgtataaatgtaagcttcatttgtaataataatacagttaggtatattaagatagatacccaatctttgtaggaaatttgttgtaactttatcacagggttatctccaatttagcattgggaggaacaaagaatgatcttcaagattgctgtttcttaaaaaaattatcngaaaaaaaaattcngaaaactttt

SEQ ID NO: 246942 - DNA, 307 bp, Gossypium hirsutum
  unsure (1)..(307): unsure at all n locations
cccacgcgtccgcccacgcgtccgcttttttccttttttgctctgtaaataaatatttatagaaaaatactatacaattttatgagggttaataattgaattttcccccaatcttaaaaaaaaaaaaaaggaggaaattttggtcggattggaagagttagggcatatatgctgtaatgagaagtatgaaatttgataagaaatgaatttgctcttttttgtaaaaaaaaaaannaaaaaaaaaaaaaaaaaaaaaaaaaaaaaaaaaaaaaaaaaaatcccaacatatactaataaaataaaattt

SEQ ID NO: 246943 - DNA, 387 bp, Gossypium hirsutum
aatatttttaactttcgatcttacgcagggctgatttatttctggtttcatatccttatgaaaatggggtctttgaagaaggaagaagaaatggggcagattggggaggaatccaaggaggctatcgtatacgttaatggagtccgcaaagtgttgcctgatggattggctcacttgactctgctggagtacctcagaggtaataatatttttgttccattttttttggttttccttgaaagtattatcggagaaaagaatcggaaagcttttttttttcctctctttttcttcctctaaaccttgcaagccaaactcactccaaggttgggttaaaactaacttccaattttttgggttttcgcgtggggaaaacccccccccccc

SEQ ID NO: 246944 - DNA, 256 bp, Gossypium hirsutum
gggatatcaaagctgacacacactggcactcaactcactaccactgtgtgtgtgtgtgcgacaagagtgatggagaaaggaaaagaggggtgggagtaaatagcgtcggagtttactatggatttaccataccggacctgggtggatgatctttataacaggatcagtttatggtcgacatctttattactgcttgttgccaacattctggctgatgtagacacatgggctaactttattttactccatataaaca

SEQ ID NO: 246945 - DNA, 424 bp, Gossypium hirsutum
acgatttccttgtgatcctaaaaaaaaaaaaattataattaaaaaaaaaaaaaaaaaaaaaaaggggggggtgcaaaatttttatctggaaatctaaaaaatgtcgtccacattcaacgggcgatgaaactgctccttttttttggcttacttaaaaacaaatgataaccacggggggcgccctttttagaggttcaaattttaccacccctaacttgcaaaggtttactttttttttggggcccccaaaattaaattactggcccgggttttaaaaacgtggggtttggaaaaccctgggggtacccaaattaaatggctttgaaaaaatttccctttttgccagttggggaaaaagaaaaaaggcccccccctttcccctttccaaaaaattgcccaccttaattgggaattggaccccccc

SEQ ID NO: 246946 - DNA, 132 bp, Gossypium hirsutum
  unsure (1)..(132): unsure at all n locations
tgtttttggactttgccccgccattggaagttgtaataaggaacagtgtgatatagctagtgtacaggcatgtgaaaaacatatttaaaaaacttcttgtaggttataatattttggattgtcagcnnnnaa

SEQ ID NO: 246947 - DNA, 144 bp, Gossypium hirsutum
  unsure (1)..(144): unsure at all n locations
gccacgcgtccggtaaaacttctcctttaaatatggccaaaatgaaacgcgatcgggggcgggttgtagctgctgtgcgccgcacccataaaaacccgcgggnggactatgacacatctctgtttgttcggagatagatgaaat

SEQ ID NO: 246948 - DNA, 173 bp, Gossypium hirsutum
tcataacacaaaagtcctttgggggctaactgtattttcagttttacactacttgaacatgcaaaattgtggatatttttatcattattcaagattttgtccaatcttgtttgtggaactctgtatatcatacaaatttggaactggtaattataaacttgtattcaactttg

SEQ ID NO: 246949 - DNA, 338 bp, Gossypium hirsutum
  unsure (1)..(338): unsure at all n locations
ccacgcgtccgaaggacacaagtgttaatggtaaaaccaaaaattccgcaagcgggacccagacctttcccaaaagccgcaaactttcattaaataaattatccatcagattggtattggttgcgacattgaacttgaattggacccggattccattcatttcgaanggaaatggtgttttcattgatgcacacagttgggatataaacaaggatttttgccggtaaaacaaccaggggatatattgcttaatcttcccaacaaaaaacctccaaccaaaaaaaaaaaaaaaaaggccggccctttttaagaatccaacttaacttccccttccttcc

SEQ ID NO: 246950 - DNA, 260 bp, Gossypium hirsutum
  unsure (1)..(260): unsure at all n locations
gctacttctccttgtccttcaaaaatctatccttttttatttatctcaggcgccgccgtattctctaagccggcggtaaatacccatttcttcctccacccttccctctcctccattaaaaaaaaagccaaaaaaaagagaaaaatattcacaaaagacaagaaagtttgctactttagtaaggtttatcgaacgcacttgggattttagtttgtttcatttattatcttctctaggattttttaattaatacccganga

SEQ ID NO: 246951 - DNA, 390 bp, Gossypium hirsutum
aaatcttacaatgggcttggacactatacaatcccaaatgaaatggaagaggcctgtgcgtggttaacttcaaaactggagaacaacggacggtctacatgacgaatgtacatgcggaaatggatatgcattaatcgaagcaaatgtgtgatgtatgacgatgcaaaacatggatatagactagtgaacatacgccgagggaatgaaagtattctaaatgggttccggatcttggctggtaactcaattgaaacatgataacttgtaccgatccaaatcgtaaactgggcggggttgaatataataatgtggaaggcaatgtgcgtgtgtaattacaaaataagcaatcgaaaagggaaccctattataatttaacagcacccgaataaa

SEQ ID NO: 246952 - DNA, 396 bp, Gossypium hirsutum
ggaatttgcaaatgtaggtactgcaaactatgtaacacaggaacttattatatacgggatgctggcacgctaaaagactataaagatgatggggttagtgaggacataacctaaagttggacatggatggtcaagacagatacgatgtcaatgataccgacagctatgtaaaaggggaagccaatctaaaagagacatgctggcgtaggccggcaaggaaagtaaaaggtaaactttaggggaagctaaaagaaattaaacgggcgatgtaaaaaaacggctagaaagggaaaaacgtgggtggaccaaaaataataaacttgaaagaaatgcccctttgggcaggaaacggaataatgaaaaagcccgaaacgtttgacctttccaaaagttaag

SEQ ID NO: 246953 - DNA, 384 bp, Gossypium hirsutum
cccacgcgtccgatcatttccacttttttcccttatcatgtatattttgagctactgtagtgtaatatattaataaatttgaactactgtagtataattatattaataaaatgaaataaagccggtaatggctggtaaattattaaaaaaaaaaaacaaaaaaaaataatacaacagatatataaaatagatacaaaagctcaacaagatatgctgggggggttcgaaaagtacgttaagtgaaaaaactaattcaaaagggggggcggttttaggggatcaaatttaatttccggggcctgggaaggaaatattttttttttggggcccctaaattaaaattcctgggcgggtttttaaaaaggggggaatgggaaaacccgg

SEQ ID NO: 246954 - DNA, 382 bp, Gossypium hirsutum
gctatatatcaagcgcgcgctctagaggagacacacttacacgcgcgcgcatgcgacacgatagatctcttatatagtgacataaatataaaacacagtgcgcggcgttacaccacggcgactgtgaaaacactgtcgtgacacaaatcaatagcgtcgcacaacatatccctttcgccagatgtcgtgatatcgaaaagaggcgcacagagagcgcttttcaacacatgcgcacactgtatgtcgaatgtgacacgcgctgtgtcgccgcatataacgcgccgggtgtgggggggacacgcacagtgacagctacactcttgagagcgctatagcccgctcttttggctttctttcctttctttatcgcgacatgtgccgg

SEQ ID NO: 246955 - DNA, 283 bp, Gossypium hirsutum
ggtgcatgagggtccccaatgtggagccactagttaagacaaacacgtacgagagaggttgatgccactattttgatcccaactctgctactgggggatgccaacaatcaagccatcaaagctcgggtagaagaccatgaagcacaccttgaacacaaaaacgatgcgcttctgtgctgcaaattaaaccaacctactactttcaactattggatttcgtatattgattcaaatttaaaataagactggtatacataccttatttgtggaccaaaagggggac

SEQ ID NO: 246956 - DNA, 407 bp, Gossypium hirsutum
ggcccgaaaaccccggtccacccacccctccccccaccccttccaaaaaaaaaaaatttaattattaaaaaaaaaaaaaaaaacaaagcggccgggtaaatttaaaaaagacgccaaacaaacctcccgccccttttatagacccaacccaacttaccccttcctcccccctaaataactctgccccacgttcacataatttcaacttacctgccctaattatacaccattatatcttttaaaaccctgccctaacccaaactaatccccctcgaattaaaccccctttccccatgcaacccttttctctaacaacctctaatcccatccaccatacataccatatccccactttatctcaaacataaaaaccccccttcttttcccctttaaaataaattacaaac

SEQ ID NO: 246957 - DNA, 246 bp, Gossypium hirsutum
cccacgcgtccggtcggaaatttggtgggaatcaagttattgctgtctactatccggagaacaagtttgcagagagggagtacgatggctaattttcatataaactcttcttagtattgtgattctctatgttcagttgattcacattgtgacataatatatgttaaaactagttgagatgattgtggagattatttctgattctgaaacctttgttgaacaatatatttcaaaaggttcatttcg

SEQ ID NO: 246958 - DNA, 377 bp, Gossypium hirsutum
ctgaatttgcccctctttggggaggtttcaattgtctcatttgtggttgcattgtgctggtggagttttgctgttgtctgggctgtcaatcggcgagaatcatattcatgggtgggccaagatattcttgtaattctccacatcgccactttgcattccagtaatggatgttttgggaattgatcatactttctaagatacaaatatttaccactctctctagtgtaaaatcttggcttaataatatgtggaatttgtggatgccaatttaaggacaagaaagatggtttaataaactgggcaattaactgattttatggctgggaaacaagtagggttttgagatttaaatttaatggtgaatgatgttaaaagtt

SEQ ID NO: 246959 - DNA, 405 bp, Gossypium hirsutum
atcccccattgttgttctcatatatagatcacgccattaacgaagttccccctcaaccctcgattccaccaatattttgtaatctggtaaacagagatgagtaattgtagaaaaaataacatttccctattgtaaaaaaagaaaaaaaaaaataaaaaaaaaaaaactaaaaaaaaaaaaaaacggaaaatctttctaaaatgggaacttcttcctgtaggtaccaatggataaagaagattgggaaacctataatgcagattaaatatggccaaggaaatgcaattaaattgttcctattgttgatcaatttggggtggaaaaaacaaggcggacatgattaattgcattgagttaagatcctgatgtggatgagaaggtttttggcacccaagccctaaagtt

SEQ ID NO: 246960 - DNA, 188 bp, Gossypium hirsutum
gacgagttatgatatgccctgggggaaatctttagactttgaaacttttaaaatcatattcggttctttttaacgctcagaactgctgttatccattcgatttatcatttcattgataattccctgatcgagggcaagtaataccatggaagagcgaatggagttcggtcttttctttttcttttttc

SEQ ID NO: 246961 - DNA, 348 bp, Gossypium hirsutum
tgctgcaacaaattattattacatctttaaatatccacaggctggcatttccagctaaccgaatggttccatttgctcaaccacatgcgaataatccatttggtggaagcacaggcctattgtagtgttaaatacgaagagttgatgggtgtgtattttggttgggagatgagaagagtgtgtagaaagcacctgtgttttgcacttgtatgggctgtaaaagccagcctgtggatatttaaagatgtaataataatttgttgctgccaccaattcatgaaaaaaaaatgattaccccgacgactaaactttagaaaaacaaaataaaatccggtttaaggaacaaaa

SEQ ID NO: 246962 - DNA, 282 bp, Gossypium hirsutum
gttcaactgataaaagattcattatgacatgaagtaacaacgttgtttctgatttttgctgtgttcttctagttctacgcattttcagacatctcttgtacaagtaaacttcataaataaacttcataaatagagaaagaatcaagacaccgcatgtatcaagatattgatacttttatgtggtgtaatattatgcacttggacaatgttgttactatgtggtgtactactaattatgtattttgataatattatttctagtactcattcgggtttcgaagt

SEQ ID NO: 246963 - DNA, 281 bp, Gossypium hirsutum
gtgatttttgttatacattgattttgaattttaaatggaatcttactgggaaaattttatgcgtgcttaaaaaaaaaaaaaaaaaaaaaaataaataaaaaaaaaaaaactaaataaataaaataaataaaataaagaaagaatcaagaaaaacgcatgtatcaagaaattgatacttttatgtggtgaaatattatgcacttgtacaatgactttactaagtggtgtaatactaattaagtatttggatcatcttatttataatactcattgcggtttcg

SEQ ID NO: 246964 - DNA, 369 bp, Gossypium hirsutum
cccacgcgtacgcccacgcgtacgcggcaacctctgttcctaggcaacaatcataccgttcatcgcccctgatctgaaccgagaccccccaaaaatcgtcgaacacccaaagaatttagcaacccatcaccacctcaaaagtaacccaccgatctttgtacccccaccctagatagtagtagccctcaatacccttccccccttaaaaccccgttaaagtttcttgcgatcccttcaaaaaccatctccaccattcttttcccttcccccgacctgccgtccgccccggccgtggccaatggcttccttggaaaagtcaacacacaaccttccaaattaagacttccaacttttattaaaccctttttt

SEQ ID NO: 246965 - DNA, 361 bp, Gossypium hirsutum
  unsure (1)..(361): unsure at all n locations
tgatattgcacctctgaaattatggttgtcggtttccttattcgccttgtatattaatttgtggaatgatgtatgcaacttttattccaactaaaattcaaaaaaaaaaaaaaaaaaaaaaaaaaaaaaaaaaaaaaaaaaaaaaaaaaaaaaaaaaaaaaaanaaannnnanggggcggccgatttaaaagaaccgggcgtcccttctcaagcatccaacttaataactcttttatacaaaaaaataaatttaatttactggcccccaatttaaaaaaactggccggggaaaaacaaggcggtacctaaaaaaaccccgttgtaacaaaattaaatttcctcgaaagaataataattaaa

SEQ ID NO: 246966 - DNA, 278 bp, Gossypium hirsutum
cgacccacgcgtacgggaagcgcgcacacgaagtcgatatgcaatgttcatgtgcaagtaagtttttgttgcttgggcacaaaacgtgaagcagctgaaatgcttaaaagctgctaccgggtcttcaattcaagaaaactctgagcatcacccttcggctgcaattcaaatggtgagagtgttgcgcaatgcatctgctactgacgagattcatcctgcccacgtaacatactgagctgagctgaaaagcaatggaaccatacttcagaaattattta

SEQ ID NO: 246967 - DNA, 227 bp, Gossypium hirsutum
ggaaattcagagcttggaggaaatagagaagagatacaaggacgagtagtgttgttaactggaacatattgggatgagctgctgctaaagaaaactcatgtatgtagtaccccctctagacttgagactgttattttataaaaagcatatttgcggtatttgtatgatgtcatgtttcctttatagcttaaactctcctgcatctctaggctacaatggagggtttt

SEQ ID NO: 246968 - DNA, 137 bp, Gossypium hirsutum
gttttagagaaatctggtggacggttctcacatgatcaatcagggaatgtggtaaagtggggtcatttgtacgactgggttgattaattacttgaccattctgtacgaaaggcatactcataatagtttattccatt

SEQ ID NO: 246969 - DNA, 325 bp, Gossypium hirsutum
cccacgcgtccggcataaaacacagcgagctacatcccgtacgtgctctctgctgttctgtggtgaattatggcgcgggccgctcatagaggatgcccctaatgtgaaaatggaggatatggtatacagaaatgcagtcctgtgcctccttagtatgaaaccagagacctgcattaaatattgtatagcattatcaaaattaattgatctctcctaatcatgaatagaaaaatgtaacttgatgaacatgaaaaaattaaccacgttgcccatgtatggggccacaaataaaatatgcgggcttctgtaccagtccacttttttt

SEQ ID NO: 246970 - DNA, 397 bp, Gossypium hirsutum
cccacgcgtccgcaagattcaacccaaatctaaacacacagagctcagcagaaatctgctgggttttaaggtttagggttttagtatttgagttgcaaaggtctcaatataaaaaaacaaagtgaaaaaaccctaaaattgatacaccataaattagggataaaataaaatatggtgggatgacaaattaatggaaaggccatcaccttggatggtcaaaacttaaatgcttgtaaattagtgcgctaaccaaattttaagggtgtgggtttttgacttaaaaccgctgagttccgcatcagtgggccaactttattggggttaagggactaattttttagttgaacatttaaaaaaaataaacattccagtcggaacaacctttccttcccccttt

SEQ ID NO: 246971 - DNA, 150 bp, Gossypium hirsutum
tatatcgaaaacatttcatagatggattaactctttttttttgtgtcaaatccttaaattggtagaataagctttaaacattgatttcaattagtgaaaaatgctattactattatgttatataataaaatggataagggattcattgag

SEQ ID NO: 246972 - DNA, 185 bp, Gossypium hirsutum
atttgtttgagggattacagtatgtaattttagttaacttctatggtttcagtcagttggcgttggatagtttagttcatctcaccattatcagtacctaaagtttttagtggttgatatttggtgttaattttgttataatattaatatatgaatctaaaactcccaagtaattttttttttcc

SEQ ID NO: 246973 - DNA, 403 bp, Gossypium hirsutum
cccacgcgtccgcaacacgggtcttgaagaaaaaaaagctgaagatcaatgttcataggcctgtggggacaagggttgtctttgatgaggaaggcaacacacaagctccacttgctatgttggctgacaagacaagtggcgatatactgcttgaccaaggtattacattatcccttctgttggcctatgttgctgcgattttttattattcttgaaatacctgagtctggcacccatgtttgactcatgtttggacatgatgggtatagaagtatgacccttcaaaagtatggaaaaacttggaaaaattggatatatctgggtcaaacacatacctggattcaacattcacaacccaatataagttattggctactcttctgcaacttttaatggataaatt

SEQ ID NO: 246974 - DNA, 379 bp, Gossypium hirsutum
gtcgtgatcgtgaccgagcacgtgaacgaggccgggatcgtggtcgtgattatgagcgcgatagagaaagagaccgtgacagggacagggacagggacagggattatgatgctggtgactatgaccgtgaccgtgggcgttccagggatagggatagggaatctgattatgaccgtgtcgagtccaaacatgagagagatcggcacagtgagagggattatgatcatggtgagccagatgaggatcatgggtggtttgagcagcatgatcatgggcataggcggtcggacctagatgaccaacactatgaatactatgatcatcatcgaggtcgaggagaatatgatctggatgctcatggggatcgctatgatcaata

SEQ ID NO: 246975 - DNA, 432 bp, Gossypium hirsutum
ctgaaactaacatgtctcggacctgacctgggagattatcagcaggtgcaatatacggtacctccatatgtttggtttggtgcatttccaaccaaggattttcatatttccagtgacggcagagcggccatagctgaaccaagggatgctgagtgtcactattccctcgttggatgcacctgcgcacctgcctttcaatttcaagactttgagctcagaaaacattccgagcttgtttccacctttccgaattatgagcctatcatttcttttctcaccaatactgattgacttgccatctgatttctcctgttctcagctcattggtgccaagaagttttcatgtttttgatccctagattgctacttctgtaatttacagtttttccacagctgaaaaaagcgttaagctttgtatcaaatgctgttttc

SEQ ID NO: 246976 - DNA, 210 bp, Gossypium hirsutum
  unsure (1)..(210): unsure at all n locations
cccacgcgtccggtttttcatttcaatttccatttatttttactttgatttttaaagtagtttcatttataatttttaatttatgtgcggattaagttttagctcaattagtataggcattgtagccaaacgcaggagaacgtgagtttaagtgcgttgaaacgcatttttaactcaggtttaatttaatgaatcttaatgttcaacana

SEQ ID NO: 246977 - DNA, 153 bp, Gossypium hirsutum
cttttaggcattttaatcatactaagaatcttgtatcaccttaagttatgtatgacttttttttgtctgttaaatgtgaaaaattgaatgtataagtagtaaaaccgaaggtttgcaactagtggcaacagccaaatcatcaaatttgacgtg

SEQ ID NO: 246978 - DNA, 409 bp, Gossypium hirsutum
catacatctgtgttaagaaattgcacccattcactgcctcttcattttcctaccaaccattgccgtatttgtaactatttttgagaatttagtagatgcttttcttcagtcatggttttatgaactaagtagggttcactctcgagtttttgtataataattacgaatagaaattttttattgcattatggatttcaaaaaaaaaaaaaaaaaaaaaaaaaaaaaaaaaaaaaaaaaaaaaaaaaaaaaaaaaaaaaaaaaaaaaaaaaaaaaaaggcaaaaataataaaaaaaaaaaaaatgccccccacctgaaaagataaaaaattttctttaatttgggggggcgccatttaaaggaaccaagttttccttcccgggggttgggaaggagatttttttttttggg

SEQ ID NO: 246979 - DNA, 422 bp, Gossypium hirsutum
cccacgcgtccggcagcatcaacaagcaatgcaaggtcaaatgggaatcaggcctgggggacccaataatagcatgcatcccatgcattcagaggctagccttggaggcggcagcagtggtggtccccctcaaccttcaggcccaagtgatggacgtgctggaaacaagcaagagggctccgaagctggtggtaatgggcagggcagcacaactggtgggcatggtggcggtgatggagcggatgaggcaaagtgactgtcctaatcagtcattttgtttggataccatgtggctgttgatagtaggtttctcttacaataggatttgtattcccctggtgatcttctcatagactgttgtaaaatgaaaattcttcttattgctttttaatgtagcagtttaggtagttttaactcttttt

SEQ ID NO: 246980 - DNA, 425 bp, Gossypium hirsutum
ccagcgtccgccagcgtccgccagcgttcggacaacgagtatgtgtaatgcgtgagcatggatagggtcataaggtcatgggctttctagtgttttcaactcacgagatgatccctcttaatcaaggatattgactcacgaggtcaagaaaacgtgtggtataactagatcaaagaaagcaacaactaccattcgtccaccagagcttatagcaagagaatcaaatcttgcaaagatggtttcagtcacttgacaaggaaaaccctagtcatcacgttggtaccgataaggaagcaggcaatgaaaatgctaacagtgaatgaacaagcaaacaccccttaatcaaaggaattggggtcaaaacaaagcatgatgatcggcacaaaacctggcaaccccaaagttgaaagaattggggtcaaaat

SEQ ID NO: 246981 - DNA, 454 bp, Gossypium hirsutum
tcccctatatgttttgatgaaagctgtggtcttgcgctggtgaataatttaataatatattgcattggcggtttcttatgggcccacttgaacgcaatattggaaaaactggatcatgaggaactgaatcaactaaaaatcatatgccctttatgatccattagttttaaagaaccggttatatggtatttaatttactttttattgaaccactggtgagtggagatatcaccattttaacattcaatccgggggtttattctatgcattgatctctgaaaaggaaaccaattgataatcttcttgtgaagaaagaattattttgtaattaagaaatgtctttattaaaaaagctggatggaatggatccttcaagttcaagtttttattcctttttttttaaaaattaaccaaatgtatgccaatttaaatgggattttttttaattaaatat

SEQ ID NO: 246982 - DNA, 357 bp, Gossypium hirsutum
  unsure (1)..(357): unsure at all n locations
atggaaacaagggtgttgaaataacagaaaagatgcaaaaaggagatatggagggctcagtgggggatataaatccatgttttccagatcatgaacaagaaatcaaagagattacaatcgttattgctgagaaaccagttgaatccgacgaaatgaaagcttgattttgattcaatttgtggaaactgcagaaatcgaagcttttaaagacgaggatgcatagatagccttcttgggagagaaaagtaataatttgttattaagatatgtacgaactacttaaataattcaagagtctttatgaactaaaaaaataaaaatccaaatttaaaaatgtatccaaactattatttcnna

SEQ ID NO: 246983 - DNA, 347 bp, Gossypium hirsutum
gccaactttcgggttgctaaagaaagggaaggaagtggatagggtggttggagcccaaaagaatgatcttgagaagaaaattgagaaacacagggatctggtagctgctacttgaactttcagcttgtattttctccattaataatgtctaatgggatttccctgaatttgattatgtttaaacactttgttgtggaacaatgattgggtcctttctcttgcattcattttcttttcatcgccccacaatccctcttatgtgttgctttaatgttaacatgttgatttttatgtatcctgtctgatgttgagtgaatctaagtttggaaagtatattatccttttcc

SEQ ID NO: 246984 - DNA, 162 bp, Gossypium hirsutum
  unsure (1)..(162): unsure at all n locations
ctagttcactaattatggcctgcttcactctgtactgtggaaaccccctctggtacactgctctcttaaaccaagttgctagggtgatggactcttttgaggaatgggcatgaaaaggatgtcagcttttctctttgtttcttagntggattggaaaatctg

SEQ ID NO: 246985 - DNA, 377 bp, Gossypium hirsutum
aatctgagttggatttttagttgacaaagcagtgaatttgaattagcatttgctggagttttttaaatttccgaaatagttacaattgctttggtttccattttctgttcctttaaactgctgaatgaagtatattaataaatatgaagaattacaatctgattagaagaagaaaaaaaaaaaaaaaaaaaaaaaaaaaaaaaaaaaaaaaaaaaaaaaaaaaaaaaaaaaaaaaaaaaaaaaaaaaaaaaaaaagggggggcctttttaaagatatcagattatgttccgcgggcttgcaagttaaaattttttttttggggcccccaaaattaaattaatgggccgcggtttaaaaacctcggaattggaaaaac

SEQ ID NO: 246986 - DNA, 322 bp, Gossypium hirsutum
agcttctttaaccatgatggttaattattacgagttttgtagtgttaaaaaaaaaaaaaaaaaaaaaaaaaaaaaaaaaaaaaaaaaaaaaaaaaaaaaaaaaaaaaaaaaaaaaaaaaaaaaaaaaaaaaaaaaaaaaaaaaaaaaaaaaaaaaaaaaatataaaaaaaaacaaaaaaaaaaacactataaacctaatttaaccgggggggcaactaaaaaaaaccaacttttatcccaactcacatgcacatcaaaaacttttcttattggacctctaaaaaaaaaatatcaagacctctttttaaaaacacgcgtaact

SEQ ID NO: 246987 - DNA, 316 bp, Gossypium hirsutum
  unsure (1)..(316): unsure at all n locations
aatctgagttggatttttagttgacaaagcatgaatttgnttagcatttgctggagttttttaaatttccgaaatagttacaattgctttggtttccattttctgttcctttaaactgctgaatgaagtatattaataaatatgaagaattacaatctgattagaagaagaaaaaaaaaaaaactaaaaaaaaaataacaaaaaaaaaaaaaaaaaaaaaaaaaacaaaataataaacaaaagagaatggtttagggggactcattttgtgactgctcctaccccagccgcgttaggctaaatatttttttaacct

SEQ ID NO: 246988 - DNA, 162 bp, Gossypium hirsutum
cccattcaatgggtgggtatttgggatgattagaggaattgtcggcctgttgctagtgctaaggctttcaaagaggttaagtcatctgcgtgtttggtttgtcataaggagtttgtgtttccaatccgggtgttcaagcactccgccctgctttagcctttc

SEQ ID NO: 246989 - DNA, 441 bp, Gossypium hirsutum
cccacgcgtccggctacgtttcagtgccccataaccgggctcgaattcaatgggaagtataagttttttgcgttgaggaattgtgggcatgttgttagtgctaaggctttgaaagaggttaagtcatctgcgtgtttggtttgtcataaggagtttgtggagtctgataagatggtgattaatggaagtgaggaggagatggcagccttgagggagaggatggaggaagagaaatcgaaaatagtgaaggagaagaagaagaggggaattgatgttgtggatgggaaaaaagattgtggtaagttggaagggaatgaaaagcttgagaatgggaagaaattgaataatggtggggtgaagaagtttcgagctacggatgtggcaccagctaatgcaacaaaagaagtttatgcttccctatttacttcttcaaagaagtcg

SEQ ID NO: 246990 - DNA, 390 bp, Gossypium hirsutum
gaaagttcttaaatatttgagtttagatcttctttgagagtgccgttgggagtgaaggttttgtgaagagcatacctaatcgggccgggtgttcgacccacccgttgatttgatcaagtcgatgcactccagggtgaaagccatgttcccaatccggctgttcaagcactcgcctgctttagcctttcagacaaccctactaccacctctctgctatccacatgcctctccgcggcgcgtgtggacctgtgccacggatcaagatcttcggaccgaagcgtcgctgtctttttctggcgtcttgtaccgtctccgcaacccttattcaccacccgatgggacttcgacatctaaacaaagggctgataagaaccaaacatgcctttcgcg

SEQ ID NO: 246991 - DNA, 425 bp, Gossypium hirsutum
cacaataccaactaaaatttgcaagcatattttaaagtattctttcaagcttaggatgatggaatctatccttcacataacataatttacacggctaaaagtgaaataacaaaaatattagagtcagaccttttatattgataacagctttattttcttttttgtatttatcaatttggccttattttaggtttgaaattgagacagttgaggatgaaaaatctgacttgcaaaacagactcagagaagagattgaaggtaataccaaactaagccagtgtggaaaaacgaaagaagacattgcaagggtgtcaactatgtcttgagaaagaagtagcaatattaaaggaagagttacaaagggagagagataagaggacaactttggaatccgttcttaactcatctcaagaacaacccacagc

SEQ ID NO: 246992 - DNA, 223 bp, Gossypium hirsutum
cccacgcgtccgattagaaatcttactttaagttctaaacgtcggataaatcaactacttttgaatctaaaagttgcattcgaaaaggcattctcattggtaatgccatctgaactctctgattgtaatgttcatataactgaacaccactcggctcgaatagcttatacgtctaattgaacttatattttattaaatgaatgtaatggagtatgttggaatt

SEQ ID NO: 246993 - DNA, 366 bp, Gossypium hirsutum
  unsure (1)..(366): unsure at all n locations
cccacgcgtncgcgatntgtcagaaattcaagaagctgaacaatagcataatctgatggtcccataatctgccatttttattttgctcggtagctctggctgatatgttatattgggtaattttagtttggtcaccttggacactacttttactcagatgaattggccattcgtccttgatgtaccagttcattggattggaaataccctttcctattcgatgattaaacagagattggagttactgaactaattccatatgcagaaaaggccccttctggtggtgaagagaggttggtacaaaattttcaatacttcgctaggcccgcaatgcaaaaagggagggggttggggggggggttgggt

SEQ ID NO: 246994 - DNA, 286 bp, Gossypium hirsutum
  unsure (1)..(286): unsure at all n locations
cttccgaggcctttaaggaatggggcctttttggtggaacccagggggtttttttttcggatttcttccggaaaaagggatggccaaaaatggtggtttctggattgggttttttctttttttttttttctaatggtactgctgcccttgtttctgggaggtgattgtgtaaacatttgtgtactttaattattgtaaagaatatttttaacattgttaattntaatatttttgtaagaatattcagttatcaatttatatcatatatcttttattggaaaanaaa

SEQ ID NO: 246995 - DNA, 291 bp, Gossypium hirsutum
  unsure (1)..(291): unsure at all n locations
gttgtgtgctagtcaattctggaatttgttgatcagtaaatgtgatgaatgttgcttcactatggatgcaaagggggaaaatttggcgcggataatgtaaatgaaaagaaatagtgggtatttatattatggttactgttgactttgggggtgggcggtttaagggatcaaagtttgcgtacgggggcttgtgatgggataggttttttatgggggctgttggatttattttgcgggctgggtngnatgcctatgttgagaggtaatgctttggtgtttttaaggttattg

SEQ ID NO: 246996 - DNA, 442 bp, Gossypium hirsutum
cccacgcgtccgagagggttaacttacaggaacaagtttctgcaccaaattagtatggagaaacgttttaacgagctctagtaaactgaggccgacctatagaaattttcaggaaccctaagagcttctcaagggaaaaaaacataatttgatcaactaggatagatttcagtttgtgggatctgaataatcaagttttggtataagttgtatttggagtgttgaatgaagactttgattagatgtgattctctgtaattctgctgaaccttagtaaagaggtattcaaaatttaaaaagtaaaaaatgattttgaagaagattgtacaaaaatggaacgaaaatatgattaaaatgttccgataggtttaaattttttctttaatcaagagcttgtaatataaaaaaaagcctattttttgttgaatgttaataacattgg

SEQ ID NO: 246997 - DNA, 339 bp, Gossypium hirsutum
cggtctgaaggatgaagattcggtatggcaatacaaagttatatggtagtggaatagaagtatgtagttggagtatcaaaattcgagttagcaagcaaatcaagctaaattggaacacaagcaataaaagggggccgaattgaaaattttgagaaatttatgtttgattagatttttttatttaactttgtaaaagttagatttaaaaaatttttgatataaaatctgattttatatggttggttgttagatgaattaagctaaatttagcatatgaaatgtatataaataccttgtatggtggctttgagaaacaattgagattgaataaaatataat

SEQ ID NO: 246998 - DNA, 274 bp, Gossypium hirsutum
cccacgcgtccgaaaggtaattaattgggtagaggtggagcagtgtgatgcaaacaagcggccggttcatccaaaagcagcacaaatagctaggaagctaaggattaagatgaaaaacccttgagttaattacacaatctgtgtttttgtaagcagatattaaagtgcattattttttgttggattgttttggtttccaatcactttcggaggttgtctatctctcacatcatcatgtattcgattgttttcacccataagtataacaatattg

SEQ ID NO: 246999 - DNA, 456 bp, Gossypium hirsutum
  unsure (1)..(456): unsure at all n locations
cccacgcgtccgggagctcacagttagcccgctgtttatggacaaacacacaagacatgggacatgtgaaggaaagtgcagctctggtagccaagttattgggtcttgtggaaccaagtcaagcacccaaggaagtagttggactcagtatcttgccccgatccgtaacccgaagatccagcagctggaaaaatgtcattcctcctctgttatagaagaaggtagagcgcagcacaccatattacggataaaactttagctccagtcaccagcagccttaacgagaccttgctcatgcgcggattgtgacatatacactatatagattgatatatatatatatatactttgcaaggtggtggtgaaatgaaatcatctcaatttctaaattgggagctgcacattgaccagactttttagtaatggattcaaatttgtggattntattttttacta

SEQ ID NO: 247000 - DNA, 400 bp, Gossypium hirsutum
tcgcccacgcgttcggcaaggcgtgcgtgtgattgtatctttggtaaacaagctgcgactcaaccgtatcatattccagctctggataccagcagtgctataaacgtagccataactgcttacgcatcttacgctcctaatgcttgttctcccaggaacgcattagcgcctggtcccaacaagtccccactggcatccctccctattactacccgaagcgacataccagctgctgatgctccttctacaatcaccgactctgatgctcctgataatacttctgctgcttctatagcttctgcctatgccatccttttcattttcgcttcggctcgcttcatgcttaccatgatgtgagtgcatgaattattggttagcactcaccccactatgatgggat

SEQ ID NO: 247001 - DNA, 218 bp, Gossypium hirsutum
cccacgcgtccgcccacgcgttcgtccacgcgttcggaagaaagccttaatgtactaaatatcattattagcaatcaataaaaaaatgattttattttatggtactacatagtttccgaaaatgtgttgtgttgtgttgtgttgttgcttcaatcaactggaatggtagtgcaaccaaatgcctttgtaagtgaaaaaaaaatgctctgtttcccatg

SEQ ID NO: 247002 - DNA, 440 bp, Gossypium hirsutum
  unsure (1)..(440): unsure at all n locations
cccacgcgtccgaaacacgagataaaccgcaagccggggtttcaaatgtgggaagggcaggaattgatgcaggagaggagaatttccataaccttgagaaagctgtgccaggtcgactagcttatcatcaaacatgtgcttctttgttttttttcttttaatagttccgtttacttatccaattttggacattctctaatttcttctgtttgccagctttgaatgtggaacactaaggaacgtgttccatgcttgaatacttgaatgttttgggctcctgggagttgattgacatgtgtttgggaataacaattggagcttcttttttttttccaaaaaaaaaaaaaaaaaaaaaaaaaaaaaaaaaaaaaaaaaaaaaaaaaaaaaaaaaaaaaaaaaaaaaaaaaaaaaaaaaaangggggcggccgttttaaaggat

SEQ ID NO: 247003 - DNA, 435 bp, Gossypium hirsutum
cccacgcgtccgctcatgatgagtgacacactttttggtactctcatggaaaaggacaagtgaatacgtaaatattcttttgtaagaactttgataagaaaaatatgacatacactatcatcatctttgttccaatacacttggtaagatttcctatgctgatagttgacagctgccatgcaacttactaaatattgggttggaaatagtagtcaaggctagtttgcccgtttggtagatgctatagttgtgttcaatatgttatggccgaaacggtttgctatagtatgtgcttagctagttgttgtggtatacttttcaaatctctgtggccataaaagctttcttttgagtttctttataaatcctaagaattcgttgcaagccctataggggtgtataatactttgtgctgatgtccattgtagatgtttc

SEQ ID NO: 247004 - DNA, 311 bp, Gossypium hirsutum
gtaaaaagtagaaaaactaacatattcatgtggaatacatacccgtactcaatacttgcactcgaagttgagtaaacatgacatgatcctccaaagatccttttgatacatgaaaaggaaaaaaaaaacttagacaatacccattttcaacactcatacctgaattcaagtaacatctcccttttttgttgttctagtcttggctttttctagatatcataatgatctggggcatgaaatttcattctcatattttctacattctagttactcaagtataacaacttttttttcttctagcactttttttt

SEQ ID NO: 247005 - DNA, 363 bp, Gossypium hirsutum
cccacgcgtccgctgtatctggtgactctgtcacattatctgttctggcagccatgctgcaaattctgtggtgtgtagcggttgggtgggtcgagttgtctccccacatggtgtaaggttggtacgggggtgtatacggttggatatggttgggtttctgcataaacatgtaatatctgttctgttctgttatgggcttatgggctttattctgaattatgttctgggctaaggccaacttattctatttctgtggtttgagctgatataggctatggttgggttaatttacacacttaattttcccaaacttaacccttttattttcattcacgcaagaaatccccaaccatagtgggcttg

SEQ ID NO: 247006 - DNA, 438 bp, Gossypium hirsutum
  unsure (1)..(438): unsure at all n locations
gtttgttccaaagctaaaccctaatttggacgaggcatttcactgatcatacctaaaaagaatttcattcaaattccaagaattttgacaattccgagttattaggtgcagggacataaaataccatttaagttttgtatgtataagaaatttaacatcatgaatcgagattgtttatagtcaaaaaaaaaaaaaaaaaaaaaaaaaaaaaaaaaaaaaaaaaaaaaaaaaaaaaaaaaaaaaaaaaaaaaaaaaaaaaaaaaaaaaaaaaaaaaaaaanaaaanaaaaaaaaaaaaaaaaaaaaaaaaaaaaagggggggggcctttttaaaggaacaaagttttcgtccgggggtttggaaagtaaaaatttttttttagggcccccaaaataaaattaacgggccgggttttaaaaacctggggatgggaaaaac

SEQ ID NO: 247007 - DNA, 396 bp, Gossypium hirsutum
gtggatttctgagcaggataaaagaatttttccttccgagtctctggtcacaaacacctgaggctgaccggttctgaatctgattatatgcaccatcaaaattaatctttatggattcccactgtgggtgtgtccatctcttatttcctttcattatttctgagtttatttgttcaagaccagttaactcaatgatgtaattactaacaaagtttgcaacatctattccattactaactttgccttcatgtatgtttctgtttctgtctctgtctccccatatggcccatagtgcacagcaaaagagtcgactttgatttgggtttaactgctctagcgcccagtcacggaataagtgattcatcgtttcagcttcttctccacatcggggacacc

SEQ ID NO: 247008 - DNA, 428 bp, Gossypium hirsutum
  unsure (1)..(428): unsure at all n locations
cccacgcgtccgaacatgatttacattttttgactaagattttccaactgacaagcatgcctgcttttgcaactgatgggatgtctcgcagagagagagctaatgtgttttgtgaagccatatgtgctgtggatgcgacagatatttctgcaaatagcattcgtgatttccttcttccttcaattcaaaacttattaagagaccccgatacactagatcctgcacacaaagaggccctcgaaataatattgaaagaaagatccggtggaacttttgatgctttgagtaaggttatgggagctcacatcgggattccatcatcaatgactagtatctttggtgagggtgggctgctaggcaagaaagaaagcactgcaccaacatctncagttggatcttcgagagcttgggcatcatccgcacatgga

SEQ ID NO: 247009 - DNA, 435 bp, Gossypium hirsutum
cccacgcgtccgcccacgcgtccgattatttattgcatgatacagaagttcctgccccaagttcgagggatccagcacagtctgatctatcgacccacaaggaatccgtgaaacaagatttttctcaatcggcagctcatctaaacttaaacgatgataaggcaagcaatacattgaactctggcactgaagttctgaaaggaattgaagctgtgagtgctggtttctctgtaaacttatctccaaagcaagatgagaggagaccaaaaaccttggagcacaacaatcccgagaaaccgatatgaccagtgaacaatctttaactccattattgactacaagacataaccgaaacgagcaagccatgtgtacatttattgctttaaagtggttaattgatgcatgttatgttactgctgtataaatactggatct

SEQ ID NO: 247010 - DNA, 440 bp, Gossypium hirsutum
  unsure (1)..(440): unsure at all n locations
gccgatcataatgtgtatatatttatcagagggaggtttgatgactgaagtaatggaaatccaaattgacaggatttacttaaaaaaaaaaaaaaaaaaaaaaaaaaaaaaaaaaaaaaaaaaaaaaaaaaaaaaaaaaaaaaaaaaaaaaaaaaaaaaaaaaaaaaaaaaaaaaaaaaaaaaaaaaaaaaaaaaaaaaaaaaaaaaaaaaaaaaaaaaaaaaaatnaannaaaaaaaaaaaaaaaaaaaaaaaaaaaaaanaanannnnnnnngggggggggggttaaaaaaaaaaaaatttatacccccgctaatcgaaaagaaaaattttttataatgacccaaataaaaaaactctcccgcggcgtttaaaaaaactggaaaaagaaaaaaacctccggtcaaaaaaaaaaaaaggacggtgaaaaaaaccctttt

SEQ ID NO: 247011 - DNA, 139 bp, Gossypium hirsutum
ccgaattcggtcgacccacgctccgaaagccgttgaactgttactatgaacttcggatgcggatttgattgcggagcaacatatatgggcggcggtggatccctaccccaaaaaccaaaccttttacctgacttatggg

SEQ ID NO: 247012 - DNA, 395 bp, Gossypium hirsutum
cacaattacatgctctttagaatgcatattatgattgatgaaagacacatagcacctaacgacacacacagtcttgcttgaaattctctaattgtgaagacctaatgtgtactttttgtctggttgtagtttgagtttgatcagaccttttttgactcttatgaatttgatggagtggaattcctggcttcagctaactggattttcaagtgttttctgcaaagtctagaggatattgagctaactggtttccaatcaagttcttgggggtccgaatttttagtgaggttcatgagatttctgctcaacaacacaaaagtgctcaagaaggtgactatctatgaacagggtggcactcttcttgaatcctggcaattttctggaccaaacatgaa

SEQ ID NO: 247013 - DNA, 193 bp, Gossypium hirsutum
aaaaaaaaaaaaaaaaaaaaaaaaaaatttaaataaaaaaaagaaaaaaaggaataaaggataaaagggtacaaacatataaatgcagaaataaggaatggggtgttgttttatcggagctaaattaattgagtcgttggttcgcaagttttctgtttgggaatatggttaaattaattgaatttactgactt

SEQ ID NO: 247014 - DNA, 263 bp, Gossypium hirsutum
  unsure (1)..(263): unsure at all n locations
cccacgcgtccgatttaactgctctagcgcccagcacagtcacggaataagtggttcatcgtttcagctccttctccacatcggggacaccttgtgttggctgctaatttcctgtgttgtagatttacctttgtaggcagatagttccatgatagccgccatattgtgatctttattttttatggtatattcaggctccaaagtgttttgtaaaattttctgtagaggttttgtaaagcataagctctaggattatcanttna

SEQ ID NO: 247015 - DNA, 118 bp, Gossypium hirsutum
cccacgcgtccggtccaattagtgctttggaaaaggtcttttagccttaattacacgatctgaatgtatcaaatgtcgtaaaatatgcgaatatgaatacataattgggttggagtgg

SEQ ID NO: 247016 - DNA, 444 bp, Gossypium hirsutum
  unsure (1)..(444): unsure at all n locations
cccacgcgtccggtgaaggttaaacttaaacaaagaagacccaagaaagcagtgcaggtatctaccacttaagtgcatttatctggctgtcctgataatatattggctatgttttcggttcattctaaagttctcgagtttgctaaatgaaatcactgtcctaatgatgcaatattaattcatagcaagtagatgcttgttctttctgtttcatggtagaaaggatcagtagttctacagattttctgccctagtaaatgtacatatgctcactttgtaaatgtttgattatttgcgggttaattgatgaagcagcttcttcttttttttgttgaannaacactngcctggggggttcaattgcaataataggttgaatcaataatggttcaggggaaaatggtgatgcagattttcgatatgttggtggtgcttcaggaaaaa

SEQ ID NO: 247017 - DNA, 233 bp, Gossypium hirsutum
cccacgcgtccgatcattgtggaagtgatatccattattgttatatgtaatttagcttttagactgttagcgtaagttttcaacttagtttcatgttccatccttaagatgcaagtgaaagtaatttctttctgtggatgttggttttaatgttaaatgtagttctaaggcactctgaattccatgattacttgcatttggcatttgagagaaaagtaactcttatcattgtc

SEQ ID NO: 247018 - DNA, 434 bp, Gossypium hirsutum
  unsure (1)..(434): unsure at all n locations
gataaatcataattgatagcaacaggaggaggaagaaagaaaaaaaaaaaaaacccttactatggcccctttcttgtcgcttggtcgtcttcgggttgccgtacgaagtaggaaaggtttcaatttgcttgggccatttgggctaatttcgaaattgggccattgggtctataaattaaatttagcttgggtaataatttgggctaaaaacttgtatttgggtctggtgaaaattgtaatgaattatttcggattttgggctttaatttaatttgggcttttattttttttnaaaaaaaaaaaaananaaaaaaaaaaaaaaaaaaaaaaaaaaaaaatanaattaaaananaaaaataaaagaagaaaaataaaaaaaaaaataaacaaaaatttataaaaaaaaaaggggcggcccttttaaaggaaccaac

SEQ ID NO: 247019 - DNA, 385 bp, Gossypium hirsutum
cccacgcgtccggaccgattgtcctatgttatataactcgtcgaagcctcaaaaggtgttgggttgcatttgtatctgtaaaaaaaaaaaaaaaaaaaaaaaaaaaaaaaaaaaaaaaaaaaaaaaaaaaaaaaaaaaaaaaaaaaaaaaaaaaaaaaaaaaaaaaaaaaaaaaaaaaaggcccgccaaaaaaaaaaaaaaaaaaaaaaaaaacgccggcaaacaaaaaaaaaaattttttaaaagggcggccggggccctttttaagggcccaatttttaacaccgcgtttattaaaaaaaccctgtttttaaacagctaacatattttaaaacatcccccccttttaaaaaactggttaaataaaaaaaaccccccccccccc

SEQ ID NO: 247020 - DNA, 278 bp, Gossypium hirsutum
cccacgcgtccgaaggcatatgtactgtaatgctcctaccacacttcgattcaataaaaataaagggagccaaatatataaattaaaataaccaaaacatacaaacataattctactaaaattaatactaaaattgaatcatgaaagtcctttgtttcattcgatagattctcatcattctaatatcggatctcaagtgaagttcatggatccggggggctttttttaataatcataccttaccaacactctctattatctgcaaatatttttttttc

SEQ ID NO: 247021 - DNA, 363 bp, Gossypium hirsutum
gccacgcgtaccgaaggaacaggttactgccatgcaggatgctgcggatattatcggtgctcacggtgctggtctaacacatatagtgtctgcaacaccaaacaccgtgattctcgaaattattagcagctttttcagacggcctcactttcaattgatcgcccaatggaaaggattggaatatcatgccattaaccttgacggatcgtatgccaatccaggagttgtcatcgatcggcttaacaagataatgaggagtctcgggtgctaagaaattattattttttccagattttatttccaatccggcacttatggaagaaacttagaagagattgttttcctttcaacagactgttttca

SEQ ID NO: 247022 - DNA, 402 bp, Gossypium hirsutum
gaatgaattaaagtgctagaaagaacctacgttcatgagttaaataaaaaagataatgcacaaccaagcaacggaggaaaaagggaaaaaaaacttacaaattttaagagaaaagtaaaaaaatctattttacttttaactaatttgtaatatatgttaaaatattcacctttgtattcgattggctactggtattgtaagtcgatattactgtgctctgttgaatttgtttgtatatttctctcttcgtaaatcgtgtgtatattattgtctttgtaaaaaatcgggatcccttttacaatgaaggtattcgggctttatagccactgtttacagtgtatttacatctttattttacttccttgccatatttgttggttctgctgcctcttgttttctttt

SEQ ID NO: 247023 - DNA, 429 bp, Gossypium hirsutum
cgttttagtaatatggtcgggtctcagttaataaacacattgtgttcgaagattggtcggtttcctcgagctgattgtcgtgtgcttgaagacattgatgcattgatcgacaaagatttgccggagatgaaactccggtgtgtgatggcgtatgaagaagaaggggaagggattgtgtcggagatcggaaacagcatattagaggcgttggtacatgaaacggcagctgatttcgaattttgttttgctggtttcaattttcaaaagtctcgtcttttagaactaaacggtgccgtttaatgtttgaatagtggtgaatgagaacatatcacatgggtgattcacgtgatgagatgctattcgttggggtctttgtaggactgtacacgtggataagtatagctgttggaccttttttttatatatata

SEQ ID NO: 247024 - DNA, 266 bp, Gossypium hirsutum
cccacgcgtccgcccacgcgtccgccaaaatgcacgctgttagccggagtgactatgataacgtgattggcgccttgccgtatctcaaagtaaatagaaatgccaagtgaagagttgccatgtgatgagttatttatgttgctttcttgtgatttctcacaattatgttagagaaagttgtgtttattgctttaatctatggtgcacttagtggccattgataaaattcctagttgaattttatttatttcaatcattttggcact

SEQ ID NO: 247025 - DNA, 450 bp, Gossypium hirsutum
  unsure (1)..(450): unsure at all n locations
cccacgcgtccggtcgagaacccgttgttccgtgaactggcggaacgatccggagatcaaaacgacgccgtcatcaacgtgccgtgcgaggttgtgttgttcgaacacttgctttggatgctcgaaaacgccgatcctcaacctgagtcattggaggagctcgtcgagttttacgcttgttgattttttttttctttttttatttttgaaaatcagaagaaatgctcccgtgtggtcgttcgcatggtaccaaagttgtacattatgtgataatgttgagaacggcgatgaaaatttggaggatgatcagatagttaacgagagaaagtcgatttcaatggcgaggatttaaccgagttcatgccccggtgaagagatttatatttgtgtatgtcgntgntctttgtcatttttcttaaaaaaatttttaagagattaatgaatgttcat

SEQ ID NO: 247026 - DNA, 415 bp, Gossypium hirsutum
ctttgattgctgaatgcttcaggaaacatcacaaaatgctttacagacgttgctagattcatatatatatggtattgagtttattttgttattttccatttctttctcaaggaaaaagcatatggtaaatggagcctgaatattcaaaatacatatacttttgaattttgagtttatttaaatatatataatcaaaattgtgatctttgcctcaaaaaaaaaaaaaaaaaaaaaaaaaaaaaaaaaaaaaaaaaaaaaaaaaaaaaaaaaaaaaaaaaaaaaaaaaaaaaaaaaaaaaaaaaacaaaaaaaaaaaaaaaaaaaaaaaaaaaaaaaaaaaaggggggcccgttttaaaggatcaaagtttcctccccggtgataaaaaaataaaattttttttttggggcccccaa

SEQ ID NO: 247027 - DNA, 165 bp, Gossypium hirsutum
tggataaaaaaataaataaaaaaaaatttatttttcggacgatctaaaagaattcaagcgggagggcgcgtaattgcgaacgtcctacttctaatatattgtaacacaaaattcaattaactggctcgcgttttacaacttcattaactgggaaaaccctaaaat

SEQ ID NO: 247028 - DNA, 151 bp, Gossypium hirsutum
catttgcaaccaaattatgggtgagtggtgaaagaagagatgggcgtatggctgtgagtgattacttttaaatttttttaaaacttccttttatgtaattagctatgtttttgcagagtaaacttttgcacaatccaatgttttcagaatg

SEQ ID NO: 247029 - DNA, 427 bp, Gossypium hirsutum
  unsure (1)..(427): unsure at all n locations
cggacgcgtgggcggacgcgtgggctctagcatacttattgtagacacaaatttagagatttggtggagctgggttggcatgaaatcacaagaatgatacatgtcttgagaatttttctgtattgagaaagtgacctttagaaactacagatataatgggtatttccattgacaatggtgatgctcttttcttatttatatacatatatacatgtaacactttttacccgtatccgttgtcggaatagagtacgaggcattattgnaaaaaaaaaaaaaaaaaaaaaaaaaaaaaaaaaaaaaagaaaaaaaaaaaaaaaaaaacaaaaaaaaaaaacaaaaaaataaaaaaaaataaaaaaaattctaatnacacctaaaataaatatataaaaaagggggggcccttttaagggacccaagtttt

SEQ ID NO: 247030 - DNA, 464 bp, Gossypium hirsutum
cgcgccacgcgtacggcaattcacttggaaatacggcaatacaccaccaaagaagagcacctaggtttaaaaacagagttttatgcgtgctggtgaacagaggaaactgcaaccactgaaagagtggaagctcgtatcgatgcagtacaaaagctttggattgccattaatggagggttcagtgagaggtgaagcctgtatttcccaaataaaacaaactcttgcctgtggtttgtagctagtaatctcccaattcatgtattactgtggtttatgtctttattctaatgttattgtgtcatgttttgtatcgcgttcgaaataatcaagtccaagtttctacttagctttacttggacgaataaggttttacctgttgtttgataagtatacctttctattgttatactggtctctcataataatataatcccatttatatgggtgaattctgtataagttaa

SEQ ID NO: 247031 - DNA, 99 bp, Gossypium hirsutum
gtaccatagtcaataagaagctcccgtgaatgtgacacaattattgtactatataataaatccaatcctggggtcatctgattccaacaggtttattct

SEQ ID NO: 247032 - DNA, 338 bp, Gossypium hirsutum
ctgtcgcgaaagaaatgagagagaatggaactgtctgtggcattgatggtcctgtaactggaattactttttctgctgattctgggaagaaaaagatccttctcctaaaaccaaaagatcgagaggcacctaatgtgccagagggtgcatctgaacagcagggtgcatcatctcctgtagtaaattcacctggttcatctgcttcaagacagggtcaaagacgcaaggctggtggaaagttaataaggagcatacttttgagaaatgaagcgggccaaaatcaatcttcagcggcagtccagcctcaacagaaaactcaaagtccggacactgtcaaa

SEQ ID NO: 247033 - DNA, 308 bp, Gossypium hirsutum
caaaattgttccatctcatgcattcatagaatttttctgtcttttgcgtttctttggggtatacaactgtttttccttttgctgttcttttttttataaatgtatttttggttagcactgcttagagaaaagtgatactattataatcacaatttgggcatatgacattaaacacagtttactgaggcaacttatttctgtgttgccttattattataatattattattattggttttaatgaaattgacgctataatgcatgtagaagataaaatacaccctgaaagtggtgctccccgtaatggag

SEQ ID NO: 247034 - DNA, 389 bp, Gossypium hirsutum
cggacgcgtgggttttttttctctgtctttctaaaaaaaaattcttccttaacaaacacagagaccacattttgaaacaaaaatggcacgccaacttgttgttcttgctttagttttgattgtccttgccggcgtggttttcgccgacgcctcatccgccggtggtagccctgcaagtgcaccggctggagcttctacaggtggcagtgctgctagttcctcccctacttctcagcctaccactccaagtcttagcggcgatatccctattgatgatccataaaatgattgtcaagaaaatgccgacaaaacattaaacaaattaccatttaataacatggtgggatttttgaaaataaataattagttctataaatagaatgttatga

SEQ ID NO: 247035 - DNA, 143 bp, Gossypium hirsutum
gtaaacgaggcttaaaatttaaatgtgtattgtaaaaatatagacccttaaagggctaacctcgctcgagtccagatccatactcgccaccgccagcggcagctcccgacgaagttttcctgacggaatgaactttacggcac

SEQ ID NO: 247036 - DNA, 365 bp, Gossypium hirsutum
aattctttcccaatttcatgaattcgggaggtattgcacgatagaactggcatcggcacaaattgcatggagtcaggatcgaagataacctgtaaatgttgctgccacatttaccatttcactgtgggtattcctggaaattcaggggggtagggtggggggatctgctgattgtaatgctatatatatagagggatatatattcattagcctccggtgtagatggtcttacaaatgtttggaaaaaggaatcgtatcctgcagatatttcatggatgggggggctttggcaaataatttgttcttataggtgcatgtaaatagttttcccattattatttcatccttcagtgtgttcattgttc

SEQ ID NO: 247037 - DNA, 182 bp, Gossypium hirsutum
agaaatgcagcaaatttaacttttaatcatgtctttgagggaatagatcgtgtagtaattgtatggatgttgagtattgagacagaggcaagggtttcgggacttgtaaattccttcatcatatcgaaaagctctttcgggagaactcagattgaatgtaaattcttgccaattttctcttc

SEQ ID NO: 247038 - DNA, 193 bp, Gossypium hirsutum
aaaaaaaaaaaatagggtatacggtcgcctgatttcagggggctgcccttcttttggccaccatcttccttgcgaatgctttcaccgttactcatttttttttggcgtgccgtaaattcatttaacggccggtggtgtaataactttgaggttggaaacctttggcctttcccacactttctccctttgaatg

SEQ ID NO: 247039 - DNA, 330 bp, Gossypium hirsutum
attattttttgggtttatatttaatgggcctgccaaatttgggcctatacagacggttatagcttaaaaatgtttgttcaaattaactcaaaaataattattatactgggtgaaataagttcgtcgcttaaatatatctttattttaaaactgtaacaaatgaacttaactcattgggttagaaaatgcattgatgaatgggacaacttggtcgggccatatatacgatccaagctgacaagatcgttcctacgaggttataggtgtttgatagagtagctgaatgtaatatactggacatgggagtaaaacggccatacatgaaaaacc

SEQ ID NO: 247040 - DNA, 415 bp, Gossypium hirsutum
gcatcggttacccaaacggtgttcgaccaaaaccccgttgccattttcggggtttccaaggttttgttgcctagagagatttttgggaaagactcggctggagtaacatcgaagccggggaatgcggtggtggggacgacagttcagccgccggaaacatctccatcaccggagaattcggccgggtttagtggtccagcgtcacatctttcatcgccgccgggatttcgtgaagagataacatcgaagggtggaagatatagaatgcaaagctgcattgttactgtatgttgtataggattggttctagtggtatgagagcttcagccttgaaacctatttactagcttcaattgggttgaattccttgtataatttcctgtatgagatgttggtcaacaacttgtttttttta

SEQ ID NO: 247041 - DNA, 420 bp, Gossypium hirsutum
agatatgaagactgagattaatgtggtgctgccagttcttgaagcaagatcagcagaagatattgatttggcttttaagcaactgcatgaaggagctgatgttgaggaagtaattgttccaagtatgattgtggaaccacaggatgacacagataacaaatcaaaattacctgttgtggaggcaagatctctgaaggaattacataatgctgtccaacaaggccgggaatctgatccagctaagctgccgcattcttcaggtgtaaacaatgctggtggatcaagaccttgaaagtaagaaggcaaaaactaatgactcaagttccagctctagctctagctctagctccagtgataatgaatgaaagcaacaaaacatagttcagaaagttagaagagagtttgtgggttcaagtttct

SEQ ID NO: 247042 - DNA, 188 bp, Gossypium hirsutum
gtagaaccccgttgaagctttttagtcattctgtttcttcaaatgaaatctctctctttttgtcaagtgaaaaatatacatattttgtacttccacataaggaaatgaaatgacggtaaagaagtacttatgtatcaaaaatgaagggaaaagaaagataaggttgttcataaggtgcaggtccaatc

SEQ ID NO: 247043 - DNA, 321 bp, Gossypium hirsutum
tcggccacgccttccgccaaaccaaaccaaaaaaaaaaggcttttgaaaaggttggagtttggggtttcaaagtctccaacatcctcaagtgaaattgcattaagtaaggcagtggaagagcccaattttttagggaatatacatatcttaaacatgttggaagatgtgaatgatattccccattcggagatttgtacatggctccaatgtattggattttttttagtattttatttccatctgagtaaagggacaattagaactattatccagtgtgttatgtagataaataatataaacggcatttgaccctttgtttc

SEQ ID NO: 247044 - DNA, 188 bp, Gossypium hirsutum
gacaactgtaatttgttttccctttgtgttttccaaatcaaaattcactgcttgtatgtattttgtgttacctttctgaaagagaatgttcagaaagttgtgtttttaccataaaaaacttgttaaacacaactcgttggagtactggtttttgatgtttaatgggacggatggattaatctggatgc

SEQ ID NO: 247045 - DNA, 374 bp, Gossypium hirsutum
ggtgtcattgtagagaaaggaaaacatgacaccttgataaatatcaaagatggtatttatgcttctttggttgcacttcacatgagtgcttccgcttcataaaactattttctttttttggtaaccataaggatcattttcttattcttttctctgctagcaaatctgatcttataagcattgtatcttataataaatttatggttaaattacctaaatggtccttgtactataggttgaaatgtctattagaaaattgaggaatttaactttgaagcaaactgttaaatttacttgatggataatttggtcttactattgcatataatatgggaataaaatatcatgaattcaatgaaaaaaaaaaaaccccc

SEQ ID NO: 247046 - DNA, 328 bp, Gossypium hirsutum
cccacgcgtccgacaaaacaataacaaaaattttttgtcttatgaaaatgtttgagttttgagtgggagaagtcttcaacatccttaagtgaaattgcattaggtaaggcagtgaaggagcccaattttttagggaatatacatatcttaaacatgttggaagatgtgaatgatattccccattcggagatttgtacatggctccaatgtattgtattttttttagtattttatttccatctgagtaaagggacaattacaactattatccagtgtgtaatgtagataaataatataaacggcatttgaccctttgtttcattataaa

SEQ ID NO: 247047 - DNA, 166 bp, Gossypium hirsutum
caccttttgaagactgttttcccttttcatcaacaccataaaacttataagtgctaggaagatgctacattattcggtaccttactttgttcgaagtgaggcatattttgtattattccggtatggatgataaataaagttgacaaaagtagctttttacttgacc

SEQ ID NO: 247048 - DNA, 288 bp, Gossypium hirsutum
cgcggaatgaatggcccgaccgacccacgcggccgggcattttagcggatattactttgctttctacattaagaaaagacagtaactctacaagatactcgcggtacgcgagcctctaagcgtcatatatgtgcagccatctggagattgcgaggcagactgatacttggagataactattagctccaaccatgcctacaagcgtagacattctatattatataatgcaggcagagaaagtatcaactaacgtactcccacattggttgtttcttatggtaagggaat

SEQ ID NO: 247049 - DNA, 239 bp, Gossypium hirsutum
cggacgcgtgggcggacgcgtgggcggacgcgtgggcggacgcgtgggcggacgcgtgggatgggcttgttgggtggtataattatgtttgggtccctttaacctcttatgtttttcatattttccttttttgaatgatgatagttgtagatattgttaaagtggagactgtatctttgggttctactgccccatttccaatggggtttccaatgttaaattattgatatctatggtgc

SEQ ID NO: 247050 - DNA, 406 bp, Gossypium hirsutum
  unsure (1)..(406): unsure at all n locations
gtttgatcttatttctatataatatgtaattattaatctatatctttaactttataagtagaggtttttgctaataaatcaagtggagagatttcttaagcctaccattacttctgaactatagagtttgcatcgctttccgatgggaaagaagcggtggcaaaaagcagctaatgtactttttatgaagtacttgaaatcaggttccaccagctcatatcagggagagcaaatcttcaccgaatctcaaatgggggaggcgctcaaaactgttggcggcaacgggccagaacctgatcttttattagtatatggacctgccaagtgccacttangtttccctgcctggagaattcgatacaccgagattcaacatatgggacccttgagtctatgaaatatgggt

SEQ ID NO: 247051 - DNA, 385 bp, Gossypium hirsutum
  unsure (1)..(385): unsure at all n locations
cttggatggttatttatcatgatgggtgtgatcttgcttgtgagctcgacgagactgatgcggcacctttcatggccattgcagaacttaataccaagtggagcagaccggaatttcagtctgaggaaaacggggtctcatcgagtcaaggatcctagcccagctgctgttatcccagcaacaacattgcaccatctgataccaacaccggctaaagagaaggcataagccaagaatgcaaaagatgactgcataagcagacaaatatgacaatctgcgatcaacttttgagtcttcagtctgggtactgtttccatttcggagggcatgaaattntttaagatcactctcccattgatctgtttgacatcattgacattataac

SEQ ID NO: 247052 - DNA, 262 bp, Gossypium hirsutum
tgatttggaagctggatagatgctccctgaattttttagaagcagtgacggctcaagggggaaaaggcagaaaccgcggagtttcctgccttaatgtaataggttgggccaattgggccacttttatttctgggctaggcagggtgtaatgggtaccgggtaatttagctgggttttgggtttgggtttaagctagttgggttttaacttttgcgctgtaaaaggattgtttaataaataaacatttatttttttttgtttt

SEQ ID NO: 247053 - DNA, 153 bp, Gossypium hirsutum
cccacgcgtccggttttaatgcattaaagctgtgacagtagttgttgaggtttcttggtattattattatttatctgcttttgagtaaaaactttctttgagttgtatgtttgaatcttctatatataaaagttttctagaccaatttttgcc

SEQ ID NO: 247054 - DNA, 415 bp, Gossypium hirsutum
  unsure (1)..(415): unsure at all n locations
gtcgatctgtcgtacaggttttggtaccggagcactctagtgacacgaggaaaataggaaacctccgcacgacaattagaagggtaacctggcatttcagcccttcgtcattgacacgtaggggtcagattggggagttggagtttattagagccccaatttttttcggcacaatgagcgttgaaatnggagaacattnnttgatggcgatattagaagcgaaaagcgtgagagcccatttttaatgcgcgatgtgccattattgcttgaaaaaacacattttgtttttgagagagaattttgtcatgtaattttgatttcatttggattgaaaaggattggttatttgtagattagagaaatatgtttattttgaagccagccctttttagacaaatcaaagtgaaagttgcag

SEQ ID NO: 247055 - DNA, 408 bp, Gossypium hirsutum
aggacatcttgtggaccgttgctactaccggtttgattcgtcctacaaaagcactaactacaggcctcatccacaagctaatgtctgtatggctgctcctcctatggttccatactctaactggacatatcaggtgactcatccttctagctggccaaattcttttgttggtaacccagtgcaacaggttccatccatggctgtgtctgctcctcaaccccatgctatggtaactactcctgatacggttggggatgctgcatggtatcccgattctggggtaacgcatcatctcactcactcagttgaatctcttggtgataacacgtctcgtcatggaccagttcaccagaaacaatcaagtgatgtttaaaatctttccttcacaatgtcaagttcgagacttaa

SEQ ID NO: 247056 - DNA, 283 bp, Gossypium hirsutum
cttttaccttttgaaagtggaaatcatggagtactgtctgttagtaagttacccattcatgtggatagcttctttgcaccctgatatcagagatcgagtgttctttttagagggtaatcatatgcattctagcattcagaaggttcctgctttggtgcttgactgtgaacccaacatagatttcagcagagatattgaagcaaagagacagtatgctctccaagttgcaaaatctttggatttggtgaaaaaaaaaaaagaaatttcacctactaaagctggg

SEQ ID NO: 247057 - DNA, 301 bp, Gossypium hirsutum
  unsure (1)..(301): unsure at all n locations
gatccttagaatttggtagagatagtgaaatgacctgtttgcaaagaaaacggtgatgttgagtaagaaaaaagggctgcctctgccatggtagtgaacaaatatcggtgatgaaacaaggtaaattgaaaaatttcccatatgaattcaaatctcagtgttatctcaaggaattcgccttattgtcaatgaaattaaattccatttgtagaattatattaccgcanaaaaaaaaaaaataaaaaaaaaaaaaaaaataaaaaaaaaaaaaaaaaaaaaaaaaaataaaaaaaaaaaatat

SEQ ID NO: 247058 - DNA, 305 bp, Gossypium hirsutum
  unsure (1)..(305): unsure at all n locations
gttgagttgcctgataagactagtttgaactacaattctaatggaattgttttgtccctagacccttgtatccagactcaaactgcaaactctttcaatattttgataatcctaaacgttgaattataaaaaaaaaaaaaaaaaaaaaaaaaaaaaaaaaaaaaaaaaaaaaaaaaaaaaaaaaaaaaaaaaaaaaaaaaaaaaaaaggggggaaaaaaaaaaagaaaaaaaaaaaaagaaggaaggaaaaaaaaaaaaaaaaggggaaaaaaaaaaaaaaaaaatnanggggggcgcccctttt

SEQ ID NO: 247059 - DNA, 149 bp, Gossypium hirsutum
  unsure (1)..(149): unsure at all n locations
taaaaccacccccacatttaatgggttgggtttattattaaagtcgcactagccacacctacatttaattntaaatatcttcccacacaaattttggcctatacacttataactttcagtactaggaacccacgcatcaataaccatag

SEQ ID NO: 247060 - DNA, 296 bp, Gossypium hirsutum
  unsure (1)..(296): unsure at all n locations
gtatttttcatttttcattttcacgcctaataaaacagatgatttaagaaccaaacaaaacaagaggaaccatcaaagatccaaacttttcctttcctaacgactcattctgaaaggaatctattcttatgatggcggaggaggatgataccagaagtggtcacaccacaaagtcccatcccgattttattttatttttcttctcctttctaagatctgttaataagattaatttctctttatcgatctgtaaatttcaattatttcttttctaggattngaaaanaaaannnnaa

SEQ ID NO: 247061 - DNA, 179 bp, Gossypium hirsutum
gtttgtagttgggcctaggtttagttttaattttcagtgatttgggtttttggttgttaattcgtcgttaggctggaattaggtacttgggctcgggctaaaaattgggtctacaatcaacattaatattgttttttatttttcctcaatagtttttgcacacaaaccaaaatgtatgc

SEQ ID NO: 247062 - DNA, 185 bp, Gossypium hirsutum
gctgagtggtttggttttaatagttagggttgagttgtaaaaggacttggacatttaattgatttggtttatgattttatttttattattattttttgttttgattttaggtatgggcccaggcaaatttgggcctatacacttataactttcagtactaggaagccacgcatcaatagcaattg

SEQ ID NO: 247063 - DNA, 221 bp, Gossypium hirsutum
ttttttttttttttttttatgaaattggttaacttgtggagaatgaagggagagtatttttgtactgtgtaaaattgtttattttacatttttttttcaatttcgtttacgattgttttttttattttatacaaattggttatttaacaaagtggcggatatatatataattgcacttattgtaaaatgtaaagttttaaatggaatcaatatttttgttt

SEQ ID NO: 247064 - DNA, 365 bp, Gossypium hirsutum
cccacgcgtccgaaacaatgaagctgcaggacgtgctgagtccttgccaattttgctatgccatggagaaggtgatgatgtggttccatataaatttggtgagaaatcgtctcgggcattgacttcaaagggatttaaggacatgactttcaaatcctacaatgggcttggtcactatacaatcccagaggagatggaagaggtatgtgcttggttaacttcaaaactggggctcaacggtcgatccacataacgaatgtaatgcggaaatgtttatgcattacttgaagcaaagttgttctggttgtgggtgtcatacatggtattgtgataattttgcataccttgttgtagttgatgttttc

SEQ ID NO: 247065 - DNA, 345 bp, Gossypium hirsutum
  unsure (1)..(345): unsure at all n locations
gcaacattgggtccttgacattgaagctgacgaaagatgatttgaaagaaatgtgtgatgcagtgccaattgaagaagtgaatggtgaaagagaatatgatgtttttgctcagtattcctataagtttgcaaatacccccaaaaagtgattgtaaatgtaaagctaaattgctagaatcgaaaagcttatgccgatccatgaagactaatcttttcgagattcatgattgttccatccaataatattatttccatgatttgaaattgagtttgcaatatactttacagttgtacaaaaaacttgttatacttttccagattataaatgctttatattactccnna

SEQ ID NO: 247066 - DNA, 234 bp, Gossypium hirsutum
cccacgcgtccggtgacatctccctcgataggatgcggctataagtgctttttcgaaaacaccaggtgccaatttggctgcaccccctttgatattcgaggccaatcagcccgtgttaagacctagagggatatatatatatgtgagcgcgcgcgttgtttgtttattattaagtgtttcttattattattacaaaacaaaaaacatgatgatacacaatgaataatgtcttcg

SEQ ID NO: 247067 - DNA, 386 bp, Gossypium hirsutum
gggttttattaatttatcctattttactactctgttttatgaaaaatctcattagtcaggtgtcaaaaaaaaaaaggaaaaaagaaaaagaaaaaaaaaaaaaaaaaaaaaaaaaaaaaaaaaaaaaaaaaaaaaaaaaaaaaaaaaaaaaaaaaaaaaaaaaaaaaaaaaaaaaaaaaaaaaaaaaaaaaaaaaaagggggcgccccttttaaagaaccaaattttactaccccgtccatccaaaataaaaatttttttatggggccaccaaaataaaatcacctgcccgctttttaaaaccggtgtaattggaaaaaccttgggttacccaaattaaatccctttgaaaaaaatccccttttcacaagttggcataatacaaaa

SEQ ID NO: 247068 - DNA, 403 bp, Gossypium hirsutum
cggacgcgtgggttttctttgatgatagtgctcgaaacatagctagcggcaaagcagcagggcttcacacagttgtagtaagctacataatttggttttcaatctagaaagctgcctataaacgattcaatgggtaacatgggagaatatgatggcaggtggggaactcaacgctggtgccaggtgcagatcatgccttgcgtagcatccacaacatcaaagaagcaatacctgagatatgggatggcgatgaggagcagatggaacaagttatacaagcagctgctgttgaaaccgtggtccttgcttagatttcagttcaaattgaaaattagagaggctgcccttgttatattattatggacatgggaagcattcatcttaagcttattaaataaatgac

SEQ ID NO: 247069 - DNA, 259 bp, Gossypium hirsutum
agcaagggaacggcaatgggaggtgacgtaaacacgaacgagagaacgacatcaaccatctatttggatatgtaccaattgatgacgcttttgacgattacgacaacattaacactgaccctacctagtgggggaaggaagaagatactcaaaaagaattggtacccgttggagcattcaaatggcggaaggggcgagttgtgagcgagtcaactaggtttcttgagaaagcgcccaagatcgtgaatgtgaaagtgag

SEQ ID NO: 247070 - DNA, 345 bp, Gossypium hirsutum
cccacgcgtccggatggttccttttctgttcactttagtaaaccagtatgccgacgtatgcagcttgcaacaagtagagtgagtcccctctattgaaatacaatttaaacccatgtcgaggtagcagtagagaaggtaataaaagcagtgggtgagagtcttaaggttgatgaattgtcgataagggttggaggctttggcggctactcaaaataaacttggaaactatttcatgttccaacttccacctttcaactacgttctaacttccatctttcaactaggtgtcatctgtactattaagaaaaaattaaatgacttaattaaaatcattagttattatgg

SEQ ID NO: 247071 - DNA, 412 bp, Gossypium hirsutum
actaaattggttaaaatcgggtcggttccggttttattaagtatggttaaatcgggtcatatgacgggtcgggtattccttatcctgtgtaacttggcttcgggttcggacgggcgggctgcgatgttggattcgggtgcggtggattgtctggtgaaattgttgaaagggagtgagttggatgagccgactcgggaaggttgtgtagcggttttatatggactgagtcaagcagggttgaggtttaagggactggctaaggctgccggtgcagtggaggagttggcgaaggtggagcggacggcaaatggtctgaccagggagaaagcaaggaaaatgtcggagatgttgaaaagggggagtgaggaggagcaagaggaagtggactgggaggcattgcttgactcgggat

SEQ ID NO: 247072 - DNA, 404 bp, Gossypium hirsutum
cccacgcgtccgctcatttccccatttcaaaaaccaaatcaatccggttcttctctccatcttctttccggaactggtgcgctgtgactcctcccttccctcaccaggtatgatgcttcccttttctctagtgctcctttcactaggttatttgcttgaacattttccgatctaggaataaactagaaaataacatcttgaagactgtctctttttctctgagtatctcgaatgatcgctccaagaacggatttgtctacttcttgcgatttacatttcttaataactgttttcgagtctccctttattattactgaaaataaacccattgatgttactaacttgatggcctctaaccctgtatgagcttcggctacgaatgaggaggagatattttcatggag

SEQ ID NO: 247073 - DNA, 194 bp, Gossypium hirsutum
ttgtcccagaagaagatgcattcggtttactagtccaaatatatatatttaaaaaatgaatctgtgagatggccctgcaaatgtacatactttattatgggcagacaatctccttttcctccccgtttttccttgccggagtggaagaggaagtgaaatgttaataaaacttctctcttctaaattgggcttca

SEQ ID NO: 247074 - DNA, 258 bp, Gossypium hirsutum
  unsure (1)..(258): unsure at all n locations
cccacgcgtncggaaagaggtgccgcagactgcgtcggagactgngatgtcgggttggctgaggaagaacgtgcangaaggaaaatatgtagtggataaagcttaagcttaaatggttgaaaatattgtgaaaaacaaggctattaaattgggtgatgagctggtcttggaatgccaaccttaaaggcttggtgggagaaagaaccttaaccgaaaggcttacttggaatgcttggctttgtattggaaggtaaagga

SEQ ID NO: 247075 - DNA, 254 bp, Gossypium hirsutum
gtttgtcggcggcatcttacatcgggcaccttgatttgagttacaaccacctatgcgggcggattccggcgggagcaccgttcgatcatctggaagcatcctctttcatgtacaacgattgtctttgtggtaaaccgcttagagcttgttgatgacatggttaataaatttttatctaccgcttatatctattgtattattggaatgataatgtaaaccctacttaaacagaaattataaaatataatttactt

SEQ ID NO: 247076 - DNA, 332 bp, Gossypium hirsutum
  unsure (1)..(332): unsure at all n locations
ctctccctgaaatcgcttgaattttttttctcgtgccagtcgcgcgacaggaaaataaaagacgtggttagtaacggcgagagctcctgtaagtggaagcgattttttaaactacggtcgatgtacgtgaatatacttcagcagataacctctactcttttttcaacatttgaaacattcagtttctttttgttgttcataattttgttactgtatttttttcgctgatgaatcaacacccgaaaaaaataaatcaatttatganttaacaaanccaaaacaaaaaatcaaaaacaagaaacactaaaaaactctgggcgctgaatgactgc

SEQ ID NO: 247077 - DNA, 307 bp, Gossypium hirsutum
gaaggatatgaaggagatttacttcaaacagttttttgaatacacaatagaatgagttaatattaggtttagcacactgactttttattctttttcaagttttattcatgtatagagaaaccaaatgatagggtggattggtccttaaaccaatgtttcattgggagaaaaatagagtttggaaggtaattttagccacctgagacggattccgactctggcggctataggtgttccggttgaagttctaccggttgccgaaaaggctacattgttttattggtttattaaatttatcgcttatatt

SEQ ID NO: 247078 - DNA, 384 bp, Gossypium hirsutum
  unsure (1)..(384): unsure at all n locations
agttaatctaaaatcaaattctctaatagagtcccagtaggactgtatgctcatccaaagaagagatggtccatgttcaaggtttctcagtcattgcgaaccatggctgaggaaaatggtttatcagaagagtttgatgatttccctctgattttcacagaccaagatgatgaatcaatatagattgggagtaatgttaattgctttttatttatgtcagttataaatagttgtataatatcaataaaaatgttaaacaaccgtaggttcttagatcttgaaaagatctatttattttgcaccttgcctttttttttttcttctaatgaaattaatgctgattgcttgnccccnnnananannnnnnnnnnnnnnnnnnnnncc

SEQ ID NO: 247079 - DNA, 268 bp, Gossypium hirsutum
attttatttgcagactcgttttaatggaagtgtttccaatggaagattactgaaaatctagagggaaaaagtgtggttgatttagtccacagattcaatctattttctgttgatcatactgataggacttgttgatgacatgttgaacaaatgtgtgttacattttgaatgtgatcccaagtgccagcgatttacaaaggcttctatggtctgtgaatcacacaacattggctaatcttcttgtaaatctttttaactgcaatggctg

SEQ ID NO: 247080 - DNA, 405 bp, Gossypium hirsutum
cccacgcgtccgccgatctgctacctcattggattcgaactcggaagtatcagcagctgagtcggtgggcacaagggggaccagccatttcatttctggtgaaagttgtggaaatggaaatgaaaagatacccttcattgatttccttggtgttggaagagcttcttaaagactagcggaggttttttgcttttggtaattagaactaaagagatccagctgaaaacacaagggaaataaaagaaaaaagagcaacattagtttgctgaaaacttcgttatttagattcaaatttatgtaagatatgagtatattttaaagttattttgtgtttagaagatttttttaagatgaaagtattgagtttgccagttgttagtcaagttacaacagggaaaacaacgc

SEQ ID NO: 247081 - DNA, 122 bp, Gossypium hirsutum
gaaatgattcactgttaactttgtgatctgtgtataaacaaacaatttctatccatttgttcggaacaccaaaaaagggccacgtttcggttctatctattttcaaaattaggtttataaac

SEQ ID NO: 247082 - DNA, 453 bp, Gossypium hirsutum
atctgtttcttcccacatcggtggatccaaagattttaaatttttaaaaaaaaaaaaaaaaaaaaaaagagaaaggtatttttgaaaggggggaaaggaaaattctaaaaaaatactaaacaaaatgctttctataaacatatacaaatcatgctttctttctttttctatcccgtttatttggtaacctttttgaccttcttcataaaaggcaatgttggggattggcaaaaccattttatactattcatgtctaatgttctaaatatattttttccatatactaaatttatctggtttgagtcttcaacttaacaatggatcatctttattgactaaaatcatttgtctttcttgtaataattgagtgttcatttgcaactgtgtttggttgcgatgctttgaatttcttgttcaaagatccaaacttgttttctttaaggtttttttttt

SEQ ID NO: 247083 - DNA, 167 bp, Gossypium hirsutum
cccacgcgtccggaaatattgatgtcaacctcattaaataacgatggataagctcattgttgacatgacaaatatcataggccaaactgtgttgttgtcatctcttctccaattatatatatgtactaaaataaaaaaggaaattgatcatcaccatttttactatt

SEQ ID NO: 247084 - DNA, 180 bp, Gossypium hirsutum
ggaagttataatcaattatacagtacatgatatgatcgaaatgccggaattcgacacaaactatatgcagacaaataggtgccatcttgtagatgaacatcaatttttttttttttgtgttctactctattcttatgtttgaatgataaagaagaatttacttttgttcattatagtatt

SEQ ID NO: 247085 - DNA, 427 bp, Gossypium hirsutum
tggatagctcagggagtgctgttggaaggaaagatagtggaacagttccaccattggataaaacaggagttgatgaaagttgtatcattgtgaatgaagctgaacttcattgtcatcctcataggcaaggcaaacacagaccttaccagaaaaagattcgtgatgctatttcttcacgaatgaggtcagcaaggaaaatggagtacaaacaacttgctaaatggtatggggatgttggaaaatgtgatgaggactccaaggggagctcaatgtctgcacaaacaagagaggttacaaggagatcctgataaagagttttattttaggggttgttccaaaagtagtaaagtttgttttattagtatgtgacctgaaaaaattaagtgtctatattctctatgttataaatgcaaatccatatgccata

SEQ ID NO: 247086 - DNA, 395 bp, Gossypium hirsutum
cccacgcgtccgcctccccgttggaagaatcagctcttgtacatttaagtttctttagtgccatagaataagaaaaaaggttaggccttttgcacaggagggaaaggcaaaaaaaaaaaaaaaaaaaaaaaaaaaaaaaaaaaaaaaaaaaaaaaaaaaaaaaaaaaaaaaaaaaaaaaaaaaaaaaaaaaaaaaaaaaaaaaaaaaaaaaaaaaaagggggggccgtttaaaagaaccaaagttaactacccggggatggaaaagaaaaattttttttatggggccaccaaaataaaataaacgggccggggtttaaaaacgtgggaatgggaaaaacctgggggtaaccaaataaaatggcttggaaaaaaatccccttttcgcaagttgggg

SEQ ID NO: 247087 - DNA, 237 bp, Gossypium hirsutum
tgaacatattgccttgcagtatctttagtaaagtttgaaaacataggtgactgatgttcatgtaaatgaactataattatgacagaggtgagtgctcttattattaaacaatagtataattatggtaactaaggaatatcgaattggcgaaggttgaaaatatcaataattattattattttattatttagtccggaaaaaaaaaaaaaaaaaaaaaaaaaaaaaaaaaagggcaaa

SEQ ID NO: 247088 - DNA, 247 bp, Gossypium hirsutum
cccacgcgtccgcccacgcgtccgcaccggaataaagttacggagtattaccggagttaccgatttatttattagatattttatttcatctaacgttcatatttgaacaaattaaaatcaatcatattgtgccttaaacatacttatttttctcgacatgttttatttgaatttattacttgtctcaatatacttaatttccttgtatcaacatatcaaaaataatcacatattgacatatcatgat

SEQ ID NO: 247089 - DNA, 254 bp, Gossypium hirsutum
cgcgtccgatccttatgttgtcatttttttacaatttatttaaaagattaggaccgagaactccattgtggatgtattgggtggaacagtattgtactactactagtagtttaacttatttagtagctgtataaagctgcttcttgtgcataaaaaaaaataaaaaaaaaaataaaaaaaaaaaaaaaaaaaaaaaaaaaaaaaaaaataaaaaaaaaaaaataaaaggctgaaatttaaaaaaggggcggccg

SEQ ID NO: 247090 - DNA, 313 bp, Gossypium hirsutum
ccggaacgaccggctcgacccactcgttctgttgtagatcgcgagcgtcatatactaagtatccaaactttactgccacattgttgatggaggcaaataggatcttaaaggtcaagcagttgtggtaatggtcccattgttgctatgttttgaactttgtatttgttactttttctgtgcaaatacgcatgcatgttcaaaacttgagtttgtggagcatttcatgcatgtattttagactctggaatgttcaactatggtggttatgttgaataaatgttaccaacataataaaatattttcagtgggattt

SEQ ID NO: 247091 - DNA, 401 bp, Gossypium hirsutum
  unsure (1)..(401): unsure at all n locations
gggtgttgttggaaaattctggtggaaatttttgggcttctactgattgaaacttactccttcaatgtgattcttcactgtcgtaagaagtaatattttttgggaacacaattgagctcaaattgaatttacttccatagaaaattttcatagttacaactttgcctaattttttgactgctctattttcaactgtttgttaacatttcagcaggtttatattgcttattcaattcagtccataactgttgtcctcccatatcttgtgtgtttatgtttttactggagattgagacctgttctctcatgataatttagtggccttgtagcattagcccccaatccatatgtaataaaaggaaaggactgttcacatgaaaaaanaaaataatatttttttt

SEQ ID NO: 247092 - DNA, 175 bp, Gossypium hirsutum
taatgtatacatacatatatatacatattttcccaggatgatgaaacctggcttagaataagttttatgagttgtatatggtgatatcaatcttccatgtttatttgtatactaaaacattgtttaacaattcattaattgttgaattaacataaatacttatttattgtcaatg

SEQ ID NO: 247093 - DNA, 406 bp, Gossypium hirsutum
ccagcttctagttcttcaatgcaagatgtaattatctgaaagaagccctttttcacattgatgtgttactccatttggtttccatgctgttccaaaataaatgtcttctcagctcaaggatgctgtacttggatcttgattcttgaatggttataactgctttgagttgaagaaatggaaaaaaagagggcttagaagatgtgagcatggattgtaattaataaattaagatatatgtttttatataggtttgtaaatgttaagggggagcaatagaaattcttaagaggggtagcaaagggcatttatcctatccagatttaatccaattgatttatgtaataatttttaaaggtgtggtttaacatatctgaaattcgaatttcaatatatgaaatgctttgtg

SEQ ID NO: 247094 - DNA, 400 bp, Gossypium hirsutum
  unsure (1)..(400): unsure at all n locations
cggcccggaacgaccgacgcgaccgagcacgcgtncgcccacgcgtccgcccacgcgtccgttttacttcagtagttataatccggaccttggttggccattgatcctggataatttcgtagagtggatgcagtcgaagcagacctgaaattatttggtttggtcaacttctcagctgtaacctccatctatctatataaaggctggtgctttaaagtttaaactcccccttttctttgctccctttttctagagccttatgtagatttcccgatagggcataaattagtcaacttgaaagattttgcaagcacaccattctttaatcaaaactgttgtgaataatttgttgtcaggaatgtttgtattgctgatttttttttttttgaaaacatgaaag

SEQ ID NO: 247095 - DNA, 410 bp, Gossypium hirsutum
cagcaacccttctcatgccaggtttcgagatgtcagagatcaagctatatcaatatagaggaggatcagagttgttggtggaagcgggggaccaaagacgagtcatttctctcccaccacaaatgcaaggtaaggtaggaggcgccaagttcattgaaagaagtcttgtaatcactattcgataaatgctttgtgatcaattttttccacatttgagtgtgtcttcttgaaacgatagtgatcaaattttattgtgaggggtatcccttcaaattggactcgttaataagccacaggtagcaagatgaaccaatctgcctttaaaggcccttgattttgtcccttgcctccacctcctttacacaagcttcatttatcctctcaaaccattatgattccttaaatgcaaa

SEQ ID NO: 247096 - DNA, 231 bp, Gossypium hirsutum
aaataatattcgagctgatatcaagattttgcatgttattgaaatacatgttctgcgatgtcatgtatctgtaaagtctttgtagtagtttcgtgaaaaaccgaaactgacctatacgagcttgtgatccgaatttcatcgatatgacatctaaggtttagggttatcttcgaacgcggatcatatttatttcaccatttaaactttcagtaatgagatggattttggttt

SEQ ID NO: 247097 - DNA, 329 bp, Gossypium hirsutum
ccggcgccaccgtcggggaggtcatcatacaaacacccatgtattgcgagggtcattttgtaccaagggactcactgaaagcctgcaatctggctaacatgttacatgaactatatgggtgcacattcatatgacttctatggaccgtttgcttattgcagatttactatggggggaaaatcttggtcgcatccctgaaacttagtcaatcatttggatcacttttcgggtaatcgaccttttccatgctttttaggctttcgtatgccacgtccattccgattatcagatcttacctgatgaatgccttagcagttggctttatatat

SEQ ID NO: 247098 - DNA, 191 bp, Gossypium hirsutum
cactttatagctctggtcttgcgttacctaaattcaatttattggccgtttttttacaacgtcttaactggaaaaacctggccgttacttaaaataatcggctcggagaaaatcccgcttttaccagctgaaatcatagcgaaaaagacctaactgatctgcccttacaaacatttttacaacctgaatgg

SEQ ID NO: 247099 - DNA, 413 bp, Gossypium hirsutum
cccacgcgtccgctttgattcccattttatgccgagcacttgaacatgttgcagagttctgaaggcgtaatttcaatcgttctaccttgtacaggaagtatttggaagatccttgtttgtgggtagaatcgaacaccactactcttagcatactctcttcacatgctgagatcggagttggcttccttctaatcatttctttgttctcgtggcaacgcaatatcatacaaactttcatgtactggcagctattaaagcttatgtaccgtgctccggttacaactggttaccaccaaagtgtttgggcaaagatcgggaggacggttaatcctcttgtccagcagtatgctccgtttttgaacggtccggtttctgcaatacagcgatggtggctcagataggaagtcaaaaat

SEQ ID NO: 247100 - DNA, 247 bp, Gossypium hirsutum
cgggacgacccaacccttccggtcttgaaccccaaccggccgccttttttttttttttttttttttaacccaaaaaaggggggaatagaaaattaatggatgcctgttaattattataaaaagctttacctttgatttttgctaagttaatatccatccccatatttggggcccaaatggggatccccatccttttggtccatttgaaaataaccttcttggggaaccaatcctgcaaaattaacca

SEQ ID NO: 247101 - DNA, 309 bp, Gossypium hirsutum
aagctgatatgagacgagtgcttcgggagatcaccaggcaacgctcccgttcccctctcggattagctgagagacctatagctgttggccattcctagaaccttccatcaccttgtagaagcaaaagtaagaggaaatagttactttcatgcccaccaacagctttttaggattagattggatttttcttttcttttttaattacgcccctgtttatggatctatctgttgtagatatgtttatggagaaaacacttcctctgtttcttccctatattaattaataacttaaaaggtcttgttgtttgg

SEQ ID NO: 247102 - DNA, 396 bp, Gossypium hirsutum
  unsure (1)..(396): unsure at all n locations
gacctgtaggattttcacatgttgaagtgttcagccctccttcagctaatgatatgcatgctggatatcctcgttttctgtcaaagcactctcacttcatgccacatacaacacaaaattatcctagccgtttggggcagcaaactgctcagcggttcaatcctggtagatccactggtgctcggggaggcgaatggaatcacatgaaagtgcagctccctcctagctttaattctttgggcccacgttctcctggaaatagtacattcagtagtggcatgccgtgggggcgtagggccaaccatcctgtctcaaatattccatcaggttctcgtggaaaaaaggactatggaaggattgcctaatgtctgaaatcaacttgcgtgngattatgta

SEQ ID NO: 247103 - DNA, 198 bp, Gossypium hirsutum
aatgaatttaacatacaacaatggtattaggattccatgtgagtaagtctttataatacgctcgaaatttatatcgaggttagtttgtgcggccaacagaatagaaatccttttttttttttttgtatctatactggatagctaaaccctgatgtagaaaatcaagtgatgtttcaataaagtactgccatttttgtg

SEQ ID NO: 247104 - DNA, 308 bp, Gossypium hirsutum
  unsure (1)..(308): unsure at all n locations
cggggcggaccaacccgtccggccgcgactggcaacttaagccgttccaccaaaaagtttaccggtattaaaccatgagaagcaggtgtgtcaaatgtcagccaattttagtttctagcagagaagcagttgaaaaaaatgctctttttaacctttaggttgtagagaagaagcatgtaatatttgctatctagttatttcaacacctttagagcttgaccctaagtaattttaaaccagttcaactaatctctaagaggttttaccattgattctgtaaatctatgatcaaatgagnttgaaattag

SEQ ID NO: 247105 - DNA, 167 bp, Gossypium hirsutum
cccacgcgtccgtccaaacgccgcttagctttttaaattcctcactaccttatgtacttgggttgcttaattgtaatatccatgtcagtataccggtgacatgaaaacatcttgcaagatgatattatggctaattagtactgaaactaaaagtttctggctgctgc

SEQ ID NO: 247106 - DNA, 306 bp, Gossypium hirsutum
atatgaacagaagttgaaaaagggaaacgatggcagccaacagctactattttataactgttaaatgtgtatgctatgttttgttctgctcactggaattcaggtttatgtttgtttgatggagtttgagtgtgcagtctgaggcgtttttgtacaaaatttctaaataaatgcgagctgtcgaaggcgtttttgtataaatttctgtctaaataaattgaagaaactgataagtccattttaagaaacccaagcttgttcaaaatgttgagtattcaaacggtgtatatgaaatttaggattgac

SEQ ID NO: 247107 - DNA, 409 bp, Gossypium hirsutum
ctttgtgaagatctaagattggtcccttgtgtgttttttttttttgcaataatgtgcagcatggagaagagtatatacttatatatatatagagagagagagagtactcctcttgttcttctcttttcattttgagcagcatttgcagcacccctaccggcatcaacttcgcttgtaattttcgtaagctttttcttcaatggcctttattagcctatagctttagtctgagttgtacaccaccaatccttaatgagttcaagatccatggtatatggacacataattctaagaacaaaccaatgctctcttatgatccaaacaatccttgcacctatcaacggtgtatggattacttgaatcataacgagacattgtattgtcattagcattatgagcccacaatctg

SEQ ID NO: 247108 - DNA, 281 bp, Gossypium hirsutum
  unsure (1)..(281): unsure at all n locations
cggacccttggccggacccttggccggacccttgggcaaaaaatgaataatccagtgtgatacttgggtttgattgttgaggaattgattgtgtatatcaagttgaaactggcaaaaccattagcattgtattcgaagggataaagtgtgatgtacatttattagtgtacgaattgatggagatggaaagtctcatttatatgatttttaaagtgaaattaataataccgaatttgtactttcatcttatctgctatattgntatttttacctgctttttt

SEQ ID NO: 247109 - DNA, 205 bp, Gossypium hirsutum
tgttgatacagctacagcaaactgcaaggttaaggaacatattgaagtctgaatcctttgctgagttttcaaatattgagttcatatatactttgcaccattttgtagatcaaatcatcctttcttttatataagaattatgcatcaattgaaaggaacaaatggcttttagagattgatagatgccctcttgtctttttgactg

SEQ ID NO: 247110 - DNA, 419 bp, Gossypium hirsutum
cggaagagggtggaagaagctcaaagaaggtaagcactggaacagcaccaaagggaggaggaacggtatcgagaactagaggagcttcaaagacaaaaggaagaggcaatgaaaaggaagaagcaacaggaggaggaagaacgtttaaaccagatgatattactgggaaagaacaaactgcgaccgaagttgtctttcgcactcggttcaaaatgatagaatccgaaaagttgttactctacgttgtaatagttgtgttgtctgtccagttttgaagttgaattctattacggcttgctcagggttcagactcgaacgctggggatagattcgctaagagtgaagctcttgactggttaagttagggctagtttagtattggtgcccaaaaaaaagttttaggttgaaatatattttga

SEQ ID NO: 247111 - DNA, 422 bp, Gossypium hirsutum
cttaatattcttccctataatatatattttttatggtaaaaaaaaaaaaaaaagtaaaagagaaaaaaaaaaaaaaaaaaaaaaaaaaaaaaaaaaaaaaaaaaaaaaaaaaaaaaaaaaaaaaaaaaaaaaaaaaaaaaaaaaaaaaaaaaaaaaaaaaaaaaaaaaaaaggggggggccgtttaaaaggaacaaagttaacgaacgggggaaggaaaggaaaaaatttttaaaaggggcaaccaaaataaaatcaaggggccggggttaaaaaacggggggacgggaaaaacctgggggtaacaaaataaaatggcttggaaaaaaaaccccttttggcaaggggggaaaaaaaaaaaaaggcccgaacaaatggcctttcaaaaaatttgccaaacttaaaggcgaaagggaacccccc

SEQ ID NO: 247112 - DNA, 413 bp, Gossypium hirsutum
  unsure (1)..(413): unsure at all n locations
gggccgaccgacgcggccgcccaggcctccngccaatactatttacatctgcaaggcncnatcntgcaaaggaggtgaattgcgactttttcaatggaccatcaaaacttctaaatttcataaattttttaaccttttatatattaatagaaatctgataaaacaatccacgaattttcaagataatacttaaattaaaaaaatgttccaactcatttataaatacaacctcaactgatagatcatatacatatcatcctatataaacattatttataacaaccaactaaacccgctacataacataacacaaattttttcctttatacaacccttattatattaatccttttaattaactttctttaaagccattacttattgtttacctacattatcaacttgcaattttt

SEQ ID NO: 247113 - DNA, 122 bp, Gossypium hirsutum
cccacgcgtccgcacatcgtactatcaccaaccattgcttccctgttgtgaattgtattaccacacgctatagccgtacaacatagtgtttcccttaataggagactttagaatatttattg

SEQ ID NO: 247114 - DNA, 151 bp, Gossypium hirsutum
  unsure (1)..(151): unsure at all n locations
cccacgcgtccgcacatcgtactatcaccatccattgcttacaagtccacagggccttatcgatttatgtgaggacnacaacatactgtctccctaaataggagactttaaaatatccattggaacaaaaaataaaaaatgcaactaaaat

SEQ ID NO: 247115 - DNA, 277 bp, Gossypium hirsutum
tccggctaactttgcctgccatcaaaatcaaaactgttatgtgttggaagccgattccctatgggtgcacagtagatattggagcgtttcagattcagaagaattatctgtagccactgccaccatatgattttaccttgtgtcgctttagctagcaagctcaattatatctgtcaaggtgtttttattcattgcaaaacttacaagttttactttcagcaaaagtaaggtatttgaaatataatgctaaaacttgaataaccattaaccaagcaag

SEQ ID NO: 247116 - DNA, 283 bp, Gossypium hirsutum
ggaaccctctgacacaaacctcgccaagattgcgagatttacaaggatgggcagtttcaagggaacttgtccctcgagttgtggcaaggacttgattgatcgttgtttagcatcgtggttgactgccgaagaacggcagaacgatgaattcgaggccattaggttgaagctttcccatgctacgatcaaccttagtggagttcaagttcctatagagaccaaatagtacttgattgtgggaatcactggctcatgggtttacacttttggactgggaaaaccc

SEQ ID NO: 247117 - DNA, 348 bp, Gossypium hirsutum
cgtacccaagcccaacgacaccccaaaacctgttccaggaatgagcggagccgttgaagtgccccgaccggagagtgttacggtgtttgaattcgggtccgtagctgctactgcagataaggttactttagccggatattgccctgtgtctgacgacctcgagccatgccgctgggaaattctgcctgccaatggatccgatgctcctcagtttcgcgtcgtcttttgacaacgaaaaaaagtggattgtaagtgggtaaaaacaaaattggtttcaaggaagttgagcgagactctttgctgagattattgtaattttagttaatgtgaaacgcgttattcttattg

SEQ ID NO: 247118 - DNA, 326 bp, Gossypium hirsutum
aaaacatgtccagaggcggattttaaggttgtttcaaatgcggggcattcagccgacgaacggggaatagctgctgaacttgtggctgcaaacgagaagctgaaaagccttgccaagaagaacaaaccttgaaattcgaaagctaagtctacatgttgatttgcctcataaacacaagcagtttgataatcaattgaagagaatttggtttaaacttagaatgttgaatccatgtgcttatataggtatacatatgcatatattgagaaaaatgcaagccatgagagaaataaacctggaaataaaaaacaaaatcaccttttcac

SEQ ID NO: 247119 - DNA, 220 bp, Gossypium hirsutum
ctttttaagaacatacaccccatacactgatcatataacgaaagagaagcccctttagctttggctataactgatgaggcttgagtgtgatgtattgaaggggactttgaatatttatatatgggtgtggtgcagagggaaccttggcttgtcttcggatagcattcaaaagaaagtccaactgatttacaaaaagggaaattccctataaaaacaaaac

SEQ ID NO: 247120 - DNA, 286 bp, Gossypium hirsutum
cataaatgtatttaggaagaggaagaagagcttaatgggtgatcattgtttcctcttttgtttttgtttttaattgaggaaggaatgttattgtaatatatatatatatataaagtgatttaggttgtgtagtgtttttattttgagaaaaaaaaaaataatttttaggataagttaaaaaggaaatatttgattggttttggttaacattcgatgaatgttcaactgatttagaaaaagggaaataccctataaaaacaaaacaggtttgtaactaaaatgcatc

SEQ ID NO: 247121 - DNA, 292 bp, Gossypium hirsutum
ggaacacatggtatgtttaagcaaaactgaaacagtcgggagtaagcttcttgaaaaggaaggcattcagtggcgtgaagaaaaccgtggaactgtactaatcaagcttggcggatacagagagttcagctttttagaatccaatagtgacacggagtaaattaattatctaataccaggtttgcatcatttaccatctgtttgtacaagacaaggatgtaatgtaacaaggttaattagtggttcaaaaacagggatcagatgtttatatgtacattactagaaatccttg

SEQ ID NO: 247122 - DNA, 323 bp, Gossypium hirsutum
cccacgcgtccgcgagctcattcaaattttgggtcttacaatgggattctatgaaagtaactacgaatatttaaatttaatgttttaatttatgagaggggctaaaaaaaattcttgcttttagccatgctattattaattatatatttttttatttttttttaattaatttattttatatattttttttttacttataatttaattattttttttttttattatttttctcattttgtattatctattttttattttttcttatttattattgtttgttttttttatatatctttttgtttatttattttttattttttttt

SEQ ID NO: 247123 - DNA, 226 bp, Gossypium hirsutum
gaccaagccttcgccagcgtccgccctattcttccgggttccacatagtcatactagatcaaagttgtaagcccgtgacgttatatgtacacttattgtaaagccagtactttgggaatcctaagattttgctcttaatgattagatttctaaaatctattctttcaaaaaaaaaaaaaaaaaaaaaaaaaaaaaaaaaaaaaaaaaaaaaaaaaaggggggcggc

SEQ ID NO: 247124 - DNA, 292 bp, Gossypium hirsutum
aatactttggtcttatctgtatgataacaaaaatagtttccaggattagatttataccaagttacttcaactcggattaatttttcaatcttagaaaagcttatttataaacaattacttacaagctgacgactctgtctaatttctttttcttaaagaaattttgtttttaaaaccaatttactcttttggtataaatgaaattaaatgaattaaatgaacttaacgttacttagaaagaagtaattaatattaatattggtagataaatttatcgttttggtaacgtcat

SEQ ID NO: 247125 - DNA, 291 bp, Gossypium hirsutum
ctccggggcaatgcttttggttgtggagaggttgggcgatgggcttgcagaacagggcctgtagtcgaccacctagcttttcatattcaatgccttaattcccccatatgtttttgtttcttcttttttaagtcttggattccgagtaatttgcgttttcttccattgaaaaactatatacggtttgataagatggtttgactggcatttggacttgggttgatctgagttgttttcttttcaccatatccgtttgttttggtttcttaatttttccgtcttgggttctgt

SEQ ID NO: 247126 - DNA, 271 bp, Gossypium hirsutum
cccactcgtccgcccactcttccgattttactgggtcattgttcagtttccctctttaaaaccatcatttggtctccacatgcactttggtcctttgggtctttctaggttcgaatgattttgtgattttttttcttttaaaaaaattgtgtctagattacaagcaaaagtgtctgaatgtcaaacttccaagttattgaaagactttgttacagatgatgaaatatgatgatgcattatagtcaaatagcattgatgtttcttttacatt

SEQ ID NO: 247127 - DNA, 267 bp, Gossypium hirsutum
cccacgcgtccggttgttttctccggaatgtcttattaatagcgagattacgatgaggtttgaggtttgagatgatcggtttatggccggagcttgatggggtgaacttaaatagttgttgaataagtgaaaatagattgatgggatgagaattgagggcatttatgaaaacacagtaattttttagtatgagaataatgttgtatttttattttggttattcttttttattgtttaatttttaggtattgtttttttttttacatt

SEQ ID NO: 247128 - DNA, 293 bp, Gossypium hirsutum
ctgatatgttaaactgtcattccaagctggattttgctcactgtgactagtttgactaatttccatggaagcttgagtttccagttggtataatgtttattgccattcgttcttaaaagacaatgctatgtattttatttttttttttattttacttcatacttttatctagtgtctatgcttttattttctattattgttttttctttttatttttttatttttatatatatattattttttttaattattttttttttattttttttttcatatatttttttttatatttt

SEQ ID NO: 247129 - DNA, 145 bp, Gossypium hirsutum
cccacccgtccgtgattttaaattgaagtcatcagtatgccttcgcaatcgatgtatataggtaatgcaggattcgggatgagattataagttttgtatgaacctgatgcattactcagttgatttattcaaccgatttatggtt

SEQ ID NO: 247130 - DNA, 150 bp, Gossypium hirsutum
cccacgcgtccggggattttaaccatatgcattctatttcctgacattctatagccaaccctaaatgcgcagcctgcttgatttgtatgcgtaaatgctttgtagcctgcctgatttattcacaagaagctaaattgtatgttgtttctt

SEQ ID NO: 247131 - DNA, 301 bp, Gossypium hirsutum
cccacgcgtccgagcttatcaatatatatatatagatctcagtgatctatagtgctttagcccttgtaataagtggtaaaaaatattatgtcaagattgatgaaagccatgcaaatgctaagatttgctttaaaaaaaaaaaaaaaaaaaaaaaaaaaaaaaaaaaaaaaaaaaaaaaaaaaaaaaaaaaaaaaaaaaaaaaaaaaaaaaaaaaaaaaaaaaaaaaaaaaaaaattttaaaaaaaaaaaaaaaaaaaaaaaaaatatataatattttttataaaaaaaaaaaaaatggggg

SEQ ID NO: 247132 - DNA, 258 bp, Gossypium hirsutum
gcaacgtaatgatatcttgatatttgggataaaagtggcgatctcccatggtagaaacatactaaggagacaaatccctttgtaataagttaaagcactatgtaagtttctttatttattttgtatttttgttctttgctttcttttataatatatattgaatacaaagtgaggccatgtagcctgataatattgtaaaatacactgttactttttaagcaaaaaaaaaaaaaaaaaaaaaaaaaaaaaaaataaaaa

SEQ ID NO: 247133 - DNA, 289 bp, Gossypium hirsutum
tgtttttttaaccctttttgctgcttgcgtgtctgctccatcttgcagagtagttgatggcggtggaatgggggttgacagagacgatgggacagaggcggcggctggtggaggcaggtggctgccagtgctagggtttttcctttttattgtttttcattattggtttgggctaggttagtgatttggactgatgtaatttgggtttgggtatttgtatttgtttggttgggttttattgggttctgggctgtttgtttagaaattgggttttgggttgttggttgta

SEQ ID NO: 247134 - DNA, 249 bp, Gossypium hirsutum
gcctcttttcccatcttatcttaaggcatttccaatatgttggcatagtctgtttcctagtaaacctggaattgaactgtcaaggctgttgttcttaagggtgaagttcggttttgaaaagaaaaagtgaagttactgtgtcaaaaaaaaaaaaaaaaaaaaaaaaaaaaaaaaaaaaaaaaaaaaaaaaaaaaaaaaaaaaaaaaaaaaaaaaaaaaaaaaaaaaaaaaaaaataaaaaaaaaataaa

SEQ ID NO: 247135 - DNA, 286 bp, Gossypium hirsutum
  unsure (1)..(286): unsure at all n locations
gtgacgctgtgcattgcgatcgtcattatgctcttctattagtgtnncacctaaattcaaattcatctgggccgtctgttttacatacgtctgtgatctgggataaatccctggtcgttaccccaatcttatatctgccttgcatgcatcttttccccctttctgccagtctgtgcgtaattatgcgaatgagggcccgcatccgattcgtcccttcccaaccagttgcgcatgcctgaatgtgcgaatgtggtcgccgccctgtagcgtgcgcatttaatgcgcg

SEQ ID NO: 247136 - DNA, 296 bp, Gossypium hirsutum
ggattatgacagagattggtgggacaggaataggcgtgggtctggtagatctgaacacagatcaaagtcaaggtcccgctctcgctcaccctcaaagagcaaaaggattagtggctttgacatggcacctcctgcttcagcaatgttagctgctggttctggtggtgctgctgcggctgctgctgctgccgtcactgccaccacagtccagattccagggaataatccaaccctacctggagtgtttccaaacatgtttcctctggcaactggtcagcagtttggtggtctccctc

SEQ ID NO: 247137 - DNA, 296 bp, Gossypium hirsutum
gaaaacacaaagaagctttaaactttgctgttgcagcacaatgtgtctctccatttgatactatggcggctgagaaagtggagaacctaaaaaaacaacttgcagtagctgaagctgaaaaaaataataaggctagtgatgggtcacctaagtctgaacctcgagctggaagggtattgtctttaagtgacatactctatcgcacagaaggtaacagtgatgcttcacaagatgggccaagatccgatagggaagattctgattatgatgaagagctggaattagattttgaaact

SEQ ID NO: 247138 - DNA, 289 bp, Gossypium hirsutum
cccacgcgtccgcttttttttttttttttttttttttttttgggttttttttttttttttaaaagctccattttattcaatattttcaatattcatcacatgtttttttaaaaaaaaaaaaaaatcgtccacatgttgatttttcgtacatgtagcttactgcagcttgtaaaaaaacaaaaaaacaatggaagccccaaccaatgttccaagaacaggcaaggttgcggcagccatcccaaatttgctttatgtaatagtttttttgggaagatgagatgattaatga

SEQ ID NO: 247139 - DNA, 212 bp, Gossypium hirsutum
cctgtgtagctttaatcttggctgcggcaatcacacaatccccagctgcatcaacttcataaccccaaaacaagaaagaattgatgggatttattgacatttcaataacaatgaaaaaaaataaaaaagaagggtaaaaacgacaaggaaacagaggaattggcatatcttatcttcagaattagtagttcagaagctgagagactacacgt

SEQ ID NO: 247140 - DNA, 290 bp, Gossypium hirsutum
caaagagtgacagatcttgttttgccagcttttcaatttcatgagttcctaattgtggagaaggctgtatttggaaagccgatctgataataagctttggagtgtggtgcattcaccgaattcttgatctttcgctgatggaaagccgaccagagctgtggggaaaatacacttatgtgcttaatcgtctccagggtgtgatagatcttgccttttcgaagcatcgatccctggtgcccccatgcttctgccttcaaattcccgtggaataccagcagaggttaagtcct

SEQ ID NO: 247141 - DNA, 293 bp, Gossypium hirsutum
gtgctatcagttgatgtggacattattgccgatccctatcagttgtgtgacgatcttgaagaagctctgaagctcattaagaattgtgtcattggtcaaggtgtgatagataactaagaatcgccattatcagttgcagtagtggcctgtgcccgtaataaagttgcttaaatatgtttaggatggcgtctacgctttctttattattatctacttgatgtcgtgtttatgaactatatttactgaacgcttgaattcctgggtaagtttaatattacggaaaaaaaagtatg

SEQ ID NO: 247142 - DNA, 222 bp, Gossypium hirsutum
cccacgcgtccggcctttctttgaaacttgaactggtcttatgctgtcgcaatgattttgttacaattgcaacccaaatttggagagtgcatcatgtggctcggaatatagtagcattggatcacaaaagtcaaagatgaatcaaaagttattgtagaggattatccggcatcgatgagattgatcgagtaaatgctacccaaaaaggcagcgacatgatcg

SEQ ID NO: 247143 - DNA, 294 bp, Gossypium hirsutum
ataagcacaaggacagttaagaccacaaggatgaagggatgatggataaaatcaaggacatgatcactggtgataaagatgacgatcgtggccgcgaccgtcgtcgcgataatagccgtggtcgcgatagcagtcgtgatcgtgagcaccatcgtgatcggaaccgtgatagtgatcgtgaaagcgaccgtgatagcgatggtggtagtgatgacgagaagaagaaaaagaagaagaaaggaaaaaagaagaaacacgatggcagcggtagtgatgatgaccctctccatgtat

SEQ ID NO: 247144 - DNA, 293 bp, Gossypium hirsutum
gctttctgttatactaataatcatatgcatctatcgggagagggggggagggaatcatgtctttcgatctcatatgctgaagccatcctgcagctgcttcggatccttccaagatctgtacggctgaggaccaaaagaagaaagatgatgaggatctggtgtttgagatgtctgcaacagctctctcttgaatactccctactgaagaacaagcttcaaatcttattccagattgtcaaactttcttagtgactatgcacattaatgttcacagcatttattagagtgttgag

SEQ ID NO: 247145 - DNA, 297 bp, Gossypium hirsutum
gagttggcactaaaaaagtgttatgctactatatgaataaatcagtgtcttgttgtgtaagcgagcacatatgtctgttaaatatgatatttgttatgctacctggaccatttcccgcttgtatcagttgtggattctagtatgtcgcatagctatcagcaggttatgcttatgatcgatgatattcacgatttacatccctgttttttagatgtggtcaataaaaagacgcacttggaccgtcatgccttgataacaaaaaggcagcggtagtgatgatgaccctctccatgtatc

SEQ ID NO: 247146 - DNA, 253 bp, Gossypium hirsutum
  unsure (1)..(253): unsure at all n locations
aaattttcttcttattgcattgttatctttgattaacttattcattttaagttaattcctttcttattgcaaaaaaaaaaaaaaaaaaaaaaaaaaaaaaaaaaaaaaaaaaaaaaaaaaaaaaagggaagngggtgtaaggggtcaaagcttcaagacgagggactccaacgtgcaaggtcttaaatagtgtaacctaaaaccaaaaaacaggccaatggcctacaacgtacaacactggaaaaagggaaaa

SEQ ID NO: 247147 - DNA, 214 bp, Gossypium hirsutum
cccacgcgtccgagaacgccaagagttggttatggggtaactggtcaaaccgaggttcaatttttttttcctttcattttattttacttttgaaaattaggtgtaaaggttgaacacagatgacatatggatgtcttgtataaatttgattttcctttctatcatttcctaatggaacacaatttaaagaggaataaacagaccttatctcttc

SEQ ID NO: 247148 - DNA, 181 bp, Gossypium hirsutum
ctaaaactccaaattcaacataccattgatatcttcgatccaaagcaacccaccggggcgcagtaataaacctttgatgaagattaccacaaaagtcaacatttccacttcttctaccctacaagaaccaaacaggttgactttttatctcaatcaaactcttacccatgttctactaaca

SEQ ID NO: 247149 - DNA, 355 bp, Gossypium hirsutum
cccacgcgtccgattcaaaaaaccattgatttgtttcatcaaagaaccagttcaactgggaaagattcattatgacaggaagtacaacgttgttctaatttttgtttttttcttctagttctacgcattttcagatatctcttgtacaaataaacttcataaataaacttcataaatagagaaagaatcaagacaccgcatgttgtatcaatatctttctaaaagggtggctattccagttggcaagaaatagagcagtaaccacataaaatttggcttcctaaaaaaaaatatggtggggttttgtggtttgatctgggtcagctgttttaataaacatatttattttccaaat

SEQ ID NO: 247150 - DNA, 339 bp, Gossypium hirsutum
  unsure (1)..(339): unsure at all n locations
gtaaaacgccaagttcgagagatcacaagataccagcgattcaaagttgcccaccgacacccaggaagaaaccaatgatgaggatgaagagaaaagtatcagagttgcagttctttgaaactacaagaagtgaagaggtagagtctttttttggatcaaactcttacccattttctactaacaatactgctgctcaccctcctttcaagaaaaggagatgtaagagtgcttgatggatattatcatacatatatattcattaatctgtccttcttcatcaccatcatatcttctcccccaagcaatntaaatttttatttcgaatttaatttcttggag

SEQ ID NO: 247151 - DNA, 161 bp, Gossypium hirsutum
atcaataataggggatcccatactttcacgggcacctgagagatggcaaaatagtctagttcatggcatttagtttatgttgtttgctttttttttggtttataaggatgtggctttgtcgttaattaccgggtaatctatcccaagttcttaccctgctc

SEQ ID NO: 247152 - DNA, 364 bp, Gossypium hirsutum
  unsure (1)..(364): unsure at all n locations
agttctgatgcgagcgccgcccttttttttttttaatcaatctggtatatatatattatattatcggtggcattgagtggcttgtaaattgtaatgctttggtctatcttttgtttaggccacaaagtcttcattttgggaattttccgttagagtattgaatgatttttttttattaaaaagattgattgcaagatatataataagaatcagaagtacgttttttgtttgattaaattttaattttaaaaatgttttatatcttttccgagtgtgttgtaaaatcaaagttattcacaaaatatttacatgccaataatatttgatgcattggtnnataaaaaaaaaaaaannnnnnnaanaa

SEQ ID NO: 247153 - DNA, 368 bp, Gossypium hirsutum
gcagaatgaatgtcatcccctgatctcatgcactgtactcttgatgaagaaatgcctttaaaccggtttagttctcgttttcgtccctctactatgtcgagatttcgacatagtagagagattaaaaccataatcatactgtttttgtccataattttttttttgaacaatctttctgatcatatttgctatttttaacataatacttaaaatcacccatatctctttctcaacccatacataaataggagtataatgcgcttcagaacattcaaactcatgtctcttatattagtaacaatatccatgtcaatcgagttagaactcaattgacttttttttcgtatatttgtacaagtttcattatt

SEQ ID NO: 247154 - DNA, 293 bp, Gossypium hirsutum
agtcggcttctgagtatgaagtcagctaatgctttgaagttatgtatggtcataatccgagaagaaactttcttgctaaatgaggaaaaagtatgaaacagggtatttctatttcgctgcatatgaagtggaattgcctgtctaggggtggctgaacgtatacatgtcatatgggggtcaaggatgccatagcgaggccacactcctatgctggcgagtaagatgagagccactggctgacaattacttatttctatggatgctcaacacatatgacatgctgcaattgtttc

SEQ ID NO: 247155 - DNA, 276 bp, Gossypium hirsutum
  unsure (1)..(276): unsure at all n locations
cttttgatatatatatatgcaaagaaaaaaccccgactgctttttgattggaatattgtaaagaatattgattatatgggaggtcggtggctaagtgatatgcattatctttccttgttctcattgctatttattcaaagatgatatgctatgtaatatatctgtcaacttttgtatatatatttatatatcttttcaatcaattaaacancanacaaaccaacaaatacacaacctgaatggcaaataaaacaccccctgtaacaacacattaaa

SEQ ID NO: 247156 - DNA, 351 bp, Gossypium hirsutum
cttcagcaaggattcggaccttctttctttccaagaatgcaaccttccgatagagaattcaaagaacaaccaagcaaggagaagttgactcctattgtcgatagcacgaaagaagtacctgggtggccatcttttggccaacttgtcgcagatctttctaagcttgcacttgaagcaatgggaagcatattcctctactttgtcccctcccgttttcaaccaaatagctcaaagaaaggtcttacaccaatgaaggattctcttataatgcctgaagatgaagtcccccctccgttagttcaaaggcaggccactccagcacccatttctgaaacccggcagacgcatacg

SEQ ID NO: 247157 - DNA, 314 bp, Gossypium hirsutum
ggaataagcacttaagtcactatgggagtccaggatattcagggtgagggatttcccgatcagttttctgggttggctgactccttatttctggacctaccgcaaccttggctagccattccttcaggttgaaacatgttgaaacaagatggaactctgtgttgcttctcactctgcatggagcaagtgcaacgttcatgtgaaactctgagatctgactttatagagatatatggacctttgaaatactgctccgcatgtatgaaatctgtgaatggaaaatggataatgatgggaattccattgcatgctca

SEQ ID NO: 247158 - DNA, 379 bp, Gossypium hirsutum
aaaaaatgctagactttaaaaaaaaaaaatttttttaaaaaaaaaaaaaaaaaaaaaaaagggggggaaaaaaaaagaaaaaaaatttaaaaaattggggggtggttttaaagtatcttaaaatttcggcccccccctttagaggtcccaacttttctttcccttccctccaacccaatacctttttttttgggtcaccccctatttattcccctgcccccctgtttccaccccctttactgtgaaacccctggcttcccccaatttaatctctttgaataccatcctcctttccccagttgccctttttccaaaaaatgccccccccctttgccttttccaacaattccccccccttattggttatttcccccccccc

SEQ ID NO: 247159 - DNA, 397 bp, Gossypium hirsutum
cttcatcgcaactagtagaaaatttatgctatggcaaggcaattcaaaatcgcagggttggcctgaaagcactttccactccagaagttattgcggcaatggatacaacccaactaggaaccctcattatgaaattaggagcagcaaatgccaaagcaacgttgaatgtatataatgaaataattaagaaaccagaattggttgaagatccccaaaccgcaaactatgatgtagctgttataggtcccgaaattgctaattgtgaaaaggaactgattaacgcaaaggttcaagcacctcgactccttgctgggaatcgatttataaaatattatgtctcaatgggatatgagataacatcaactctcgagcttgaaaatccaaatgagtattaggc

SEQ ID NO: 247160 - DNA, 228 bp, Gossypium hirsutum
cccacgcgtccgataccgtcctagtctcaaccttaaacaatgcctgcagaaaacacatgtgtactacattagaaacaagaaagcagatatcctctaaacaatatcttcttaaaatcttgcatttcaatatttggtgttcactctttttaggaaactataaattaatgatttcttgtttggcgcattcagtaaaatttgagacattcatacttttatctttcataaacc

SEQ ID NO: 247161 - DNA, 234 bp, Gossypium hirsutum
cataccctatcggaccttgtttgtttcatttattcgatggggttcgtcaccgccaatctaacaccttgaagttggaagcctgttttgcccaacagctggtatttatcgtaaataatttattgaacgtgctttaagttcatatgggtagcttgaagaatttgtaacccggcgacctgacctgattaataatactaatatatattgatttagtgttgaaaaaaaaaacttaaaacc

SEQ ID NO: 247162 - DNA, 158 bp, Gossypium hirsutum
gaccctctatggaggctctttgttttgcagcaaagcatgtaaaatagattgcctcgtgtaataaaatttcaaagtgaaaaattgtatattcaaattgtttgtaacaattggcataaagtgttggtgtgagtgtgattcaattctataatctcaaggac

SEQ ID NO: 247163 - DNA, 288 bp, Gossypium hirsutum
cccacgcgtccgggaaagtgctggatcctagattgtccttaaaagaccccttaacatggccttggtgagtgtacatgtgctgctgaagctctttccttttttcttttttctgttaatctttttgtagttggatagctatgtgttgatgatcaatgtgttgacaatgattgcaagaatgtgttttgtaattatttcgagtgagtttcgattagatgagccaatcagacacataatgttcaatcttttttatgaccaatgtatcttttattttgtttatgggtacagatt

SEQ ID NO: 247164 - DNA, 271 bp, Gossypium hirsutum
  unsure (1)..(271): unsure at all n locations
tgtttctttccaattaagggggccattttttcctaatctcatctgnnaaactaaagaaccaggagccacgcttgtatctatttccattnggaaatcaatttcttnttctttatttcatgcctgtcatagaggatcctaatttggataaacatggttgtttaggattctttaaacaagttttccttctagctttaatttattaagtagtttcagttggtgttcccattnaaaaaaaaaaaaaaaagacccaaccatataactccttcttaac

SEQ ID NO: 247165 - DNA, 335 bp, Gossypium hirsutum
tgcagcctcaccagcaattccaaatgatgtttttttcaaggcattccagattcatcctagagagggtgagagaatcaaggtcaaattgacacctaaaaaatagattaaatcaagtttaatatgttgtgttctcaataatcttaaattaaaaacgaataagcttagagttattattatatttaaaatagaaaataagcatctatatggtattcaaatttattattattgtgtttgaacacttgaaactgctttacaattccatcttgcgagacaggaagcttccaagttccccctgaaacctttctattttaaaatatatgatattttctatgaaa

SEQ ID NO: 247166 - DNA, 212 bp, Gossypium hirsutum
  unsure (1)..(212): unsure at all n locations
gtctggctccgattacggcggagtaaacgatgttcgagtaacaggtaaacttttagccctcgattttcttgctttgattttatctgaaaaagagaaaagaaaatccaggaaaaagagtctgaaatcacctttccaatttttgatctttttttctctgaaatttttctgtttttctattcaatatccgncaaaaagatcccgttacaatgttt

SEQ ID NO: 247167 - DNA, 305 bp, Gossypium hirsutum
ggaacctacaatgggggactactttcgacagaagctgggactattgctcgagtgattgcagatgccacaataacaatggctggcttcttaggtcagagtcagcttttgaatatcactctacttccttcactactgatatgcgtcatctctattgctgctacatgctttacctacaactctctgtattgatctactctataacaagaagaagaaaaatcagtatctccttcacaattcaatcatgatcctttacaggttttacctgttcaaaagttgttttcatcatcatcatcatcattattata

SEQ ID NO: 247168 - DNA, 260 bp, Gossypium hirsutum
ctgggatttgaatgctttgtatagatggataggaataggcctagggcagttacttttctttctctcttttcacttttcagagtacttttcctcttagttgcctgcctaccacaatttacttctcatttctcgtgtatgtaatctagtttccttgtcaactagttataagccttttttgaggattaccaactctttgtattcgtttgcaattagacctgttcatgagctgagttatcaatctaaacttaaaggtttgcttt

SEQ ID NO: 247169 - DNA, 294 bp, Gossypium hirsutum
gtcgtggaccacatacgatgcttacatctaccattctgcagacacttggtctctcttccgctgatgaactaattgggtggacctatgcagatccatcctgggctcgcatcgccgcacttgtcccagttgttgtctcttgtgcagaggctggtgatgaagttgcaaataagattttgaaagaggcagttcaagagttagctttaagtgtgaaagctgttgttcagagacttggcctgtgcggtgcagatagaaaaaattccttccctcttgttatggttggtggtgttcttgaag

SEQ ID NO: 247170 - DNA, 362 bp, Gossypium hirsutum
tcatcccaaagagaaaaccaggcatccttcaactagtatgcgatgtcagtgaggttcaggagaaagaaaatgaatgtaagaagtcattggacccaaaaagactccctgtgggaattgctgcaggcgcagccaaatccggtgaaaatgatggcaccaaaaaatgttttcccaaaagtaagcgccgccattggtcctccagttttcccaaagggcggccgcagttttaaagtaaattcccagccaaagggctggaaccagaagggctgaaaagacccgttttggactttgctactagagtatctttcagtagtttttaagtttatacagttccccgagtttttttttttatcaaccataacgct

SEQ ID NO: 247171 - DNA, 403 bp, Gossypium hirsutum
gataaaataatcctagaaaaataattaaaatggccttattacaacccaaaaccaaataatgatatgtaataagataaaacttataaagaaataaatcggctacttattgcaattaaaagaaacagaaacaatagtgtggccatctccgagtccctcacagctccaaaccatctaagcttagggattacctgataggagactggagttaatccacgctccgagcactcttggctgatccctttcgctgaatggcgagcttgtctgtgtagggcgttgaataggaaagatcgaagaattcacttaattctggcttttccattggggttgctttcattttctgcaggatggggaattgaagattggggatgggtttattgttcaatggccatgtgagagttttttt

SEQ ID NO: 247172 - DNA, 306 bp, Gossypium hirsutum
ctttttcaaccctattttcatttttcaatcttgtttgtaataagttcattgtaaacccagttttacctatgttgaaacaaatagttggcaatatattggtgaatttacatgagaaaaaaaaaaaaaaaaaaaaaaaaaaaaaaaaaaaaaaaaaaaaaagaaaaaaaatataaaagaaaataagattaaaaaagcaaaaataaaaagaaagggaatattatatagagtggacaaaattaaataaactggccgttggttaaaacgttttaactggaaaaaccttgaattgccccaggttagtctttt

SEQ ID NO: 247173 - DNA, 281 bp, Gossypium hirsutum
cagccttgtccaaatttggtacttcatgaaccctaaaactattcagaacatcttacccataggcattaaatgaagaacagatttagggtacatgaagtaccaaattcgttcaaggaagaaatcgcactggattgcccttgcagagaggattgtgaaaactctctttttattacctttcttttttgaagttgttaaagtctgtgaatgtaatttgaaatgtacatttccttttaatttccatcataattcactatttatataaaaaaaaaaggggggggcgt

SEQ ID NO: 247174 - DNA, 322 bp, Gossypium hirsutum
  unsure (1)..(322): unsure at all n locations
ctatattgtaattttgattttcgggggaatttgttaattccataattttttgtaaaaagctttagtctcggtttgtaaattaataggattttgagtacctcctgtaatagtttgtaggcgcttcgaaccgaaaaattgccaaaaggttctcctctccagacttgaaaatcttcatttgctgacgttgccaatggaatctgcaagatctttttagcaacttccgcattgaaggtattagaaataatatcatctttccactctctactatctgcatcaatcaaatctgaaactaatgtaatatttccatttctctgnnnaaaaa

SEQ ID NO: 247175 - DNA, 350 bp, Gossypium hirsutum
  unsure (1)..(350): unsure at all n locations
cgggccgacgcgttccgcccacccgttccgcccacgcgtnccggtttaaattttgcttggaagacatgtccgtgggagctgaggagacatgccgagaaaagggactgcttcctctttctaatgagaagaagatcaaaaacatagactgaaaaatatgaactttcaacaattgagtgcctacccatgtcttccatttctagtagtgaaaacaataaagatttaaatctattatctgtttcctggtattgtacaatttttaattgcaaacattggtaatgtaatttggagtctattctgggaactttgtgatttatctaatattttcagcattcctgaaaaaaaaaaataaa

SEQ ID NO: 247176 - DNA, 329 bp, Gossypium hirsutum
  unsure (1)..(329): unsure at all n locations
cccacgcgtccgatcggagttgatggtctatttacggatttcacagagagcctccataatttccaggaatggacgtcgcctctctcacaaaaggatagtgacagtgcatctaaattggtggataaaattgccttgttgatctcttcttatagaaaaggatagattgtatcatatatttatatcatcctaagaacatatccattgagctttattcactccaaggcataataagcacatcttaattcaggttgagtttatgcaccgaagtgtgtaagttttaaggagtcctcctttcgaattttcaattttttttttctggnaaaaaaaaa

SEQ ID NO: 247177 - DNA, 274 bp, Gossypium hirsutum
tctccattccaaaaaactccaatccaaagaaatggttgggtaaaatacataagggaaaaaaggatgccggggaaacctacctttcttttttatctaataaagcctgcaatgttatttgaaatgccatttctttaaattcatcacaattcacatattactcaaaaaaaaaaaaaagctcccttctaaggatccatctacatcgcgtgcatctacattaagctctttatataccacctaaattaattcactaccctctttttacaacttcgttaag

SEQ ID NO: 247178 - DNA, 191 bp, Gossypium hirsutum
gccgattcgggtttgtgtgtatctccctgtattggttcttaggtgacatgaatatggaaatatgacgttctgattttgttatctccgtttcatgaatgtgtaggaaatttgtgtacttgtattattcacgggctataatcgtgttcaaggtcttatatttatataaattttgatagattgcttattcttac

SEQ ID NO: 247179 - DNA, 395 bp, Gossypium hirsutum
gtgctcttcaaggggttgggaaggtttttgagccttataaagacaataaagtagatcttcttgggcctaagttgcttttcattgcccttaatttgggtggcttagcacttggtgtttggaagcttaacacgttggggcttcttcctacacatgcatcagactgggtgtcatccttaccccctgctcaggaggtagagtattcgggtggaggtattcctctataataacgtgtttgttagtctttggttatctgatcaatttctggaggtgtgagttgacttatggaaggccggtcgaaatttcttgtgaagatggagaacaacaccaccttagatttttatgttaaattttatgaaacatgtagttgtagtatgggacgacatgattaagaacat

SEQ ID NO: 247180 - DNA, 412 bp, Gossypium hirsutum
ggaataagaaaatccttaatcaattggattctttgtacttagttaacgtggggattcaattgaagattagtagctaaaatgttagattttctctaaaaaaaaaaacaaaacataaagataatatatagtgtaaaaattataaaagggttataataagggtgtgcggagggaaatattaatattgaatgctattttttgtgtttgggtctaatttatttatttatcccctcaactgttttgtatttatcagttctttttctcttgtatttttgttcaatattaaaattaaaatgttaaaaggaggaatatgctttttattttgtcccatttttccttattattttatcccttcccattcttgctccaaacttttttaagatgaaggtttgaaaaataattattttattttggt

SEQ ID NO: 247181 - DNA, 373 bp, Gossypium hirsutum
ctttgatgggtgtaagggttttaaacttaacgaattctagtatctatatcggcgattacaatccaaaaaaaaaaaaaaaaaaaaaaaaaaaaaaaaaaaaaaaaaaaaaaaaaaaaaaaaaaaaaaaaaaaaaaaaaaaaaaaaaaaaaaaaaaaaaaaaaaaaaaaaaaaaaaaaaaaaaaggggggggcggttttaaaggaacaaagtttacgtacgggggcttggaaagtaatagtttttttataggggaacaaaaattaaattaaggggcgggggtttaaaaagggggggaggggaaaaacccgggggtaaccaaattaaatggcttggaaaaaaatccccttttggcaagttgggttaaaaacaaaaa

SEQ ID NO: 247182 - DNA, 316 bp, Gossypium hirsutum
cccacgcgtccgcttctggatatggcggttgaagtggcgaaggaggtggagctggtggtgccggcgggtatggaggagccggtggacatggaggtggtggtggtagtggtggcggtggagctagtgcaggtggatatggtggtggagcttctggatatggcggtgggggtggtgaaggaggtggagctggtggtgcaagtggacatggaggtggtgaggtttatctttggagttcatagtgtgtcatcattaatgttattatgccttatcgagctataaacttcttgatattttttgttcccaattaataaaattt

SEQ ID NO: 247183 - DNA, 478 bp, Gossypium hirsutum
  unsure (1)..(478): unsure at all n locations
cccgggttcgatcccaatcgcgtccgnncttttttttnntttttttgtgnntaatatannatgatatttcccatttatcaaagggtgattgacaatactttcagtgagtgacaagataatgtataaaggggaggaagaaaaacagggaaatnngaaagtgggtgaaatctaanntatgtaanntaataatattaaaccaagaaagatacccagctttatacaaaaatgaagnnaaactataatgagnggaaatttnngtgtctagaaaccagagcnaagggtagagannaccctaatgcttgtgttattttgttgatggaaaattggtgatggggaaattgagaatgtcatcaatggagaatatataggaggttctaaaaaaaaggaaaaagaaacacaaagaagattattaaaatcctttgtatatatagatggtgaaatgcctctttttactcctttttggttttttgattatgta

SEQ ID NO: 247184 - DNA, 385 bp, Gossypium hirsutum
ctttttattattttaatataattttttttttattatcaaggcattgacatactgggggggactttaatattaaaaggatgaataacatgtaaatgaaagttggtgatctaatatgtaattataatataaacaagaagatacatctttaacaaatgaagaaactaaatgatgaaattgttgtctataaacatatcaagggaaagaaccctaattcttgcgttatttttttataaaaattgaatatggtgaatagacaatgtcatcatatggataatattttccattgttctaaaaaattgaaaaagaaacacattgaatattattaaaattcttattatatatatatagcaaaatgcctctttctactcctttttagtcttttaat

SEQ ID NO: 247185 - DNA, 193 bp, Gossypium hirsutum
gtacactttgttttgttctcggatcaactgtataatgtttggttgaacaaggcaaaggaattgctccaagcttcaatgcatcaaagcagccagaattaacttgtcctgccttcatccttaaggattcagaaacttcaaaagtgtgtgtattaaatttaactatgagagaattgcattcagttggtttgcttgg

SEQ ID NO: 247186 - DNA, 347 bp, Gossypium hirsutum
gccatccgtaggcgccctattgtgacttgctatagaggaaacgcctatgcgtcgtgtctgcctgctaaaaaccaacggataagatctgaacgttgcggtatttacaagcgtcgtggatgcttctagtttatttgctcaggcaaaggggtaactcgtgtgtatggacttcctttgcttttttgtgttctttttttttccctctgtttctgtgtcaagatttatggcttccatttgtgtgatgcttagatatgtatctacactttaagaaaatggaattttatatgttgtgtttgaagctttttaagtcaattttctttttcttaaaaaaaaaaaaataaaataaataa

SEQ ID NO: 247187 - DNA, 406 bp, Gossypium hirsutum
cccacgcgtccggattcaacaggtccagatgaactcttgggagcatcagaaggctcttcctcccattccacttcactatcatcattaatattgctttccttattcaaaagattatgttcagcattcataccaggagtaacatcatcccattttccttcaaccactccctcctcccactcaaaatctgaatcagaacccgaagcctgctttctcaaagatttttccttaggagaaggtagtgttacaggatcacctgctgctaagcatgcaaaaatatcatcatcatcatcaaaatactccgtctttccatcatcctcaaaagttatttccatacaagattcagtttcaaatgcagacttccggttgctctcattcacatttacagattcaccattatcatcacgtg

SEQ ID NO: 247188 - DNA, 399 bp, Gossypium hirsutum
ccgcccttttttttttttttttttttttttttttttggatgccttaaaaagcttggtattattaagaaacagagaaagatacattcaaactttgctaaatgctagatacatacatacaacttcataactacacaattcttttttctatatatatatatatatattagccctttggattggatatttatggaccgttaatcataattctaaggcttatgattttgagtataaatataatccaaatgagcatctgccatcatcctccttttcacacattcttcatctttctcataacactcttctgctcccatcaactttgagaaatcatcttttctatcagcttgaatcatcatcatctcgtttgctttaagctccttttcaccatggttgttgatttgc

SEQ ID NO: 247189 - DNA, 367 bp, Gossypium hirsutum
cccacgcgtccgcccacgcgtccgtccttgatcatatgtttcatcaaggctcgagactcgaatggaagtgactgaaacttctaatcatttgaagcgctcctgcctaaaattttccaaggtgtacgtcggtgtttgttcataggaaatatagatttatacaagaacaagagcccgattttttttcccatatggctgtttttataatatcaatgtagttgccactccttagctatgaacatgatatagaatccagaaatctctggcctcgttgcttccttcaactttattgtaccgaattttgttgttcacaatcgaggtcaaattgtcacattgaaataaggcttttatatgtaccaaattttggctc

SEQ ID NO: 247190 - DNA, 386 bp, Gossypium hirsutum
ttctaatttggttttcctacataacaatttttttttcttttaagaaccttacattctaggatgggtcttttacattggatgacctatattcaattcactttcctttttaatacaacttctttacttattaaacctttactttctcaacttaatctccttcaaccacatcctccttccactaaatatcttaattacaacctgaaaccttcttatttaaatatttatcattatcacaatgtattattacaaaatcaacccctcttaatcatgcaaaaatatcatcatcttcatcaaaatactcctcctttccatctttcttatatgttattttcatacaacattcattttcaaattcaaacattccttttgctctcattcacatttac

SEQ ID NO: 247191 - DNA, 296 bp, Gossypium hirsutum
ggcaatgcctgatgtgaagtcattggacattcggaacctcatctgaaactcgaaattcggctttggtgggtccaggttggaggtggaccaatattaactggtcaacaattggctaaaacccttctttttcattttgcttccattatttgattaaataattattatgggaaaggggaacccgggattggaagggccccacccgtaaatccggaccaactaaaatggtggttttggttggggttaataattctcaggttttggggatgacttccgcctcctaattgttataattgggt

SEQ ID NO: 247192 - DNA, 392 bp, Gossypium hirsutum
tggtaataatgcttatagacttggttacttttttatcaaaaaaaaaaaaaaaaaaagagggaaaaaaaaaaaaaaaaaaaaaaaaaaaaaaaaaaaaaaaaaaaaaaaaaaaaaaaaaaaaaaaaaaaaaaaaaaaaaaaaaaaaaaaaaaaaaaaaaaaaaaaaaaaaaaaaaggggggggccgttttaagggtccaaagtttacttccccggcctggcaaggtaatagtttttttttggggcccccaaatttaatttccgggcccgggttttaaaaccgtggggaggggaaaaacccggggttccccaaattaattcgcttggaaaaaaatccccttttcccagggtgggtttataacaaaaaggcccccccctttcccctttccaaaaa

SEQ ID NO: 247193 - DNA, 142 bp, Gossypium hirsutum
acaccaaagggaaaggtatataaaacacagcaaatttcagtgcattacatgcaagagaaatccaatggtaaactttatgttggggatggggattttgttaacccccaaataaacaaagttgccgggtatctttagtattact

SEQ ID NO: 247194 - DNA, 384 bp, Gossypium hirsutum
tccacgcgtactaccacgcgtacgcttgattggtttgtgttattccataatttcctatagaaaggttttgtttcggtctgtattaaataagcactaggatccgtagttgcctcttgtaatagtttataggcacttcttctgactgtaaatttgccaaaatgttctcctcgccagacatggaagttgttatgttcttcttccgccaggggaatttgcaaaatcttctatacagtattttctcgaaaggtattttcaatttaaaaaaaataaaaaaaaaaataaaagaaatatataataaattaaataatataattatattattaaaatttaattaatatttaatatggataataaaaaaaaaaggggggggcccttttaaagttt

SEQ ID NO: 247195 - DNA, 179 bp, Gossypium hirsutum
accaagcgtcctcaataattatactttcttttagacaaatcattctgacttgtgaggaaggagataatgcctaaacctcttgatatcttactttagaaatgcaaataggatctaatactgttattgaaatataataaaaaaaaaaaaaaaaaaaaaaaaaaaaaaaaataaaatataaa

SEQ ID NO: 247196 - DNA, 333 bp, Gossypium hirsutum
ctagaagatcccgagtcttttcatttttttctttccgtgactagaaatctatcagggacgcgatctaacgaatgaacggtcaacatcttaacggactgaacattacctctaaccaatcccaatcactcacaaatgcttgccgtggctgtggatcttgagcaggaaacggtggttacagccgcggtggaagcagcagcatatatggtgatcgccaaggatgatatgctgacgaacgccagtaatgtgatatacggaaatggtggaagctatcgtggtgatgttctcagaaatagactccctttattaggataactttaccgctattctattttc

SEQ ID NO: 247197 - DNA, 149 bp, Gossypium hirsutum
ccgggccgacccactcttcctttttaatatcccctaattttacattttttttttttcgaaactagaaagctatcatatgcacgttctatgtaatgaacgatccccatctttatggactgaacattaccctctaccaatcccaatcgctc

SEQ ID NO: 247198 - DNA, 345 bp, Gossypium hirsutum
cccacgcgtgcgacatatctcacaagatcgtttgaagttgaaggacgagtttggtggctactaacggcgcctaattgaaacccttggcaaaaaaagaaaaatgaaaatgagcgtggctggccgtgtacatttgggcttaggattatgacaatttggacttattggattgacgacactggggatgtgcactggactgtttggttctatctatatgttcttaattttgggttttgggtgttgggcccgggcagatttggcccattacaattagtacctaaacttatttacctctatcagattggtacttatgatttttttttctaaattggtatccaaatttttttt

SEQ ID NO: 247199 - DNA, 304 bp, Gossypium hirsutum
cccacgcgtccgcccacgcgtccggaaatgctggaagagggccatttagtcctagagccaatgaaaagccatcaaatttaggcaaaggttagcaagtaatggaccaagttgctaaaagaatatatatacatatatgagcatgcagttcaagaagtctgctatgcatatcccatactaatcccctgattttcgctatcactcatgtaaaatatattctactactaataaaaatgccgttgattagtggaaaaaaaaaaaaaaaaaaaaaaaaaaaaaaaaaaaaaaaaaaaaaaaaaaaataaaa

SEQ ID NO: 247200 - DNA, 375 bp, Gossypium hirsutum
tggagtttcgacccacgcgtacgcccacgcgtgcgtccacgcgtccggcctggtttcatactgaccagcaatatctatattcgtgtttccatctctaattgttttcgtttttcagctgtaatcgctcatgtcttgttatcttttgatcagacatttcacacaccggccaggctcgacaaaggttaggacttttttctagttataaaaaagttcaatatacactcatgtattcattctttttggtccccctttcctctgttcatatgtagcctgtagctagaaagtttacttttaaatggctttgttgtttaaaaaaaactctgaaaacttatggttttgttttgacttttagagaatgaaatgcagagatccctt

SEQ ID NO: 247201 - DNA, 262 bp, Gossypium hirsutum
gtgacaataaaaagattggccaccctttttttatttaaaaaaaaaaaaaaaaaatagaagggaaaaataaaaaaaaaacaatatataaaaaaaaaagactacaaatcttgtacatccaaattcaacgttccttttttaaaatccccttaattcttttcactcgcctcttctttacattcttttattcccttaaactctcctcctttccctgcttattctctttgcattactttttcctttcccccctttctttactcctttt

SEQ ID NO: 247202 - DNA, 112 bp, Gossypium hirsutum
gaacattgtaaatggggatggtttatgtttatttgaagctagaatgctggcttgcactagacgaccaatacccctatatgataaatcaagaggcgaagtcttgttaatctct

SEQ ID NO: 247203 - DNA, 390 bp, Gossypium hirsutum
  unsure (1)..(390): unsure at all n locations
cccacgcgtccgcatgtttgttatatatgtatgttattgttatcatctaatgcaataatatataggtcttctttaaaaaaaaaaaaccanaccaaaaaaaaaaaaacaaaaaacaaaaaaaaaaaaaaaaaaaaaaacacaaaccaaaaaaaaaaaaaaaaaaaaaaaaaaaaaaaaaaaaaaattccggccccccccttaaaagaaaccaacctaactaccccctccataccaaaaaaaatcttttcaaaagcgcaaccaaaataaaattaactgcccgtgtaaaaacaactttttaactagaaaaaccctggataaacccaactaaaaccctttgaaaacatcccctatttacaaccttcttaataacaaaaaaccccacctatcgac

SEQ ID NO: 247204 - DNA, 233 bp, Gossypium hirsutum
gaagaacatggttgtaaatttgatttcaaagcattggggaaacaacagattgctcaagctaatggcgttgttaaagctatcaagcttcataaaatctgaaatttgaagtgaaatgatcggaaaaaaaaaacaagaaaaaaaaggatttgttttgttttgtgattgtgtcatttgaaaaaaaaaagcgatgaaattatattgaccgtcgagtctcgccggtcggttggccgttc

SEQ ID NO: 247205 - DNA, 289 bp, Gossypium hirsutum
cccacgcgtccggtaactgagtttattactcttgataacatattatttttcaaaagagagaggaaaaaaaaaaaaaaaaacaaaaaaaaaaaaaaaaaaaaaaaaaaaacgtgcatccaatataaaagggtccgctcttcttacacatccatgctatcctcctccttcttgtatagcaacacctttatttaattaaccccccaatttcttacatcggccggacttttaaaaccctgtcatttccaaaatcctttgctttccaaaatttacccccttgaccaacattccc

SEQ ID NO: 247206 - DNA, 310 bp, Gossypium hirsutum
tagccatacatttgataattgaccttgttcttggctagcaaatactcacagttaaggtgggttatagtgtttgtagggttgaaggattttttttttgggtctctgttttatgggtagaaggaatgaattccggttatttaaggtgcagcattaggataagattgggttagtctttttttgccagagttgcttctatagataatgtaatagttccagaaactttgatagaagctatcttctgtttcaaaaaaaaaaaaaaaaaaaaaaaaaaaaaaaaaaaaaaatatttaattttttaaaatgttattta

SEQ ID NO: 247207 - DNA, 386 bp, Gossypium hirsutum
  unsure (1)..(386): unsure at all n locations
cggaataaccgggccggccccacgcgtccgcccacgcgtccggctgcaaatgaggaggatattttgtggtgaatgatggcctttaaggcgaggggattccccgtcatatcgcgaaccaccaaacccgtcgcagatgtgaagctactactatcaaatgctccatcaaaatagattgtcgttctcggcatgtcttcttagactctaaaaggcacgaactgattcctggagaaccatattagccataaagtataacaaanaagtctacattggatgtcgtttcctctcttaaaaaccccgttgcaggacagtcacggaagaaatgggggctatcttctacccaggaacaacctcgggggcatccatcaatttgaaattactcttttgta

SEQ ID NO: 247208 - DNA, 255 bp, Gossypium hirsutum
  unsure (1)..(255): unsure at all n locations
tgggtnaacccccgaagggtgggcggagtttttttgatttaactaatccccccaatgcccacaaactattacccaaaaatgcttcttgatgttgaaaaatgtgtaaaaatagtttcaagagcatatgcataatatactgcattgacataaacactactgcagtgactgaatttgctggtaagactattgagaccttgagccacagacaaaaggcatgtgattgattaagtttatatatatgacaatggaagactt

SEQ ID NO: 247209 - DNA, 372 bp, Gossypium hirsutum
gcaaatttggagaagagagcaaatcatgtttacaaagcggtaaaggacaactattgatgcttaattaaagttccagaggccaaggaaaaagcattcaaaccaatagtggcatggatggaataccagaatgtaggttgctgaaacagtggccacacattcatatgcttggtttcatccctaaatccaagtatacgtagggtgagtaaaattcgatttgattcgagaaaaatttaaatttcgagttaatcgaattaagttattcagattattcgagttgagttaaattttacgactcgaataattcgaataacaaattggtgtaaatatccctttggtccctattaattttgaaaatgagcaaattagtctctc

SEQ ID NO: 247210 - DNA, 277 bp, Gossypium hirsutum
  unsure (1)..(277): unsure at all n locations
accggnttcggaaaacccggcccgacccacgcgtccgctcacacctacggtatttgttacgtttttttttgacaacaccaatcgcttaacacggcggggacacatttttagacgggtctcgatacaaatgcaagaacgacagccgtctaggcatctaaggccgaactctgaacgtgacacatcttctggaagaacatgcagtacgataagaggtataattgtaatcagcaaggaaagatgcgaacaatgaagtccacggtattgatcataggaagtg

SEQ ID NO: 247211 - DNA, 392 bp, Gossypium hirsutum
gggaaatggtgctttatttggagcttgttatatccagactgcccagtctcatgatgtaggacaattacaatggattggtccagttcctggggatattccagaagttgaggcttattgtgaaatagaattttggaggggtggtcaagtgacagaggaaggtctgaagtggttgattgacagaggatttaaaaccattgttgatctaagagctgagactgtaaaggacaatttttatcaatcagccttggatgatgctattttatctgagaaagttgattttttattttgcatatgaaaagaaaagaactaatgttactaaaatttagtaatttttatgtaaaatttgaagatttttatttcaccaaaagattgctataaataattaatttatt

SEQ ID NO: 247212 - DNA, 339 bp, Gossypium hirsutum
  unsure (1)..(339): unsure at all n locations
tccggcttttgaactcttcttttggggtggnngcttggaacttatagtatatggttcnntagttgannactttagtataagagagtgttagtagggactannggaagtannaaaatgttgcatttattaatnnatggtttcnnctgatttcnnagtattacctggtttanttggtgaccctagatctnnttgataaanncttgtagtttaaaatcgtttgaaccctacgagaaaccgttgtttgacaattnnaacattcgaagttcaaccctttgtaaaagctgccttgtttatnggtgcgccnnannaaaaaaaaaannaaaaaaaaaaaannnnnng

SEQ ID NO: 247213 - DNA, 415 bp, Gossypium hirsutum
cccacgcgtccgagggcatcaaattacggtttttgtaatctaaaaaagtgtgagaataacattcgtgcactggatagtccatgtgccaatataagaatggaaattgggtggcctcacggagtgccgttcgttcatccccacgatctacctaataaggccaagatcggttttcttgaagcatatgaacctggttggacagcaactcacgatatggatttaagcctaatggaacctgcacagaccagtcaacagtactgtaactgaatcatcgttgtggttttgtatgtccattatcctgaattcgcttgttcctggtcagttttctcaatctcaacttggtggtttcttttcctgctaaatccaggacaagagctgttccaaccggtgtaagctgttttgttgaacccaacccatt

SEQ ID NO: 247214 - DNA, 404 bp, Gossypium hirsutum
cccacgcttccggaaaaatgaacctttcttcgttgcacgacgaatgaggcgtgaagcatgattttaaaaggaaaaaactctttaaaacagattggtcggtgttcatcatctctaattataccccatgttcagtctcatgattttaacttcacatatcaacttgagagtggaaataatgctgatttacctagctccggtcagatctttgcagttcccgttgctccagtagatgttatcattgctggcacagatggactgtttgataacttgtacaataatgaaattactgcggtggtggttcatgcactgatagctggttttgggcctgaagtgactgctcattatatagcattattggcacgagaactatcacattctatatatttacaaactcctttctcaac

SEQ ID NO: 247215 - DNA, 382 bp, Gossypium hirsutum
  unsure (1)..(382): unsure at all n locations
ggcttggcacgcttaagagggctattttgtgcagtgtaagcaactatgtagtgaacaagggctcctgtcctgttactgtggtgaagcatcatgtttaaggattgtttttcattgcctttgaggttttaaaagtgttttcccataatagaagtaataaggaatagttgagatatgtagcttgatttatgttttattgcatgggattgtatgtatggaagtaattaaagcttttgttgaagctgaacacacttcatcttgttgtatattgagatgggtgtttgtgtaaactagacttaccaattgagtgatgtgagaataaattgtgtaggcagtttctaagaactgctggttcttccanaaaagaactgataaatcctgtctt

SEQ ID NO: 247216 - DNA, 269 bp, Gossypium hirsutum
  unsure (1)..(269): unsure at all n locations
cccacgcgtccggctattcatactttatgttttctgtaagttatatccaatgttgtgggtgcaacttgttgagcaagttgtttgccattcttgctgcttcaccaatcaattataacaagctgtatctcaacaatttgcttggatttcaagtcatcaagttcttcatttttatgtttgtagcttttttctgctgaatattagccaccttgcttgtaattttagttatgaattggtacatgaatgagccatttcatcacgtttaccccana

SEQ ID NO: 247217 - DNA, 272 bp, Gossypium hirsutum
cccacccgtccggatgaagacaggctatttttttttcaccagggtccggtttggctggggatgggaccaatctaagggtttggtaatttggtcctttaaggggggtttcagttgtggtttggttctaaattataaccttaaagtagtagcaaatgatagctatattgtaatgcaagtttgataaatgaaatcattgtttgtttgtttgaaaagtaaatacaattcaaacgcaaatgatcattaaaataattcttcatgaggagattttcaat

SEQ ID NO: 247218 - DNA, 341 bp, Gossypium hirsutum
  unsure (1)..(341): unsure at all n locations
aatttgtgcccccgttttctttgaataattgaacattctaagttggctcagaattggacctgcagtttcagctctgtatattggaaaaagcacttccatagatgcatgtataaatttccttacattgatatttaatacatgcaattactttttaacctnnnnnanannnnnnnnnannnnnnnnnnnnnnnanannnaannaaaaaaaaaaaaaaaannnaannnnnaaaaaaaaaaaaaaaaaaaaaaaaaaaaaaannaaaaannaggannnnnnaanannaaaaaaaaaaanaaaaaaaaannaaaaaaaaaaaaaaaaaaaaagggggggggntatt

SEQ ID NO: 247219 - DNA, 246 bp, Gossypium hirsutum
  unsure (1)..(246): unsure at all n locations
cggacgcgtggggttgggagggatatgagtatttgtttgttccctcctgctaaaaatggggtgggaccctgttgtatcctagtactcgtggtgatagatcaactgctatatttgtcagtccaacctgtgtttcccctgaaacaatctgttgtgtggataaaaaaaaggaatttactagagatgccaggtggaagttgagatttcaaannnnaaaannnnannnnaaaaaaaaaaaaaaaaaanaaa

SEQ ID NO: 247220 - DNA, 235 bp, Gossypium hirsutum
  unsure (1)..(235): unsure at all n locations
cggaataaccgggcccgccccacgcgtccgtggaaaacaaggcagatgctcggagaactttatttcaactttttccgtcctaatggtggggttggggtcccactatgtgggaaacccatattttctggcacaaatgttttgccttcctttttcttttgtttttttgtcaaaagccaattctttttggcttattaacagggaatgggcagaaatttttcggcagagattgaangtt

SEQ ID NO: 247221 - DNA, 412 bp, Gossypium hirsutum
aaataacatatataaaaatcatctttttatatattccaaaaacaacacattgcgcaggcgtgttccatattctaacctaacacccttcacaaaatcttaaatatgaaattaaaccttcttcatataaaatcaacatataaaaagatctgtttcaaaatctcaattgtctcatttaacaaaattcatctttcaaaaaaaattgacctaccagtctccccccatcgttgcccattcacatccaagcccttcaaatggaaacatcatgtggtccttcaaacatgtcaatataaagaatagcttccttcataaacttaccaatatcacttctttccatccataaaattatttaaaataccttatctttccattaattaaacttattatcctccattaaaatttattaactatattt

SEQ ID NO: 247222 - DNA, 411 bp, Gossypium hirsutum
gttagctaataacccatctgatataaattttctttttcctcggttaagttcaagagtttggggggcggaaacagtcactggttatgatctccagcctgatgtgaacgctctgggattagggttttcttctgggatagtgtctagtgatactggagatggtgattatcgaaatggttttaacactaacccgactaagcaaatccaggatgtggtgacttcaaatgcactccttccatgctattccaatatctttggatcaactagcaccaccacggcaccaacaattgcttctttgttagcttctacactttaccaacacaaattcatgaaatgtggtgtcaaaaattcttcactgcctaaccaattgcaagccttatcaccttttcaagaccttcaaatgacatgcaactg

SEQ ID NO: 247223 - DNA, 264 bp, Gossypium hirsutum
caaataacattcttcaaattcatttgattttgattaaggaacccaaaggaaaaaaaaaaggaggggaggaagcaatgcctgatgtaaactcaggcatacaagtttgtggtttggctttcatgttactgactcaacagcacagatcgagagataaattgtctgagatctcgaactaatttcagtatagactttggttttcctctatattcatatttgttggattttggtttagtttttagtgttgaaatggaaactacttgaagc

SEQ ID NO: 247224 - DNA, 392 bp, Gossypium hirsutum
  unsure (1)..(392): unsure at all n locations
ctgtgaagaagatgtatgatattcaggccaagaattggaacaacctggtcaaggcccatgggcccaaaaaaggcttatgtaaggtggaccccgaataacaaggcctggaatgttgcaaacaaaatcggatttatctaaccagttggcaactaccttgttttgaatgcttaatttttggggtttggttgcagggtgagaactgtattttcagaatcagctggaaaattaaagcttaagttttttgttttttaaaggttgtaaatcttgctttactgcccactaaatcatctttggtataaaacttaagtcaagaaagtatttaaacatgtttttcatatttgtttaaaaatggttgaatgcttgaattttcggctattcttactttacanatg

SEQ ID NO: 247225 - DNA, 202 bp, Gossypium hirsutum
atttaatggtcatatttcgcgaatttaatatggactattttcattatgaactgtgtatgtcatttgcaatgcttgcatgaacgtggtggataatccagtttgagatgaaactctgaactttttaaataaaaagaacccaaagttaactgaaggcactgatcaagtctaaacttataaaaaaagaaagttgatcaaaaatatg

SEQ ID NO: 247226 - DNA, 418 bp, Gossypium hirsutum
cccacgcgtccgatgggaaacatggaggatggtgtcagtggcctttcttgttgccgctttgatttccgtatcggttatttccgtggtggcggctgtcaaatccgcaaagcctgtcataataggtttggcaagtgcgttgacgactgctatagttccgttgggaacatggtgcaacaattcttggaagcggaacaaggaaaagataaagatgaagaagaagttaacagctataatggagatctttggttctagtgcaaccaccatatggatgcttgttgaacaattgtaaattaagaaagcgtcactgtccgactccgttgattacgtgctcaaagaaggatatactttgaaggctgggatggatgatatcaacaaaaaattgaaacttgttacgcctatcatcacagatttgcttcga

SEQ ID NO: 247227 - DNA, 241 bp, Gossypium hirsutum
  unsure (1)..(241): unsure at all n locations
cagttggtgataataatgataatggtatatcatcaaatggagggaagtgcatgaggtggagcagtgtaagaacaagtcccacatgttttctgggtttgccagcaatcangccagttcactcttagcttagttacccaaaataataaactctnttaagggtaaaaaatgaggtgtcgcttttattggataaatggaaatatgtacgatccaacagccttagaaacccaannnnnaaaannaa

SEQ ID NO: 247228 - DNA, 256 bp, Gossypium hirsutum
cgaaaaaatcgaaatccagcacagtagggttcgatctctcgaatttttaaatattgaacattggtttgttttagaatttagaaaacatgagtgaagttctaaagggatatttgattattttgaataaacgggaaattgcaacccagcacgatagggcacgatttttcgaattgtcaaatatcaaacatttccttcgtgttaaagaatttttaaagacatgagtgaaattctaaaggaatatttgattattttgaac

SEQ ID NO: 247229 - DNA, 280 bp, Gossypium hirsutum
  unsure (1)..(280): unsure at all n locations
cggaatggacagggccggccgaccacgcgttcgacggtcagtctctatttccactaagttcaaaattacctggttcccttaatattttgggccgctttccaatggcctccaataattttttgacctgccaatttaccatccttatttttatgtttgcccttcgtaataaaatacaataagcccctggaataatctttaatctcaatagcaggattaatctttcnnaaaaaaaaaaaaaaaaaaaaaaaaaaaaaaaaaaaaaaaggggggggccgtttta

SEQ ID NO: 247230 - DNA, 312 bp, Gossypium hirsutum
gcgacaatgttgaccgtggtgataatctttattttattgctacaactacaaacggaaaggtggggaacttctcaaccccttccccacatcatcctctcaaggcatggagatcacttaaccaaggaataaacactggcgcaaaccgtgacaaccgtgaggtaatatttgttgcacattcatcaagagctttccgcgatgaggaaagcaaaagcttttggctggagattgagattgtggataagcatagatatccatcaaggttccaagcaccttacaatgtcacaacaacattgttagtccctgctcactacc

SEQ ID NO: 247231 - DNA, 267 bp, Gossypium hirsutum
  unsure (1)..(267): unsure at all n locations
agctaagccagcttcgaagccgaagaaagctgaggcgacaaagaagccaacaaagagagggggggccaagaagaaatcaactccagcaaagccgaagcagcctaaatctatcaagtcacctgcggctaaaaaggccaagaaggcggctgcttagaacaaatgtgtaggaagtcactttaggttttatatgtaatcagtaacttatctttgtgaatacatggatgttagttcggtgcttgtgttnnggaaaaaaannnnnannnnaaa

SEQ ID NO: 247232 - DNA, 380 bp, Gossypium hirsutum
cagattcaaaaagaggccagaaattcaatggctgttgttagacatctccgggaatcataggggttggctgtggtgaggattgttgatatccattaatttgagacttagtcagagaaacactatttgatggttaacctgaggaaagatgtatgcaattttcatgataaaaggttcggggaaggatgatacggcagtatgaagtagccaaatataccaaggtagaaattaggttgtagtagtgtatatctatgtgtttcttaagtgcgatgtaattatgcagtagtttattgtttgttgcagctggttatgctgcgagggtccgaagctacggattgtgtcgatgttcttcactttcttgtatagatttcagcaatgaaaag

SEQ ID NO: 247233 - DNA, 373 bp, Gossypium hirsutum
cccacgcgtccgaaaggggcagttttgtgccgatatcttgtatgtacaaggatttagacgggacatccctgagctgcaaactctcgatggctgctgaagaccaaaaactggtttccaagtatgctttattgatgaagaagagaatggaactagagaatcaccttgtcaaaaagttgggacggtactagaagtcaataatagtgtgttatatctcgtgatttttaggtactatcagagttcaattcaaatttaacatggacattgttatagttttttttttccttttatttaaatcattgcaaataaaaggtattatcagagttcagttaaaaaaaaaaaaaaaaaaaaattgttagaataaaaaaatttaaaa

SEQ ID NO: 247234 - DNA, 383 bp, Gossypium hirsutum
gcatggatgagatcaacaatgctgcagtcattcattataatggaaacatgaaaccgtgggtcgacattgctatgaaccaatacaagaatctttggactaaatatgtggataatgatatggagtttgtgcagatgtgcaatttcggagtctaggttaagttaaagtgcttgtgcttctctccagcaatcaaggtaacaagaatacaaagttgtagtgattgttcatagtggcttgagggttataccatcagttttatttattttcattatcccatttattgtagaatttctattatcgattcataaattttgctatttcgtcctctcgaatataagcatgaattgtactgaaccaaatagctttatgtacacaaagaaaatgat

SEQ ID NO: 247235 - DNA, 202 bp, Gossypium hirsutum
gggtactcctctttatctttttgactccattcaacacatcccataccctttacttaaactttatgacacgaacattctctatacatgcaatatttcatacatttattcattcttttggacaacatttaatgtaccaacatgttaatttattacttaatcttaaaaatccttttccttatccattccttttaacaactttttt

SEQ ID NO: 247236 - DNA, 387 bp, Gossypium hirsutum
cccacgcgtccgcccacgcgtccggttgccaaacaatcgagtgttttatcacggagtttagagaagaggattgtcccgagggctttgtttgctcaagaattgtcatcaaaaggtttggttaatgactttaaattgtctgtattgtttgacacatcggagaagacgttcaacaagatgtttggtgactatttcgtaaagaaagcacccgagctcttgaagctatacaaagaaaatgttgagaagtgaattaatgtagactgcagcgttagtgtttttcgtgctgtgctgcctggattttggttcattcttttgatctgaagcttgttgtagttgttttattgtcttccattaatgaaaccttaagctcaacatgtttgctgtttgatt

SEQ ID NO: 247237 - DNA, 273 bp, Gossypium hirsutum
cccacgcgtccgcccacgcgtccggagctgctcgccgcgcccaaacctataaggtgcgcaagaatttgtggaggaggctatggcgataggtgacgccaaaatgaggaggtggacgggcatcttggttaggtcctaagttccctcaaatggagcgaaccaaaaatcaaaaatcaaaattatcatcatcatcatcatcatagttattatcaattatcattttcctgggcttcttttgtagtttctttatgcagaaaaaaattaatcagttattcc

SEQ ID NO: 247238 - DNA, 363 bp, Gossypium hirsutum
cggacgcgtgggcggacgcgtgggttggaacaggtgattttcaagaaagaaactgggactgacaaaagggtagactgtaacagcttttgtctcaaagggatcttgttactccattttctattcttgtttcattttcctttttccaattctacttatttatctgctcctgcaaatgcaatgggaaacaacccatgaacattaaaaataagttaagtttctgtcattgggggtgtatatatattatatatgcatatgtatatatattttatcaatgatgacatgataaggtcacttgtgcaaaaataaaaaaaccacaaatttaataattggggtccaaatggtcaggtgccagatttctttctt

SEQ ID NO: 247239 - DNA, 234 bp, Gossypium hirsutum
aaaatggtgtcgccatagttttgattgaatgaagcactgctacctccataaaaattcctgcgagtgcaagactccaattgccatgccccgagacttcccacggtttcctgaatgttttgagtaataaaatcctgtatgcatgtatgtatgtaaatcgacctttcaagtttacatattttttccgtgacagcttgccatggaaatggaaatatcattcatatcttttaagttttt

SEQ ID NO: 247240 - DNA, 372 bp, Gossypium hirsutum
cccacgcgtccgattcatctttcctttatttgaacagtcaggacctggacaagtgaggggctgtgaataaccctgaagagcaaaactaggtcgattatatacgactgagtttactaggaaactctattagtttttttacctatttattgacccctttttctccatactctctttatctctttctgataataaaaaaaaaagcagtggcggccaaaaaaaaaaaaaaaaattaataaaaataaaaaaaaatataaaaaaagaaattaattaaaaatatcaaaaacccatagatttcaccaaaaaaaaaaataacattaaaatttaataaattcttaataaaatattatttatatttaaaggggccgccttttt

SEQ ID NO: 247241 - DNA, 349 bp, Gossypium hirsutum
tcgctgatgccttggaagttttgggaaatgaatctccaaaatcaattgtgaaaggaaggctagccaacaatcgtaacatggacaatgacaataacggggttgagaatagttcacatttgacttcaaatatattggccgagcgccgcatccttgattttagcgaatgtgaaacacccagaaaggaaaccgaaaatgggaaatcctcaacaactgctgcaaccatgagtttctcaagcccctctttctatctttttaaaaagagcggatagtgcctcttattattattttttgactaaaaatccctcatgtttgtaggttatatcgtatatgtatgccttttttttttttc

SEQ ID NO: 247242 - DNA, 425 bp, Gossypium hirsutum
gtttagaggacttctataacttatttttcttacaaattctattaccaattatatggaccgaagctatggcttctatctcggaagtaaaaaaaaaaaaaaaaaaaaaaaaaaaaaaaaaaaaaaaaaaaaaaaaaaaaaaaaaaaaaaaaaaaaaaaaaaaaaaaaaaaaaaaaaaaaaaaaaaaaaaaaaaaaaaaaaaaaaaaaaaaagggggggccctttaaaaggaacaaagttatattccccgggcatgcaacttaaaaatttttttaaggggcccccaaaaaaaaattaacggcccggggtttaaaaaccgggggacgggaaaaaccctgggttacccaaaataaatccctttaaaaaaaatccccttttcgcaagtgggggaaaaacaaaaaaggcccccaccaaacccctttccaaaa

SEQ ID NO: 247243 - DNA, 194 bp, Gossypium hirsutum
gcagtgaagaaagatgatttaaaattggggtttataaaaaaaggaagaaaggaacagggcggatgagtttgctaagatatctattaatgaataggacatctatgtttttatgttacaagcttttgcaagatggtttcttcatttaaattttctcggttctgaaatacaacgtgttttctttttttttcttaaaa

SEQ ID NO: 247244 - DNA, 190 bp, Gossypium hirsutum
gaaaacccgggcgcgaccgcacgcgtccgtagtagacaaattctgtgctttactggttttgcaatgtccaaaattttgagttaggtctgcaatttttatgtgccgtatgtgaagttttgatttgttgttgatcttatgtgattaagactgagaaaagacaattatcaaagagaatgaatttgatactatt

SEQ ID NO: 247245 - DNA, 292 bp, Gossypium hirsutum
  unsure (1)..(292): unsure at all n locations
ggaaaacccggcccgaccgcacgcgtccgcccacccctccaatccttttcatgattcatgtttcgtcccatatccagctaaccgggtcgtttcatttgaacaacgcggcatgccaataaaccattttntgtaaacacattcctattattgtgttaaatacaaatatttgattggtgtgtattttcgttggtatattataatattttttataaagcacctcctttttacacttctattgactttaaaaaccatcctttttatatttaaatatttaataataattttattcttc

SEQ ID NO: 247246 - DNA, 381 bp, Gossypium hirsutum
  unsure (1)..(381): unsure at all n locations
cccacgcgtccgcccacgcgtccgcccacgcgtccgcccacgcgtccgcccacgcgtccggcccaaccaaggatcaaaactctaatgttttgtcctactatgtgttatatttatgtgcctacttaagctacctttcccggttatcaagagtgcccatatagaactctctctctctaaaaaaaaaaaaagagagttctttatatggagttttatattatgtgatgagagaataaattatcttgtnaaaaaaaaaaaaaaaaaaaaaaccaaaaaaaaaaaaaaaaaaaaaaaaaaaaaaaaaaaaaaaaaaaaaaaaaaaaaaaaaaaaaaaaaaaaaaaaaaaaaaaaaaggggncccccctaaaaaaaaaaagggggggg

SEQ ID NO: 247247 - DNA, 210 bp, Gossypium hirsutum
cccacgcgtccgtggaatcttatctatcttcggctccatggaagaaactgaggttagaggttcatcatgcttagccttgtacatttaacttctctttgacctatgctgtttctagccccatcagtgttagggattatcggggtcggcaatcccgacatccgagcatgtagttgactggaatttatgcaatctcaatgagacttttcattt

SEQ ID NO: 247248 - DNA, 320 bp, Gossypium hirsutum
catgaccggattccagcgtagctgccgcaaccttgcctgttcttggatcattggtgggggcttccattgtttctttgttttcttacatgctgcactaagctacatgtatcataactgagcatgtcaacaaaatatattattttatttcttttgaaagaaacatgtgatgaatattgaataaaattgaataaaatggagctttgaataccaaacaaaactaaaagaaaggctattacacatttttcccaaactaaatagcttgagaaagtaaggaccccatttaaaaaaatcaaagattacaaaaaataacaaggggcggc

SEQ ID NO: 247249 - DNA, 418 bp, Gossypium hirsutum
caccgacaagatccgcatgctcagagacatgcaccacaaccatgcaaggaacagagccggggtaaggaaccatcacgaccggcgaatattcaagctttccaaaagaatttggggcaagaaagcaacacccagaaagaagaatagcaagtcagaagatcaaggggctattgaaatgggaggtgatggtgtactatggtcatccgcctcattcatagtaaatagaaacaatcttttagattaggcagatgagaactttgaaattttggtttgtgaggaattgaaattgtggagtaaatcagttgtagccagaataatcatacaaatggtttcgaggagcaactaagtacctggcaagaaataacatttttatttatttatttttcagaatgagatgattttggatcgtgctactttattt

SEQ ID NO: 247250 - DNA, 366 bp, Gossypium hirsutum
cccacgcgtccggtgctttatctctgaactttcaatcaaatatctatctgaattgggtagcgtttaaaacagaatattagaatatataacttttggtttgaaaaaaaaaaaaaaaaaaaaaaaaaaaaaaaaaaaaaaaaaaaaaaaaaaaaaaaaaaaaaaaaaaaaaaaaaaaaaaaaaaaaaaaaaaaaaaaaaaaaaaaaaaaaaaaaaaaaaaaaaagggggcggcccttttaaaaaaaccaaaatttatttccccgttaatgaaaaaaaaattttttttaattgggcccccaaaataaaaaaaatggccggggtttaaaaaacttggggtatgggaaaaaccttggtttaacaaaattaa

SEQ ID NO: 247251 - DNA, 359 bp, Gossypium hirsutum
  unsure (1)..(359): unsure at all n locations
atgtattggacgcaaataggatatatttcagtttcagttatgttgtgctttatacaatatgattgataattatacttgtaaaacttcttaaaaaaatattggccacaggtatttcaaaccaaaaaaaaaaaaaaaaaaaaaaaaaaaaaaaaaaaaaaaaaaaaaaaaaaaaaaaaaaaaaaaaaaaaaaaaaaaaaaaaaaaaaaaaaaaaaaaaaaaaaaaaaaaaaaaaaaatataaataaatttggaaattattataaaaatatataaaaattaaaaaatattaaanagtgggggggggcttttttagaaaggaaattttatttgtgggacacaagggaattttatttttttttt

SEQ ID NO: 247252 - DNA, 425 bp, Gossypium hirsutum
cccacgcgtccgcccacgcgtccgattttatttttttaattgagctaagacggtgcatgggggagtgctcgatctatttaatttgtatttcttaaatattaaatgaatatgtgcgaattccagaattacaataaaaaaaaaaaaaaaaaaaaaaaaaaaaaaaaaaaaaaaaaaaaaaaaaaaaaaaaaaaaaaaaaaaaaaaaaaaaaaaaaaaaaaaaaaaaaaaaaaaaaaaaaaaaaaaaaaaaaaaaaaagggggggcccttttaagggaccaaagtttacttcccggggtttggaaggtaaaattttttttttggggcccccaaaataaaattaaggggccgggttttaaaaacgtggggatgggaaaaacctgggggtacccaaattaaatggcttggaaaaaaatccccttttgccc

SEQ ID NO: 247253 - DNA, 350 bp, Gossypium hirsutum
gaaaaaaagtttaagatagtgggctgacttgggctttaagattttaattaggttttgttttaatgttgggccatgtattggactatttttttgtttatttagtttgggttcttttaggccaaaattagctattacattaagagtgaattttttttaatcaaatttgaagttggatttacaaggtttttaattaaaagttttcacaatttaaaaaaaaaaaaaaaaaaaaaaaaaaaaaaaaaaaaaaaaaaaaaaaaaaatataaaaaaaaaaaaaatattaaaaaaaatataaaataaaaaataataaataaataaatataaaatataaataatttcatcctccctctt

SEQ ID NO: 247254 - DNA, 424 bp, Gossypium hirsutum
cccacgcgtccggtagaatttatgtttatttaaattaatctcaataaattgatcggtcagaaaaaaaaaaaaaaaagaaaaaaaaaaaaaaaaaaaaaaaaaaaaaaaaaaaaaaaaaaaaaaaaaaaaaaaaaaaaaaaaaaaaaaaaaaaaaaaaaaaaaaaaaaaagggggggcccctttaaaaaaaacaaatttaactaccccttcattccaactaaaaatttttttaaaagggccacaaaaataaaataaatggcccggtttttaaaaactctggaccggaaaaaaccttggcttacccaaattaaatctcttgaaaaaaaatcccctttctccaaggtggttaaaaacaaaaaagcccctaccctatcccctttccaaaaattttccaaccctaaaatgaaaatggaaccccccttta

SEQ ID NO: 247255 - DNA, 246 bp, Gossypium hirsutum
atcagataatgggaattgtctactaatggtgtgtggggcaatgatttctacaaaaaaaagaagaaaaaagaaaaaaaaagagagagtaatggttcctctttctctccccaccctgtttgtaatagtaccatgtaatgtatgtatatctttgtggcagtccattcaaagaaattcaatcctaaattaaaaaaaaaaatatataaaaattaaaaaaaaaaaaaaaaaaaattaaaaataaaatatttg

SEQ ID NO: 247256 - DNA, 266 bp, Gossypium hirsutum
caggattcttcatcttctcctttgtccatctccacaataagtaaagctctatcatgtcgagcatgcaggccatcgaccgttggattcaaaatttgagtgaaacaatgatgcatttgaaatgtttagagttttgaattttatgcgttatgatttttatcggttaaagaaaaaaaattcccgtaaagatatccgttcagtttaccctattttttttgttcccctgttataattatttttcatttttgacttattttggtttttttttt

SEQ ID NO: 247257 - DNA, 316 bp, Gossypium hirsutum
cccacgcgtccgtcacaatgtcaataacaaacttttcttgtttaaaaaaactgttactaggcgatgtcatataataataaaaaaacaaaaataaaatatatataaatagaagataaaaaaaacaccaggggccgccccttttaaagacccaatccttcctcccccttccttccaaagtaaaactctttttttggggccccctaattcaattccccggcccgcgttttaccacccccggaccgggaaaacccttgcgtttcccaacttaattccccttcaagccaacccccttttccccgcttgggttataacaaaa

SEQ ID NO: 247258 - DNA, 274 bp, Gossypium hirsutum
cttatggtcaggagaataatggaagggaatcacaggatgggaatggtcatccgtgatccggctgcagatgcaattgctgattttgcttgtgaagtggagatcacagagtgtgaacctcttcctgatggacgctttgttttggagattgaaagtcgacggatatttcgcatcctcagatcctgggatcatgatggatatcacatgacccactcatcgctttggatatgatttgtagcaaaagaactagctttgtgacccaaacttttccattttg

SEQ ID NO: 247259 - DNA, 195 bp, Gossypium hirsutum
cccacgcgtccggatatagaacagtttgaggcttttccggtttcagtgaactgttacttgcgttgtcatatagtagtagaaaagcgagttgtagtatgtataaatgtggataaaaagaacaccacggaatgcgtgtttatgtaccgaatcctgctcgacaattgagtttgaatcaatttcaagttcccagccttc

SEQ ID NO: 247260 - DNA, 319 bp, Gossypium hirsutum
tttattaatttgtaaaaaatacaccacggttttcctttttttacccaatcctgctcacaattgaatttgaatcaatttctatttcccaaccttcaaactgctaaaacaaaaaaaattaaaatatattataaaggggcgggcgttctatacaatccaatctttctttccccttctttccatttttttactcttctttattgtcacccaaattctattcactttccccccttttacaacattcgttacttttaaaaccctcccatttcccctctttttcgccttaaaaacattccccctttttcaaaattactttttatcc

SEQ ID NO: 247261 - DNA, 276 bp, Gossypium hirsutum
gtgaagaccaatgaaagcccaaatcgtgatgcatcatttgaggaatgcgcgagctcggattgtttaagctcaatggaatgcatgcaaggagctgcagtcgagcctaattttctggatttcactggaatggattttggttctgtttacggaatgaggagagcatttagtgaaggcgatataaaggtcagccttaaaattttttcggtggtttttgacatttttacttctgggaatgacgtggaagcatttttaggcatttatgtgggatattaattc

SEQ ID NO: 247262 - DNA, 397 bp, Gossypium hirsutum
gttttatgtgtagccacccttggtgacatatttaagggagatgctgatagggcttgagtcaaagtgagttgttctcctttccaacattgaagaggtataatataaaagacagagtgttgatcgacttttcgatcgggggtttatctgatgtctgtctgagctgatttttggacaatgactagtaggctcaaggatttcgattgtgcaaggttggatttttcgtacggattttgtagcttcaagtttttcaatttcaatattagtcatatttgggtgatattctcgacttttttctttagtttgcttgagattatttgttgttattcttggtggagttgtatgctttttattgtggcttcatattgtgattttgtagcaaaccttttgagtggacttt

SEQ ID NO: 247263 - DNA, 112 bp, Gossypium hirsutum
cagtattggagatggttgctgcttttgaaagggcatctgagaagaaaattcctcttgtaattgcgggacctcgagcccgtgattccggaattggttattctctaacccaaaa

SEQ ID NO: 247264 - DNA, 356 bp, Gossypium hirsutum
  unsure (1)..(356): unsure at all n locations
ncnngattttcttannaccttttnntaaaaaacccataaaagnatgtgtaaaagggtgtcctttcgtgtgtgggttctcaagtggcgtttctgtgcttctcaaggtccaattgcgtagtggggaccatgannagagaagggctttaagatgaggggcagcatctccctgtaagccgaaagatgccactttttgagttcaaggggtaagctcaactttgtttgaaaactttaaaaagctctgcttggagatgattcccaaaagtgtgggatggggccaacttctggggcttagctgatgagatttgcagctacctccagaatgggatgtagaaagttgctacttgaaatatgccgat

SEQ ID NO: 247265 - DNA, 239 bp, Gossypium hirsutum
tgtaaattgggcttgggtaatttagtttgtgccattcataattgggcttgtacaccattagagtggtgagaagccaaaatgggtgattaaaagatccaaagagcatgctttgcttatgaaatgaatcccaccatcagaaattaatgccttattataaaaaagggttatataaagtttttttttttttattatttttttttatattaataaaaattgtttttttattttatatttatttt

SEQ ID NO: 247266 - DNA, 258 bp, Gossypium hirsutum
cccacgcgtccgaccgagtccaagttccccccttatattcttcactaccatatgagatccgtcattgtcctttagatttcaattgcttgttggccttcacttatctccacatcaatttcattatatgtaattttactcttaaaacattggttttcgtgataatattatttaaatatagatcacaataacattatcttgtaagtataataagcttggattcgatttcaaataatttcatttcttattattatttattgt

SEQ ID NO: 247267 - DNA, 407 bp, Gossypium hirsutum
cccacgcgtccgatttggaggtgatcctaatagtcagcgggagcacatatttctgcttgtgttcttttggagcaagcaatcaaagaatctagaggagattaagcctggatctgacattaaatcagagccgttggatggcaataatgataatcaggactccacgtggctggagcttggcaaatgatcgaatgggatttattattattatttatttgattttcttttaatcagtggatggcgatgttgatgatgagaatcggaaaggaacgcgccaacgtggtccctatggagcatgtttcgaagaatcacgtgttgggatgaaactatagttgtaccagtcttgccttactccattggtcgaaaacgattactacctagtattttgatagtaggatgatatgtatgta

SEQ ID NO: 247268 - DNA, 396 bp, Gossypium hirsutum
  unsure (1)..(396): unsure at all n locations
ggaanncnccgggnncgaccccacgccgtggcgagaatacccaggtnntgaatgaagggggattgcnntggcggctattgttatgagnngaagatnganntggtgccaggccgaatgagttacgagtcgtagttgcgagggagtgagggaccatnncgataagaatttannaatttctnncttctcttttnntttgtcattnntttgaatttaattttaagaaatatggnntggtgatatnnnttggcgtnnatggtcatgcctttattatagcaccaatggattgctggatttattgttattacacatnggatttanccttttattatgttaatggcattngtttctctttaaaaaaaaaaaaaaaaaataaaaaaaaaaaaaaattataatttt

SEQ ID NO: 247269 - DNA, 248 bp, Gossypium hirsutum
ggacacccacgcgtccgcccacgcgtccgatttggagctaattgctatccttgtctttaagacttcagtaaacaaatgcaaataactagtttaaatcttgtcagcggtttgtcaattgcaaaccacattttatgctgtcattctccattaaaataaagcttttacttttaattttttaccattttacacaatattatttttttttttcttatctttgtaaatcttttatattttattctttttctttt

SEQ ID NO: 247270 - DNA, 451 bp, Gossypium hirsutum
  unsure (1)..(451): unsure at all n locations
gttcctctgccggttctttgttcctcttttccactgaagaagtctctggttctttgttccggttcggcaccaccggtgacaagtcaggagaccaacctagtggctagatgtcgacgagtatactgccatgctcatgattatcacatcaattttattcaaataacaggtagctagtgggttttgtttttattgcaattttgtggagttttggctccgtattttagtattatctgaaaatcaattgaagaggaagtattctttttctgggataatatgtggttgaatcacacatcttacattttttcttctctgatggaaaaataagtcttcattagctttantcaattttttttaattatttaaaaatttttctaacatttatttaatttatttctttttttttctctttttttttttttattctatgtttatctttttctatttttttttt

SEQ ID NO: 247271 - DNA, 300 bp, Gossypium hirsutum
  unsure (1)..(300): unsure at all n locations
gctagtattcaacataaagtacacacactttctgttggcctggggagctgacaaaagaccttggtgtgttagctatgatcatatcatgctataatgtgcagtcttatctctaaacaaagggacaggagacataaaatattctatatatcagaactgtacaagctagcacgtcaactaatattgacattgactaacgggactcgaattaatactcacacaagaatttggttcttcttgaactttattaaanaaaaaaaaaaaattaaaaataaatatttaaaaaataaaaaataaaatttt

SEQ ID NO: 247272 - DNA, 310 bp, Gossypium hirsutum
agcaattacggggtataagttgagcaaggagtgtatgatgaaagtggttttggatgggatgataagaggaaaatgatcgcatgtgatagagcgacatatgatgcagcagtgatagtaatatatgtatgtatatgttaagtatatttcaattgttttttacttgttattctaattgtgtataatatccaacaagcacacaagaagtatgaactatttttgaataaaagcattgatcattatgaaaaaaaaaaaaaaaaaaaaaaaaaaataaaaaaaaaaataaataaaaaatataaatataataaataaa

SEQ ID NO: 247273 - DNA, 235 bp, Gossypium hirsutum
attggaaggtggacgcagtctggtacgacaaatttgggtatcccctatgaaggctggggtgcaggggagtgcggaatctaatgacgtgtctatgaggccatcccatcacataccgaatggcagaacttttaccagaaaagtatcgggatgagatagctccgcgtgatgccattataggctgtatactgatactgctaagcagaagacgacaattctactaactacatactactaa

SEQ ID NO: 247274 - DNA, 347 bp, Gossypium hirsutum
  unsure (1)..(347): unsure at all n locations
cccacgccttccatcccgagcccccgccctnnnttnngttttttttttttttnnnnnnnnnnnnggaaccaaaagaaaagggattggttattggatgtcccattggatcctaacttactgctcttacatttgcaactataggtgggccgacctccccctttggagttgttcaagttttttcaatctttggtccgggccttttgtttttcttggtgtttggttggtagattggtttctagattagctaaaataaatttaatcaattaggctctttttgatagtctttaatgcatatgatacgatgcatgaaatgaatgcaaaaaggcgtcaattctaatttgatttca

SEQ ID NO: 247275 - DNA, 414 bp, Gossypium hirsutum
  unsure (1)..(414): unsure at all n locations
ccgggttcctggttgaatgaaatgctgaaaactttgggttgctgtggtttgtacccatcattgtgtatatgtatatatgaggtatgcgcaggcttggttttctttctaaacaaagaggtgagtgtgtgtgtatatcttgtcatatacccttggtcaggcctaatcatgtatgtgaacagttagaagtaaagacagtgaatgccttttacatgtatttgccaagctatcgaaactcaataaggccatgcttggttggattgttagtggcgtctgatgttatttggtacagctgtaatttaacaagtcacgtgactgacttttataaatgagttgggggatactatatttatttaacactgttgttttgagtctttttnnanaaannnnnnnnnnnnnnnnnnnnnnnnnnncccc

SEQ ID NO: 247276 - DNA, 365 bp, Gossypium hirsutum
  unsure (1)..(365): unsure at all n locations
gggaaaggaaggtattgatgacagtattttcagttaggaatatattgtgacggtatattttgttttggttttgtttttaattgaatcaggggagagtggatgtgtttgtgtattgaatttaaggttatataatataatgacattattggggtttaaatatgtttaatatgaacatggcatttgcctaaaaaaaaaaaaaaaaaataaaaaaaaataaaataaataaaaaaaatattattttaatatatttttnttaaattaaatattttatttattttatattttttctttttatttatttaatatttattttttttttattataattatttttattttatattattatttatattatttttttt

SEQ ID NO: 247277 - DNA, 444 bp, Gossypium hirsutum
cccacgcgtccgaaacaagcagcaaagatcgttgttgccacaatcttgatcttgaacctcttgcaagtggaagtacgcccaaggtggaagatccagctgatcagcttttgtcgagcaatcttcaacgcggctatggagagtgtagtttctctgctgcaggtctaataacttactctgggccaatagcatattcaggcagtctctctcatagatcagatagcagcacaacaagcactcgttcttttgccttccctatattgcaatctgaatggaatagcagcccggtaagaatggcaaaagctgagaggagacattacaggaagcaccgaggttggagacagggcttcctttgctgtagattctgaatacttctctattcaatccataggttatacaaatatattattttgcgcttatcaaaattatatttttgggtgggggggg

SEQ ID NO: 247278 - DNA, 364 bp, Gossypium hirsutum
tttaaaagtttggcctttattatatgctttttcctggggtagctatcattttggttaaaaaaacgtatactcaatggtctctcctctttgcttttggcaaaacatagtgatagctttagccattattatatgctttttcatgggtgagctaccattttggttaaaatttctttaacttaatggtctcttatctttgcttttggcaaagcataatgatagctttggctgaggccatgacctctctatgttgatgaatgcactgggagagatattctgaagtaaaatttaggagaaaatgttagtcactctatgtttttagtttttcttcagatttggtaaccatatttaagtctcactgtcatta

SEQ ID NO: 247279 - DNA, 146 bp, Gossypium hirsutum
  unsure (1)..(146): unsure at all n locations
gcgtcncnngcccacgcccgtccgnncccacgccgtcncnngctagatcgggcgaggcggctctngctctagaggganntccaagcnnttacgtagccgcgtgggcatgcnngacgtcannntagctctntnnctatagtgggtca

SEQ ID NO: 247280 - DNA, 504 bp, Gossypium hirsutum
  unsure (1)..(504): unsure at all n locations
ggaatntcccggggtcgacgccagcgcggtgccgctttanncattgcggatgcccatacatggngnnactgcttataactatgtgtccanngcaggtgnnngcttagcnncactcgcgtatggcgcatacgctatggcgtcagaggcgtganacgcggggatccctntctcacaaattcnaaccaatangnncttggacccatcaatnncaatctgatggggctctcatttatttcaaacccacacctctnntctctttatcacanggagggaaccatattnagcagtggttctaagtggggataaaaccaggaatggctgttgaaatacgagccaacttggtgattatccaaagcaagtaaatgcacaatgaagcatngatggtaggtttcccactgttgcctgatgtgattcatcatcattgagttgtgtacaataatctatttggattgaccaaatgttggtccgttaccatggtactttatcaccataaaaaaaggggat

SEQ ID NO: 247281 - DNA, 446 bp, Gossypium hirsutum
  unsure (1)..(446): unsure at all n locations
caaaattttcacctttcctttttctttaagaaaaaaaatcaaatattgttctaaatattagctttgtgaaccagccgacagaatgggcagtaaaattggggatgcgttagtgtcccctttgttcagattttgtggtgggtgtggctgttatatagagagaaacaagagggagggtttagggggatgaaatataatatttgattgtgggtagaaggggccaaattctctttgattgtagggtgaagagtaagtgaagacctcatctatagacagaccctctttgtatattagaatttagtagtaggtaggtaaaatttacttttgaagggggattttcttctttaatgccggggaaagaaaataaaaagcctaaatttattcccaaaaaaaaaaaanntnnatnanaaatnnnttntttttttttaatttttttttttttttttttt

SEQ ID NO: 247282 - DNA, 245 bp, Gossypium hirsutum
ttccctacaagcttacagcagagcagaaaacctgtattaagcggttaatcggatctccctaagaattggtggtaccccttgtttgctaattgctacaatcagccaacttgtgtaagttaacatttttccttttcttttatgtttctgttttatatgttttatttttttttcttggaaatgagaaattcaagtgttgctgaactgggatgggctgaataacaattacctaggggagttcatgaatt

SEQ ID NO: 247283 - DNA, 173 bp, Gossypium hirsutum
cccacgcgtccggaattgaaatttttgttgtaaactttaatcattgtttatttggcgtttgtttgatggtggaattgatataaaccagcaaataatgcagtaaatggcaacgtaaactagtcccgatgtatatatatatataaaaatccatataaggcattcttgtttgggat

SEQ ID NO: 247284 - DNA, 359 bp, Gossypium hirsutum
  unsure (1)..(359): unsure at all n locations
gcgcccacgcgtccgccaatattgaagcaacatatttttgttttatagactctaaaaaaacaatcaaccaggttggtgttgaattgtatagtgtgttagatgaatnaataaagtgcagagatactggtcattcgaaagagcaagtcaggtttagggctgtgcccaacaatgtacttaaattattgctttgtttattaaatgggataactatcatttttagttcttttctaattaaataagcttttttatttaatgcttttcttaaaatatattttttcctttcttctatatattatatttttatttattaatttttattattttttttaatgttatttattttttataattttttattt

SEQ ID NO: 247285 - DNA, 453 bp, Gossypium hirsutum
agatgaacactttgggaattaatgaagataatttggagacaaagggtgtgaggatcccgttaccttgggaacttttgaggccggtagtgacaattttagggcattgtttgtttggtcctttaaattcacaagatgtgaaggactccgcctcggtcgcggttaggtgtttatacgcgagggcatctcatgatttggcaccccaagcgatcttggcattgcagagtctgataaggcttgataagaatgcaagagcagctgcaacaacggctgctacggtgacaacaaacgcttcttcgaatgctaacactcctagcaaggctaagaagcccgaaatcctattggtttccaagtgatttcatggttttgctttttcaggtaatggatgtgcatagtgttttaagcttctggtatctttgtgtaagaaaattcacacttgtggaaattcaattttac

SEQ ID NO: 247286 - DNA, 277 bp, Gossypium hirsutum
  unsure (1)..(277): unsure at all n locations
gcccagccacgcgtacgcgtccttcatcttccttcttcctcttccggttctcctagccctcttcaacgccgccgctgtcctcttggccgacggtagcaagtgggctaggaagggcctangtcggccgccgccgttgtaggtgcaacttgggtcggtggctgccagagggatcaaatcgtaaacgcaggaaaggtttttggggccaaagtgtaatttagagaaaatatttgggtcaaattgtaatttataaaagttacggggttaaaatatacttttc

SEQ ID NO: 247287 - DNA, 311 bp, Gossypium hirsutum
cctacgcgtacgaccacgcgtacgaccacacataacgatttattttttaaaaaaaaaaaaaaaaaaaaagggttgtggttataagcattacttgaagatactgaaatatattaaatggatgtgataaaaaaaaaaaaaatcaattgggggggggttttttaagggttcaaattttccgtccccgggtttgcaaggtaaaatttttttttttgggacaccaaaataaaataaatggcccgcgttttaaaaacggggggatgggaaaaaccctgggttaaccaaatttaatccttttgaaaaaaatccccttt

SEQ ID NO: 247288 - DNA, 343 bp, Gossypium hirsutum
  unsure (1)..(343): unsure at all n locations
ggtcccaccccgcgtccggttgtaatatgtttactccctcgttttttattttataaaggaactgtttagttcaaaaaagagaaggtttatttttatatggtggatgggccaaaaaaattaaaaaaatataaaaaatttaataaatgtgttttttttttttgtgttttnttttttagataatgagattaaatatatttatattttttttttttttattttttatttttttaaatattttttttttttgtggcccctttttttaaaactcctttttttctccccttttcttccttttttatatttttttttttgtcccccatatttcttattctccccccttttt

SEQ ID NO: 247289 - DNA, 375 bp, Gossypium hirsutum
cagagttttctctgccatcctattttcctttggtttttgatcccttggtttagactactacttcccttccatccttttgttgcatggtgttaatgaccggacgcccaatctctattcatttacatatgttggtgatacctttgagatcaatcaagtggtttgacatatgtatcttttttccaaattttagtcttggatttttccggagtgtcttctttcttgtgcctttacatatgttggcgatatatataccatcaaggatagcagtggctatcttggcattactgtatgagtttacttttagccacccaactttaaggctctacttggaatgaaagatggaaacgagtgacaatggaaaaatttgtaaatcta

SEQ ID NO: 247290 - DNA, 292 bp, Gossypium hirsutum
cggaatggaaggagccgacccaagcgaccgcccacgcgtccgatgattttggttatctcattgtttcaggcttggaatatatctttggaagatggagacttttgtaatgtataaactagtagtcttccatggaaaaaaaaaaaaaaaaaaaaaaaaaaaaaaaaaaaaaaaaaaaaaaaagaaaaaaaaaaaaaaaaaattttataaaaaaaaaacaaacaaaaaaataaatatttttaataataaaagttaaattaaatttaaatttgaccggttgttttaaaaataaatt

SEQ ID NO: 247291 - DNA, 339 bp, Gossypium hirsutum
cttttaggtccaaaaaaaaaaaaaaaaaattttttttaaaaaaaaaaaaaaaaaaaaaaaaagagaggaaaaataagagagaaaaaaagaaaaaaaaaaaaaaaaaaaaaaaaaaaaaaaaaaaaaaaaaaaaaaaaaaaaaaagggggcgccccttttaaagaatcaaagtttacttccccttgcttgcaaagtaaaaatttttttttagggccaccaaaattaaattaactggccggggtttaaaaacgtgggaactggaaaaaccttgggtttcccaaattaaatcgctttgaaaaaaatccccttttcccaagttgggttaataccaaaaaggcc

SEQ ID NO: 247292 - DNA, 332 bp, Gossypium hirsutum
gcagaaattagctgcttgtgggtttgctgatgaggctgttgagaaatgggcatcggcttcgaatttggcttcgctttctcttttggcagagccgcgtcttcaaggttccctccttaaagttacggcatttttattcaaccaagcgaagaacattagagtggaagaagatcgtgaagaaagcagcaaagaaaactggagtcaaacaaagatgaaaatgataacatcgtggctgccgttgttgtgcagagggagcaatggcagcgacgtgccggtgctgagcataagcgaaagagccgagctcgagaagatattggaggacgccattgaaaagc

SEQ ID NO: 247293 - DNA, 144 bp, Gossypium hirsutum
cccacgcgtccgcccacgcgtccgtgtattcatatccgagatgtgtcggatacgggtttcagatacaattattgtaagaaaaacaaagagtcatatagtaacatagctagtttaacttgcttcataaagaagaaataatgattc

SEQ ID NO: 247294 - DNA, 302 bp, Gossypium hirsutum
cggaaaggggggatcccattttattgttgtcataaaatttggggggggggtggggaatcaaacccaaacatttttcagggtggggagacacacccatttttagcttaaaacccatttattttcatagggaatgcttaggatgaaaaagagctgtttttttttaaaagcatcaaattttgggtgtaggggatgaattagttgaagctcaaacatcaaattttattttgatatccattttttccacactcactcgaacctaaagaatttaatcagttcttttctaaaaaaagaagacaatttta

SEQ ID NO: 247295 - DNA, 430 bp, Gossypium hirsutum
ttttctttttcttgcaagagcttttatattgaactgctggaatggctgagggtcataaggtcaccttgaatgtgtatgacttgagtcagggaatggctcggcagctttcgatgaccttattagggaaggttattgagggaatatggcacactggtatggtagtttatggtaatgaatactatttcggtggaggaatccaacacattcctgctgggacggcaccatacgggagaccaattaaagtgatcgatctaggtgtcactcatgtgcctaaagatttgtttgagatgtatttacaggagattagtcctcgttacacagccgagacctacagtttgcttacccacaattgcaacaacttcagcaatgaagttgcccaatttctagttggtactaacattccagactatattttgcaacttccaaatga

SEQ ID NO: 247296 - DNA, 198 bp, Gossypium hirsutum
cccgactctattgtcgaattccagttactttataccattcttgatgacagaacactgatgatcaattccaactggattgctcaaatagaatattaagacacctaaacatatttcaaataattttgatagcaaatttgtacttgtgttcaaaaatatatcgaacttccagttaggtttggtggacttaggctgcaaatt

SEQ ID NO: 247297 - DNA, 332 bp, Gossypium hirsutum
gcaacccaggtggggtatatgacaagcaaaggtttcatggtacctctgctcaacagtcttgtccagatcagccttcttcaccccacctccaaagaggactttgattttattgccaaatctgtggctgaagacgaggattctcggcccctttcttttccatcagagggaagaaataatggagtgccattcgtgaaaagccccttacaaggcatgtttgttcacatctcactcgagatggtcaaccattggcttgtgcctgtatgtacattatgaatgataaaatcatttttttaaaaaaaaaaaaaaaaaaaaaaaaaaattatttatttttt

SEQ ID NO: 247298 - DNA, 422 bp, Gossypium hirsutum
ggcggccgggatatgacgacggtgaggttgttgatgaagcagaagcttccaccggcgacgatatttccggcgtttacgtgtagggtaagggtacaatacagttgtgggaaggataggaaatcgttgacgttgccgtgtgatgtatggagaatgaacggcggcggaattgcatggcggctcgatatcaacgccgctctttgcttgggccggtgagaacaaaaaaaaaaaggggcaagaagcagccattttctttgcatgaagaaagcttagcatctatatattctggtcatatgccacgagtccgaggcttgtaggaattctgtgaacaaaaatggaactccgacaacgtaattaaagaacgaggtgagcaatcaccgcaatggtcttgtaatttaatggtagttttttttttttttgttaaa

SEQ ID NO: 247299 - DNA, 290 bp, Gossypium hirsutum
  unsure (1)..(290): unsure at all n locations
cccacgcgtccggggggcatgcggcgtcataaagggttagggaaccctagggttttgttgtgactttgttgaatgtttgggcttagtttggattaagggttttgggccatattgggccattgtaatggattatttaattattttaattttggctgttttgctggtatggctcaggcaaaaattaggctctacaatttttataattttnannttttaaatcaaatttttatcataaaaaaaaaaaaaaaaaaaaaaaaaaaaaatgcaagagaagggattctttataaaat

SEQ ID NO: 247300 - DNA, 302 bp, Gossypium hirsutum
  unsure (1)..(302): unsure at all n locations
cccactcgtncnnngactcatgttcggacttgatggcctatctcagattgaataacccccgcaggagtttacagggaaggaagggggtcatataaaatatctttaaaaatccaagacctatgatacatgtatgcattgactgtacttggagattatatttgctttataaatttatccttatgatttttaaaataattagaattaatctactaattaaaattgatttataatatatataaaatatattttttttaaactctttcttattacttattattattatttttatttattatatatat

SEQ ID NO: 247301 - DNA, 434 bp, Gossypium hirsutum
  unsure (1)..(434): unsure at all n locations
gaccgacgcgtccgcccacgcgtccgaccaggcaaaccatcgaatcacaactagaatgcaaaggcgcatttacagtcatgcaactgatgctgcgatacgccccttggatgaggagaaagctgtgcaggctgctgtagatcttatgggggagctttttgtcttcacggttgctggagctgtcttgatctttgaagttcaaagaagttctaggtcggaagccaagaaggaggaagcacgccgaaaagatttggaggtattcattgagcagtctcctttctttttattgttttcctcttttgtatcaaggtgataaacatgatgctaaccaagatggagtttagtcctatgttgctctaactcttcatatttgttgaaatacccgtgtgcgacatctatgttcatgaaccaacacatactcngaaaatgatacaaaa

SEQ ID NO: 247302 - DNA, 327 bp, Gossypium hirsutum
aaaaaaaaaaaaaaaaaaaaaaaaaattttattaaaggacaaccaataaaaaaaaaaccgagagcgaacttaccgaaggttgcgagagaaaaaactttcttttatttataacctacattaatttcattgccctgctttttaccaccctccctttttgttaaacccccccctttccctacctaattccctttgtatccaatccctttttttctagttccctttttttccaaaagtccggccctttacccccttcccaccttttcccaaccctgattgtaaaatggaacccccccctgaccgtccttttaaaccattcccctttttttt

SEQ ID NO: 247303 - DNA, 219 bp, Gossypium hirsutum
gccaggcgtacagcttgaaggctggggccatgcatatttaataaacccgataatgtggagagttgtgatgaagggagcctgttcatgttcagtcaagaaatgattctcaaggagggtaatatatatacatggaccggtgttcatgattgtgatttctttttttttatatgaaatttccgtagacgaaaaaaaaaaaaaaaaaaaaattaaatttaataa

SEQ ID NO: 247304 - DNA, 347 bp, Gossypium hirsutum
gtttgttttcaattgaaagaatggcagtttttttcaaaaaaaaaaaaaaaaaaaaaagaggaaaaaaaaagaaaaaaaaaaaaaaaaaaaaaaaaaaaaaaaaaaaaaaaaaaaaaaaaaaaaaaaaaaaaaaaaaaaaaaaaaaaaaaaaaaaaaaaaaaaaaaaaagggggggccccttttaaagaaccaaattttactcccccgtttttccaagtaaaaactttttttttggggcccccaaaataaaattcatggcccgctttttaaaaacgttgggacgggaaaaaccctgggttacccaaattaaatcccttggaaaaaaatccctttttccccggttggtt

SEQ ID NO: 247305 - DNA, 279 bp, Gossypium hirsutum
  unsure (1)..(279): unsure at all n locations
cccacgcgtncgaaggcccatgaatctggactggtctgacagtcaactatcaacaatcaagggcggataattaccgaagtgaagcgagccaccttaaccgtgtgcatatattttgatcttacgtcgagggcccatgagatcaaagactagggtggatttgggcttcttgttatctttattgcgactattagaatagattggattgtaatgtgtgttaccgcatgcatggctgatacatctaagaagttaatttggttgaatagtaccgacgaaacgatc

SEQ ID NO: 247306 - DNA, 230 bp, Gossypium hirsutum
gagtagggtttattaggttattggaataatatgctatataacattaattcttttggcagtggtattttagggtgtaatagtaccttaaaaaattgaatgagtttggtctttccgaggaggttctgtcactgctcaacttgtgatattgtctgggattttgggagtgaaatggcggctgtaagctattcaacagtcttttctaatcaaatcaaaattaaagttttgaatgt

SEQ ID NO: 247307 - DNA, 256 bp, Gossypium hirsutum
cccacgcgtccgaaagcccatgaatcttgactcggctgacagccaaatatcaacatgaatgtcacataattaccaaaatcaaacgatccaccttaaccgtgtacatatattttgatcttacgtcgtggcacatgagatcaaagcctcggtttgttttgttcttcttcttttcttttttttttttattaaataaattggattttaatgtttgttaccgcatgcatggctgataaatctaaaaatttaattttgttgg

SEQ ID NO: 247308 - DNA, 324 bp, Gossypium hirsutum
cggacgcgtgggtagttctagatccctagtttccgccctttttttttttattttttgccggcacaataaagtaggggagtgagttacctttttcccaattaattaattttttctataatgcatacatgtttgatgcaaaaggaaacaaataaacattcctactttatcaactcccataccttatatactctacatatagacaagggatttgcttcacataattgtcgctcaaaaccattaataataacataataatgaaaagatgcataattaataaatcaattattccttaaacacactttgtttctaaaatcaattataatt

SEQ ID NO: 247309 - DNA, 381 bp, Gossypium hirsutum
gaaagatcaatatctctttgactattagtgaaaccagtgagctaaagttaagtgctggaaatggagattgtgtgcttcacatgaaccctcttgtacctgaagggaactttttcttaaaccttccttcttatgacaagttgctgactccagtaaatggcgcatacttcttgattgcaaccattgtaattttgggaggatcatgggcttgttgcatgtttaggaaagggaggcggcatgatggtggtataccttaccaagagctagaaatgggattaccagaatccatgcaagctactgaagtagaaacggctgaaggttgggaccagggttgggatagcgattgggatgaagacaaggcagttaaatcaccaatgggacgac

SEQ ID NO: 247310 - DNA, 134 bp, Gossypium hirsutum
cccacgcgtccggtttgtactctacgcactcatataaccatggcttgtcaaagtatcccttatgcctatatccgaaaagatttgtagaatgtgatttgaactatgaagtacatgctggcatcgacattgttttt

SEQ ID NO: 247311 - DNA, 321 bp, Gossypium hirsutum
cccacgcgtccgaatttgctcctctaaaagggttttccctttgaaaaatatcgatcttccgcgagatcaaattctctgctaaagagctaataaactaaaacacggtagttatgggactaatcttttagttttttctctataacagcaggaactgaggctgctatttgctgcatgtgcattgcttatctttttattgttcttgtgtgtgtgtgccttgaatgctattaaaagtgccatagcattatcaataggtaggtatccttgtaatttatctgaaagtctttaatggtgaaagatgtcgtggcagtagcataattatct

SEQ ID NO: 247312 - DNA, 138 bp, Gossypium hirsutum
  unsure (1)..(138): unsure at all n locations
ggaanttcccgggtgcgaaccgcacgcgnntccggtattatntnngtgtattttaaagttggaaatttgttatgcaagttacctaaacctttnngtgtataaagtcagatnnggattctaagatagtgttagttcgtg

SEQ ID NO: 247313 - DNA, 254 bp, Gossypium hirsutum
  unsure (1)..(254): unsure at all n locations
cccacgcgtccgatttcaaaccagcatagttgaaccttgttttcaaaattaacgttatcggcgaatgtatgtttgtaattggcgttgcctctacgagcacttaacaagccttaccattttttggatttttttttaaggcaacctattggaaggggaccggtttttccaaaaaaaaataatnaaaaaaaaaaaaaaaaaaaaaaaaaattaattaattttaaattaatttataataaataaaattaatatttttt

SEQ ID NO: 247314 - DNA, 477 bp, Gossypium hirsutum
  unsure (1)..(477): unsure at all n locations
gaaacccataaacccctccctctccttgatgctnaggaacaaaatcatgttgttgtttgcgattttaaagagtgggtgggaagagaaataactgtttaactttataactatttgtctatcattatgaaccctttatttctcttgatcaatacctttaatatcattttttttttaattcttttgttttgtcataacataatttatgtatctcttatattcttttttttattcttaacttttttttaattattctctattttttttatttcctattttttactctttcttttacttatatatattattttttcctttaattttctattttatttttatatttttaattactttttatttcttttttttatattttcctctatactttttctatttcttttttctttttttaatatttttttcttttctttttttatttttttatcttttatttttatttattatttattttttttattt

SEQ ID NO: 247315 - DNA, 441 bp, Gossypium hirsutum
  unsure (1)..(441): unsure at all n locations
gaaaacccgggcgcgacgcgcacgcgtnnccgcggacgccgtctcgctccacgtccgtccgcctcacttctgtccnnngcccttaaatttaatnntttacctcgtccagtgtcatactccgtgttgggtgcccaaganngattttgaaaccccggatcgcttanntggcaattgggcttcggaaggaaaaaccacccgcattatgcccaatcactgtnngacagggccatacnncttcttctaaccattgatttgcattatgnctcatnntgctcccgtaatttagaaaggatgtnaaagtttggtggtgatatgattcccaaaaaggcattgcagaggaacccatttcttaaacacccatctccggtnnggcgtgttcactgtgcnagtgaagacccaatggaacgttgaaattcttggctattttcataaagggtgaaa

SEQ ID NO: 247316 - DNA, 124 bp, Gossypium hirsutum
  unsure (1)..(124): unsure at all n locations
accaaaannaatttggnntcttcaatannagcatggtnntaggagannattgggaattgggtcctnngtgctatttannatttgcnntggatctnnntagtggtaannntataaaggggcatgt

SEQ ID NO: 247317 - DNA, 302 bp, Gossypium hirsutum
  unsure (1)..(302): unsure at all n locations
ctttttaaaaaatttacagagcccaccttctcattttttcttcttttcctctgctaggttgtcaaagcctagcttgcgccgaaataaaaagaaacaaaataggttttcaatctttctctgctagggcaaaagagttagcccatccttgcagctgctccgttgtgcgcacaccaacgatggcggccggaaaaaaaatcaacggtaagggtattccctccctttttctttttgattttcgaatgtaattntnnanaaaaaaaaaaataaatataatataaataaaaaaaaattaataattatat

SEQ ID NO: 247318 - DNA, 278 bp, Gossypium hirsutum
cttgatcaatgcaccagaatatcacattaattgtcggagcaattacaattaattgtatatggatttaatttttggattcagaaaaaaaaaaaaaaaaaaaaaaaaagaaaaaaaaaaaaaaaaaaaaaaaaaaaaaaaaaaggagcaaacaaaaaaaaaaaataaaaaataaaaaaaaaaaaggggcaccctactggacgttaaaaaacaacgtcaatgttaaaaaaaaggccggggcttaacaaaataaacccatagaaaaacctccggttttcaaa

SEQ ID NO: 247319 - DNA, 346 bp, Gossypium hirsutum
ggagaaaccagaaagaacggaatatatataaataaaatccacactcaaatgtaacaaaccaatgccgaagacatgaaaattccaaaacccatctctccttttaggctttcatctcttcttcgcacccaaaaagacccaaccctagccttcaaccttgtcaaaaacccaaacccagacctccgtcctatgacctcatcatcaccaagctcggtcgcgtcaaaatgttccaagaaatggaacaagttcttcaccaactcaaaagcgacacgcgcatagtcccagaggagatcattttttgcaatgtcatcaagttttatggtcgggccaagttacacgaacgtgcact

SEQ ID NO: 247320 - DNA, 204 bp, Gossypium hirsutum
gccaataataatcgctgattcaccagtacccaccgtgtgggacaatcaaatctcgtgttggatagttctgtattgcatgtctgatttgaatattttatcacattattattattattattatttttgcataagctctgtaattccattaaaccagatgcaattttgtggggttggaaataaatgcatcaaattttcattgataag

SEQ ID NO: 247321 - DNA, 203 bp, Gossypium hirsutum
attagattttccggtgccgccaccgccatggtctcatcctggtcatcattcttcatgcagttgttaaaataagtgtatcccatttttttatatacaaagaagaaataatgaattttatcgtttattaaaaacgagaagttagtgttttatttggatttgtaaaaatttgaactttttcataaaatacaagaattagatttgac

SEQ ID NO: 247322 - DNA, 364 bp, Gossypium hirsutum
accacgcgtccgaataaatcccactgttgtttctaaaattttcatttacaagtttaatggcaaggaatgaccggcggcaatgttgaaatggggtgccattatatgccaattaaaaaaaaaaaaaaaaaaaaaaaaaaaaaaaaaaaaaaaaaaaaaaaaaaaaaaaaaaaaaaaaaaaaaaaaaaaaaaaaaaaaaaaaaaaaaaaaaaaaaaaaaaaaaaaaaaaaaaaaaaaaaaaaaaaaaatcaaaaataacaaaaaaaaaaattaataaaaataaaaaaatatatgggggggggcctttataaaaaaaaaaaagtatttaattcccttgcttaaaaataaaattttttttattggggcc

SEQ ID NO: 247323 - DNA, 240 bp, Gossypium hirsutum
  unsure (1)..(240): unsure at all n locations
ggccgacccgcgcgtccgcccacgcgtccgatgaattgcagatgtcggtctttgagactgttgcaaattgcaacacttagaacagttgtatggtaggtattctttaataaagaacatattgattgttgtcaaagatgtaagaaaaccgaaagatgaatcggagtgtttaggaaggcttgattataatcttcatagtttttcattctattacactngttaatgaacatgcaatnttaattg

SEQ ID NO: 247324 - DNA, 415 bp, Gossypium hirsutum
gcgctctttacatactggacctagccctccttaaaaacacaatattcttgttagttgtttgtgtgaaaattatgttgcaaaactgaaatccccttttcttaaaaaaaaaaaaaaaaaaaaaaaaaaaaaaaaaaaaaaaaaaaaaaaaaaaaaaaaaaaaaaaaaaaaaaaaaaaaaaaaaaaaaaaaaaaaaaaaaaaaaaaaaaaaaaaaaaaaaaaaaaaaaaaaaaaaaaaaaaaaaaaaaaaaaaggggggggccctttaaaagaaccaaagtttacgtcccggggattgcagaggaaaattttttttttggggcccccaaaaaaaaataaccgggccggggtttaaaaacgggggaaggggaaaaacccggggttacccaaaataaattgctttgaaaaaatccccttt

SEQ ID NO: 247325 - DNA, 237 bp, Gossypium hirsutum
gacattcagaagctcctcgcgacatgaatcttgaggtcacagtgacttgaaccgcttctgcttgcaatgaaaataagtagatagatagtacaagtagatgtcaggaaaagaagatggaacggtgttttcggctatatgtctgatatggacttttttgttttctgttttccatggtcatggtctgcattatctgatcaaatttcccttttcaacagttatacaaagttgtttactttg

SEQ ID NO: 247326 - DNA, 334 bp, Gossypium hirsutum
acccttccaatcactcctaaccggagattgacctatattgtttctccttcggtctacagtcagccaggggtgtgcgagtggagttccattccacatgatcaaaatgactactgtattatcggaaactggaccagagaaatcattgcaataaagtcaattgtaaagttgatggccttagattgctcaaaattctgtcattttttggtgctcagttgccacattagccgcatctaaccaattcagtggatagctcagttaataggtttttttttttttttaagatcttcaatttttacatatttcccacttttgtatataggtaaatatgtaaatg

SEQ ID NO: 247327 - DNA, 342 bp, Gossypium hirsutum
accggggcgggatcacgcgtgcgacaaatctgctagacctagagaataagatgatcgttgtctatatatgagtttgtatattcattgcactagcactattatgaaaagaagacttcaccgatggttgaatcggaagaggatggcatatatttttcatatccattctggaaatttagatgattgaagctatatagattgtacaaagcagaagtttgggtgtaaattgcttaataacaggtagagttccccaattaggtgaagtctttttgaacttttgagatttttttatgggaagctatatatatatatatatgtaaatatgcagcaaagttttggactgtt

SEQ ID NO: 247328 - DNA, 421 bp, Gossypium hirsutum
gagtgccataacggtttgaacgcatatgattttggtttagatattggggcttatgaccagaaagataccagtgacgagaaaaaccttggggaatatatagcgataaaacattccgcaaagaactctgacacgtccttaatggattcttgttcatttgcttcacaagacattagcttgtcaagcatcggctctctatcccttgcagacaaggacaagttggaagagatgaaatcggagcttgatgcaatagattcacagtaccagcaatgtttccaagagctcttaaggatgagagaagaagcaatggaaagcgccaggaagaggtggatatcaaagaagaaagtatctgtgatgtgatgtacaatatcttttacttgctaaccatcaaagtttttctcctcttcccttagcttatgatagt

SEQ ID NO: 247329 - DNA, 258 bp, Gossypium hirsutum
gcagaggctgcttaagaagatgagcgaacaacaaagtcttagctcggtctaatgatggatgggggtggactttgtgcgtaattgaagaccttctagtaattatcaactcagtagattcattatttttctccaattctgttctttaaatgcattgctagactgtcatgatgaatgcaaaatatgtaagtgaccccacaaggcaatgttcttgatgccaaaacctaccttgagaaaattaatatgcaagagttcttaagc

SEQ ID NO: 247330 - DNA, 349 bp, Gossypium hirsutum
gaaggatatgtgcttaagcacgtgtgttttaggtgaaaggttcgagggttggtattccagaagaaaaaaaaagaaaaaaaaaaggacaaaaaaaaataaaaaaaaaaaaaaaaacgtgcgcgttcatgcaaaaacaataactaataaatagtgcaaccaaaatacaaactactggccattgatagacaaattcatttacatggaaaaccctgaaaaaacccaacttaatcaaaatccatgacatacccatcttgacacgcttttgtaaaaatgaagaattccgaaactgtcgtcattacaaacaggtgcgcacccaaaatccataactaaacgcgccctgtctcaatgc

SEQ ID NO: 247331 - DNA, 301 bp, Gossypium hirsutum
  unsure (1)..(301): unsure at all n locations
cgagcttgaagattaaatgaaatcagatattatcgtctctttttctccttggatatttttgcagtgggtgaattggggggggggggagtgtttttggtggcaactgcgagctatttagctgcaggtttttgtgaactgtggatttgagattgtataacacccacgtctacaatctgataattaatctaaacataccccaaattaatgtttgtttgcatgaacatgatccccttcagttccaaattgatgaatggattggatttgttttcttttcgaagcannnnantntaaaaaaaattaa

SEQ ID NO: 247332 - DNA, 358 bp, Gossypium hirsutum
  unsure (1)..(358): unsure at all n locations
gattccaagtgataatttagaactggtcctggcttgaattgttgtcgaacatcataattgataacgatgcattgatgcctgttatatacacctgcttatactttcacgagttttgcaggattaaaaaaaacactcgtaatgtcacattgcgatagttatttcatggtttacatcgatattcagtgtggacagtggtagcatcatttgtgctttcggcgatgagcgccacgcttcggggttgcaatttaaaatctccttggtggcaaagctaagaatttattcccaaannaaaaaaannaaaaaaaaaaaaaaaaaaaaaaaaaaaaaataaaanaaaaaaaaaaataaaaaaaaataa

SEQ ID NO: 247333 - DNA, 275 bp, Gossypium hirsutum
  unsure (1)..(275): unsure at all n locations
ccaagccggcggccaacccttccgcccacccgtccgcctggagacaacttgtatatgtgtgtcatgtcatctaatcttgagcctggctagatacggtatattaatgtttgaatatgtgtcgttttccttcttttcttccttactcccagntcgaatttcctacgatctgaagctcattatagatttgatgcatcgtagacatcctgttttaagctatatttttcgtgccatgttatttggccaccacatatttaataaatcttggggatacatnt

SEQ ID NO: 247334 - DNA, 264 bp, Gossypium hirsutum
ccattttatcatttggtttggtctctcgccggcactcggcagagaaacaaaaagcaaaacaaaaagaaaaataaggaaagaaaagaaaaataagaagaaaatataaaatatctcttcttgatttggagctctgcatttgggtacgatcaaacatatggtgcaaaaaaaagaaaaacacggggcggcacatatcaaagatcccagattacttactcgtagcacccgacctcacacatcttctatagacgccacctaaattcaatc

SEQ ID NO: 247335 - DNA, 401 bp, Gossypium hirsutum
ggatttttaaagaaaatacaattacaggtgttgggtaagttttgcaggctgcacgattccgactagaaagggggagaaacagttgaagaaaattcccctttgtcgtataaattggagaaacaaacaaataaggggccttatatttgtggacataattagtttggtcctctaatgcatatgcggaagtgatgcttctgcttgtatttggtgttatggagaggcactgtcgctgttataaattaagttataaacactattatgtgcatgaaattattgaaaaaaaaaaaataaaaaaaattttttaatttaaattttatttttattttttattatttattttttttttatttttttattattttttatttattttttatatttatttttttattttttttttt

SEQ ID NO: 247336 - DNA, 327 bp, Gossypium hirsutum
  unsure (1)..(327): unsure at all n locations
cccacgcgtccgcatcattgtactgtctgtttgtcacggcttcaaatgttcatgaattggatgtccgctctacattccatcggcaactcccagatcagaattattgcaatcacaagtaatgtctaatgcttcttctagttagatttcttttctttttttgtgaaattacatgtgggtcatgtataaccatatcagaagactgcatttagaatataagtttgtgtttctggatcccannanaaaaaaaaaaaaaataaataattaataaataataaaaataaatttttaaatattatttttttttttattatataattaattttattt

SEQ ID NO: 247337 - DNA, 170 bp, Gossypium hirsutum
  unsure (1)..(170): unsure at all n locations
cccacgcgtccgctcttctttttgtagacagccatggctttagcgttttggtgttcctccggaatgttcaagtggtgtataattcatgggcaaatatatagcaagcttggtttcgtnaaaaaaaaaaaaaaaaaaaaaaaaaaaaaaaaaaaaaaaaaaatttaaaattt

SEQ ID NO: 247338 - DNA, 231 bp, Gossypium hirsutum
  unsure (1)..(231): unsure at all n locations
tcgcccacaccttcgggccaaagaaaataaacgtgtttgttggaaaacactgaatttagtaagtgcttggaaaaatattggagtgagtgcttacctacatgtaacctgaccaatggcttaaaaaaaataattttattaaagaaacaaagaaagggagatcttctaaaccttgttgctttttttnnaaaaaaaatttaatataanntatatttttattttttataatataaa

SEQ ID NO: 247339 - DNA, 165 bp, Gossypium hirsutum
gctcaaaagatggaataagcttttgaaactctgctgggcggcagtgccattaaggcatggaatctggatgccaacagcataaaaagaataagcgtttatcacattaaattgcatgttgtataaaataatatagggatgttgtacacaatggactttgtttaaatc

SEQ ID NO: 247340 - DNA, 137 bp, Gossypium hirsutum
cttgggaatgctagagatcctctatattttataagggtcgttatcacagagggagttcttgcttcagttatattgctatatcgttccatacaatatcataatatgtttacatttgtgctcctaatgaatgatcttac

SEQ ID NO: 247341 - DNA, 300 bp, Gossypium hirsutum
cccacgcgtccgcccacgcgtccgttgcttccccatgcagtttcttgttattttccaaaaggggtttcagttattggagtacagttggagaacgatgtctctagagctccccttgttgctatttgctggatcttgtttttgggccttttcttcgattttgctttggattacttttgttttaggcttttgtttgtttggttttttagtctgtttgttcagactggtcttttaagactcataaccttatggctttgattttatgttgtcctttttgaataaaatccagcgattatttcttca

SEQ ID NO: 247342 - DNA, 188 bp, Gossypium hirsutum
cccacgcgtccgtccacgcgtccgtccactcgtccgcccacgcgtccgcccacgcgtccggcagttgttgcatgttggtttccccttttgatgagattttcgtatcttgcagttcggtattttgatttgtaaacgcggcttagatgttgtataacgtcacaataacatatcattcatattggagattt

SEQ ID NO: 247343 - DNA, 415 bp, Gossypium hirsutum
tcttgatataattacagtcagcctatgtgatatgagactaggtaatctttctttgactagcttggattttgagtactgtaatgaagttcgatcagctttgaccagtctgcagggaccatttgttgcaatatatgaggcagtggaaagggagaggagctaaaatcatctgactagcttggtgatggtcactccaattatagactcatttttattcgacattactgtaaaagtagatacattaatgatagttagacattagtgtactatacactggtatttttgtagtcttgtaagaatagggctacaatcttgttttttcgcttgccctttgatcaccattaatgcagggatatctatgatattttttttaacaaaaaaaataaaaaaaaaaaaaaggaaaaaaaaaaaaataaaa

SEQ ID NO: 247344 - DNA, 420 bp, Gossypium hirsutum
gttttaggatcccatttccgagcgcaagttgactattttattgagtatttgaagattcagagtgattataagggcataaacatggatcaatggatgggtttttttcggttctgcaatgagtggttaaaatttccagttcttgcaacaacactttctctggcagaaaaaattgaagaatacaaatgataagtttcccggacttcagtagttataatccggaccttgcttggccattgatcctggataatttcgtagagtggatgcagtcgaagcagacctgaaattatttggtttggtcaacttctcagctgtaacctccatctatctatataaaggctggtgctttaaagtttaaactcccccttttctttgctccctttttctagagccttatgtagatttcccgatagggcataaatt

SEQ ID NO: 247345 - DNA, 388 bp, Gossypium hirsutum
  unsure (1)..(388): unsure at all n locations
gggagattctgagtttatattacatcattcttaattccacgaggatatgttttagatgggttagggttgaacttaatttccctttttaggcatgagtgtgcgttttaaaggatgttggtccaattgttgattgttccctttttatcgtgtgtttttattcctctggaaagatagttgtatacatttatacatgttcaaccgttattccctattcaaggtttggtttcagcaatcattttagggtttaggtgcaaaaacctaagatttgctccctcggcaacgatgtctggttttgttatttgcatggtcgttgaaactgagtcctgngtcatgttggtctgaactgagattaaattggttggaccatcaatagttatgattggaatat

SEQ ID NO: 247346 - DNA, 306 bp, Gossypium hirsutum
catataacttatcagacgggctgaatttttacttaatgaactctacttgattgatttaattttgtatgggaaaacaattcactgcaacttgccttgaacaaaaaaaactatcgctgttcttccttttgttaaccaaagtcaatgactgatctgttataaatgtgcataaaaagccggactttcaagcttgccggaagttcctgttctaagcactgctttcacggacattctcatgcgcgctgtttttcgaacgacatgcttactgctcacaagctgacctatatcgtaccttctttccacaattgt

SEQ ID NO: 247347 - DNA, 399 bp, Gossypium hirsutum
  unsure (1)..(399): unsure at all n locations
gtccttggcagatttgctgctccttttttttttttctttttttcctttccttttacaggtatattagttctgtaggtgttagcctcacatcttcaaacacacacacactgcaataacctttgttaagctggttacctttataccaagtaaatggggcgcctctttgtctttgtctctgtctgtttctttccacatttattatggcaggctaaggctcgggctgtcttgttatccatatattctgctggtgctaggtggtggccgagatttggtttatcaatcatctatatttataagtaacgatagaaacaagttgaattcactaaaacagaacataacatattaaatttattcaaatgtaatcggttggtttaattccttctttttcaaannaaaaaa

SEQ ID NO: 247348 - DNA, 428 bp, Gossypium hirsutum
  unsure (1)..(428): unsure at all n locations
agtttctggatatctaaatttggggttggtttttgttattctcttttcattcctctgggagttttttcttttaccctttttcacattcgagcaagaattcagtgttatttcttatcttgttcaggttaattgcatttttacccattttttatatttacagaggtgtaaagacgatcctcgaaagcatcttatgaaagaaatgtaaaataatgcaggggttctatcactttgagtttcatatatatctgaaatgtaaaaagttttagtggagtggagagacatttatgatttatgtcaattcactgagggttggaatttttctgaaggggcagtagtatagatgttcctggcttagttgatatcggntagtctttagaatcttgaccttatctgtatagtggttgctgagctcactttgtatgagaaat

SEQ ID NO: 247349 - DNA, 434 bp, Gossypium hirsutum
ggcaggtcaaatagctataattgactacccataattacatattattgcaccttattgtaagttataattttttttcattaatcaaaggtttgatcttctaaataaaacaccaaaactataaatacataacataaaaaataaaaaaaagctatactaaaaaaacggactgaggataaatggagttcataagctctgggaatacaacaatgttgggaaacgatacaaagacatttctgtgctaggacagaggcaatcagaggaatgaactcatccttttctttctctttgtggatgttttgaagttttttatttgaggaatgggtatgagcatatatctatgatgtagcaatgctcattgttgcaataaaatgtcacttttttttttttggggggaggaggggaacgtacatctttattaacaatgagtcgattga

SEQ ID NO: 247350 - DNA, 368 bp, Gossypium hirsutum
tatgtaggcacaaggagagaaaaccttttgcctatggactttgtaatgaatgttatgaagaggtgagcacccatgtacctactaagcgttcctatcttcttttgcccgctacaattgtaccactggaaactgttctatcattgaagctcgagttcatgctgttactggttggtgtagttcatgaaggtttcaagagggcttgatggaagatcagatccacctgcattccagcgtgctgagaaagagagactggcaaaattatctatttaggaaaatgctaaagtatgttctgtaatcatactttctaaaggtttaaagacagtgaaaggttgaaaaatcctaattgtaatcacttgatatattttact

SEQ ID NO: 247351 - DNA, 313 bp, Gossypium hirsutum
  unsure (1)..(313): unsure at all n locations
ccgtccgcccacgcctgtccgcccacgccgtnnccgaacttgagnntaaattttttgtagggttnttaaatgtatggctcatatgtaataaacgcataggcttgaaaaanagaaccaaanaaaaagaacctttttgttgtattcctatatctccaatgngattcatgcaagggaatgccaaanaaaacattgaatctcatctttcgtagagctttcataaatgcaaaatatgttgtttcgggctcctgaaatatacaaaaactaaataaaggctatcgatgaagccctaaaatgtaaaagggagttgaaaata

SEQ ID NO: 247352 - DNA, 258 bp, Gossypium hirsutum
cccacgcgtccgagagattgcttcttctgatctgatttttcgatataaatactagacaaagtatggatatttcttgtcatttgcatttactactgttagtaaaataagattctcttattaggatcttagtttcttcacttgtattagtcttaacaatggcttgcattgcattggtgttgattttacctaaatttcgaggtttacaaattttaatttttattaattacttaaaaaaaaaaaaaaaaaaaggagaaacaa

SEQ ID NO: 247353 - DNA, 226 bp, Gossypium hirsutum
tatattcatatatatatgatgttgttcctatttaaaaaaaagaaaaaaaaaccacggggggagggaggaattaaactgacataagcacaccacaacagaaagtaaaaaagacaaacgctgaggaggttcgtaagggtcttcgctagtcttggctcttttcatcggcgtccattgcgttggtgtcgcttctacctatatagtgtggtttacctgtgggggggccttt

SEQ ID NO: 247354 - DNA, 296 bp, Gossypium hirsutum
aaaaaaaaaaaaaattaaaaacaaaagaaaaaaatatacaccatgcaatacaagaaacacatagggggggtagttgaaataaaacaaggttgaccggctgataacaaaaacttaaaaagacacacaaggatgcttatcataaacaaatgcttaccctgggggtggctggttaccatatgtatgcagcctgtccctccgctggtaaagttttatttattgatcctgctgctcgaaatgtttgatttgctcgagcaagaacaggacggtacttgactaaacatgcatttgcccaatta

SEQ ID NO: 247355 - DNA, 431 bp, Gossypium hirsutum
cccacgcgtccggccgaacgagccctagcaacgatagaactcttatgccggatcccctcgggttgctccgccttcgcctcacacgcgctcactgtcccgcttttggtaaagacgatactgaggatctccgacagggccacggaatacgccgctggtgcgttgatggcactctgttcggaatcggaacagagtcaaaaggacgcggtgagcgcgggcgttctgactcagctgctgctgctggttcaaagcgattgtacggacagggctaagaggaaagctcaaatgctgcttaaattgcttcgggattcgtggcctgaagattccatcggaaattcggatgatttcgctgggagtgaaatcgtacccttttgaaaacgataagtacttcacccagattctccattaaaaagaagaccaatatttttaaattt

SEQ ID NO: 247356 - DNA, 267 bp, Gossypium hirsutum
gtgaaatccatctactattatctgcaaacataaatactaaagaaaaaaaagaaaagaaaaaagaggggaaaaaaaaagagccagaaatagggtagcccggaacttgagggtacagacgcatagaggccaggtcatcgagggcccaggtatttaatgagtggtgcgtgtaattgccatgaaggagagcccgtatcggaccgtataaggccgtggtgaagcgcggtccttacctaattaattttttgttgaaagtttgaaatacattgg

SEQ ID NO: 247357 - DNA, 339 bp, Gossypium hirsutum
agaagaacatgtccttacggaagctatggaagtgattatgttttattatttattgtgctttcgcggttttggggtaaattcaaacatggaaacccgatttaatatatgaacaatgtatagaatattatattatttgcctggctagtactacacacgtctacttttctagacaaggtaagagcacattttatgaaatcatatttgctaagttttgaattctaaaataaaaaaaataatatcaaagtcaaaataaaaaaatattatataatttaaaactttaattaggcgggctcttcttaaagaaagaatattaaggcctcctgtatggcactttttata

SEQ ID NO: 247358 - DNA, 250 bp, Gossypium hirsutum
atgacatcgtgatctaattaccacctacgtagtgcttgttttagaattatgttcatacaaataaaattttgagcgaaactctttcggttcttccataaaatatactatgaacattaggtataacttctttttattggcacgtctagtaatacaaacggctatttttctagaaattgttggcacacatttcattaaatcttcttagctaagtttcgtatccacacatacacctttacgcagctggcttaat

SEQ ID NO: 247359 - DNA, 187 bp, Gossypium hirsutum
cattttcgaaatgggaatgatttttcattgatgaaaaaaaaaaaaaaaaaaaaaaaaaaaaaaagggcaaacaatataaaaagataaaaaattaaatacgcgtgcttgcaaaaaaaataacatggtctttcgtgtgacctaataacaattatctgtccgttgttgtcacacgttatgtctgttatat

SEQ ID NO: 247360 - DNA, 400 bp, Gossypium hirsutum
cccacgcgtccgcccacgcgtccgaattttttatttatgatcttgctgtcttgttatggtttttttgtaaggaaactctgtaagttgttaaccatgtaatatagtttttttatggtttattatgttgtgccacgtattgctatatccaacaaaagaaaggagactgtgcttttgattttgaaagacggttaggcatgtagaaaggtgaaatgcgtttctttcaaaatacgtaagtttgattactaagctactaagtaagtagctcatcaccatttctatgttttaatacagttctttgctgctaatataacttctatatttcttgatatataaatcaacataaatcttaatatggtcctgcaggggtttgggccccgattttcaagttttggttcgaaaa

SEQ ID NO: 247361 - DNA, 377 bp, Gossypium hirsutum
gattctgagtgtgagatacaagtatcatcacatcagagtccatttacttctgaagggactcctatggcactggtagagcatactccaaaaggaatctatggtcatatcactgctctagttatttccttcttgacccttttttctatcatccgaacaatggtgttgcatctgatgaagaagtcgagtgtaagtgatttgacatgtaacattcctgaccagcatgttgagtcaacgttcaaagacgaaaccccgcctccttcaactgctccaaggtttacaaaaggagacctggtgtcatctggtgtaagaaagcttggtgatctaaaaaaaaaaggtgagaagctacaatcaaaaagatttgagatgccttattagaa

SEQ ID NO: 247362 - DNA, 287 bp, Gossypium hirsutum
actgaatggacgtaccacaagtcgaattgctctgaatggccattgtcgctgtaaagaacgacgcggatgccacagtagagcaatccaccttgtttggaagggctctttgggaacatcctagacaatacctaaagacgtgagattattattcctacccagatctacatctcgaacaaacagtagtgtcgactactctgttagatcgaagattaacttgagtaggcatatagctccgtgaagagctcaaaactgtaatactgatctttgagcgtaactgtaaaacccag

SEQ ID NO: 247363 - DNA, 273 bp, Gossypium hirsutum
gttctagatcgcgagcgccggcctttttttttttttttgggggacaaaaccttgaaattttcggattggaacgggtaatatggtacataaaattttccataagtggagcactaaaaaaccaaccgagcacaccaattaataaaaattacaagttcaagttggtgattgaagtgatcttcctacagaaagagaagcttatactactactactactactactactactactactactactactactaccaccaccatactagcgagatacaaaca

SEQ ID NO: 247364 - DNA, 288 bp, Gossypium hirsutum
tgctgatgccgagggcagcaagatggaagaagttgactaagctttttaacatgtttgtgaagagttcatttggtagtctcatttttagcttttaatataatattctggaaaattggtcaatgctgagttttctttgtaatggtaaatgaatctttagtgctcgtaaatggaatctagtccactgccgtgaaaaataaaaaaatggaaaaataaaagctagtctactactaatgataataatacttataagtggagtgggggcgagattcaaacagaatatttttactg

SEQ ID NO: 247365 - DNA, 292 bp, Gossypium hirsutum
aaaacaggaaaagcaattacagactattgatttgctgcaataagctacttcgtctttcacttaaatgtaattgctgattgctgaaaaaaaaaaaaaataaaatctttaaaaaaaataaaaataaagactaatattgctatatttaaaaaaaaataaaaagagctgtggtattaaatttcaaaaaacattttagcctgttaaataggataaatacgttatatcttataatatatgagtttataatcattaactactgagggagaggggttatgaccatttcttttttttaata

SEQ ID NO: 247366 - DNA, 266 bp, Gossypium hirsutum
ccggttcagctttttctctattcatcacccctttgtttggtttatttgttatgaggaacctagtttatcaatttcaggtgtcgaatctttggacttgatttggttgttttttgaaccctagtctgttttcaatgaaattttggttgctcatagtcaaaaaaaaagaaaaagagctacctaaagtctaataaattgaaagaaatatacaaaaaaggttcttcactatacgggttcaagtcttacttttatcagactgcaagacaata

SEQ ID NO: 247367 - DNA, 370 bp, Gossypium hirsutum
gtcactctttgagcaaatgatcagaccctcaaacagaggtattgttctgaagatatctatggtggaggttagtccccagtgcttgactcccgactgaacggagagtcctcatcgggttcacggagtttatgtgggagcgcccgatccaataataccaagtgcgagtgttcttgcccaataatgccttttaagggcgtggattggaacccccactaaaatgtgtgaactcgtcgacagcttttcgtaaagtacggagacaaaaacctgtggctttaaacgagcataggcatcctgagaacaatacttacatttaggatccaagaccggcctagagagtgacttcctctcaacattacttctactcgggaga

SEQ ID NO: 247368 - DNA, 263 bp, Gossypium hirsutum
cccacgcgtccggaggtaatgatgatttgacattcactaaaaaatataaaaaaaaaaaaaaaaagggagaaaaaatacggaattgcataatgagaggaagtatactcaacagtcaaatttgactatttacactatgactgtcctgatccgaaagttatatgctatagcttggatggtggactggtttcaatatttggatacatggggggggcggtctcttatattgactcgatttaagacgcgcctcatgaggttacaatgtt

SEQ ID NO: 247369 - DNA, 373 bp, Gossypium hirsutum
cccacgcgtccgcccacgcgtccgaagagaagaaaagtgaagcagggactccctctgaagcaccggtggtttctaatatgaggggcactgaaataatccggcagctcgaccgtgatgctgatgtcgggttgagattgaggcatgttaattaaaaatgatgctaacgaaacacattaggaggggtttttttttttggaaagctggtatgaatgcattgataaaatataatttgacaagctgatatttcacaatgctgggtagtatgtggccaagaatggtgttaaaaacagtataattggctgtttaatcttgggcaccagaaacacgggtggtagggttcctttttggaacaaaaaacataatgttgctttaa

SEQ ID NO: 247370 - DNA, 169 bp, Gossypium hirsutum
cccacgcgtccgatccactgtagtcatatatgcactggtagaattttgattagatgttttaaataacaatcagcatgcttacagaataagagtacggatttgtggcctgtaaaaacaaaattaattgtagcatccacttttattgttatatatcatcattagattaccc

SEQ ID NO: 247371 - DNA, 326 bp, Gossypium hirsutum
tatgaactgtttgtgttttaaagtgggtttgtggttgtttaagggaactatgctttgcggtgctgaaatggtcagtgaaccacatgtttaattactatatgaataaagttttatgtttataattaacagattaaaaaaaaaaaaaaaaaaaaaaaaaaaaaaaaaaaaaaaaaaaaaaaaaaaaaaaaaaaaaaaaaaaaaaaaaaaaaaaaaaaaaaaaaaaaaaaaaaaaaaaaaaaaaaaaaaaaaagggggggcctttttaaagaatcaaagtttatttccccgtgtatgcaaagtaaaaatttttttatggggcccccaaa

SEQ ID NO: 247372 - DNA, 425 bp, Gossypium hirsutum
actcatgcatccgcctggctgcatgaattccgcacgagtttttttttttttttactttttattttttattttcgggtgggtttttttttttttttttttttctcttttcccgaacaaggattattttattaatcactttgggatattgcatttccaagcaatgaaacttcattttttgccaacaaggggttggattttttttttttttttacaacaaaaagttgactgccagagaagccaaacaaggggtgggagatatatatatatattcttattcttattcttatcatgggggggcttttcattttttggaatgaaactttataaagccctcccagagatgatttatcttcatattattttttcaataaaaaacaatcattctcatcccattcaaataatgcctcttaagtttccttttttga

SEQ ID NO: 247373 - DNA, 418 bp, Gossypium hirsutum
gccacgcgtgcggtcaggcgagcacgcatttattggtcccagcctttgctgctttcaacaatgtagtagcccatcagcagcagtgtcgcgaagctgatttctctaaaaaaaaaaaagagaatgcatgcctctcagacgtatctcacccaattggttcgtgcaggcgctcgctcaacagtctgaggctcgtttagtgggctgctttggtgtggcctctgacacacactcagactggacatcctcgttcccatctaatggtgtcacataatagtgaagtagagagcgtgttcatgacagcacgcgcgggtgctcttccataactctcgatgactcaaaatccgaagctgctggattaagaagctggctactctagtctcctacatgtagagataatatctgatgcatcatatctttttat

SEQ ID NO: 247374 - DNA, 380 bp, Gossypium hirsutum
ctttggtatgcttattgccttacctgtagcattggtctactatcttcttttagcattgtgaaaatgttttcctggaaaaatactgcaaattttctttccagaagcagtaacctgacatcagtttctgggaaacttcatagatggacatcatatatttatagatgtccaattcagttttctggaaaattctttgacattattgattgtttcctgggaaaaaacaaactatatttatacaagttattacatttaatacaacagagaactaaactgttgattgagtgaaatatattctcgtatttattctttaatttttttttcaaggttttgaataacacaaattcagccaaacagcaacgtgtttggtgttcaaaagtttt

SEQ ID NO: 247375 - DNA, 311 bp, Gossypium hirsutum
gcatggtgtgcttattggcatgcctgtgtctcttttcgactatggccttctaacatcgggggggtcttttccaggaaaaagacttccccttttttttccagagtctgtatcacttcatcagttactgtcaaacttcatatttggacatcatatatttatagatgtgctattcagtcttacggataaatgtttgacattattgattgcttcctgggaaaaaacaaactctatctatacaagtttttccgtttcatacctctaagaactaaactgtggatcgtgcgaaagaatagctcgtatttattctttaa

SEQ ID NO: 247376 - DNA, 308 bp, Gossypium hirsutum
cctcacgcgtatcgaagaacaagctaggaagcatttttttttatccgaacactggtctatggcgtgggggatttcatttccgtttaaaatcaccagctcatctggaaaaatcatcacacgtaatatccattcactcagaccgtgttgctctggctgatcaaataataactcctcgccgtatcactaattgattatacttgcaggaaagccaatggactccagccctttgctaaacaacttcgtcccccattagctcctctttaaataacatgttgcgctataaatgctaatgtatacttcttattact

SEQ ID NO: 247377 - DNA, 405 bp, Gossypium hirsutum
ggcgttgaaggcaaccgcagtagaaggtacagaccctattagtttgtgggagtgtggacatcaggtagcgcttttgctgggaaacaggagacagacgttgtagttggatgaatggtgaaggggactgtttaaccaccctcttatctctctcgttcactgcctccatacccaaaatcgtggattataaaacgaaattagagagtgaaaacaatgttggaatggggaaatttggagcatcatatagaaaacttaaaaaggtctgtaggagaggtacttgaaattatattgttcgacaagtttagttgtacttggtggattgctttattgttacatagcaggaaacagaagttgggttttgcttataactctagaggctatatacaggctccactccgtactccatgt

SEQ ID NO: 247378 - DNA, 138 bp, Gossypium hirsutum
tccacgcgtccgtaaagatcctagaccttatctgaatgtcatcttcagtactgtaaatagaatgaaaatacttggaatatatgaaaaagcacaagtcttaaaatcaaataaaaataaaaaagagaaatacatttcaat

SEQ ID NO: 247379 - DNA, 298 bp, Gossypium hirsutum
aaagttcaaaaaaaaattaggacacagattttggtctttaattattgggcaatctaatttgaaatttgtgtttttctttttcactacagatagtgtctgtagtttgtaattttgtaaatactaaagctttttttttcttctttgtagaaagtttttaactgatgggcattatcactttgttttagactagcataattttttttcccttatttctatttttggaaaaaaaaagggcactatctcttatttatcatcccaacaaatattaaaataaattgtctatgaataaatagtttta

SEQ ID NO: 247380 - DNA, 306 bp, Gossypium hirsutum
cccacgcgtccgagcctttgctggattcgtctcggacaagctgagcatgctttaacagatgcaagggcttgcaaagcattaaaaccagactggccaaaagcttgctataaaaaaagggctgcattgcggttggtggcaaaaatttattgaacaacttatggcctttaccaaggtgtgccagttggcccccaaaattaaaaacctgtaaatgcctttaaggaaaccagtgaaaccgggaagaaggttcatgggacccatcaaaaaaaatctaattaagtttcccagccgattcacccaaaatttgag

SEQ ID NO: 247381 - DNA, 420 bp, Gossypium hirsutum
aaggaaaagggaggaaggttgaggagctactaaaacgatgcccaaatcttaagaaaattattatttttagggttatttcaaaagccaagccacacaaggaatgccagggaagtgtatgcagtatccattgttggtccttttcctattgctgtaactaatttattggatttaacaaataggtagcttgggagactgagtttccattgattgcaactgcaaaagctttacaaattttcaagaagaggagccaatgtttgcatgttattcaagtatatttagtctattggtattcttgctttgtattttccagcttctaaaatacattcattgatgcaaggaagccttatatgtccaacaaaaaaaaaaaattcaatgaacgacaaaaaacaacgtcgagactggaaaaaccatggcaatacc

SEQ ID NO: 247382 - DNA, 420 bp, Gossypium hirsutum
tccatacgtgttaggatgtagactcgctcttttagacaaattacctacatatggcagccgaactggatgcggcttaactctatggctgtgacacatagcatgattggcacatggatgacatatccacatacgaattaattcctaaaagatgagagcgaacgattctcataaacttccttaatagacctaaaacgtttaaatatttataaaagattgacatctcatccactttgcaacccatatgtatgtcacattatcgtagattaagaaacttttacttttctatgcattttggggcgttttcacggaaaaaaataaacttacccgctcatagaagcgaataaaaaatgttatcctggaacttacgtcaatttacactaggaatattgtcaatgttaatcgagtgaaaactcagtccac

SEQ ID NO: 247383 - DNA, 435 bp, Gossypium hirsutum
gttttctctacttccccttctccttctgctctccaatggctaactgacaaatacgagtccccacccattccaccaaacatgtttatcttgtctttcagaacaaaagaaacaacaccaccagcctaagcctaaacagatccgagctttctattttggctaaaccaagactatatcttgttctatattgttggtgggtctgtttgtttccaaagataacttcactgcattttctttgctttttccaaatggatgttttctagcttccttcttttggagatcttaatgtgatttgagcaagatcaaaaggaaacagaagatgcttgtagatttgcggaacaaaatgcagctgcacagagatattttgttgaagttttgtgtgattgatcggatgtgtatgccggctttcatcaactactttcgaaggccttactagga

SEQ ID NO: 247384 - DNA, 433 bp, Gossypium hirsutum
cccacgcgtccgtgcagttgttgaggaaattggagtgccagctacatccttgtcagatcctctttttatcggcatatcccgcagggtcttgaatgttagaccagctatctttttctttattaaatgcagtcttgaatcaaaagaaatccatcaactgtattctaaggcacaagatggctatgaatccactcaactttatacagtctcaatgattgaagtagagcatatgacattaaaaatgcctggctgtcatcaaggtggatttgctctctataaactaatggttgaagcgttgaagaagaactgatgatagttcattgctgctgctctcttcgatttcaaatttctactcttctatatattttccatcttagatttcaaagcaataacatcgagttcataaactttgatgtaactataacggcatttaatt

SEQ ID NO: 247385 - DNA, 347 bp, Gossypium hirsutum
cccacgcgtccgcccacgcgtccggtttgttcctaaactctgatacttgatgatggccttaatcaattatggatagtctttgttgtggttaacataaaaaacaaaaataaagggtcacacaaataagaacaaaaaactccatcaacttatcaaatgacacctaaaaaccgaaaatgttagccaaattagagtcggctcaacaacaaaaagaatgtttcaccagttaatgtaaaagataactggtaatataaaaaaagaaaaagagaggttggcctaagaaatatgggcccgattggacaatggcaaaggcattgtcaccaatgcctatttcctcatccgtccctccc

SEQ ID NO: 247386 - DNA, 264 bp, Gossypium hirsutum
cccacgcgtccggcgatgtaaacgagcttaattacagcaatggttttgattcgtcaccctcaccggatcagcctcctatggatttctccgacgaaatgctaaaagagtggacggccgccgcctccactcactgctgtcaccaaagtgcggcttccaatctccagtccttgcctccatttattgaaaatggaattgaatgaccttgaaaaaataaaagacgaaaaatattttctcatgtaaactaaataaacacatcttccatca

SEQ ID NO: 247387 - DNA, 244 bp, Gossypium hirsutum
cccacgcgtccgcccacgcgtccggaacaaactacgtcgagggtacatgttcttctctagggacccattttggtgcgccaaaactaattttgtcacgactatattgttattgcttgtattctcctgcctatcattattttatatctgcaactctttggtgtgaaatgttagatccatggtaatttacaaaaattatttatattaaaattgtttttcctaaaaaaaaaaaaaaaaaaaaaaatat

SEQ ID NO: 247388 - DNA, 105 bp, Gossypium hirsutum
cggacgcgtggggtgttttttacattatttgtgtagctgcccaaataattatgtcaagatacaagaaagcatagtgatgaatgacaataaacaattctatttatc

SEQ ID NO: 247389 - DNA, 440 bp, Gossypium hirsutum
gcaacttctagtgtctccacagggattatttaggatggatttcaacttgcgtctcatatgttactttaaattgaaccatcaaggatttcaaagcttcattttgtaacctggcattgggcttttagtgccagattgtgcagaatctttgaaaccaagatggttatcttcctgtgttgagcaaaaaaaaaaagcacttgctttgctaacccgtatgaaaaatacaaccgcgaggatttcttcaagcggctgctatcttgagaacggcattttttatataccctctttgacaagaaagaaatgttctttttaggagaatctagaggcgtgagagtgtaccagttgcaaataaaaaaaatcagaaaaccagagtgctttatagataatctggtcatacaaaaaattattatgattctaagacagcgatgttacatttgaaaaat

SEQ ID NO: 247390 - DNA, 241 bp, Gossypium hirsutum
cccacgcgtccgaaagtgaagcatatgtagtaacttttgtttttcaccgtaatcttgggtcggcgttttccttttattttgttggtgattgaggtggtgctaatagttagtacaaagtccagctagtggtaaaatgttgttaagggggctgaagcggctgcaaatcaaggcaaaaaatgtagcccgcagctcttggtcttagtcattatatatatatactaatttttatttttactgctct

SEQ ID NO: 247391 - DNA, 404 bp, Gossypium hirsutum
gccgcaccgaatacatgggcaagcctcaaacaatcaggaacaataattcaccgttgtcggcagctgtgatatgatgataaggcgacctggttctcggttaaattttatttggaagcctggaaggcctcgtttcatgcttatgttacagctccgtagctgctggatttatcatctcctggtgtagcttctatagaatagttttctttttccagacagctttcatagctcatactgcaaagcaaaagaatgtaaccgttcttttgtaagttttgttttgtttttccctgtacttcttaaaccacttgggagaaagaatgcttgagattatgcttaaaaagtaatgctatgcccggtactacctagagaatctgttacttacaacctgaattcctttcctatatgtg

SEQ ID NO: 247392 - DNA, 375 bp, Gossypium hirsutum
cccacgcgtccggaactctgttttgccttttctcatccttggtggtaccatataatgtaaaagggaatataaataatatatgaaaaataaatcttccagtgaaaaaaaaaaaaaaaaaaaaaaaaaaaaaaaaaaaaaaaaaaaaaaataaaaaaaaaaaaaaattaataaaaataaataaaataaaaaaaaaaaaaaaaataaaaaaggggcgcccctcttaaagaaccaaaatttactaccccggtcatgcaatataaaaatttttttattgggcacctaaaatttaattcacgggccgtgtttttacaaagtctgaattggaaaaacccttgcataccccaaataaatgtttttaaaaaaatataccctttt

SEQ ID NO: 247393 - DNA, 430 bp, Gossypium hirsutum
  unsure (1)..(430): unsure at all n locations
cacaaatgaactcactttggcctggccacactcaacaatgaagatgcctgctgcattctgaattaaacagttgagcgcttggggctcgggcatcaacttggtgactgttcttgcatcgaatatgcaacacccttagctgtcaaactgggaaagaatggtggagaatcaattttcttatagatccagtcttttgttctttcttgttgagtagttttttaagttttcttcacctcactaaaaaatgactgcttttgacaccttntttctttagaatctcaaatntactttggtcagagtgtttgttcctcctcttcttctgggtggtgcttttagagtttagatgtaagactcgtgtttatggatcttaatatgataggagtcttctatagttttcaaattttatatattgttcatttattatatttatttt

SEQ ID NO: 247394 - DNA, 288 bp, Gossypium hirsutum
cccacgcgtccggttttccgtaggtacagagagattatttctgatcgcgtgtccaaggagaagagtgagtttgtgaatgtcactgtttctcttataaaagcttgatcattatcgtcatcatgatcttcctttattttattattagataaataatcactggttatctatgctagaaatgaactgttcgaagcaaaccgcagtatccagtcaagagtaatctcttgcaagcatattgtttttaattatagctctctcgcatgtaatttgattaaatcgaaacaaccaatt

SEQ ID NO: 247395 - DNA, 370 bp, Gossypium hirsutum
ggaaaaggtaagggtgcagcagaatatgagtaaatgatggaactttcataagggcccaaacaactaaaagttgacaaaataacaatgtacgacaaacgagagtggaattgcattttgcaatactgatttggtttgtaggaaaatgtgaaaatctttgtgtaacccataatcacaaagccatgtagtgctaatactgtttaagaaggttccaattacttagtttcatgctcaaaaaaaaaaaaaatattttatatttaaattattattatttttaaattatttttttttatattattttttatttgggttgtcttttttaagatatacttaatttttttttttggtgtttatttttatgattttttttttt

SEQ ID NO: 247396 - DNA, 193 bp, Gossypium hirsutum
aaggctttgagctttgacttgagctcctagtttcaatgtcttcaaattgtacatttgtctgagaaaaaataatttctctgttaaattaaattgatgaacaataaaatttttgtggtcatcaatattaagctaataaacttccattatgtatacaaggaaaacctatgttataggggtttccctttttcttctt

SEQ ID NO: 247397 - DNA, 363 bp, Gossypium hirsutum
cccacgcgtccgatgaattcaggaggtattgcacggtataactggcatccgcacaaattgcgcggagtcaggatcgaagataacctgtaaatgttgcctgccacatttaccatttcattgtgggtattcctggaaattggggggggggatctgctgattgtaatgctatatatatagtgggatatatattcattagcctacggtgtaaatggttttacacttgttcctgaaaatggagtcttattctgcatatttttcatggatggggtggctttttgcaatatatttgttttttataggtgcattgtaatttatatttttccatttatgtaattttttccatcttctatgttgtttgtttat

SEQ ID NO: 247398 - DNA, 427 bp, Gossypium hirsutum
cccacgcgtccgaagataatggaattgaatgaaatcaatgattgaggagatttaaatgaatcagaaatggatgagcttagacgattgaatattgaattgtgggtagcaattaaatgtcgtgaaccgatttggtgtcaaaaataagaattattttgttaggtgaaggtgattccaattttgtttctttcataaagcagtgaaaattagatcgaaggaaaagatagtgcatggcttaaaatttgaggattcatggtgcaatgatacaaagtttttgaaggaaaaaatgttcaattcgttcagtaattactttaacagctcatcgagaaaatggttagtggatatggctttgaactttaagaagattttcgaggaagatgcagcgaaacttaagttatctttcacgttgaaagggattaagaaagcatta

SEQ ID NO: 247399 - DNA, 234 bp, Gossypium hirsutum
cgtaaacgtaccccctagtctcgatctgtttggggccatttattagaaatctacttaatttgtagctaaggaaacctttagcaatgaagaactttatgacccatttagttcatcctaataaaatataggattgtaatggagtagtcattatttgataatggaatgtaatggaattaaatagacataacaggttgaaatttataaaaaaaatttatttttatatattttatttta

SEQ ID NO: 247400 - DNA, 413 bp, Gossypium hirsutum
  unsure (1)..(413): unsure at all n locations
cacgtgggtgaggccgacgcatggcggtggtgcagcacgtgctaagggaagcctggactcgactgcggcgcaaggattttcagaaaccctagaagcttctggggtattcctccgatttgggctacggtttgggcttgtaattcgggtttgggtgtgggtaaatggttttgggttagtgaatttgtgctttgggtttgtattgtatttggactagtatcggcttttgtaatttggacattaactggactttattatttttttgttttnnaaaaaattatttattttttattttttataaatatttaatatatatttaatgtttattattttattaatttatagtttttttatttatttatattttattaatattatttatttatatgtattattttatatttaatttataattt

SEQ ID NO: 247401 - DNA, 205 bp, Gossypium hirsutum
taaaaaaaaaaaaaaaaaaaaaaaaaaaaaaaaataaaaagggcaaccgatctaaaaagaggcagcttacaaacacatacatgcaaacggccaacctcttttatggtgtcccctatatttaatccagtttccgggcgccgtacatcttatttcctggctattctatgggttcacccaacttaattcttttgctttgggtccccaa

SEQ ID NO: 247402 - DNA, 280 bp, Gossypium hirsutum
cttttctgtattgtcataatactttcaaggaatgccatccaaagctacaccaatggcggtcgaaggatctcatgtgcctgtaagagcaacagatagagttcccacttcagtttcattccttcgaaaccccttatctaatggactatgttgctggtttatctgctgaaggaaaaatgagcatattttttggatagaaataaaaatgttgttggtctatctatggcttcataagataaatctttgttgttcaacatcatatgtttttatggagtttactttt

SEQ ID NO: 247403 - DNA, 387 bp, Gossypium hirsutum
cccacgcgtccgcaacaaccccatttatcatcaagtgtggagcaaattccaattccgaactggttatcaaagcagatgcaaaggttcaggaacccaagggtggtgaaattgtaagggttgttcctagaccctctgttttagaaaatatgagcttggatgaaatgaaacaaatattctccgaacttccagaggctctgagcttacttgccctagccaggactgcggatggcacccgagctcggtattccagattgtataggacattggcgatgaaggttccatcgctgagggatctagtcggggagctcgaaaaggggggagtgttaaaagatgttaacctgtgatttgacgtgctctggagggatttgcggaatcaaatgtattgga

SEQ ID NO: 247404 - DNA, 361 bp, Gossypium hirsutum
gtactatgaaatccgagctataatggcactttacatgccattggatagtcaagcgggggtgccgaaccatgtaagcgatagtctagcatgaatactaaaaactccagtatttgcagggagtagatgtggttcttcttgttatacattgattcaattggatttggtgcaaggattttattgatatgtaaaatatattgagcattaaatgaatacagaatataaatggctcttttgttttttaacatattttttggaaaaaattattttttaccttatttaaatattctttaattttttttctttttattttatatttggttttattttatttattttttctttaatcattatattttttttt

SEQ ID NO: 247405 - DNA, 361 bp, Gossypium hirsutum
cggacgcgtgggcggacgcgtgggaaaaaaaaaaaataaaaaaaaaaataaaattataaaggaggggtttattattaatagattgtcctctttttataaaacttattcttaaccactttcatacatccattttttactttaccataaaacattcttttggttaaagttctactacgtatgtaataggagggcttcattccctgtgactttggtctttaaattaattgtgtgattgtctcctctttacatactggacctagcccttcttaaaaacacaattttctttgtagttgtttgtattaaaattattgtacaaaacttaaatccccttttcttaaaatatatatactttatattattt

SEQ ID NO: 247406 - DNA, 281 bp, Gossypium hirsutum
aaactgactaggctatcaaccaatgataaaatctgacaggtttatgccagctggtgtgctctctgcgacggtcactgaggaggtaaacccgatctgatattgtgaatgattgcaaacatactcctttatgcttgggttgtatgctctgatataacttagaactgtgtccatgaactggatagtttcaaccaatgcgatgtatgatttttttttttggtagaataaacaaaggattatatagaagtgttcataagtaaattgccaatagtgtttttttcttt

SEQ ID NO: 247407 - DNA, 429 bp, Gossypium hirsutum
cacgcttccgcccacgcgtcctaacttttcccaagaacttagtgacttggccatggaatctgcacaaattgatggccggttagctcggcgtccactaaaggatagccggagagagttcaaggcacataagatgttatcatctcacatcactcagttaatgcagaaatatgatacagccattaagtctcttcctgtcaattccccctcaatgagtaacactttcactcttctgaggcaaatggctcatgatctcctaaccggtgaacttcgtgttctgaaatctgcatccatatggttgaataattactgtgcggttctgaaatcaacaagcaactgtcggagtcaattggaaaaccgtatctgaaaaagtgaactgtaaacactggctatatatatgcaagctttttggagtcattctttttgcccact

SEQ ID NO: 247408 - DNA, 267 bp, Gossypium hirsutum
cccacgcgtccgtgcacatatcataagactgattgatccgtccttaggattcgacctaggggtattgcaaaatgatgaaatatggtaatagataattgcatttgtcatcgggttctaacatatggctaatttagtatacgagtttattaggctgccttattaatattatctgatccctgaacagcaacaaagattttgttttggcttaccttaaatggtcgtaaatgattgatatttgtacctgttgtgtatttaacagagtatgaa

SEQ ID NO: 247409 - DNA, 229 bp, Gossypium hirsutum
gccacgcgtacatcatttagtgcaccaaataatgttccataagaagttgctgacatattagcgggcgaattacagtaacactgccatgaataaagctctgatttgctgtctcatctgttgcacaagaatatgccccatacttacatgaaagctaacagttgaccgctctgttacacgctttggaaaaataaaaaatatatatttttataaattttatttatctatattt

SEQ ID NO: 247410 - DNA, 338 bp, Gossypium hirsutum
cgattttcgccgcctgtggagcgttttggtggttcattttgcccatgttaccctcactcttaatgaaatttgtttaagggtcaaatggacatgggcggtaattccatcattttattttgttataatttgtaagtatcatacaaataagtaataaaaatattttgttaaaaaaaaaaatataataaaaaaaaaattaatataaattaaaaaaaataaataataattaaatttaaaaatatattattattttatttttttttatatataatatttaatggggcggccttttttaagattccaagtttatttcctcttttttcctaatttataattttttt

SEQ ID NO: 247411 - DNA, 274 bp, Gossypium hirsutum
aaaaaaaaaaaaaaaaaaaaaaaaaaaaaaaaaaaaaaaaaaaaaaaaaaaaaaaaaaaaaaaggggcggccgttataaaaggaatccaaagctaacaaacacgggcgtgcgactttataggtcccatgtttgcgtcccctaaattcactccactggccttttttttacagccccttaattgaaataaccgggccgttacttaacaaaatcgcgttggggaaaatcctgcttttcccaacttgaatattttcgaagaggcccccccttttccgc

SEQ ID NO: 247412 - DNA, 354 bp, Gossypium hirsutum
cccacgcgtccgataaaaaaaaaaaaaaaaataaaaaaaaaaaaaaaaaaaaaaaagggagggaaaaaaaaaaaaaaaaataaaaaaaaaaaaaaaaaaaaaaaaaaaaaaataaaaaaaaataaaaaaaaataaaaaaaaaaaaaaaagggggggccccttttaaagattcaaatttttcttccccgggaatccaatgtattttcttttttttatggcccctaaaattaaatttactgccccttttttaaaaactttggaattggaaaaacctggtctttcccaaattaaatttcttatgaaaaaatttcttttttttccagttgtgttaataccaaaaaggcccgccttttt

SEQ ID NO: 247413 - DNA, 344 bp, Gossypium hirsutum
  unsure (1)..(344): unsure at all n locations
cctaccttcaattttcactgatatttgacaaccctaaaacccatggctttgctcaagggggtctggggctataaaccagccatattcattaactaatttgctcaatttttgcaagcagccgcatacccaggaagtgaagctgaggattgatcctgtccatgtggtgagcaataaggtaattgctgctgcagacagttttagattcttaaacatgtaaaaatacccttggagcctgttatgcttgttttgtttcagacttgaatttcatgtggttctattttgttcattttcgataatatatattacgcaaatagacatccaatgggaaacgattatgagtttnt

SEQ ID NO: 247414 - DNA, 384 bp, Gossypium hirsutum
gcaccctgatattctcagcacagctgtaatctttgggatgctaatagctttgcccataacacttgtctactatatattattggggatataaattaagcggcaaatgcaaatgcgcaatactcttttgatgttccacattcaaaggccaaagaaatcctggaccgacacatcatgactgcattcatgattaatgtctctctcctttacttttaatccttagttaaatttgtaaaatctttatttgtagtcaaattatagggggaactgttttttgttttttttttctagctaattatctttttattccaaacaattttattccttgtcatgatagcttaaaaaaaaaaagaaatttaacccctcgatatttgtgatggaagtttg

SEQ ID NO: 247415 - DNA, 198 bp, Gossypium hirsutum
cccacgcgtccggtgaagcatggcatgtgatatatatatatatgttaatggatttcatcagtctgaaatcaacggaagcttaaatacattattacatttcttattatttttttatttttgatctagagtctatttttttgtatgaactgagaatgaaatttgtgaatataaagtaagtaaatttgactcttgattaac

SEQ ID NO: 247416 - DNA, 425 bp, Gossypium hirsutum
cccacgcgtccgcccacgcgtccggatttctatatccgagaagttgctgccagcatatcggtcatttctggggcggttcaggagccaaatagagagtgggaaacaccctgagaattacatcaagtactcagctgaagacttggaaactgctgtgttggatttcttcgagggataccctgcgtcctagcacttgatcatggatgctttgtagaaactaggagacattctttcaattcttttgtggagggtattcgggtgatggtggtgctggtaaatctgtggctgccttgagctctccaatttgtttaacaattgttgatcgaatcatttccactgttgaggaagcaacaaagatcaggtgttagcattccagaatagccaggcctcctggaacctgaatgctttctgcaccgtcagcattatgg

SEQ ID NO: 247417 - DNA, 209 bp, Gossypium hirsutum
aaaaacaatgctttcttgtttcatcctaaacttctattccatcctcaatcccaaaacttaatttcttacgcctttgtattactaaggtaatggcatgtcttgtctcgcactacctaatgactcaatatatttttatttaaaaatttataatatgaaactatactatataaagtccataaaacagtaagagactgatcaatagaaatatg

SEQ ID NO: 247418 - DNA, 348 bp, Gossypium hirsutum
gttgagccacaggtgagatctggtataaagtatgtaaaattgtatatcatattagtttgtttccattaaactcatggagattgggatggtggaaattgggttttgaatataaagcttggaggggctttccaagctattctttttcctttgtaaacaggatacacccatgtggttctgtgatcttttttttatttattgaaatccacatggattagagggagatgatgaatttagagaatgcagattttatttttctaaatccaaaaaagaatagaacctaaaatagaatagaacaattgcagacatactaaaaacaagggtctgacttcagaagttgtaaacaatcaa

SEQ ID NO: 247419 - DNA, 330 bp, Gossypium hirsutum
  unsure (1)..(330): unsure at all n locations
atcatacttatggatattaggctaatggcccgttcctgatatcctcacgtttgttgaatcttatgatttatgagaaactaattggaatttggtgtnaaaaaaaaaaaaaaaaaaaaaaaaaaaaaaaaaaaaaaaaaaaaaaaaaaaaaaaaaaaaaaaaaatttcaaatggaaaaaaaaataaaaaaaatggtgaggctggaaaaaatgaatcaatattaacttacataatcaatctaaattaatagtatattttaatttttttccttattgttaataatactaaaattttaatatattttaaatttaatatggttttttatatatatt

SEQ ID NO: 247420 - DNA, 324 bp, Gossypium hirsutum
cccacgcgtccgaaagctacatatccttcatctttagtttttaatcattgcagtattagagttttctttttttatgtatggattctcagcccattggcgacataaattattgaatctctctttacattttgaaaaaaaaaaaaaaacaaaaaaaaaaaaaaaaaaaaattaaaaaaaaaaaaaaaaaaaaaaaaaaaaaaaatttaaaaaaaaaaaaaaaagaaaaaaaaaaaaaaaaaaaaaaaaaaaaaaaaaacaaacaaacaacaaaaaaaatggggggaaaatttagggggggcccgttttaatggcccgtctttttaa

SEQ ID NO: 247421 - DNA, 310 bp, Gossypium hirsutum
ctagtttgtagtttgaagaagagtaacaaagtgactttttttggaagttgattcgttgaggctagaagtaacataagaaaaagcttactaagtacgttgtatacgattcactatgtgtatagaaagaatacatctgtttgcaaaaaaaaaaaaaaaaaaaaaaaaaaaaaaaaaaaaaaaaaaaaaaaaaaaaaaaaaaaaaaaataaaaaaaaaaaaaaaaaaaataaaaaaaaaaaaaaataaaatggtgtgtgtttttataatattatttatttttatgtattgtagattaaatttttatttttttt

SEQ ID NO: 247422 - DNA, 335 bp, Gossypium hirsutum
  unsure (1)..(335): unsure at all n locations
ggtgaaaagaacaaaggagggaaaggaaacaatggggaaggagataaaaagagtggtaaaaaaggaggaggtggtggtggtttgcttggatttttcaagaaggataaaggtgaaaaagatttttcaagtaagggtaaaaatgaatgggatggtagtggtggtaaaaacaaaggttcccacaatggaaatggaggcaatggtggtggtggaaacaataatggccatggagctaaaaagggtggagctggatttggtgggggcgctggtgctggtggtggcgttggtggaggtggtgggcttggaagaggtggtggtggaaggttcngaagaagtgg

SEQ ID NO: 247423 - DNA, 189 bp, Gossypium hirsutum
  unsure (1)..(189): unsure at all n locations
gaaatatataggaaatgtgaagaaaaaaaaaagggggggacacaattatgaaagggagagagaaaaggttgtagatctgtggagatgaggtgtaataatttggtgggctctgcttaagaaaaagggcaggtcttgaccgttgatttttcatatcaaaagaaaagaatgaacttgtgattgaacaacana

SEQ ID NO: 247424 - DNA, 386 bp, Gossypium hirsutum
cccacgcgtccgtcaaaccaagtagtgtgcatcagctcatgcgggtcttacattggacgagggcgtgggttgctaggatgagtcgactggaataatgtattaagactgctatgtgttctggcgctatacaaaggaattctgatgtactgaagctcaccattattatatttggtacagaaatgttaatcttgaacttgtgaaatgtttcaatttaggctgggcctgcttctgtttacactgaaggtatattggatatttggcgattccaaatttattgttagcgtctatatgcttgggttttatggctgctgctttacaccgttgtagactgctgaaacaccttgacgttatgaactgtaattttgtttttaataacattacctttt

SEQ ID NO: 247425 - DNA, 393 bp, Gossypium hirsutum
cggactccatggcaaaaaatgacggtacggtaacatattgggcgacctgactggcgggaacggtggactataccattagcgaactatggaaacaatatcaagcggcctcaacagataatgaaaaacaaacgctaacacagatctatacaataacagccgtagtgcttgagatgacaaatgcgccagttatggtgtgccccatgctaaaaaaggcatacgctatttaaactacgcatagacactaaacaacaaggtcttacattgaaactctagaggcgtcagtcggaacataagccaaagcattagcaatctgaaacaccgattcattggtatcgtacccaaagcatcttgctattcaagttctacaagtttagctaggaaccattcctatct

SEQ ID NO: 247426 - DNA, 371 bp, Gossypium hirsutum
actgctcttcacttcttgtgctcccttccataatgcacccctagccaagttgtgaaagtcgcaaaacaacatcatgcccttattatctcaacacccaactcatttttctcaataaaaatgtgcatcatacaacgtgctcctaagattccatcagatcatccttgtgcttataagtataatgttatattgctaattcattactgctattcaattactccgatagactgagctatttgaagatcatgatacagatgcacttaactggtgatctccttggtagactttagcactccttgccatgtgctcaaatataaaatggggggcaagtttactaagcacaaaattcatctccttcactgaacagttctagt

SEQ ID NO: 247427 - DNA, 132 bp, Gossypium hirsutum
cccacgcgtccgaaagcataagctctaggattttcatccgatctctgtaatagtttataggcacttcggaccttaaattcacccgacatctcacctccccaaataagaaagtcttcataaggtgttcgtgct

SEQ ID NO: 247428 - DNA, 417 bp, Gossypium hirsutum
ctattcttgggtttccagtttcttggtcaccgaatcaaagtcaatgggctacgagattgtcaactaattatgattcaactagaactgttttataggcgtttccagctaaaataccctagagcttatgaaatgagcttatgcagatttcgttgaatggtttgtgacagttttgctgagtataaaatggtgctcctgcttagtagaatatgtaaacagccgtaacgagaagggcaccgtcaatatccaaccggatttcaaatatggttgcgtgattcttcacaactttgcaggctgtagccatgatttggggggcagactgcgagtccttgcaatgatttggagcaggggaacatcgtgcaaggtaacttgcacgcggaccataaaaaccattccagggttttatctaatgttcccaat

SEQ ID NO: 247429 - DNA, 222 bp, Gossypium hirsutum
cttagatcgatagcattaaggagtttttgtagtagatatgccaaaattttcatatttctccacccaatgcttcgcttcgcgattctgacttaacactttccgctgatcactaatttatgttagttttctgttttagttattttatttttgagacatatatgctttgttttttgtttattatgcactattatttttattattttataggttgtttgcttttct

SEQ ID NO: 247430 - DNA, 328 bp, Gossypium hirsutum
gccacgcgtccggccctttggtcttttggttgccgaagaaccaactaactttgttaggagggggaaatgcttactctagctcgtcttcctaaacgcgatacctcggtcgctagttcatactacatccatgctcgaacaagcaaatatcgaacacacataacgttacgcttaatagtgcaaagtgaagtttcataccaactactggacataagagagcatctcagacgtgtccagctccaagaacatgatgcagcatctcctcactggcgatctactctgttgagccaacctaatcctgctatgcgcgcatattgtatgctcgggaaac

SEQ ID NO: 247431 - DNA, 323 bp, Gossypium hirsutum
cccacgcgtccgcatgaactggacactttcaggaattgcatcaaatacatgggaacgaatgcactagaagccacctgaacctggaaatcgtatcaaatattcgcaatttattctggagctttcatggacatttattcatttgaacgcagctggagccttataaaactgtttccttttttcttttatgcttgttttcacgtgtcgcaaataaactttgattctgcatgttctggacatgcaaagtgtatatgatgaaagatagaaatggattatttcctattatttcttgatcgaaataaatgaaagtaaaaaagtttagagtt

SEQ ID NO: 247432 - DNA, 320 bp, Gossypium hirsutum
gaagaatttagtcctttttattattgcttttgtctcttgttttcagtactctgctaaagacataaattatttgtggtttttgatgtttttgttttaattgtttgttgttttatcatggaatggtttctatttttatgggttggctaaacaataatttaactctttgttctattactacttgattttattggaaaaaaaaaagatataaaagcaatgtacagaatgaaaaacaattcacaaatattactacctaccttacttgttatgcacgtttcttccatctatcatggttattttatttttgacaattgtacgatatt

SEQ ID NO: 247433 - DNA, 416 bp, Gossypium hirsutum
cccacgcgtccgggaaacccaaaattgtgccaaaaatccattacaaaatgaacgctgtatcgaggcgagctattactggaatctttactccagcgagacaggggatcaacttattgagtcatgatctgagtcaggttcagcaaatgagagggataagggtgaaggtaaggaacggcaacttggagcaagcgttggcggtgatgcagcgggtgatgcaatctagcggaatcgaacggctgataaagcaggaacaaactcatcacattaagaattcggagaaacggattttggcacgcaagattttggagcgtaagatcaaatcacaggaccacgctcgcaagctgcaaaccatcctcatcaagaaagtcaggggtctgtgagggcaactttggtgtaattttctgggtaaacttttg

SEQ ID NO: 247434 - DNA, 263 bp, Gossypium hirsutum
gtagagattgttagaattgtgtgactcaaattctaagagattgcttataagtcaagttaaacaaaaatatattttctttctaaaaaaaaaaaaaaaaaaaaaaaaaaggacagcaaataaaaaagaaaaaaaacgaaaaaaaacgggcatgcgaaaaaaaaaaaccaaaaaaaaaggaaactagcggccattcactgggccggctttttacaacgccgagaatgggaaaacgggggggctaattaaagtaaccgaaatggaaa

SEQ ID NO: 247435 - DNA, 389 bp, Gossypium hirsutum
cccacgcgtccggttggtttcatacaaggttaaaaagggaacactaacctctgaaagttgtgcagaatattatcggtttcttttttgagttgatttaagttgaattccattataaaaaaaaaaaaaaaaaaaaaaaaaaaaaaaaaaaaaaagaaataaaaaaaaaaaaaaaaaaaaaaaaaaaaaaaaaaaaaaaaaaaaaaaaaaaaaaaaaaaaaaaaaaaggggggcggccttttaaaaaaatcaaattttactaccgggggctggcaacgtaattgtttttttttggggccacaaaaataaaattcacgggccgtgttttaaaaacgttgggactggaaaaaccctggccttaccaaaataaattgcttaggaaaaaatccctt

SEQ ID NO: 247436 - DNA, 339 bp, Gossypium hirsutum
cccacgcgtccgatggagatgaacatgcagcaaggacctaagaagcaatgtttgcgaagaacacggaccggtccatggtgaagtgaaaacattgtgcttgtggttcttggttagcagatagttgtacaaatttaagtcaaagggtagtagttgatatttctttagattttaatagatgaaattagtgcacagtagataaaagaaaacaccaatattggtagtattctttttttatgggcaacatgcatggttttattaaacaatatctgtaaatataagaatctcagagttccttttgttggttcttattaattgaagtaatcatgtgtgtctttttct

SEQ ID NO: 247437 - DNA, 310 bp, Gossypium hirsutum
tcgaccacaagattccttctacgcttcgatttcaacgaagaagacggaatctcttagcacatccgcaaggtacggaggcaacgtggcgggggtagctggcgtgtatggatgttgctggtggcgtagctgctgctagggctagggtttgctgcaaacatggtttaagttttgggccctttttgggcttaaggttttattagttttgggttttaaatttgggtttgggtttgtaatgttttgggttttaaatttaggtcatgtaatttggattttgatgatggactattaatttatttagtctttatttttg

SEQ ID NO: 247438 - DNA, 243 bp, Gossypium hirsutum
acgctctgatgatatttgaaagtaggaaatggttaattttatatcgatgtttatatatagataggatgggctccctttgagagaaatgataataagtggaactacatgacaaggaaagttacagatggagtgattaggttttgttgcaacaaattatattgaatcagaatgcatatatgtatacgaaggggggatggagttgatagtgtctgcctatctcatgtgagattatagatgttaact

SEQ ID NO: 247439 - DNA, 171 bp, Gossypium hirsutum
aacagacgtagggtcaatgaatttatagatatgggaagaacgaattgagtttgtgggagggttattaaggtaaatattgctaggtaattgaataaagaggtgatttttgattgactgtattacatgcaaactagcttatgaaaggatggggccacaatgagaaggaatgta

SEQ ID NO: 247440 - DNA, 113 bp, Gossypium hirsutum
gacaaactcaaggtcaatccatatatacatatgggaacaactaattaagtttgtgggggagctatacagcttactacttgcatggaaactgtacatacgacactttatttgat

SEQ ID NO: 247441 - DNA, 354 bp, Gossypium hirsutum
aaaagacaatatttgaaagtacgagatgaattataatagatggcctgtacacagtgaataggggtgggctgtctttgtgaataaaccataattcttggaccgacacttgcaagaaacattccagggtgtgggcgattttgaggagccgaactagatttccctgcactggccagactatcttttattctagggggcctggagttaattaaatgggccgtaattttaaaaacatagtaagctgaaaatcctcttacatacacaaatatattgcttggtaataatactccgttttacgtccctgaatattctcaaaaagtctgttacaattcttcattataaaaaattccccaacct

SEQ ID NO: 247442 - DNA, 300 bp, Gossypium hirsutum
ggtggttatggaggagctggtggacatggatgtggtgctggtggcggtaatggtggaggcagagctagtgcaggtggtgcttctgggtatggcagtggaggtggcaacggaggtggagctggtagtggtggcggctatgaaggagctaatggacacggaggtggtggtggcaatggtggtggaggagctagtgctggtggatatggtggaggagcttctggatatggaagtggaggtggtgaaggaggtggagctggtggtggttatggaagagcctgttgacaaggaggtggtgctagt

SEQ ID NO: 247443 - DNA, 299 bp, Gossypium hirsutum
gctaataccgccgcgtaggcatttggttgaataagttgggtttggttcgttttggcgaggcgtgcatgcttaattctatctagcagacgatgtaaactgtgtgcttaatttctatactcttccacatgctttgataaacaaagaatgtgaccccaataaagaattagatcctcaatcaatatgaaggtcttgcacttttattgaagtactaagtaccttcgaaactatagatttcaaggggtacaatactttaaaaggcgcggctattttaaagtttttcagtcatatctcccggttct

SEQ ID NO: 247444 - DNA, 178 bp, Gossypium hirsutum
atgacgttcattctttttattatgtatttttatctgcatttagacatttaatcgaaactatgcatgcccctgtttttagaatcatataaaattgcttgtattgttcagagacatttaattgaaactatgtattaccctgtttttagaatcatatggctatttaactgccatttacttg

SEQ ID NO: 247445 - DNA, 365 bp, Gossypium hirsutum
cccacgcgtccgtgttggttagcgaatgcattctttgttatttagatttgctactagaatattcatgacttctgcaatttgtttttgctcgatttcctttttaattattaaaattttctcacattgtgtaggttctccccgtaatcctcagactctatctttccaaatttgcttgaaacaattgtcggcatgtgatgggccagtttaggattattccagttcaggaaaacacctcttcaggagttttggagaaatcacatcgaataaccaagttttgaagctttcacgttaataatctgttaaactaatgaatggaaggcttcaaacaaagccaacaattgtttcgggtttacctatttatttta

SEQ ID NO: 247446 - DNA, 300 bp, Gossypium hirsutum
gaaaactctggtggaagcaaatatgaagctgattaaggtccctaaggccccaaaggattatgacatacttgccatacccttaacaagctcagcaatgaggatgttgaggaagagaaatggcacacctgaagaatggcgtcaatatctcttccccactactgatccttagacattcatttctacctatgttacttagatttggatgtaaatgttggatacagatatgttttcgtcaaaaaacaataatcaagagtaacataggtccatacataccggttgctgtacattctcttatatttc

SEQ ID NO: 247447 - DNA, 412 bp, Gossypium hirsutum
  unsure (1)..(412): unsure at all n locations
cccaaatcaagtatcgattcgccttcatcttcatctccccaaaacgactgacaaacaatagagggaagggaggtaatctttttttatagtcatcaagcttcatcctctccgacgtttcccttccattgattgcagagctcatggtgacaattttgctgcgaaaagaatgagaaagctgacccaaaggagagctgttgattatactagtactgttgtgcgatatatgcagattcgaatgtcacagcgagattcacgggacaggacaacattgtagattcgaatgttctaaccttttgatgttgtaaaactgtataacatatggattatgacatagaatttcatgaaattcatngaaatcatgtaaccattttgtaatatatgaatattaatgttatgcaaaatataantcctc

SEQ ID NO: 247448 - DNA, 189 bp, Gossypium hirsutum
tccacgcgtacgcccactcgtacgagcaggacggaggacacggaaggcaagagtcggttgtgtgggccaactagctgacctgtcatataaatggaatgccagttgcggggcttcttgcttctaagactaagctttatgctaagggtttgtggatagggttgatatgtggtctttcatgccaagctgctg

SEQ ID NO: 247449 - DNA, 273 bp, Gossypium hirsutum
  unsure (1)..(273): unsure at all n locations
ccgacatgtaagatattttcgtatgtttatatgaagatttcttggtatatcactcganatatcaaaagaaaaaaaaaaaaaaaaaaaaaaaaaaaaaaaaaaaaaaaaaaaaaaaaaaaaaaaaaaaaaaaaaaaaaaaaaaaaaaaaaaaaaaaaaaaaaaaaaaaaaaaaaaanggggccgccccttttaaaggatccaattttacttccccgtccttccaacgtaatagcttttttttagggccccctaaattaaatccactgccccctt

SEQ ID NO: 247450 - DNA, 258 bp, Gossypium hirsutum
cccacgcgtccgaacaactttctttaggtaaactcggtgcttgatttcatttcattcctttttggatcaatcaagaaaatttctttttttttccaaaaaaattaataataaatctggtttctgttggttgcttacctaaaaatgtgaacctttggtggtttttccattattttaataactgaacctaaattttggttggaatggaagggtttcctattattaaccagcccctttttttgaaataaaaaatttacttca

SEQ ID NO: 247451 - DNA, 414 bp, Gossypium hirsutum
gcaaaaataaaagagtacattttctttaaaaaaaaaaaaaaaaaaaaaaaaaaaaaaaaaaaaaaaaaaaaaaaaaaaaaaaaaaaaaaaaaaaaaaaaaaaaaaaaaaaaaaaaaaaaaaaaaaaaaaaaaaaaaaaaaaaaaaaaaaaaaaaaaaaaagacaaatatattaaaaaataaaaaaaagtaatttgcttgcggtgtataaaaaagggggggcccctttaaaaaaaatcattttttccctggggggtgggggaaaaaaagtctttttttgggggccccttaaaataaaaaaccggggccccttttagacccttcccccttggaaaaccccgggttttccccacttaaatcgccttggggaaaccccctttttccggcgggggggtttaatataaaggggccccccc

SEQ ID NO: 247452 - DNA, 191 bp, Gossypium hirsutum
gtgtgcagaaacctgagaagcgcctctcatttttctgagataacggaaggcttgtatatggctgccatgtttctcggagttattaactgccaaacagcccaaccagttgtagccattgaaggaagcgttttttatcaaaaaagagcaaccggattgacctttgcattaccttttgcactcgcacaggtaat

SEQ ID NO: 247453 - DNA, 327 bp, Gossypium hirsutum
gagaagtttgatgtcttcaaagattggctgctttaaaacgtcctgtgttaatatttctccctcctaagtagcctgcagtaattaacattaaaagttctgagaagatataagctgaaaaccattggaatcccggaacataattttgtctgttgtggacaatgatgagggagagcaaccattgaacaggggagggattcaccgaaagggggcttgagatctttgttgaagagagggagaaacattgcttagaagaagttgagaattatttgagtaatttttgagattatctttttttttttgataaaaaaccaccctaagatcaacctc

SEQ ID NO: 247454 - DNA, 402 bp, Gossypium hirsutum
aaaacttcgaaaaaaatgagtatacctatactcatatccaatgctcacttatcttagtattatagatgttgtcttttgattttcatttttgtgactgttatgcagattccttgttgatttgagatatctggcttaagttaatataagattaaattttggtttgccatgtgaacattctatatgaactccattgcttattattagtttatcatggttgaatttggatgataatcatctcttctagatatgagcttaatcattgtaacttataaaaggaagcaaactgttaatggtgagaaacaaaggaagaaagatagatggaaccaccttagagtgaaaagggagaaaaaaggtgagtgaaagaagggaaacaaagaaaaagaataatagagaaaaataatt

SEQ ID NO: 247455 - DNA, 157 bp, Gossypium hirsutum
aatgctactgcatattaacccttgtcgacaaataattccatgagattctccatattgtaaccttaattttgcttggtagattaaggagccatagttttttgtaaaagttcatatagcctgtttgtaaagtgtaagctctaggaatttcctccaaagc

SEQ ID NO: 247456 - DNA, 414 bp, Gossypium hirsutum
cccacgcgtccgctttactttagatggtagatttagactccagagttgtttataaaattttttatagatggtttgtaaagcataagctctaggattttcaaccattctctgtaatagtttataagcacttcggactgtgaaatcacccgacggctcgcctccccaaataagaaaatcttcatgaggtgtccgtgctagaggaattcagagaattcgtgctgcatcaacttctgcgaagagcaaatcagagatgttttaccttttggttctaccatcgagcttttgaccgataactgaatgagttcctctgctaacaaggagatctcatctcccccaaacccatcgttgccaccactttccttcatcccaagccgcagcagccactgttttcgctaggataccagggatagcact

SEQ ID NO: 247457 - DNA, 112 bp, Gossypium hirsutum
gatagatgcatgtgtgagagtcacgtgcctagaatcatgatgtgcttttacatgtttgggcccattgtcatgatgtacttcatgcgggagaaaagcgcgtatgaacgttgtt

SEQ ID NO: 247458 - DNA, 355 bp, Gossypium hirsutum
gccaattggtggttggttggttcatggtggtgatgatgcaaatatggtaacggtgctgcaattttggaggtggatgagaatctcaacaagcaatttcgggtgtttaaagcagcacaacatgaggaaatgtgttacaatatgaagtttggtctacgttttagtggtatcacatatggttcaagatgtgtgaaaattcaccacgtaaatgcacgtgctgaatcaagtaataaagtgataagaagatgtcgttcccaagtagaccaaattataagttgctaagtaccaaattataaaaattactaagtttctcaatcaattttatggtcttggaaatctaacttcacctattttcgtt

SEQ ID NO: 247459 - DNA, 232 bp, Gossypium hirsutum
  unsure (1)..(232): unsure at all n locations
ggtaaatgatttttactatgtcaagtttatgcttattgaatatttgaaacgtgtgcgcactactgtggagtgttaatgattaatttatgtatccgtatttggttccataattagttaataaacaatgttgtattgctagaatttcattgnacacaggtngctntttaagactaactgtttagcatctatcaaataaaaaggctaatcattatttaggcttcaaaaataaatt

SEQ ID NO: 247460 - DNA, 365 bp, Gossypium hirsutum
  unsure (1)..(365): unsure at all n locations
cccacgcgtccgctaaaatcaatttgttagggctcattctagcaatcgtcgaaccaccattccatttggtggccgacaatgcacaagcagcgaccagattccactgacgaaggctctgctcaaggaaatttggaacggctgtacggaggagaggggaaatggctcgtgggaacccaaccccctagcactgttctggcgtattccagaagtttctggtgttctcggttgttgattttctttgagtccaattgngtctcgcgtttgggttatagaatncgggttaggtttgggtttattcaattgggtttaaaaaaatgtatttggactgcttttaatttaatttactatttggcctgatggtttgt

SEQ ID NO: 247461 - DNA, 289 bp, Gossypium hirsutum
aaaaaacatacaaaaaaatatacttgtggatttaataaaaaaataaaaaaaaaaataaaaaaaggaataaaaaaaactaaaaaaaaagaaaaataataaaaaaacaaaaaaaaaaaaagggtcggccgttttgagaatccatggtggtgtcgcttacatgtctctttaagctttttttttagggacgcttatttttattactttggcctcccaattataacattttgtcggggaaacccgggtcgatacccattttaagcaccttgattttcttcctcttgtcgccagc

SEQ ID NO: 247462 - DNA, 228 bp, Gossypium hirsutum
gatgctagctcgagttggaggttgttggagattctatcacactaacaagtttttgattggtattgtatcaacgatcttcaagtatttttaagtctatggcatgtatagggatttgattatgtgtgtatatgttattatgagttggcataaaattttggcgtataatatttgatggttcattttgtataaggctattgaggttggctaatattagttaagttatatgtt

SEQ ID NO: 247463 - DNA, 400 bp, Gossypium hirsutum
gccacgcgtacgtccacgcgatcgaccacgtgtacgttcatgctcaaaacaagaaacttactgcacagctattgtctttgaaagccaaagattcaaatgaaaccaggatcaagaacgaaaacgagggttcatggtgcagcaatggaagcgaaaacaattatgatatgaacttagccataaggcctgcagcaacaatgactcaacttcttcatggttcatcgaaaccaagcctccaatgcctaaaacttgaccaagtggttcaacaagatcagagcttggcttgccatatgtttaaccaagatggtgatgaacagcaaggtttctggccttgggctgaccaatcaatcaaattttcattgaattaagaaccagtgccacattgttcttaattatgtacttc

SEQ ID NO: 247464 - DNA, 427 bp, Gossypium hirsutum
ctcgaacaaagtcacaatatcctcacaagttaatcatgattcgccgaccttgctatatatctttgggtcccttggtaggctgcaaaacaagcataggtgaagtgactggcctgttatctttggtgtgactggatgatatttaacctaccaaaataggttggtttcttgtctagctgtttaccatctttgaataggaagactaatcatcatttggcgtcatgaattttttttgctgtatacgagatgctaatgttgctcaaatgtcccaatcatgtgtttggccctctggttaactctgaaacaagacttaaggacaaagttttcatgtcagatatttaaagagtgaggtcatgtttagattgggtgatgcgtttgttttaataaacagttggaattgattaaaaagtccaaacataattcattggtc

SEQ ID NO: 247465 - DNA, 335 bp, Gossypium hirsutum
caaattgcttgcagttccactgcgccaggttcatgaaaaccacaagacatatggaccgataatatcgggagtgccacagttgctatccaagttcaccatcaacattgttgacatttagaacatgcttgtttacaataatcgttgctttccaggttaagtaataggaacggtgagaagatgtgtgctgcagctgtacggggttttaaatcttaggtttgtaatttttcatggaattcccaaatacatttgtatatagtatgttatataccatagttttcttacaatatgtgatatactaacattgagctcgacaatatcaaatttatcttcttggt

SEQ ID NO: 247466 - DNA, 162 bp, Gossypium hirsutum
ggttgtcgttgttgcctataaatggtatatttctcgttttcttaaattatatcgtcaatgttggttttccattgagtcgtctgtttgtggtgttacaagggattaatcctttaattccacaaatttagaaagaaaataaggaaattaattctatgtcgcgat

SEQ ID NO: 247467 - DNA, 281 bp, Gossypium hirsutum
cccacgcgtccgggactgcaatagatttgacgagtagttcggctaaaaaaaaaaaaaaaaaaaaaaaaaaaaaaaaaaaaaaaaaaaaaaaaaaaaaaaaaaaaaaaaaaaaaaaaaaaaaaaaagaacagccaaaaaaaaaaaaaaagggataaaaaaaggaaaattacatggtattgccccgctcttttttaacgactgagattaaataaaaaaccccttaatttaaaaaaattgggcggctaaaaatattttcttttttaacaaaatccatttaaaac

SEQ ID NO: 247468 - DNA, 313 bp, Gossypium hirsutum
cccacgcgtccgcaatatcggctaccagccgattgtcggtctatggcaaacaccaaacctatgttggataacattgagcctcttttggagaagaggccagttggatttgagaaaactattgcttatttgcctgaatttgttaaacatttctcataagcaacgtttggtgtatattgatgttggggcaagtgagcatttgaactctaacgttacagattggttcttgccatcttatcccgtggatcgaaaagcattccatgtttatttcatcgatcacaatacttcagtgatgctatcctatgtcaacaagcct

SEQ ID NO: 247469 - DNA, 260 bp, Gossypium hirsutum
gccacgcgtacgcgcagtgtaaaaccgaaacttttgtctctgcactattcataacacctactgccagctaaatcctgaagagttttccaaacttgtttctctcatgagtctttggaattagttcttacagcagatcactaggttccaggaagccatttaatccgggggccattcagctcggatttaagattttgaattagaagctagaaagatttactgagggactgatttatctgtgcattccgggtgattgatctgtc

SEQ ID NO: 247470 - DNA, 310 bp, Gossypium hirsutum
aaaaaaaacagcagttaaaagcaaaaaaccatggtggcgctccaattggggttccaacttcaggcactgaagtatctttatcaccaggattagctccaggcccttcaaaaggaagcaacactggtgcttcaaacatggaaatatttggtctggcttccttcattgccttaccaattgcctttcttcccatgctttttgggatttaaagctcttattttcccattattaaaacttattttcctccattaatattcatttactatatttatatttatatttatatatggtttgcaagttttttctttttttt

SEQ ID NO: 247471 - DNA, 415 bp, Gossypium hirsutum
  unsure (1)..(415): unsure at all n locations
aacatcacactgtagttgctacggaggtcggggaagtgttcacttggggatctaatagaggatggagcaatttaacaaattggaagaaacacgatttaagttggaatcaaattgaaagctttcaatcctttaaagctctaatgcatggcgataacttacatgagaaatggcatactggatcaatcagccatactgctttctagccatggttgtctaacttacatgaactgcaaaatattgaaggtgttgtagaggattcaatctcttcaagctgaaaaagccaaggcttagcacttcttcaagtggagtgttatttaatgttgcattccatggtcatttatcttagtccgaacttgaatttggtaccttatgtactagcttctttaaccatgattgntaattattacgtgttttg

SEQ ID NO: 247472 - DNA, 169 bp, Gossypium hirsutum
ttcccaagtaatgttgtataattgtggagaaaactctgaccaaacagcttgttgtaagctatgagaagtctagtctaattgtgtgattaccttttgttatgctttcggatagcatttttgcttcaccagtaggtcagttggccctatgctttatccttgttatttcatt

SEQ ID NO: 247473 - DNA, 376 bp, Gossypium hirsutum
aaaaaaaaaaaaaggaagaagaagaatgaaaaacacacacatacacacaccatagctgatcctggaaaacaagaaatttgtctttgactgagaagtaacaaaattttgttggtctgaagaggggaaaagcgagtcagattctgataaattcagcaacaagttgtggggatgacatggattaacagccatgcacatggggtgtaattttattgtggggttaaatgtttttttctgttataatttattatttgattgcaaaataaatatgttaaaaagtgtggaaaagggtatagagtggggagtttgcacagaattagttctttgtatgatacgattcttctttctgttcatagtggaatagaattttattttcttt

SEQ ID NO: 247474 - DNA, 421 bp, Gossypium hirsutum
aaattgcattacaacaaaataacattttgttttgcatttattcattcaacataagcggcatggagatttaagaaggcgcgcaactccacaacaaaaaaacacctttgtctgtgaaaaattcttgaaattccatgcaaacttggatagctgtaatttcctctcatcaggaatacacagttataacagatgttcgttactgtaaaaattatatctttggaaaaacccttctcacatcttatatttaacactactataaacttcacattatttatcatctttcttttacttataagactatgccaaacactagtaattaattatttcatatgttgattgactactgatacttgctctctatgaattcataaaattttttctttaattatttttctactattttgaatctttttatttcaaattt

SEQ ID NO: 247475 - DNA, 217 bp, Gossypium hirsutum
gtccgatcaaccatcggtgaaggtggcggtcacagttgatgcacctgctgttctcaaattggtgctggagaggttgatgggagtgatgatgaggatggttgtattgtgtaatcagtgtgaatgtttttttaagaccgtatcagctttgtcagtggactaatttgttctgttacggtagctgttattgtttcaataaaaggtaataattttatgcttt

SEQ ID NO: 247476 - DNA, 384 bp, Gossypium hirsutum
  unsure (1)..(384): unsure at all n locations
ttttatttttctaggttatataataaggtaagtaaggttgaagaaaaagtaaatagtttaggagagattaaaaatttagacttaaaccatgagtctaaagaaatattaactaatgttaataataaattagatcaagttataaataataatattgagcctaatgtagattttggtccattatattacggtcatagtaatgtaattttaactttatctgaagaagaaaaacacttcttctgatgaatcgtcatctacgttnaaaaaaaaaaaataaatattacctatagtataatataattttaacaaaaaaaagggcggcctcgcttttagggacctaatttaaataacggttgattaatacctaataaaaggggggtgctttta

SEQ ID NO: 247477 - DNA, 419 bp, Gossypium hirsutum
cccacgcgtccgcccacgcgtccgattttccttcactcttggattatatggcttattttatatacgatgtgtctcatcacataaattattatattatatttgaccaatattataagtatttcaaacctaaaaaaaaaaaaaaaaaaaaaaaaaaaaaaaaaaaaaaaaaaaaaaaaaaaaaaaaaaaaaaaaaaaaaaaaaaaaaaaaaaaaaaaaaaaaaaaaaaaaaaaaaaaaaaaaaaaaaaaaaaaaaagggggggggcccttttaaaggaccaaagtttacttccccgggctggcaaggaaaaagtttttttatggggcccccaaaataaaataaaggggccggggtttaaaaacgtggggaggggaaaaacccggggttacccaaattaaatggcttggaagaaaatcccct

SEQ ID NO: 247478 - DNA, 409 bp, Gossypium hirsutum
cccacgcgtccgcccacgcgtccggttttctgatgtagttctgaggatgggttttctcggaaaataactttccggtgagtttttgtaaattaccggcactggaattctctctcttattttttgctttacagtattgaaactgttaaaaggaggagaaaaatgaatgttggtcggtaatctttaaaatcatctctttttttttttttactactttgtgtctagtattgaatgtatgaaatgaataaatcaaaattattggaacatttcccaattcaaaaaaaaaataagcattgctaattttctgaacagataatgcatgcatgcatgtatgtacacatacatatgaatgtacgttgaatgaagtcttctcaaaaaaaaaaaaaaaaaagggggcggcccttttaaagga

SEQ ID NO: 247479 - DNA, 223 bp, Gossypium hirsutum
gtccaatttaaacagttcattgtgccgtaagtggattacaagattgttttcttggtgctagccagtcttgtatgtgtttatggttatggccactttgccatcaatggtcgaggttgttttgttctttgtcggttacttacatggaccaatcctataaatagccattaaaatgctaatttgactcgaacgatttgcaaatacaatgagttctcttcatttattt

SEQ ID NO: 247480 - DNA, 240 bp, Gossypium hirsutum
gtataaacgaaaaaaaaaaaatcttcctcccaccatcatttgatcattttgtcagtttgtttttgtgttgtttttttattctaaattttctcgcctgccaaacaagcaaaatataggtccattttcaatagagtactgtacagaggacaaagctgtagccatctttctttgttaatggagaatttctttgttatgacagatttaaggacaatgagatgcaaaaatgaagcttttttggtg

SEQ ID NO: 247481 - DNA, 376 bp, Gossypium hirsutum
cccacgcgtccgccagctccaccaaccgacactcccgccggatctccagctgattcgccggctggttcgtcggagaacagcacctccgataatgctgccggtcacgtgagtcccactgttatattcactgtgttggccattgtcggttattcactatgttaatttgttcttttttgggtttgctattttgcttattttcattacagtttgcttcttcttcttttttaaatgtatttgggtttcaatttatgggataaacggtgatagctcgacggcgccgcctccggcgaccatatgggtctgaagaagaatactggaaccttgttatttttttctcttttatttttgtttaattacattttcttagtgttcgttt

SEQ ID NO: 247482 - DNA, 207 bp, Gossypium hirsutum
gcagatcagggttctcaaaagtctaatgggtactgctgaaacacaatggcatccttgtgagtggaagacagttaccattatcatcatatcatatcatatatataataaatatatcatatgtttaaacactaaatgtgtgctggttttcacattttatcccttagatgtaattcctttctgctgtagtgattgcatttatatatgttt

SEQ ID NO: 247483 - DNA, 418 bp, Gossypium hirsutum
cccacgcgtccgcctgagtttatccattaccagtttgattttgacatgagttcttgacatgagtgccttaaacatcttttgcctttttcttccaaaagtttaatgtctttccattagagtttcatcgtcaagtttatctcctcttccttttgatcgacattttcaataatttgggttcaagatcccctatatgctagaggtatagagttcgaactttggcatgagcttgtttttcagcaatggcattttgcgctcatcttcaacgattagacatttcaaagtgactaaagataataccaaatttgtttgaatgaaaaataataactttatcaatgctattggacatagaaattaagattataataactgaaacctgtgatatttgtaagcttaataaaaaaaaaagtgaaacatgtta

SEQ ID NO: 247484 - DNA, 354 bp, Gossypium hirsutum
cccacgcgtccgctaaaaattagttgttgggcctgttactggtttgggcccgtttattggtttgtgcctgggcattattgggtttgtacagcatgttagatcaaagaacaaattgattcttctgtcaaaaaatctcatccatttctactgttaaaaactgatcattgtacgtgaaaatgaggtacatgtggcacaccacatgtaactatctggttattctataaaccatgttagtttttaaaaatagaaatgaatgaagtttttaatagaaaaaaaaaaaaaaaaaaaaaaaaaaaaaaaaaaaaaaaaaaaaaaaaaaaaaaaaaaaaaaaaaaaaaaaaaaaaaaaaaaaaa

SEQ ID NO: 247485 - DNA, 440 bp, Gossypium hirsutum
ttcttaatggatttggccttgttacctcccaatccggtgggggtctatcctatcctacatggttaggtagcaattacaagaaaaaaaaaaaaaaaaaaaaaaaaaaaaaaaaaaaaaaaaaaaaaaaaaaaaaaaaaaaaaaaaaaaaaaaaaaaaaaaaaaaaaaaaaaaaaaaaaaaaaaaaaaaaaaaaaaaaaaaaaaaaaaaaaaaaaaaaaaaaaaagggggggcccttttaaaaaattcaaatttttttacccctggttggcaagataaaatttttttttttgggcaacaaaaaaaaaaaaaagggcccgggttttaaaaacgttggatttgaaaaaaccttggtttacccaaattaaatgctttgaaaaaaattccctttttgccgggttgggtaaaaaaaaaaaagccccccacaaatcccttttcaaaaa

SEQ ID NO: 247486 - DNA, 426 bp, Gossypium hirsutum
gcaaaccctagcccccttttaaccccatcattgatccaccaccaagaacggctaccgctggttttggggctccgacgaatcgattttcagcctgaaaatcccttcttgacttcaatttgaacaaagcaaaagaggatcagcggcctattcacaaggtacggaggcccgttggcgcggtggtacgtggcgcttgacgtggggcgtgactggtggagcgctggagggtacggagccaggctttgggcgcatggaggccgtacatagggcgttggctgcggcgcacctaagaaacctagggtttctgaaattgttttaacctttgggcctctgtgccgtgtaatcttaggctaggatattaatttgggtattgggttagtgattgggtcaaagtctgtaaatggacatttaatggactattaagattta

SEQ ID NO: 247487 - DNA, 398 bp, Gossypium hirsutum
gttcaccattgctccgcccactccccattggtttggaggccttaattttctcttcaggcggggatgggaattaaagcggggggacggattacaagaaacagccttctttggaatttattccaattagcaagctttttcttccctccccaaaaagatattaattttccatattaaaaaatcgtctccatacagataaaacaacctaagcgctttatccagaacctatgaccagtaaccctgtctaggttataacagcattcgagaggagcgggcaccaacaagctattcaatacttgcacttgtcggcgcactgattctctgctggcacttcatagcattttccaactattggttgtggttataagaagaatgcacactattctatttgtaagatttcc

SEQ ID NO: 247488 - DNA, 335 bp, Gossypium hirsutum
acgctttctatatttttctcatggaaatcaacattatcgcgattcgtttatgcatgaaaggagtgtgttatcaatagggacagcaaattcttttcacacattttgaatcctagattccttacctgattggctaatggaattataatatgcgaaaattgtttgtgaggtagtttattcatatgtaaattcagctcttatcaatagatatgatgattcggatccatatattcattgctcttttcactattgagcagacaattttcttccctttaagccatgacttattttgttaatgtacttgtgtctatttttaaaaatatcattctgctattagt

SEQ ID NO: 247489 - DNA, 419 bp, Gossypium hirsutum
gtcgattataatggaaatgactattaaatgtttaaaattcattttatttaattgatggatgctgttgtttaaatgctgcgggttgaagtgtttaaatgctgtaaattgaagtgtttaaatgttgtaaattgcagtgtttaaatgttgtaaattgaagtgtttaagtactgcaaattgaagtgtttagttgctggaaattgagatgttttattgctgtaattgagttgtataaatgttgttaattgagatgttaaagtgctgcaaattgaagtgtttaaatgctataaattgaagtgcttaaatgttgtaaattggcatttgtttgtaggttcattggcatcttctcctgatgagagtgtagtttatcaagctttaaactttgcgttatcctccgaggtattagaattcctagttcaaaa

SEQ ID NO: 247490 - DNA, 387 bp, Gossypium hirsutum
gctgtggttctttccctcttttgcaagtgcttgcagaaaatctggtgatggaaagatcgacgggggtgatagaggcctgaaatctggcggtggtgtcagtgaggcgctgattacagaggcagagccttgagtgatggcctcgattggggagctggacagacgctccccgaactttccagaagcagttgcggcgcgagggaaaagagctagggttagaaaccttagctggaaatttttggttctgggcctagttcattttgggccgttgtattaggtcaaaggtaggcttagaaatgggattgtaatgtagtgggttgagtctgccgggtaatgttataattgggcctcgggtgtaatgggtttatggggcataatttgggctgtaaa

SEQ ID NO: 247491 - DNA, 461 bp, Gossypium hirsutum
  unsure (1)..(461): unsure at all n locations
cgnntccgcccacgtcgttctcgcgtgaccgcgttgggaggacaaatttttgtcattttatttcgantattttgttatgagttttgtgagcnnncaggccagaagattggtgctattctacattacgtagaatacgcgaaaagcttatattcttcagaagattcgagggcnngagccatattcttcgtaagaattacgatattgtgagaatagattattgtnnaatcttgtgaacatcccttgactttgntagggatagagctacatctcattcgtcgatataacttcgatctagatcactggttttgggggagctcaactataaatagagtctccccctcacttgtaaatcattcattagaatccatgcatccattgtattttgtattctttgaaagaaagtaatacaattgagatcatttacttnaaaaaaaaaaaaaacaattagtattaaggaaagg

SEQ ID NO: 247492 - DNA, 393 bp, Gossypium hirsutum
acgcctacgcttacataccaaaaaacaatttctttctttcctttttctttttttttaatgtcaagggttctggggatgtttgaatctagctatttctgggaatggggaaaaaccaagcctactaggctttccaaagagccaggcttggctctttctttgctggccctgaaaaaatcaaagattgcatgactggcatactgctcgttttggcaaaattaaaactttttatacagttacatgggaagagttcaaaatgaaacaaaaagaagatgcattgagaaaaggggaactataagcaaataccgatcaaatgatgcgagaatataaagcttaatttgatgctgcatgggcaagcaagctttcacatggtagaaaccacttcaattgttaatc

SEQ ID NO: 247493 - DNA, 374 bp, Gossypium hirsutum
cgtaaaaggatcggtgacctcccacaaagtaggggttgcaccggagaatcgtttgtctctgaaaacggaactttcaagacaatcgaggagttttgggatggggaaatttgattacattttcattctaaaaaatagccttgagtcattatgttaacttggaatttattcttcatattttttaaaataataaggatgtttgcttgaattaagattcaaaaatcttttaagatatttaaatatatttattatgtattaattagtatatatttttattaagtgaaactacattcaagatcactttaatattgatcaaaagaaacaaaaataaaaaacttaattatatgcataaaaggaaaagcaaatcttaaaaatgg

SEQ ID NO: 247494 - DNA, 136 bp, Gossypium hirsutum
gaaaccctttgtttcgttcaatgtaacaaaaaagtctttagttctacactgcataacttaatgcttggtattgacctttgtggaaggtaagttggggttctttttataagaaatgtgcctttgatgccatttcatg

SEQ ID NO: 247495 - DNA, 291 bp, Gossypium hirsutum
gaacttatgaaccattcatttctatgcctgctagaatcacccaaaagttagttgaatgagagaacttgaccaagttttatgaattctactgctagtttttacatgttatctgtagccaattttagattcttcaattgttgactgcgataacatggttgaaacatgttctttctggttcccatagattataaatgacggatttctttgcatttgtaataatatttttgtgattcattggtgttaaaaacaattatacataaaagataatcagaataatacacaaaaaatgat

SEQ ID NO: 247496 - DNA, 355 bp, Gossypium hirsutum
aacgacggaaactaaaggggcgtgacgtttggttggcttctggaactttctgtttacgacgcctagggttccaaaaaccctaggtcttccttcatctgttaacacattgggccatttgggtcgttcctgcttgtgggttgggtgtaaatgggttaatgggtagttttaggtattctgggttaaaggcaaccgaattttgggcttatacatagactgttaaaaaacaaataaacatttatttatttattttaaaaaaaaaaaaaaaaaaaaaaaaaaaaaaaaaaaaaaaaaaaaaaaaaaaaaaaaaaaaaaaaaaaaaaaaaaaaaaaaaaaaaaaaagggtgaaaaattaaaa

SEQ ID NO: 247497 - DNA, 344 bp, Gossypium hirsutum
aaaaaaaaaaaataaaaaaaaaaaaaaaaaaaattaaaaaaaaaaaaaaaaaaaaaaaaaaaaagtgaaaaaaaaaaaaaaaaaaggaaaaaaaaaaaaaaaaaaaaaaaaaaaaaaaaaataggggcgccctttttaaagaatcaaactttacttccccttccatgcaacgtaaaattttttttattgtgtccccaaaattaaattaactgcccctcttttaaaaactccggaattgaaaaaaccctggctttcccaaattaaatccctttacaaaaaatccctttttccccagttggctaaataacaaaaagccccccaccaatcccctttccaaaaatttc

SEQ ID NO: 247498 - DNA, 167 bp, Gossypium hirsutum
cccacgcgtccgcccacgcgtccgcccacgcgtccgcccacgcgtccgcccacgcgtccgatgggatcttgttcggtgtggtaagctttgggttgcaataagttattgtaatgtatggaaatagattagtgatgaataatcaataaattatcgggtgtcttatttcc

SEQ ID NO: 247499 - DNA, 426 bp, Gossypium hirsutum
  unsure (1)..(426): unsure at all n locations
gtgagtttgaaatatttaagtgtatggtcaaacttttataagtttttcatatacatgaagggtcgtacactgctggacagagaaaaagaagaatccgggtagcataggttaatgttagtattcattttttctcgatgaataaatgaaaaagaaaatatagaaatttttaatacaaattgtcaagaaattatgttgagtgatcactaaattgtagaatatttttatgaaatgtattctttataggactttgaataattgaaattgcagatgtggttcaaaaaaaaaaaaaaaaaaaaaaaaaaaaaaaaaaaaaaaaaaaaaaaaaaaaaaaaaaaaataaaaaaaaaaaaaataataaaaaaaaaaataaaaaataaaaattttattaataaataaatataaaaatatattttatnatcccccctt

SEQ ID NO: 247500 - DNA, 390 bp, Gossypium hirsutum
cttttgaaactcaatccaatttatcagaagtttcttgatctccgatgaccaaaaactgtgggggtgaaacaagttcttctagaggcgttggttgtggtaaggtagggaatcctactcaaacgatgtgggaagttgtgcctagcagatgtttccgatgtaccaccacctccaacaaacctaaggcaatgttgttggctagagggctacgccacaagatggtcatctatgggatatcttgagtggaggagagaaataatcttaataaaacctacaaaaatctttcgtgtttcttgttccctttgtatgccttagaagggggtcttacccttccattgcaccctttcgtgagagaggtgttgaatttttataaaataattcctaagtagctaa

SEQ ID NO: 247501 - DNA, 286 bp, Gossypium hirsutum
cccacgcgtccgaaaaaaaaaaaaaaaaaaaaaaaaagaaaaaaaaaaaaaaaagaaaaagaaagggaaaaaaaaataaataaaaaaaggagggctattatatagggtgacggtatgttttattgattgatgctgttatattgattgttttgtagtgtgaaaactatttaatttggggggcttattttttttaactgctgttttgtttaagcctgcttgcctggtaaatcatttgcgttggctgatttaagttttttacaggtggtctttttttatagtggttggg

SEQ ID NO: 247502 - DNA, 437 bp, Gossypium hirsutum
cggacgcgtgggttcagtttctttttcagttatattttctacagagatagcaaatgtaggtgttgatggatcaggaatgttagggtctgaaccaagggtgccgatggcaagaaagccatggaatagctcagacattgccaacgatgaatcctcttcatagtcttcttcatctactcgtgctgcttctacaccagcaaatgactttcgaagatggtctctctgggatggactgaatggcttggtaccatagtttggctttgaatagatttgttggtcatccagtaatgactgcccggtaagacaattacaagaatgccctgacacgaaaaagttaaaagaaaaacttggatgacagtgagatagatgaaagaataagttcttgcgtagcattttagcagagacagtgattacttttccctaaccatgacaacatttaa

SEQ ID NO: 247503 - DNA, 286 bp, Gossypium hirsutum
gctttatgtatacaaatttcacatggccgaagacgataatcaaactccaggcttaaagaatctgtgaacattttaattcccgttccattctcgatttctaaggtacaaactaagtccgtgttttcctctctgggatctgggttgattcatttagtagtgtaatttcagtggtatggttgagtgtaggattgtcctatttttaagtttggatcatggtttggttgtgtagcaattgtttttggctccctctatttgtcatttttcaaattgggtcggtccatttacc

SEQ ID NO: 247504 - DNA, 399 bp, Gossypium hirsutum
caattatgcaattgatagcgttattggtcctgatggcaaaacaaaacaactgcctggcttctgcggtacatctgaatgtcggaagcgattatattaggttttaagcaacttaaaagctttggaattctggtgagcggaagcccattcctatctcctctctctcttgtactggagaaaagtgtgtttgattgaacgattatataaaatatgggggttttcaagaaagttgatttacttgttggacagtttttaatctcaccattatcgatgggcatatgtatagatgaaacaagaaatactgtcatgtttctgctcctggactgatttgaaacgatgtattataattctatgcttttaaaaaaaaaaaaagaataacggcttgcgaattataataaaata

SEQ ID NO: 247505 - DNA, 432 bp, Gossypium hirsutum
  unsure (1)..(432): unsure at all n locations
gacaaaatcgtatcagatacattaacagttgtgcattaagtggtgagatcccctcaaaatttgctaaacttaaagaactgcgaactgtgtaagaaagactccctaatgtttatatacgagttgagttttcatggtttgctgttgcattgtttcttctgttctttgttttgttattggaactatttccaattttctggtttacttgaaatccgatatttgattaaagagaccaaatagagagcacaagtgagagcgaatgcagtgcaagtgatgaagtgcttgttgttccttatgataacttagcacctatgtcttgtgcagatattactgaatctaagcagcttttggataagcttgttgtggtgaagtataatggagcttntggaaagaatatgggtttcggtggtcccgaaatggggtnggagaatgatc

SEQ ID NO: 247506 - DNA, 363 bp, Gossypium hirsutum
gaattctcgaggaagaagttggacttgaccggacaggagctgaccgaggagaaggaattggcttactcatgcctctcatgaatgcattcatcatttccataatctgtttggaagaggagtggtttgccttaataggattagctgcagttttgaataaaaaaccgttctagatgaactgctagtgattggtaagcgacgtcctctgatcgagatcttcattatacttgtcacttgttcatggatattttggatattttaccggtaatcccggattttaagctccaattttaaatgggataatcgacactgttggtgaaacaaatataactgaatctaagcagcttttgtataaacttagttgtg

SEQ ID NO: 247507 - DNA, 346 bp, Gossypium hirsutum
ctgatttggaaggcgaagagacgggcgaagattttagtaaatatattaacgaaatccatctaaattatcttaatcaggggatcctaacatcgtatcctttgcctaatcatgattaccattctaatacgaatcaaagcagagaaatcagtggctcaggctggaaaacacctccacctccggctccgaggagtgcggcttgggattacttgaacttttttgatgaaatttatgagagatacgagttgccttatttttcgagcaaagaagtgaaagacaaaggaggagttcatgaacatcttgaagcacaagcagtaaagcaagttcatggagatgagaaatctagtgc

SEQ ID NO: 247508 - DNA, 410 bp, Gossypium hirsutum
ataaaaaaaaaaaaaaaaaaaaaaaacaaaaatttaaaaaaaaatataaaaaaaaaaaaatatgagaaatataaaaaaaaaaaaaaataaaataaaaaaactataaataataaaaaaaaaacgggggggcccttttaaaggttccaagtttccttccctttgcttgcaaaataattgttttttttttgtgccacctaatttaatttcaatggcctgagttttacaccttaaagttttgaaaaaccctggttttcccaattttattgcctttgaagcaaataccctttttgcctttttgattattaccaaaaaggccccgcccgttcgcttttcccaaattttacccctcctgattgtctattggaaccccccttttaccggcgctttacgctctagaggtttggtggtta

SEQ ID NO: 247509 - DNA, 349 bp, Gossypium hirsutum
  unsure (1)..(349): unsure at all n locations
cccacgcgtccgcctgaatctggattactgactactgagtcatggatgaagctggtattctttgtaaaatttgactttgcatgctgttgggatttatatatagtgtttatatatattatatattatattgtgtgatttacttttttttatagctgatttactgtcagcttgtttattctcaataattttcttttacttcatgtttctacactattgagttttgatgtttatttataaactttatcttcaattttggtatataaaccaatatttgttaaagcttgnnnaaaaaaaanaaaaaaaaataataaaatatatttttatttattttttattaaaaataataata

SEQ ID NO: 247510 - DNA, 363 bp, Gossypium hirsutum
  unsure (1)..(363): unsure at all n locations
tctgaacatagggttgtttctttcgaagggctatagtgtttcttttcttttttgtgtagactttgatttgttgcagctttgcctcggaaatggtcaatggtgtacatggttcatatgttattcaggggaatatagttgctgtttgctacagtcgtcactagggcttcttctgctcagtttggacattggagtctacaagatgccagtccccatctgatgtccgtcaaatttacattgcaatggcatgaatcatgatcaattttgtttcccttgttgatttttttgtgtgattccaatgttgatgagcgcttgtcatcaatgattcaataatttccttattctganatatatacattatggttc

SEQ ID NO: 247511 - DNA, 399 bp, Gossypium hirsutum
ctgcaccatctacaatttatgttttttggattcattcgattgtaggtgttgagtagtatatgtatgatgtatctagtgtaggtgtattcattatttttgagatttttatatacaaaattcttaaaaaaaaaaaaaaaaaaaaaaaaaaaaaaaaaaaaaaaaaaaaaaaaaaaaaaaaaaaaaaaaaaaaaaaaaagaaacagaaaatataaaaaaaaaaaaatataaaaaaaataaactgaaaaaacttccaattaaaaaaaaaaaaaaaaaaaaaaagggggggccccttaaaaaaaaaaaattttaatacccggtgacgggggcgttattttttttttttggggcccacaaaaaaaatcctggggcccggtttttaaaacctggggagggggaaaa

SEQ ID NO: 247512 - DNA, 325 bp, Gossypium hirsutum
tgctatttgttatgtgaattgctccgttatttctacgtgtagaggacttctataacttagggatcttacaaattctattaccaattatataaacctaagctatggcttctatctcggaagtatttttttgggtgaaaataaatactccataaccatgatggggtatgcagaagaacatgagactactgttcttgaagtagacttacaaatatggagtgaactgaatatgggggggggatttcatgggcccaagttgctatcagcactgatgaagtatacaaaagctgtgagggtgacgaacatgtaatacacgggccgggggtaa

SEQ ID NO: 247513 - DNA, 246 bp, Gossypium hirsutum
cccacgcgtccggctgcaactttatagggcagggatcaacagcaggttctttcatggtcaatgaatttatgaacactgccggcgtctactgccattatcattcagcagccttagtgagtaaaataaattatttaatttcatttaattatgctttcttttgccgccattttatggttataatgtaattttaggacctgcatatatattctgtgaatatataaataaataactgaaatcactcccaat

SEQ ID NO: 247514 - DNA, 104 bp, Gossypium hirsutum
cccacgcgtccgctgtgttgtaaagagatttttgccaatttgttaagtgatcatctgccagaatatagcttgcttttcacctatgattcagaagttttcatttt

SEQ ID NO: 247515 - DNA, 414 bp, Gossypium hirsutum
attccatacttttctgtaaaaatctttagtctcagcctatatatattattactaggatccgaattaaaaaaaaaaaaaaaaaaaaaaaaaaaaaaaaaaaaaaaaaaaaaaaaaaaaaaaaaaaaaaaaaaaaaaaaaaaaaaaaaaaataaaaagaaaaaaaaaaaaaaaagcaaaagctataaatcaaaaaaaagatacaaatgggaatttgtagaaaataacaaaaagagaaaacttaaatacaaacaaaaatagttatataagcttccgttaatagcaaaattggaccaacctgtttattaaatgctctttgtgaaataaaaaagaataccttgccgaagatcaataagggtaagaattttaccttagatctttcaaaaaaacattggatggtagagccactatatgtat

SEQ ID NO: 247516 - DNA, 358 bp, Gossypium hirsutum
cccacgcgtccggcttgaggcaggattattatttcataagagaaataaatattaatacctattggattatgcacaagcactgtgctgtgtgccccaaaatccagtgtgaaagtacatcattgtgtcatagctcagcagggggtaggatttaatgactgtttacaaggattagattttgtcggttcgagtgttattttgtccccgttgattgagactgaatcaagtgtaatgtttttccttaaaaaaaaaaaaaaaaaaaaaaaaaaaaaaaaaaaaaaaaaaaaaaaaaaaaaaaaaaaaaaaaaaaaaaaaaaaaaaaaaaaaaaaaaaaaaaaaaaaaaaaagggggggccgcttt

SEQ ID NO: 247517 - DNA, 416 bp, Gossypium hirsutum
cccacgcgtccgtggtttaacatttgtttgtgaactgcagtcttatcctgaatgtaaattttgcagtaaatatttttgcagtacacttgtcagccttctgctttctagtcttttgagcatgctgtactaaatttgcattaaaaattgccctgaatctgaaatgccgactatattgttgttgagaatgtgaattgacaagcatagaaggcagaaactggaatattgcagtaaccttctttgtacggtttggttttttatgcatgttttaagtgtcccaagcctagaagctttaaaccttgctatggtcagtgcttaaaattagtgtagcgttaattattgcagttgagacaagccaagactgagatagtatcagctagcaaagtggcatatcgttttcttgtgggtgttacgtctag

SEQ ID NO: 247518 - DNA, 407 bp, Gossypium hirsutum
gaaaaatctcattctttttcgctattttatcttcttccttttttgctgctttgggcttgttgtttgctgcaggtatgggtacggagacgcgtgacgtggctcggcgcgtacgaaggcagaggctagcgtggagcggctcggaggcgtggctcgtggggccgagggaaaaccctggtggctgcggcgctggaggcattctggaaaccctcggggtttctgaaaattattcaaatcgggccatagtgtattgggcctagggttttgggtatgggtgtatttgggtttgattttgggctagtaatttaggtttaggttttgggccgtgttgatttggtctgtacgatttttggcttgtaactatggactgatattatttgtaaatggacttttaatatttttacttttat

SEQ ID NO: 247519 - DNA, 385 bp, Gossypium hirsutum
  unsure (1)..(385): unsure at all n locations
cggacgcgtgggcggacgcgtgggtccaaccaaaaaaaaaaaaaagaacagagtagataagtttgcaaagatttcaatctcgtaattggttcttgggtcgttcgtttatcgtttgcattatttcgtcgaccggcttgtttgctctgttttttcctttttagtagtctgggtttttatttttcttatatttggtttttgttttttttgctttctattcttggctcctttgaaacctttagaacaatttgcaaccaatgtttttttttttttttttttgcatatgggtgactaattttactattttaaaattttaaaagtgctttattttccnnaaaaaaaaaaaaaaanaaaggggaagaaaaaaaaaaaaaaaaaaaannngggg

SEQ ID NO: 247520 - DNA, 404 bp, Gossypium hirsutum
gtagaaaccaaatcaagaagagcaataacactgtttgaatatcttagcctttttcttttcagttttaaattttaattggccttttggagtttgatttttctttggtccttcctaaatctttagttgttcaacattctctacagtcaagaatggaatgattttcattcttcaaatgttctgttgtactttgcgtcattattgtagaatggaatattatttggcttaaaaaaaaaaaaaaaaaaaaaaaaaaaaaaaaaaaaaaaaaaaaaaaaaaaaaaaaaaatgaaaattaaatacaacaacaataattacctttattacaatgctttctactttataaaatatttttaaatttttacatattaaccatttcctttttaaatttttacgggggggcccctttt

SEQ ID NO: 247521 - DNA, 363 bp, Gossypium hirsutum
  unsure (1)..(363): unsure at all n locations
ctcaaaattaaggatggagttctggaagaaatttactttcgtcttggctatgatggcggtagtcctggcagccaccatgcctgcaacggtaagcgccgctcgcaaagaggaggtgactctccctgccgatttgagctcaacaaccactttggccaaaattttagatgttgaagacaaacctgataagaaatgcctcaaaaattttgaattttgcatgtttacgaccagagtttgctgtgaaaattgtgcatgtttaggattatgcctgtgtttgtaaactcttccccttttcccttataatataattgcttgtattgtactaaaaaaaataaaggtttgtctttaaacatggttatccaanng

SEQ ID NO: 247522 - DNA, 289 bp, Gossypium hirsutum
ggatgttaaaagcaatgatttgcagaatggaaataagagtgggtgagaaagccaccatggttgagttaatattcaaacattaacctcgggcctcagctctgatatagttagcaagtaagtacgtacatacacggaatacgcaaaaaaaggtatgtcatctcacagggttaggaaaaggtgggaggggcgatatcattgttccttagctcttatgaatgtgctatggactatatacgaatgtacaaactgtgattggcatgatatgaaataatatatgtatatattatgt

SEQ ID NO: 247523 - DNA, 105 bp, Gossypium hirsutum
gggatctacaatattttttgagcaacctcgtcatgaaaggtattgcatatcaactttgttttccatttcatactcgaatgatcaataaaatttgagactaactcc

SEQ ID NO: 247524 - DNA, 416 bp, Gossypium hirsutum
cggacgcgtgggggcgaccatctatgttgtttacattttcaaatattatgaaaaaccaggcaaagtggcagttcaattcactcacaaataatgcataaaatcgagtgtaaaaccaggcaacgagaatactttgacaaaggaacagttcacaactctctacccaacaaaaaacgagcactttaactctgcagtctactgcctatttataggcctcctaggcaacagcgataagcactcattaatcagaaaaatatcaccttgaaaatagccacctatcacgtattgggaaggagaaaaattaccaccttcaacttatgtgtaatatcacatttttatgtaatattaaatttattaacgtaaaagataaaaacacttaaataataattatataataatattaaatatttatttactta

SEQ ID NO: 247525 - DNA, 345 bp, Gossypium hirsutum
gaacaaagatatatatatattccagtgttgaagttttttaataaacccttttctttggctgagaaaaaaaaaaaaaaaaaaaaaaaaaaaaaaaaaaaaaaaaaaaaaaaaaaaaagaaaaaaaaaaaaaaaaaaaaaaaaaaaaaaaaaaaaaaaaaaaaaaaaaaaaaaaacaacaaaagaaaaacaaaaaaataaaaaaaatgaaaaaaagaaaaaaaagggggggcccgggtaaaagattggaattataaaacgtggacagtggaaagaataatgctcttgatggtggaacgcgaaaaaaacaaaaaggccgggatgaatacatcttttaataaggaaaac

SEQ ID NO: 247526 - DNA, 253 bp, Gossypium hirsutum
  unsure (1)..(253): unsure at all n locations
gcttgagcgtctggtaaatctttggcctttccataagaatgctgctcataccaatggaaaagtaacaaattcgttcttcattttcccttttctttttgttgtgctaatgatgcatctcacttttttgtttctacttctgctcaatataacaaccaagaaatgtttgactaaaacagttttctcctgacgactttcaacaactgagttttgttggaagatttaaaattgtataaaatttccctctcgttnaagc

SEQ ID NO: 247527 - DNA, 340 bp, Gossypium hirsutum
atttattcttgccaaagatgcgtgaatggcataaaagatagttggaataaatcaggagaggggatcaaagcctgatgtgtttttaactgcgtgagattaaaaaatttgcggaaaagatatgtgttgttgtgttaggtggagaaacaatgttagctctttgacatgaattaggatggatggtgtacctgtacctttaaatttgtttgatggtgatcatttagaaatgagataatatgggatttcatccttgttgcaaaaaaaaaaaaatgaaataataaaaaaaaaaaaaaaattaaaaagaacatgaaagaaattatatatgtattggagataaacatta

SEQ ID NO: 247528 - DNA, 173 bp, Gossypium hirsutum
cccacgcgtccgaagctctaaaagcttgccttactaaaaaaactttttatgtaattcttttgcaagggcctgtaattattgcaaatgatgggaaagaaagatttcccaaagttagatggaagaaatcagcaactttgcgagagaatgcaatgcttcttcagtaattagcgtat

SEQ ID NO: 247529 - DNA, 106 bp, Gossypium hirsutum
aattttggcttatgtttcagttaaaacaagtctttgtaataatttctcctatgcttaaacaaattcttgggtctatgtatttatgttacttggactcgggtttcgg

SEQ ID NO: 247530 - DNA, 257 bp, Gossypium hirsutum
cccacgcgtccgctctcgcgtacgatttggttcttaattagggcccggacaaaaatggcccagtacaacaagattggtgggggtagacagctaaatggtacaatcagttgagtcgaaatggaatttagcaattgattaattaaccgaattagatcgattcggccgattaattcagttttaatcgaactaaaaaaaaaaaaagaaaaaaccaagaaaaaacaaaaaaaaaatagggattaaaaaaaaaaagcctttag

SEQ ID NO: 247531 - DNA, 351 bp, Gossypium hirsutum
cgcaagcgttacttggggctcgactaatgattgagtgaatgactagcatttacttgcgctgttgtggcagagtgatcatcagttggttgttaggagatattgagactattacatacatgactggaggaggaccatgcatatagtaattatataaaataagctgctatatcgaatggcaaagatattgtgttttgcattgatgattttggtgaagaaaattttgccttttacctcatttccctgtcagatagtgtatgggtgcccgggaataggattcatgtttgggatcaagagctgcgacgtgatatttgccctttagagggcctacatatggatgccaatgggcgagaa

SEQ ID NO: 247532 - DNA, 365 bp, Gossypium hirsutum
atcgctctcagctctacagtccttctcgattgcagtggcgtacatccatacccgaagccccactctccgaccgaaaaatgttcagcggtccaagtaacaggatctagaatcgaaattcatgtagttgtaaccgaccccttactgtcttataatggtgtgtagatcgaaatttaggtattttatacaggaatttgagattgttaatttttcatgctttgttttcagattgttatgaatgtaatgtaggttttgattttatcattgattggaaatcttatcattgatttctcataaacaaaagatattgtattttgctcattttgattgaatctaaagtcttagataaaaaaaaataaacaaaaaca

SEQ ID NO: 247533 - DNA, 355 bp, Gossypium hirsutum
ggggggaaatgatcaacgatgggaattattcgccgaggattgctggacgtccgatcccaaggaggggtcaagtgaaaattgctatcttaatggggattgcccattcttttgcttctattttctctgcaagtagtcgcaggcaatctgcatctcacttgtcctaggttgtttaatttctcccaaaaagtaagagaactgggagggtaaacgttgcccagagaactgggagggtaaacgtttcccgtcctaggaaagatgtgagctgtttttttttttttgtcgatgttcatatcagttttgtacagagcttgtatttatagcttttcagatgaatgaattttcaatttattttttt

SEQ ID NO: 247534 - DNA, 413 bp, Gossypium hirsutum
gtgaagtctggttttgatctaatggcagacccactagattgtgtttttggttatacggctgcatcggaggaaattcatcactctactccttcaagtatgtcaagcagagcacagagtcgtgcgcacaggagagctaatcgaaggcgtcgattgcatcatcaggaagcttcatcgagctcgcatgataataagtattctaagttttatgtaatgtgacatttaagttaatttttagtacacacacaacaaaaagaaaaaaggagttaagaagttaacctaaagggtggatttggtgctaaacatttgaggcaccgagtgaattaggatcaaatctttcaaattggtcggttgaagattaaatagtttctgagactactcaaataaggactttgatgggcaattgcaccaaacgt

SEQ ID NO: 247535 - DNA, 220 bp, Gossypium hirsutum
  unsure (1)..(220): unsure at all n locations
agttagaggaaaaccggggacaggggtattttaggcgctatggtatagacgcaaaatgaaggtattcacgtgtgtgtaactgtgaatggcttctgattttgaaacaaaatgtatagaaagtcagaaggttttctctaaatatgtagatataatagtgttttctttgcgcaaaaacaaaaatgatggaaaaaaggataaaaaattnggggggggccccttt

SEQ ID NO: 247536 - DNA, 375 bp, Gossypium hirsutum
  unsure (1)..(375): unsure at all n locations
ggtgaggacttggatgaaaagaatgggaaaattggggatcaaattggaaatgggaaattggcaaggctaataagctgcaaaggaaatgggtgtgggcacaaagggttgcttgattgggagccatacttggtggctacttaaaaatatttctcaaccctaacaaagagaattactagcattgaatgtcactaattttttttctttccatttttctaatttttagctataaaaagtttgagattaccaatnnaaaaaaaaaaaaaaaaaaaaaaaaaaaaaaaaagacaaaaaatataaaagaaaaaaaaaaaaaaataaanaaaaattaaantaaataaaaattaaataaaaaaaaaggggcggcccttttaaagg

SEQ ID NO: 247537 - DNA, 393 bp, Gossypium hirsutum
  unsure (1)..(393): unsure at all n locations
attgaaattgtcagcttcggacttgctcttagacttaccattgtttttctttggttgattgacgaagctgaactcttgcataaatctctatgaataaaaaacactctttgagtgatacttttttttaattgttgaacctttgatatcgctaatcaaatctcagtntcnaaaaaaaaaaaaaaaaaaaaaggagacaatataaaaaaaaacaacataaaaaaaaaaaaaataaaaaaaaaaaaaaaaaaaaaaaaaaaacaaaaaatataattaaatgactcgtagttaaaaaacaatattaccttgtaaaaaaccatgacattaaaaagggggggcccctttttaagagatacatttttttcccgctgggtttaaaatcttaaattctttttt

SEQ ID NO: 247538 - DNA, 384 bp, Gossypium hirsutum
aaaacccgggccgaccgacgcgtacgaaagaatcataaatttcttgtaaattattttatattggagaaaaaaatcataaattgtgaggggttttttatttggggagggggtgaataacgacaaaacatgatacaactgctataactaatactttccgggtacttgaaaaatatattaaagttttatgcatattattataacaaaattttctaataaataaatttaaatatcttgtaaaaaagattttaacttttaaaaatattagaaactcaacatacaatgataataatggattgaccattaatagaaaaagcatttttttaacttgttttcgattcctatcttattatactatgtaaacaatatttaataaactgataggtt

SEQ ID NO: 247539 - DNA, 298 bp, Gossypium hirsutum
cccacgcgtccgcccacgcgtccgcaatggccataaactatatatgtgtatgatttaaattgataaagatccaacgaaagcccaaaaccttgaaaagaaatgatgctgtgttgcctgtaaatatttgcgttcctgcactgtaggattttgttttagaagaagtgaaaaatattgtgtttgcatttaaaaaaaaaaaagatgcgtgaaaaatgtatgagataacgatgcttcatactgagaaaattgacaaagctcgggattgatcctcctaagggagaactttgctatggtccttctg

SEQ ID NO: 247540 - DNA, 372 bp, Gossypium hirsutum
gttctacttggcttcagaggactggtcatcctattatcaatttcaatcaaacaggtccattacctgaaccatttattaagggcctaaccacagcaagtttgcaagggcgggctcagattgtccctgacattgaaagccctggaaatctggttttttatttggatggagcccacagtcctgaaagcatggaagcgtgtgcaaggtggttttctctttgcactagggatgataatcacctatctaacctgaattatcagccgcagcagcatatggatgaaggatctaagaaggatactgcccagattctgctattcaattgtatgtcagtgcgagatcctcagttgcttctgcctcgcttgatgaggacatgtg

SEQ ID NO: 247541 - DNA, 410 bp, Gossypium hirsutum
gatgatgtttggttttagtactctcttttttgtcgtcagatctcacacatgatgttaaagtggagtttgatgctatcactttggtacaaattttattataattttttggatattggcataatatttttttaatattgtaaagcaagagatagatttagtgttacagtgtacattagattaggcttctttattggaaggacatcaatttggggtcacgagggattttgttttagtttttttatcaatgtgggataaaaatatagttcacacacccttattttttttaaaaaattaatattttagataaaagaaacaattggttaaaatatggcgtaagtctccatactcttcgaaaatttaaaatttagtttttatacttttatttatatgaatttagtcctttacttttt

SEQ ID NO: 247542 - DNA, 421 bp, Gossypium hirsutum
aaacccgggccgacccacgcgttcggatgatgtttggatttattactctcttttttttcgtcagaactcacacatgatcttgaacgtgacattgattctatgggtggggcacaaaatttattataattttttggatattggcataatatttttttaatattgcaaatcaagagatatatttagtgttacagtgtacattagattaagcttctttattggaaggacattaatttggggtcacaagggattttgttttagattttatatcaatgttggataaaaatatattttacacacacttattttttttaaaaaattaatattttagataaaaaaaacaattggttaaaatatggcgtaagtgttcatactcttctaaaatttaaaatttacattccatacttttatttatatgaaatta

SEQ ID NO: 247543 - DNA, 383 bp, Gossypium hirsutum
gatgggtttgaggtgggagacattccagacaatgctgttatacatataacgggattggatgcacgggtatctacatgctggatatttatttcaaacatagcctgatgacattaaactagatgttgggggcttcatactgagaacaactacctacttattctctatcacttggcttactgatggataacatgaaacaggcaaacaatatgctgacaaattgagtgcaagtgtgctgacttagaagatggctcccatgttcaagactattaaaaacaccatatgacaggaaaaaagctgttacacgggctgcattcttacccacacagctataccaaggaaaatgtgatgacgtggatacacataaatccggagagagattctct

SEQ ID NO: 247544 - DNA, 304 bp, Gossypium hirsutum
cccacgcgtccgaaaatattctgtagctttgttgtctttgggtctgtccatcttgtaagaaaaatttatgccgattaggtgccgaaaaaaaaaaaaaaaaaaaaaaaaaaaaaaaaaaaaaaaaaaaaaaaaaaaaaaaaaaaaaaaaaaaaaaaataaaaaaaaaaaaaaaaaaaaaaaataaaaaaaaaaaaaaccataaatgaaaatcaatgaacaaacgaataaaatgggggtgactgtgaaaacacataacattatccaacttggtcacattgcagctctatcctgttttagacagctg

SEQ ID NO: 247545 - DNA, 404 bp, Gossypium hirsutum
attttgctttcatgcatgacctgattcctgtaaaaccatattaaccataaagcgtagcagaggagtcgacattgagtttcagggcctcttgtaaatacccaggacattgatgaaaaatatgtaggctatcttttgcccaaagcatgacaacggagacatctatcatctgcaatgactctcctgtgcttaagattaacaaggttgggaataaagtcccaggaaattctccagatagtaattgagattttagaggatagttgttaagtccacaatttcttgtaaatttttttagttacggcatgtaataaataattcctaagatccggattaacatcttgtaatagtttataggtactgcgaactgaaaataagccagataaattccttttccaagcttgagtatc

SEQ ID NO: 247546 - DNA, 297 bp, Gossypium hirsutum
  unsure (1)..(297): unsure at all n locations
ctagcatttctatgctttttgctgacacggcgaataaaatccaaccttttaaaacagcgatcgccacctaaaaggtcagtattgacagtatgacctcacttaaaacttgtactcttgcattatgatcgataaattaaatagaatatctttttgcttgattgtgcataanaaaagaggttatagaaaaaaaataatatcatggtaaaacgccagcctaaggactggtttcaaatttatttggcggaaccgagcctgtccttgtatcttttggtggggcttccatcgaatctttggttt

SEQ ID NO: 247547 - DNA, 146 bp, Gossypium hirsutum
cattaatgttattatgccttatcgagctataaacttcttgatattttttgttcccatttttccaccaaagtggtcctggagctttaggtctgttcctgggctccgttccttcactcaatgttctatctaaacgttttatattatac

SEQ ID NO: 247548 - DNA, 365 bp, Gossypium hirsutum
attttggtcatggttagtccaaaaataaagtctctgtattcctttttttttttactttggggtataaacccaaagtaaattgtacaatggttgtggttgtggaaaaaaaaaaaaaaaaaaaaaaaaaaaaaaaaaaaaaaaaaaaaaaaaaaaaaaagaaaaagaaaaaaaaaaaaaaaaaaagaaaaaaaaaaaaaaaaaaaaaaacaaagacaagaaaaaaaaaaaaaacaaaaaaaaaaaggggggggggcttttaaagaaaaaaatttttatccctggcctatgggatttatatatttttttatagggtgaccaaataaaaagcaagggcctgaatattaaaaaccctgaaaattggaaaa

SEQ ID NO: 247549 - DNA, 371 bp, Gossypium hirsutum
cttttcccttttttttttcttttaatttcataatttgttgttatgaacataaattgtgcattaggggaactggagaaggtggaagacttctatattaagaccctatttgatttggtgtgctggattcatgaacatcattgaacaattgggtgctttgtaaaccattttattcatgttctattgattagtttgtggtgttcctttaaaaaaaaaaaaaaaaaaaataaccaaaaactgtcaagggagagctaaaaaaacattaaaattcataaccaaattggttttagaattgcttaagacatgacaagataaaaaggcaagtggttcgaattttgagtcttcttaaaatattatggctagcattttccttt

SEQ ID NO: 247550 - DNA, 380 bp, Gossypium hirsutum
caatggctcaccacgggcatcctccacctacaccagacccttttgcacccccaccgccagggcatccggcaccacctccgccagacccctttgctccaccaccgccagggcatccggcaccacctgcacctgacccttttgctccaccaccgccagggcatccggcaccacctacaccagaccccttcgcaccacctatgtttgggcagactgcaccgccagcaccacccccatattagcctatagcataaaaatttgattagattcttatagaatcgtaacaataaataagagagtagatattgttatgttgaatgttggaagtggatggtaataatctttatgctacaataaatgagctagagggtggtgctcacaaa

SEQ ID NO: 247551 - DNA, 388 bp, Gossypium hirsutum
  unsure (1)..(388): unsure at all n locations
accaagcgtacgacctaaaccagactatcagtttgaagatcaattgtgttgtgaaatgtgggtttgataaaaaaaaaaaaaagagaaaaaaaaaaaaaaaaaaaaaaaaaaaaacaaagctgtactaaattagcattaaaaattgccctgaatctgaaaatgccgactatattgttgatgagaatgtgaattgacaagcatagaaagcagaaactggaatattgcggtgaccttctttgtacggggtggttttttatgcatgttttaagtgtcccaagcctaaaagctntaaaccttgctatggacagtgcttaaaattagtggagcggtaattattgcagctgagacaagccaagactgagatagtatcagctagcaaagcggcata

SEQ ID NO: 247552 - DNA, 308 bp, Gossypium hirsutum
ggcaacagggcacacgacttagggttcaggatgctgttgatctggcggagtcatttgcattcaacctcgagggttcaagttctagtgtgagttcggatgtaggctcggatcatatatccagcttgtgacatggtgccatgcactatatattgattcctccattcattcagagctcattgtttattatagcttgtaaccttgtatattaccctaaaaaacacatctggcgacatatatgccttgccattgattcactcattccaatgtcatgcgggatcaatgggataaaattattcatcaaactcacc

SEQ ID NO: 247553 - DNA, 291 bp, Gossypium hirsutum
  unsure (1)..(291): unsure at all n locations
cccacgcgtccgcccacgcgtccggctagcttggctagcatgatgggtatgatgggttcaggttgggcttttcgtcaacctgattcgggtcgagttgatgatgataggtcttccaatcaaagcacggattgcaattgacacaaattttcattttttgaattttgttatatttttaaccctgtaagaagggagtaaattgtaaataaataattaaattattcattaatttattgtgatacaaaataaaagtctcctaagatcatccaatacaagctttacttctattgttna

SEQ ID NO: 247554 - DNA, 339 bp, Gossypium hirsutum
gccgttaaagaaaattaaaatgcatatctttttctttccttttcttttgtttaaggggcggtgcatataaatgaaggatggggcgttaaatggagcatgctaagtagttgcggacactttcggtgagacgagtctgttctagcttcttcaccgacaatatgaaatttcttgtatgcaagaaccaaactccattattttcctaaaccgcatatagatttgggtatgcgccaattcgcatgcattggactagtgttctccataagaaaatctaatatctactagtgcagtttaactaattgctgcaattgctgaaattctttaaaccaaacttcaagttcc

SEQ ID NO: 247555 - DNA, 282 bp, Gossypium hirsutum
gccgaggcttacattttttccatgttatatttcgctgcatgcttaatcctaatgctttgtgggtgccttatattttagactaggccactcatgaacttctctctctactaattaggtctgctaataataagttcgactctaaagcgcctcttacacgacctaactgactatactgaagaatgaaatactgatagcatattttataccctcacccactctgaaaatcctgcaacccgcgccgtaccgtatggctcctcatgctttggataagggggcctagcc

SEQ ID NO: 247556 - DNA, 205 bp, Gossypium hirsutum
tctttctctcttttttttcttctgcttttttctgataataatgtattttgtctgtattatacattttcttactgtacaaatcaattattagttgtaaaataattgcaacaagcaactaagattttgtcccaatatcgcttgatctctcttccctttacaaaaagatgagtttcttttaataaagggctggcactttctttctcct

SEQ ID NO: 247557 - DNA, 407 bp, Gossypium hirsutum
cagaatattgactcgttgagagtgaaacttacttccgatgacttgaaagaaatcagagatgctgggccgattgaagaggtcgcaggcgatcggaactacgatagcatgaagaaagcttcatggaaatttgcagacacctgcaaaagatgttggggtttcaattgaacaaggcaattgaaatggttatggcatgtttgtttcatttaagggaaaatgtgtggcatagatctttttaaggttttaaaaccatccatacttgcgtttgggacaaaaattatagatggttttgatatgaaataataaagagagcaatgttaaggcaaagacttttatgctgccactattactgatgagcgtatgaaaagaagaaaaaccagagggagctctaatgtgctgtcgatctgagt

SEQ ID NO: 247558 - DNA, 401 bp, Gossypium hirsutum
  unsure (1)..(401): unsure at all n locations
ggccttcaccatcttttaatttaagagggcctactatattttgattcacaattacaagtgttaaaagattgaaatcctttgtttgtaatatttgttttctcattgctggtacaaccatctttgtaattttctttatttttagaatgaaattgctaaagtgatgttcaagtgtnaaaaaaaaaaaaaaaaaaaaaaaaaaaaaaaaaaaaaaaaaaaaaaaaaaaaaaaaaaaaaaaaaaaaaaaaaaaaaaaaaaacaaataaaaaaaaaaaaaaattaataaaaagattaaacaaaaaaaaatataattgaaataagatttaaaaaattgggggggggccttttaaagggtacaaaatttttatacgctttctttacaaaaaattttttttttttggggg

SEQ ID NO: 247559 - DNA, 367 bp, Gossypium hirsutum
cccacgcgtccggtatgaatatggttgtgatatctgaatgtaaagtaataatctccatagagtcgagtgttgacatctatgaatgttttgagtggtatattaaatattaattattaacgtgttaaagttcacataaaaaaaaaaaaaaaaaaaaaaaaaaaaaaaaaaaaaaaaaaaaaaaaaaaaaaaaaaaaaaaaaaaaatgaaaaaaaaaagaaacaaaaaaaaaacaaaaaaaaaagaagcaaaaaaaactaaaaataaaaaacataaaccgggggggggccgtttttgggaaccaaaattaacggccccttatgcgcaacgataaagttttttttaggggcaccgaaattaaaattgaggg

SEQ ID NO: 247560 - DNA, 164 bp, Gossypium hirsutum
tggagcttgttctttctggaatccgtggctggaacatgcagtattttacagttgtgatatgagttgatgtaacattgtttggaacactttaatgatctaatcgcgaacttatttcctggataagtacttcattacagttttacgaaaaaaatccagtttaatag

SEQ ID NO: 247561 - DNA, 187 bp, Gossypium hirsutum
cccacgcgtccgtaaagaacatgactttgtttaaaacaaaaaaaaaaaaaactcaagcgacggagcccataactattgcatccccctcgcacccaaaactttcccccagttagatttataaacatcagaagctgtgccccccaataccccgctccttcatttcttttcctcccaacaaaaacgcccc

SEQ ID NO: 247562 - DNA, 371 bp, Gossypium hirsutum
cccacgcgtccgcccacgcgtccgcccacgcgtccgtccacgcgtacgcccacgcgtccgggtgcaagtaagagtgggtaaatttagatccatggggcatggtattgggatctgttttgatgtattttcgttaaagcaatatattttttaccatatttaagaatgcaaacatcatttgttgtgtgaaagaaatgaaactgctattaagtgaagaaaacaaaacaaaaaaagatggtatgtataggaggcaatataacttgggctgacgccctttgaggctcatgttgctccttgcggacaatgacaagtgctgctacttattaggtgcgacatataacaaaaatgtttactgatgttataaatgtgggggg

SEQ ID NO: 247563 - DNA, 264 bp, Gossypium hirsutum
accacacgtacgcccacgcatccgcacactcttatgatagacggaaaacaactggaccatgggcgtatcatgtttgactgcgaacagcacaaaggtttctgtatcttgtatgactacaacattcatacaggtttatttattgaatattctaagaagacttttacattttaattttattaatatgcttaaaagactctggctcttaaattgtggtcgacaggtaaacaaaactagctttttttgatagctttggaggtgaaattc

SEQ ID NO: 247564 - DNA, 359 bp, Gossypium hirsutum
cccacgcgtccgaaaaaataaaaaattaatttaaaaaaaaaaaaaaaaaaaaaaaaagagaagaggaaaaaaataaaaaatataaaagaataaaaaaaaaaaaaaaaaaaaaaaaaaaaaaaaaagggggggcctttttaaaggatacaaattttgtttccttttcatgaaagattataattttttttataggaaaagcaaaattaatttaaagggccgaattttaaaaacatgtgaattggaaaaaaactgtgtttatcaaaataaaataagtttaaagaaaattccctttttccacaatgttgtaaatggaaaaaggctcgatctaatgatctttaaaaaaatgatggaaatcttaa

SEQ ID NO: 247565 - DNA, 388 bp, Gossypium hirsutum
gtcctgatgctcagattacttaattctgaccaagatcatgttggagggtccatcatatcttgtgtcaagggattttccaagctcctgcgagcaagagagcaagtggatttataacacttttcatgtaaccgagctcgcaagaagcaagtgccagatggaagatggagaagaccagatgatgagaaaagttctcaagccactcgaaggtgatgaaaacaagggggaaaaggaggatatgtcccttgcccagtttgactgtccagataaccaccgccacgcaggtgatcattcagaaacaagtttactgatccagcagcttgggcaagacatctcaattaactgtctcctccgctgctcaaggtctgattatggtgccattgcatctttg

SEQ ID NO: 247566 - DNA, 408 bp, Gossypium hirsutum
gaagaaaatgccgtctttacaaacagcgctgccccctgagcttgctaacaacgttatcagactttaccgggagtgtcttcgaagagctaaatatataggccataagcaacataatacagcattggttgttgatatggtgagacagcagttcaaaaagcatatgcatgagacggatccagagaagattcagaagctgaaggatgatgctgcaaggggactaattaaccacatactctatgagtctgagaagctatctggacgaaaattcagcaatagctcttgatagagttggggtttttatttgagatattggtattagacaaatttcatgactgctcaactaagtaataaacaaaggcttgaattttggtgttcataatgagttcgactgtgtgctgcattgaactt

SEQ ID NO: 247567 - DNA, 411 bp, Gossypium hirsutum
cccacgcgtgcggttgaaatgaacaaaacgattgtgaagactagacagtgggaacaacagcagcggatgctagttgatcttgtagggggtgaatggactataatgatgggatatgacgtgttgattcttttttatgcggggacaccccttttgtatatatctatgatagtaaatgagctaacgttgctcttaaacatgctcatctgtattgcgacatactgtatccttgagtacgcctgcataaataaagacaaggactaagatttttaattgcatgatgccttgcgttaatatattaataacaaaacgttaagtgtctacgcatgttaacggtattcagcggctataagcggattttaagcgggcttgaggattctttgtttaaatcaactcttattataataaatgaaa

SEQ ID NO: 247568 - DNA, 198 bp, Gossypium hirsutum
cagacgcgtggtatggaatgaatgtgaatgcttgtcaaaatatttgaatcatctggattggtatatgccgaaaaaacgaagagaaaacacaaaagtcaaaaacggggttgtctgcggtgtattgtattaataacgtgcgatgaatcagacaagctatgaatgtactatgaatccatgagtttaattttttcacttgaa

SEQ ID NO: 247569 - DNA, 293 bp, Gossypium hirsutum
ctggagaaggcgcgtgtggacttggcgcggtatgcgcaacaagcgcagggatctggttcggctacggcgcaagggcagaaagctgctagggctgacgcacaagtgttttccagaaacccctagggatttctggaattcggaccgttttgatttgggcttaactgggttcatggtttgggtctggtatttgggttaaataagctaatgtaaatcacactaaattaggattggctttcattgctgggccatacggctgtgctgcatgtatttgctatctgaaatactaaacgcta

SEQ ID NO: 247570 - DNA, 368 bp, Gossypium hirsutum
  unsure (1)..(368): unsure at all n locations
gaccatctatgggtgatgtgctgtggaaccttgagtttgccttgcagctgcaggagagtgcagaagagagtgggaagggaattggtgaaatggacatggaggaggggagctatgaaggaacctgtaaagggaagaaagatcctaatgcatccctggggtttgatggtaacataactgattctaggagcagcgggatgagcatgagcatcggtggtcgcagcctggctagtgaagacttagagggtttgacacctagtgctgttttctcacagatcatgaaccctaaagggcgttgagatgagaagtgcacaagtgattgttgcatgacttgagcatggcatggaatggaatataggaatattgngttt

SEQ ID NO: 247571 - DNA, 364 bp, Gossypium hirsutum
cccacgcgtccgattttatgcagtctcttatgtaatattaacttgcagggctatataatgggttatcattgatcctttctgtaatttatattaatgcaatctcattatgtaatagggataaaaaaaaaaaaaacaaaaccaataatacaaaaaccaaaaaaaaaataaaaaataactaattaaagaaaaaaaaaaaaaaaatctaaacccctataaaaaataaaaaataaaaatgaattatctattttgttttttccttaaaacaaatttcaaataaaataaatcaaccaaaataaatataaaggggtgcactttttaaaaataaaattttttttccctctttttttcaaaaaaaataattttt

SEQ ID NO: 247572 - DNA, 213 bp, Gossypium hirsutum
aggtgatccaaatcgatgcagctatgacaatccaccatccagaggtctccagtcttgtttgctatcgccgccttctctaagaagctgttaatccttggaattgtggctgctcaagactcactaggtgtcgaagttaatgtatattttgataatataagacggaacctttcttatataaatatataaatatagaaacctccacatattaatgca

SEQ ID NO: 247573 - DNA, 284 bp, Gossypium hirsutum
cccacgcgtccggcagaaatgaacaaaatgctgctgaagaagaacaatgggagcatcacagcagttgtcatggatcttctaggtggagaaggggcttaaatgaggggatatgacggttgattctttcttatggttggacaagccttttatatatatatataaaaataaataaatgaagcgtgcttctaaacctggtcatcttattccaacatatgatatccatgaatttgtatccagaaagaaagaaaaagacttttaatattaattccatgacacctttcttt

SEQ ID NO: 247574 - DNA, 202 bp, Gossypium hirsutum
cccacgcgtccgtgctagatgagtttttttggttaagtttattattctttcaatctactaattaattcctcaagatgctttacttgtgtattagtgtttttcccccttttggccaaatacttgtgtatcataggttaaaatatgccacaggttcctgtaattttcacaaaattagaatttaatcctagagtttagttcttct

SEQ ID NO: 247575 - DNA, 168 bp, Gossypium hirsutum
ggctgatggagctgctcgacgtttggcacggtgctataatttgagggtttcagatgactcaggcccttctacctttcactgacatgcaacaaccctatgtactaacgtaagtagagaggacctttacttgtagagaggatctttacttggcatgtattagaacacttc

SEQ ID NO: 247576 - DNA, 322 bp, Gossypium hirsutum
atcaacattaacatcattcaagtcatttttattaacaatattaacatcattaaagagaaaggaaaaaaaaaaaaaaaaaaagaaaaaaaaaaaaaaaaaaaaaaaaaaaaaaaaaaaaaaaaaaaaaaaaaaaaaaaaaaaaaaaaaaaaaaaaaaaaaaaaaaaaaaaaaggggggggggttttaagggaccaaagttaacgtccccgggcatggaaagaaaaattttttttatgggggcaccaaaattaaattaacgggccggggtttaaaaacggggggatgggaaaaacccgggggtaaccaaattaaatggcttggg

SEQ ID NO: 247577 - DNA, 198 bp, Gossypium hirsutum
cccacacgtacgatttccctatatattgtattttattctatctagaaagctaatggaaaaggaataaatatgcttggcttgggaaataaagattttactacttttggactaatactagagtataatatgttaaaatataccacaaagttcctgtaattataacaaaattagaatttaatcctagagtttagttcttct

SEQ ID NO: 247578 - DNA, 185 bp, Gossypium hirsutum
cccacgcgtccgcggacgcgtgggttttgttccccttgctcccacacatgccaatgttgtaggagtcagcctacattactttgtacttgattgtaatcattggatacgagatgtatccgacttgggtatggtttaatgtatctggaggatttttgggaggttgaaaaatatatagagactgaagg

SEQ ID NO: 247579 - DNA, 413 bp, Gossypium hirsutum
atttgagtgaaattagagagttgaatttagtctaaagtggaaattgaatgaaaatatggaattagttttgcagaaataaagttagcctcagtttcgggactaaattggaatttagacaaaagttgaataaatatggaaatattcaaagtgaaattgtattgtattgtattgatgaattttaattgttttaattcacgtagctaatgctgtaccgaaaactttgactaagaaagaaaaagacaaagtcgacgaggagtagctcggaaattctggttaggttaaagtcagattgccgattcagcatccatcaaagatcccaaactcaaaatgtggtgatatatatttctttttgtgtcggcatgtacctagtgtagaagcccaaatttgcccgggccctaccagcaaaacaaact

SEQ ID NO: 247580 - DNA, 407 bp, Gossypium hirsutum
  unsure (1)..(407): unsure at all n locations
ctccgctcccctttctcgggcctttttaaagaattccgtttttgtaaaataaaataataaaaaaaacattgcaggtttggaccatttggtaatttgctctttctttgttagcactggtttcgaaatttgattgtgtactatactgttcagttgtactttctgtattttagaatttattctatttttattttcatttttcaaaatttcagatagataatgtcgttgaaatttttctgttaaatttatttgtattacattttaaattttaatttttttaaagtacttactagattgctgtgtaacaaagaaaatgacattgtaataaatctaaatttaatagacaatttctactgtattagttnnnaaaaaaaaaaccggaaaaacactaacattaaaaacagccgaaa

SEQ ID NO: 247581 - DNA, 207 bp, Gossypium hirsutum
gggattgcaagttatattccaagagatctctctctcaattttctttttagttcttcacctttctcttttgcttattatcttttcttcctcctttttcattttttctttgactttttcacttgtattgaagcaaagtttgaataaggcagatcgaaaagactgtaattaagatcatgattttatgaaatctagaagctgtttaatgtt

SEQ ID NO: 247582 - DNA, 332 bp, Gossypium hirsutum
gccacgcgttcgacattacccattttatcctgtgtctttacttctatgaatctatccacgtggtatatagaaaaagcctttatgatgaaaaaaactgatagaataggggttgtaatatttggccccattgttgttcagttttgtggcagggtgtgtggatgactgtgttatactttaagacgatggcttagggacggtccagattttctgtaattgtagttttaaaacctcattatttatagagcatgatggaaattattatgacgcgtctatatgctttacttcagaaaatagggcttttcttgttttttattaagctcacatctcctaaa

SEQ ID NO: 247583 - DNA, 238 bp, Gossypium hirsutum
cccacgcgtccggctaacaacctaaggatgatgttcactagtggtatatatgggatggatgaggttgtgtgcttcaggttggatatatttttctaatattaccttattatttttcaaatttcttttagaatgattctcattttttccttcttgtttctattttagttggtatagagagcatttgataccgtatcgagttttggttggtttgaaacatttttcacctcaatttttttgc

SEQ ID NO: 247584 - DNA, 349 bp, Gossypium hirsutum
  unsure (1)..(349): unsure at all n locations
tgtacatcattgtaaattgatctgacacatttcgatattgatgcaggaaattgatctgacaaactcaagtgaaatcttaattgaagcacatttcattctagttatgtttatgttttctttatgtttgatgtgtataacaagtaaggtgaaaataaagagttttgtaagagaaaattcaaccttgnaaaaaaaaaaaaaaaaaaaaaaaaaaaaaaaaaaaaaaaaaaaaaaaaaaaaaaaaagaaaaaaaatataaagaaaaaaaattggcgaacgnttgaatggaaccaaggttcctttcttttgtgtgccccgtattaacttttttgtcgggcgacctaaatcaaat

SEQ ID NO: 247585 - DNA, 358 bp, Gossypium hirsutum
  unsure (1)..(358): unsure at all n locations
cctacgtgattgttaattgatctgacacattttgatattgatgcaggaaattgatctgacaaactcatgcgaaattttagttgaagcacattgcattctagttatgtttatgttttctttatgtttgatgtgtataacaagttgggtgaaaatatagagttctgtaagataaaattcaatcttgactattacagtggatcgatgtgttcttgaactttgaaacatgaaccaacaaattcctttgttgggttgattacaatggatgaccaacaagagatgttttcatcagccagggtttatgaaattggtcgccgaatgccaactgatgatgattctgatcctgatgatgcanaaagtg

SEQ ID NO: 247586 - DNA, 423 bp, Gossypium hirsutum
aaaaaaaaaaaaaaaaaaaaaaaaaataaaaaaaaaaaaaaaaaaaaaaaaaaaaaaaaaaaaaaaaaaaaaaaaaaaaaaaaaaaaaaaaaaaaaaaaaaaaaaaaaaaaaaaaaaaaaaaaaaaaaaaaaaataaaaaaaaaaaggggggggcctttttaagggttcaaattttatttccggttgtttgaaaattaatattttttttttggggcaactaaaataaatttaattggccgggtttttaaaaggtggggtttggaaaaaccttgggtttcccaaatttattggttttgaaaaaaatccttttttggccagttggattaataaaaaaagggcccgaactaatcgcttttcaaaaaatttgcccaccttaattggcaattggaaccccccttttacgggccttttaagcggggggg

SEQ ID NO: 247587 - DNA, 402 bp, Gossypium hirsutum
gcaaactagaaattgttggagacttctattttcagacaaattaagagacaagacgcattatattaccagctgacagcagtgttgttgacaactgggctttttttaaactttttctgtgagaccaataatgcttctcctgtattatacacatttataactgttttgtgcgtgtaataaaaataccatacttttaaaattttagccaatgggaaaggtcttcatttgtgaaatgaagggttttgatggatatgaaaaggattttttggggggaggggtttggggaataaatatttttgaaaaatggcaagtgggggagagaaaaacaatgatttttatgcagatttggggtggaataaagaatgttcttcaacagagcttatgactgctttttataaacttttt

SEQ ID NO: 247588 - DNA, 412 bp, Gossypium hirsutum
  unsure (1)..(412): unsure at all n locations
tgaaaaccttttctttcacggaaacataagaataaaaagggattccgtgttgcagtgtttcccacacaaaaggtgtaaatcctaagtcatgctttataaaaattctagtattgatatgaatgttcaatatcatagggggtttagcttcgtttcgatttttctaggtttcctagctttaagttttcgttgtttttggtaccataattagtcgacaatacaaaggactgttgggttttgttggttttgaattggtttttttggggggaggggtttggggtttgattttttttgaagaatggcaagtggaggagagaaaaacaatgatttttatgcagttttggggttgaataaggaatgcactccaacagagctcangactgcttataagaaacttgccctgagatggcaccct

SEQ ID NO: 247589 - DNA, 412 bp, Gossypium hirsutum
  unsure (1)..(412): unsure at all n locations
ctttaatccctctctttgaatgccgacctgccaccctaaacgacgtccagcagattcaagtttcgagggccgacattcttgactataaaaccccctcaaagctccgacttcagcgaagcaaacggaactccacagcctattcgtgcgtgattgaacacgtctctgacgtggcgtggtggatcaacgcacgtcacgggatggtggtgcctggtgcgtgagggggcacgctgtttgttgaaactgcgcaaaggggctgttagggtttcccttgctgaaatgttttaagttcgtaggctaattgggctgcgttgtaaatgagtatttatggtttgggttgaggttttagggttttgttcttatttggnttttggtttatgggctctaagctaaattgggccctacaattattact

SEQ ID NO: 247590 - DNA, 139 bp, Gossypium hirsutum
gagaaaacagctgtgcttctagctattcgttattgcagtgcttgagaatttaagttgaaaacaaatgattgtatgtgacatttaaattattgccttgcaattttttgggtttagaaaaaaggaggtatgaacatttgcc

SEQ ID NO: 247591 - DNA, 321 bp, Gossypium hirsutum
taacatggacattaattaaaattaaattactattgcataatgatagagctgtctatagatgaggttgaaaattgcactttatattccaatatgtcaatttggtttaagaatggctcgtactacgatctcaaaatagtataaatatatatccacctatacatacatatacatctgtatatgtatgagagttctcagttaaaaaaaaaaaacaatgaagagaaaacattaaagaacaaaaatcaaacaaaagcaaaaaagctaaaaaaactatataataaaaaaaacaataaatcttcaaaagccggggggcctttttaaagg

SEQ ID NO: 247592 - DNA, 393 bp, Gossypium hirsutum
  unsure (1)..(393): unsure at all n locations
gatatgtcaagcaactgaggccatatctgctggctctcggtactttccagtnaaaaaaaaaaaaaaaaaaaaaaaaaaaaaaaaaaaaaaaaaaaaaaaaaaaaaaaaaaaaaaaaaaaaaaaaaaaaaaaaaaaaaaaaaaaaaaaaaaaaaaaaaaaaaaaaaaaaaaaaaaaaaaaaaaaaaaaggggggggcggttttaaaggacaaaattttagttccccgtgattgcaagttaaaacttttttaatagggcaacaaaaataaaattaaggggcgggggtttaaaaacttttgaacgggaaaaaccttggcgtacccaaattaaatggttttgaaaaaaatccctttttcaccagttgggtaaaaaggaaaaaggcccgaaccaatcc

SEQ ID NO: 247593 - DNA, 317 bp, Gossypium hirsutum
aaaaaaaaaaaaaaaaataaaaaaaaaaaatttaaatataaaaaaaaaaaaaaaaaaaaaaggggatagaagaagaaaaaattaagaaaaatataatgatgataaaaagggggcgggttttttataggttatgagttttcttacgcatgggtggttgttgttaatttttttttgttgtgaagacttttgattgatctggttatatttttacaaggtatgatttgttttaacttggtggtatgaataattattggtctggatgcttttctctttttaacaagttggtataatgaatagtaattgggacctgtatgttt

SEQ ID NO: 247594 - DNA, 339 bp, Gossypium hirsutum
tctagatcgcgagcggccggcattccttattatactgacatggtccctgtagtgtaaactgtcaaaaccatcgccattagtcttttattattattattattattattattattgttattattattattattattattatatatccttctccgattcgagaataaaaggaaaaattcatcattattatggagaaaaaaaaaaaaacaaacagaaataatattaccccaaccaataaaaaaaaataaaaaaataattatgtaaccatcccttcccctctctatctctttaaaatgctctgcctctaatgaaatatatcttattttgttttgattgtacttt

SEQ ID NO: 247595 - DNA, 324 bp, Gossypium hirsutum
  unsure (1)..(324): unsure at all n locations
gaccaaccatggttagacttaggtaatcaccatcactctctctcgaccgcaatatcacttccctttccttttctttcatccctctctgtggaacttgttaatcttttttatgtataagcctatggatttggattgtaactagggattctttctccatccatgaccttgatgcatggttgagaatgaatttgccacttactactatgctttcatttcaaaaaaaaaaaaaaaaaaaaaaaaaaaaaaaaaaaaaaaaaaaaaaaaaaaaaaaaaaaaaaaaaaaaaaaaanaaataaaaaaaaaaaaaaaaaaaaaaaaannnaa

SEQ ID NO: 247596 - DNA, 419 bp, Gossypium hirsutum
gcatcatcatctaccaaagattttacttctctatttctgtattttttttggtgttataaaggaaaaatgaaccaatcccatagcaatagcttccaagctggccaggctcagggccaagctcaggagaagaccagtcagatggtagacaaggctagggaaactgcacaatctgctatggattcaatgcaacaggctgggcagcagatgcaggctaaagcacaaggcgcagcagatgccatgaaggatacaatggggatgaacaaatgaaactactccagcttgatcccaaattaccacccctctcgggcacctatctatctatatatgtatgtatgcatttttagcttttgatttttgttttgtcaaaattttcttcattttgctcatataatctttgagccaagaagaaagatttaccc

SEQ ID NO: 247597 - DNA, 391 bp, Gossypium hirsutum
gataatcatatacaaaagatataacatatttataaatgaatttataaaggcgttataaaggaaaaatgttcctatcaaatagcaatagcttacaagctggccaggctcatggccaagctcaagagaagaccagtcagatggtataacatggctgggggaactgcacaatatggatatggattcaatgcaccatgctgggcataatatgcttgcttttgcacacggcgcattaaatgccatgaaggatacaatgaggatgaacaaatgaaactactccagcttgatcccaaattaccacccctctggggcacctatctatctatatatgtatgtatgcatttttagctcttgatttttgttttgtaaaaagtttgttcattttgcttttata

SEQ ID NO: 247598 - DNA, 312 bp, Gossypium hirsutum
ggtggatctggtgaaagctctggaaatagatgatgtagttgacagtgatgtcaatgaggatgatgattaggttgctgaactagatgaactgaactctcaacattacaattctgggaattgtcttgccccctttcctttggtttttggtgctagaatttgcattgaaaaccagaattgttgtttatttattaactaaaatgctcctccaattggagaaagtagccttaagttttgtttgtttgtacgattggacccaaatttaatcggcttttattttaagaacataatttatttgattatgttcatttgcat

SEQ ID NO: 247599 - DNA, 114 bp, Gossypium hirsutum
gaaaaaaagtatagtcgtggattgactaataaggggaaaacctccctcatttgtaaggagactgattgaagtaaagttgaaggcaaaataaaagagatggcatcgagttttggt

SEQ ID NO: 247600 - DNA, 135 bp, Gossypium hirsutum
aaacatgtaaaaaacgatgatccttaaactaagctgataactttacgacatagttatgggatcaaagattttgtgggtctgatactcacaccttaaactaccactagaagtgcaataaaagttaaattttcttag

SEQ ID NO: 247601 - DNA, 333 bp, Gossypium hirsutum
aagagacttaagttgggttgtgcatacaggatcactggttaatgcgtaaaaagagttgtagtaaagactgataagcactaagctcttgtatcgcaaacttcattatacttgtgaaggcactgagaaccgaattttctgctatgtattagagaatccaagcacccatgcatgattgtagttggtgagtcaaacaaaaatgtacttagcggaaaataaacacgtagtgttggcttggctgctaaaagattcaatcagacggacgctctccttgcttttccaatgggaatatttgatcacacacatttaaagaaagggccggagctagaaagaaag

SEQ ID NO: 247602 - DNA, 394 bp, Gossypium hirsutum
aaaaaaaaaaaaaaaaaaaaaaaaaaaaaaaaaaaaaataaaaaaaaaaaaaaataatgaaagaaaaaaataaccccgcgcgtccgttggatttaagctgacaagtatttgtagttggcttgtagttgaagttttttatagggaacataatgttgtttttttggtagaagtttaaaaatttttattttttaaaaaaaggtgttttgaatgttttaaatggggttttaaaagttggattttgaactttttaattaattgaaaagcccttttgttaatgtttttgaactctgaaaactgccattcaattgtgcggttacatccagaataaatgggggcggtcggtttaagggtaccaatttttcgtacccttgcttgcgaatttttaatttttttt

SEQ ID NO: 247603 - DNA, 402 bp, Gossypium hirsutum
cgtatgaaggaataaaagaatatgatccccttttttcacccaaacgatcgtgctcgggagttggattattacaggtaacggaaaacacttggtggtcaaatacctttacccgaacccagtgcgggggacccgctcagaaaagaacaaattgagttgcagcaccacaaaagcgcgatccataccatagatgattctatttgtccgtcatgggcccttgctttctttagctcacttggtggatcaaaccgccgggcgcattataataaccttgtgtgaactctcattttatgtgacggggcctataccctatttcgtcactctcatgcactttatagaccggatatgcattttttttttgaaaagtgcaaagaacctttttcttatatgattgtatcaaaagca

SEQ ID NO: 247604 - DNA, 413 bp, Gossypium hirsutum
aaagtgggttaataatgttcaactttctatttaaaaaaaaataaagataaagaatgtgtaaagaaaaataaataaattaaaaataaaaaattaaaatgaaattatcaacacgatggggctgacgctttaaaggttcaaagctttgttacgctttcttgcaacttaatagcttttttatggtggatcttaaattcaataaagtgtcagcgtttttacaacgttttgattggaaaaaccttggtatatccaaactttatgtctttgaatgatatctcttttttgctattttgtgtaatacaaaagatggcttaaccgattgtttttcccaaaattatctcttcctgattggctaattgtactcaccttgtaatggttctttaatttcgtctgaagtggtggttacccccattttt

SEQ ID NO: 247605 - DNA, 326 bp, Gossypium hirsutum
gaattttgaaaaaattgaataaaatggagctttgaattagaaaaatgaaaataaagggaggggacaccttataaaataacaagaaaaaggataataaaagtgctgttagtattaataaaaatacaaaacaagcatgaagagtctgaaccaaggaacaaggggggggccgttttatggtgtcaaggttttcttccccttgctggcgccgtttttctttttttttgggggcccctaattttatttctgtggccgtctttttacaactgtttgtttgggaaacccttgggtttccccaatttattggctttgataatttcccctttttg

SEQ ID NO: 247606 - DNA, 349 bp, Gossypium hirsutum
ggctttgctgacgactcatggattttggatggatttattgactgtaagggtcagtgttcagacatcatatcagttgatccatatggggctgtttatttgaggtatagaagagctcttggctatatggtcgtgggcaaaagaatctattatttaggtgaatacctaacccaatggcgctaatggacctgatggatgtggattcatgaactctgcttaaggtcacttactttgtggtggaaaccaccgggttcatgagactaaccttttttgaactctcatttgatgtgatagaacctattttcttttataaaactatcatgtactttatggcccgtgtatgcattttttt

SEQ ID NO: 247607 - DNA, 354 bp, Gossypium hirsutum
aatttttgcttctctgcaaactcccttgattgcatactgttaatcaattgagccatcctcattttctacatctgctagatatctggtcaatgggcagattttttcccgagctcagtcgtttgtatacttttattacaagagagatatacaacacaccattgcatgtagtgctggcctgacctttcaaagcattcaaaatagaatcattgctgctagctgtagaattctaaatgaattttgtgagtgatccaaatggaaattcttttattttgtatccttttagttataaaagtaactgaaagtttactggtaaaaaaaaaaaactaaaaaacaaaaaaaaaaaaaaaagggcgg

SEQ ID NO: 247608 - DNA, 307 bp, Gossypium hirsutum
  unsure (1)..(307): unsure at all n locations
atttaggtaaaaatcatagaaagatcatgtttaaatatatgtttcttgcatttgagaaccaagtctttagctagaaagggaagaagcaaaatgtgagtgtgccaggttcttcagtttggttttgatgcttgtaaggtaccatgactgatgttaccagctaactaagctactttgtttgatgatnaaaaaaaaaatgaaaagaaaaaaataaaaacagccgtaacaaagaaaggaaaagaaaatatacaaaccaataaaaaaaaatggatgcatgataaattaaacaaaatgggggggctcgttttaa

SEQ ID NO: 247609 - DNA, 400 bp, Gossypium hirsutum
  unsure (1)..(400): unsure at all n locations
cccacgcgtccgtgttaaatttgatccgagaactcgtgtcttaatattggattcgtataattttaggtatggtcatcatgtttaaaacattacatatttgtatatatttgttaataaattatgttatatttgtaaaaaaaaaaaaaaaaaaaaaaaaaaaaaaaaaaaaaaaaaaaaaaaaaaaaaaaaaaaaaaaaaaaaaaaaaaaaaaaaaaaaaaaaaaaaaaaaaaaagcaaaaaaccnnnaaaaagaaaaaaataaaaaaaaaaaaaaaaaaaaaaaaaaaacaaaaaaaaaaaaaaaaaaagnaaaaaaaaaaaaacnnncccngggggggcgcggcttaaaaaaaaaacaatttcgaacccgtagaaagaaaaaaaaaattttttttttttt

SEQ ID NO: 247610 - DNA, 413 bp, Gossypium hirsutum
cccacgcgtccggtatctcatgtccgcatttgatgttccagaggttatggctgtcacccgaagcaatatttgcaagaatggaatacaggcgctgtcccgagggggtgctgtcatatattatgcttcaatcttcctttacttctgggttttctcgactcctgtggtttctttggtgttcggaagctacttgtatatctgcattaactggtttcatctacactttgacgaggcgttctcttctctcagaattgctaattacaagtcattcacacgattccacatcaatcgtgatggtgatcttgaagttttcactcttgcagtcgataaggttccaagggaatggatgttggatcctgattgggatatggagcagaagcagccacaacagttgagccataagagaaaatacccta

SEQ ID NO: 247611 - DNA, 277 bp, Gossypium hirsutum
attaaaatttcagatttgttaagtgcattttaaaaaaaaaaaaaatatggaatggggaaaggggaaattttttttaaaaatgaaaaaaaaaaatatgttatttaaatggggctgatatatattaattatgggatttatctttcggggttgggttttaatgggccctaggtttgcattggcgttcgtgcgcttgttttatctcttttttaacagttggcttgtggtatggggcgagggctcctaaaatttctgagtgggaaattacttgtttttctta

SEQ ID NO: 247612 - DNA, 407 bp, Gossypium hirsutum
ggaagatgaagagtgatgatggacagttggtggtgctgagtaatgatgttactctaaagatcaaggccatggcagagggtttgatgtgtgagacagtgcaagaattccgggagagtgtggtgaaccccttctcagagcggttcatgtgggcagacagctctcctagaggacacacctggtcagtgatggatgatgtagttttgaggggcaaatacaaccgttgtcccctaaagaagccatccaagggaggagatatcaagggtttgaaactcattctgcttcataattcccactatgcccacctcaattcagtccgctaaaacatctgagatatgttccagcagttatgttttgaaatctcaagtaattgcttacatatattgcaatagcatataccattgatggga

SEQ ID NO: 247613 - DNA, 278 bp, Gossypium hirsutum
  unsure (1)..(278): unsure at all n locations
tttaattngagggtcgacccacaccttcacccacgcgtccacggacacctacttccactctcgcacccatataaatctcctgagtctcagaaggattatatgagtattttagggagcgctccatcccagattaatcgttctaatctcgtgtaagcaagtgggtctaacaaccacaaaatatctctatatggacgcctcattatcctaacactgcttggagctaatgttgaaatccgcccggaaataaaggaggagaatttctttcttttctttgcaag

SEQ ID NO: 247614 - DNA, 307 bp, Gossypium hirsutum
  unsure (1)..(307): unsure at all n locations
cttaaaccttggccaggatgctcttaaactaactgaattttgtactcgctaagttgctctgaagatttagcccatgaaaaggcagttagttaaatctttgttcatttttgtgagagatgggcaagacagccaaaggtacgaaatggctattgctacaaatgcttgtacccaactgtgattttataagccaagttaacatttccgagttcgcnttggncnaaaanaaacctcccaacccctcctaaaaagagatatggggccttaaaaaataattttacccccaaaatcaaaaaaaaaatattcccaa

SEQ ID NO: 247615 - DNA, 417 bp, Gossypium hirsutum
gtctagattccttacttcacattcataagactggtcattttgatgaccatttttaccattatactatggttaccaacttatccatcaagcactcatgttcaatcattatcacgttgtgtatataacatacaattaccacatagctatgaccacctcaattggtcatagagcatacatccaacacacatgtcatattactaaccatgcatggcaaacaaacataatcacattataaacattagacatgacatgaatagctaggcttacaagccataatcaatatgagccacatctcatggccatatgcatataactcaatctaagccaacacatttggccaaagcaaaataatgcatgtcaatcagctagatccctgtacatgccactcacttgaaaattctaatatatacttcattt

SEQ ID NO: 247616 - DNA, 272 bp, Gossypium hirsutum
  unsure (1)..(272): unsure at all n locations
cccacgcgtccgcggactcgtccgcccactcgtccgcccatataaatttcttgactcagaggaggattagagtagtattttattggttgtttcatgggagatttagcgttaaaatctgttgagaggaaggggttatgagtgacattttagatattaatatgtacttattaattccctttgtgtgcttganaaaaaaaaaaaaaaaaaaaaaaacataaaaaaaaaaaataaatatatttttttctagccaccttattgattacatttttcgt

SEQ ID NO: 247617 - DNA, 187 bp, Gossypium hirsutum
acgaaacaccctcctttttttaaaacttccaatctcaacgcccatcatatgcccctgaggactgggtttaaaaaaaaaaggccgaggccgtttactttctttcacttatcacccgtcgaagaggccccccaccgttacaacacaaaatgtgggggccgcttttctacccccattcttacgaacccgg

SEQ ID NO: 247618 - DNA, 152 bp, Gossypium hirsutum
agcagctccacgcgtccgggtgatatttcacagctcatgttattttcaataaacaagtttatgacgggtgtaactatttgcatgctgggggaatgaaaactgaaattagtcagtctttgcagggtaaactagatgattctagtgagctagtg

SEQ ID NO: 247619 - DNA, 379 bp, Gossypium hirsutum
  unsure (1)..(379): unsure at all n locations
cgtgacttgattaatatgtatatggttgcagggagggtgggcaagtgtaaggaggtttgtgaggaggccactatggcgggtttttcattaaataaacgtaccttgttaaatttgtcaaaacttgacccttttcttttttgtatcattacatctttcccccnnnaaaacnnnaaaaaaaaaaaatattggtttattttattaacttaaaggtaaagaaaaaaaaaaatacaactaaaagtgccccctgttaatattctggaaaacgcgtcctttttatatacattggactaactttcttaatcaaacaaaaaaaaaaggggggcccttttaaaaaaaccaaattttttttccctcctttgaagaatttaaattttttttt

SEQ ID NO: 247620 - DNA, 328 bp, Gossypium hirsutum
  unsure (1)..(328): unsure at all n locations
cttcttttccttcttcaattttcttgggattttccagttttttgtcatgattatcattttgtctttgttttaaaatattacattgttacagaaatgatgactgattcttttgatagaaaagctcagctgtatacgaactgaatatatattttttgggttattaaanaaaaaaaaaaaagaaaaatttttattgtgtggccgttttaagggaaaaaaacttaaaaacgcgcctatgggacgcaaaaaaaaatttttttgtgacaacctaaataaaaaaaaaagggggggcgttttaaaggtcccaaacttaaaaacccgggtttggaac

SEQ ID NO: 247621 - DNA, 137 bp, Gossypium hirsutum
catttgcatatgtcaaatagtgacatactttatgtttcatagtggcggtattcttattgagcatgggttatctgtataaagatggggttcttggctcccaaaccacctttctttgcttatatttatagttttgcttg

SEQ ID NO: 247622 - DNA, 384 bp, Gossypium hirsutum
  unsure (1)..(384): unsure at all n locations
gacagcctcatccacatttttttttgaccaccttatctgaccttgttattttgttgagtaagttggtcagggtttgcatgtgttgagataatgggatgttttgcaaggtatgtgttgctgtcagaagtttttgtggactccaatgaaagctttttggtatatcggctagtactggcctagcttcatggtcttcaatagaatgaatggctttgttcccattttgtgtgtagcgttaggagagtgttggtgtagtgtgcttatataatggagttcagaatttttgtatattctgttagctgcttagtggcgcttcttgttggatctcctatatatcaagtgtccagaagttggntattgtatatgatataattcacagnttttctc

SEQ ID NO: 247623 - DNA, 288 bp, Gossypium hirsutum
cccacgcgtccgccccgaagtgcataaaaagctcataatggtcccagtgtgaagggatactgctcgcatccttcacttctaataccatattttttgtttggaatcaattaaggtgggtttagatggacgttgcatttatttgtagttagtgtaaaaacagcgataacggtgaaattagatactataatgatactatagtatgagataaaaaagtaaactaaacgtgcaccgtccatccaaatccatatttaattttttttcttggagaaacaaaaattttgtactttg

SEQ ID NO: 247624 - DNA, 234 bp, Gossypium hirsutum
caagttgtcttctagtctcagcccctcagtaggtccaatgaccagtgaaacaatagtaatattgttgggctaattctctgtgtaaatttcgcccactttaatatattttgtttaattcaactttttcaattacatattagagagtacattgtgaataaatttactcaagctattgatttatttaaatcgcatggaaaggatcagaataaataaattaaaataacatattatgaa

SEQ ID NO: 247625 - DNA, 265 bp, Gossypium hirsutum
gtcgcttatggctgctcggtcctcaatagttgtattctcagcaaccattttctgcactggggcaacaacagcagcgagctttgcacagtcaacttggcatgagctctggcggaagcacaggccttcatatgctgcaaactgaatctagtactgcaggtggcagtggagcacttggggccagagggtttcctgattttggacgtggttcttctggagaaagcatccatggtggcaagccaatggcaagtggaagcaagcaagatat

SEQ ID NO: 247626 - DNA, 343 bp, Gossypium hirsutum
  unsure (1)..(343): unsure at all n locations
agtataattgttcttaaaataaaactttttcttctaaaaaaccccaaaagctcccacagaaaaaggtgccttctcaaataaaactagaccactcatctanactaattcctacttgttaatcaaccactcttatttactttaatttctttacactcccccccataaatatccaaactttcttaaccctttttattcccaatttaccttttttttttttccccctaatttaattccatctccctttttattaaaaaatgaaaaccgaaaaacccctcgttatcccaatacttaattacttacaaaaaaaccctttttacacacctatttttctatccaaaatccc

SEQ ID NO: 247627 - DNA, 178 bp, Gossypium hirsutum
cccacgcgtccggtttgtaagcacttctgactgtatattctccggagagttccccgttcgatacttcttgcaataggatatgaattttaataaaaaaaaaaaaaaaaaaaaaaaaaaaaaaaaaaaggaggccaaggggaaaaaataaaaaaataaaaaggcgagcgtgcttccaagt

SEQ ID NO: 247628 - DNA, 220 bp, Gossypium hirsutum
gccaattgggccgtaagttttaatttgggtctaggtctgtttttggtatttgggctattgggaaaaaaaatggactattttatttcagtttctagtttatgggccccgggctaaatggggtcataacacatatcatgatatattctagatcttttcctgatgtggagatggggaaagagtacaaatccgatggagggtccagttcgtcagctgtgactat

SEQ ID NO: 247629 - DNA, 365 bp, Gossypium hirsutum
gccaggcggccattttgcctaatatccgtcatatgtgcggtgacatgttcggtggcgggggcataccagactgaataccggagccatcttcagggagctgtcaacggatcaggaaactttttgggaagctgtgtggaaagcagcgtctgcctcaattgccgagtctactatagtgaatgacttcgactatatgtgctactctattggctatgaaaacactttgcaaacctacttccgcccataagatgctggtgtagaggttggagcctacatataagctttcacataatgtactatatgccgttgtcttcaccatggccaccatgttgcctacttaattgcctgtcttttttgactaacatttc

SEQ ID NO: 247630 - DNA, 239 bp, Gossypium hirsutum
acagccaattgggccgttagttctaattcggttttaaggctagcgcgagcatctgagctctcggttaaataaatggaggagtgagaggcaatttctaatttatgggccccgggctaaattggctcataacacatatcacgatatatctctatatctttccctgatgtgcagatggggtaagagtacaaatccgatggaggatccagttcgtcatctggtactatgcactgtgcatacca

SEQ ID NO: 247631 - DNA, 239 bp, Gossypium hirsutum
gttgcgtggacgcagttatacttatgattgtcttctgggttttgtaacttaccagaatgaatacatacatagatatgatccctctgttgaagaaaggtttagactagattggtattgtttggtttattattggttggctggataaagcaaaaaagtacatgctaaataaatgtttctatttcctttccttccgttactgttattattattttatattaagaataagacaattatttagt

SEQ ID NO: 247632 - DNA, 325 bp, Gossypium hirsutum
  unsure (1)..(325): unsure at all n locations
cccacgcgtccgaaaaataaaaaaaaaaatttaaatttaaaaaaaaaaaaaaactaacaaaggctagggctacatatgaattagggcccgtccctcaaatgnattctattataccttagagatgctgatattctctttctatggcatatctacaaaaattctgaaatgaatccaatatcacagaactactgaaacatatttctgatactattttccttatcatccacttggatgagcaaattgacttgattcgaacatcctttcatttaccaacacataactctttctttctcaatcccttcatgtaacctttttttccccttgt

SEQ ID NO: 247633 - DNA, 401 bp, Gossypium hirsutum
cccacgcgtccgcccttgagtgccgacgttcagccttgtgccaaagctccgattacgacagagacggcatcaactcggtggtgccggcggaaaaaggtaagtttccctttcttcccttctttttattttaaaaaaagaaaaataaaaagaaaatatatataataaaaagtaaaagaacgatgagcaccaacaaagtagaataaaataaaataaaaaaacctttgtattcaaaaagatttttgtatctgtattcaaattttctgtcttttgctttcgtaaaaatcccccttttgcagatttctttcctggccttaaatagctggaaataataaataatacacatgataaaaatacaaaatccctcttttccgtttgttactcgtttttcccctttattttgc

SEQ ID NO: 247634 - DNA, 203 bp, Gossypium hirsutum
tgaagattcttctttacctggacattgtgttatataactgtgggttttcagcgtgatttggttgtactagagtattagaacgattgcaaggttgaggttttaggttataaaataaaacaaaatccaagcaggtaaactgaaaaaaaaaaaaaaaaaaaaaaataaaaaatagaaaaaaaaaaaaaaaataaaataggggggcc

SEQ ID NO: 247635 - DNA, 395 bp, Gossypium hirsutum
tttttcttagttggacttgtcatgtttttcatgttaccaatcaatgtttgctactagtttcggagagttactattgagatgggaacataatttgttctaaaaaaaaaaaaaaaaaaaaaaaaaaaaaaaaaaaaaaaaaaaaaaaaaaaaaaatataaaaaaaaaaaaaaaaaaaaataaacaccaacaaaaaaaaaataaaataaaataaaaaaaaccatagaattcaaaaaaaaaattagatataaaaaaaaaaaaatataggggggggttttctaaaaaatacaaattttgcaaatttctttccagaccttaaatatcttgtaataataaataatacaaaataataaaaatccaaattccctattttccggttggtaataacttttgccctt

SEQ ID NO: 247636 - DNA, 408 bp, Gossypium hirsutum
attttcttttaaaaaaataaaaaaaaaaaattaaaaaaaaaaaaaaaaaaaaaaaaaaaaggggaaaaaaaaaaaaaaaaaagggaaaaaaaaaaaaaaaaaaaaaaaaaaaaaaaaaaaaaaaaaaaaaaaaaaaaaaaaaaaaaaaaaaaaaaaggggggggcccttttaaagaaccaaattttatttccccttctttccaaagaaaaattttttttttggggcccccaaaattaaattcctggcccgggttttaaaaacgtgggaatgggaaaaccctggggttaaccaaatttaatgcttttgaaaaaaatccctttttcccaagttggggaataacaaaaaaggccccccccgttcccctttccaaaaatttgcccaccctaaatggaaatgggaaccccccc

SEQ ID NO: 247637 - DNA, 307 bp, Gossypium hirsutum
cccacgcgtccgctttaaagaaaaaaataaataaataaaaagaagtgaaaaaacatatactgacagggcatcccattcataagccacggtacatactatattcaaatttagtatcagcaattcaagagagtaggtaactctatagtctgttgtaataattttttatcggaaaaccaatataatactcatataaattattttataattttttttattatttagtaactaataatgctcgtttttagaaataaagaaaatgtaataacgagagataaaaataggagatgaactggtagtatatgttttt

SEQ ID NO: 247638 - DNA, 410 bp, Gossypium hirsutum
cccacgcgtccgattctacatcttgcattgcctcaccaatttcatctatccagaataattgacagccagataaagaaacaaatccaaccacaacatcacgtcctcaagcatgtgataatgttatacatgttataaggcacagtagcttccgagttggcaatgagcagccagtgatggaaaaagtagatacaggtgtccaaaatgtagatgttgggaaactcataaatgttgtgagggatgaatcagacacaagaaacgtgacaagcccaatgaccctcaggtcatcaaatgttccagattatcctggcattaaagaaatggatgtcaggaactccatttcttcatctccaaaactggattcaccagaccctacgaagccaagctcttctctaacagacgaagagacacca

SEQ ID NO: 247639 - DNA, 101 bp, Gossypium hirsutum
caagtcaacaaaggcaaaagcatagcttgcccttatttgagggaattaatttaataattgggtaataaatcaacttccagaattttcaatattatgaccct

SEQ ID NO: 247640 - DNA, 333 bp, Gossypium hirsutum
tttaagttttatatatgtaattcccatcaactaaatgaattttatatttgagtactttatgtcttagggtctataattgtgacgcttggttttgttttgtttcgtattagtgtgggattatttgctacttggtaacccattcaatcttttgttacattataaaaaaaataatacaaatgtgtgtgtaaaaataaaaaaagaaaactactacaataaattgaccagttcaacaatgcagttctgattctgaatcttctgaaaaagctatgtgcaaggagctacttgtacccataaaacattattcattcaatgggattttgtcattgtaaaatt

SEQ ID NO: 247641 - DNA, 375 bp, Gossypium hirsutum
gcgcccacgcgtccgtccactcttccgtccactcttccggggggtgcaagagacttgagtggcgggggagctgtataaaaacgaattctattattacccaccaaggtatgccactgagttctatgctcatcctccacagcacttcactgatgagaaccctcaagcttgccctataatgtaatgaacaaaaaaaagttaggtgctctgctgatctacacgttcttctacttgttctgcttaatggctctctaaaaaagtataatctacaatgaaactctagaattctgccagtttgtatttttctttaaaatgttatatataattatatctaaaataaagatatagttccaacttatttgcacatacttttttcta

SEQ ID NO: 247642 - DNA, 438 bp, Gossypium hirsutum
  unsure (1)..(438): unsure at all n locations
tccacccacgcgtccacccacgcgttcaatagacaccctgctctaaattttacttctaaaaataaaaaacaaatactgggtggagcttttacttaaaaaagaggtgcggctatcacactcctnnncttatattgcaacactgctttgggctgccgccttttaaacaaccactttcaaacccctaaattacaaaataaagattcttttctgtgaccccaaatttaaacaactgccccccgttttacaacacccctaacataaaaaaccccactttaccccactatttaacctttacaaaaattcccctttttcctattcgggttataatcaaaaaaaccccccccatccccctttccaaaaatttctcaaccctaataaaaaaaaaaaaacccccttctttaacactttttttacaaatgatttttttttttccccccc

SEQ ID NO: 247643 - DNA, 427 bp, Gossypium hirsutum
  unsure (1)..(427): unsure at all n locations
cccgggtcgacaccacgccgtccgcccacgcgntccgggaaggtaaccacacatatttattgttcatatgtgtggtttcaaaaatgatgtgcggttgtatgtagtgtttcaccacaagctctgaaggatttgatgaaataagatggttaacattttttttattctctgcaaatttaaattctagccttgtctttaaagggtagcccgcttattaacatattgcctttttctggtatgttattggtagtaccctaagcttacacttttcctatttgtacattggatataatcgtatgaattttttttttttttaaaattcaaaaaaaaaaggtgtgtttattctacttttgtggctttttctcggattaaaatttttcttttttttgttttttggtagagaggggaaaaatttaaggggggggggttt

SEQ ID NO: 247644 - DNA, 296 bp, Gossypium hirsutum
cccacgcgtccggtcaatcacctctgaagtttgaaatgttgtaatgctattgacaaaaagaagcttgtattgtcgggttttaaaatagactataacgaggattagataaggcgaataaaaaaaaaaaaaaaaaaaaaaaaaaaaaaaaaaaaaaaaaaaaaaaaaaaaaaaaaaaaaaaaaatataaataaaaataacaaaaaagaggacttacgtaaattgaccagttaaaaaatgaactttcttctctgaatcatcaaaaaaaggtattctcatgagctaattttatgcaaaaa

SEQ ID NO: 247645 - DNA, 181 bp, Gossypium hirsutum
gcaaaattggtgtgtactgttacttttactttaaaaattatcgtcacttttattatgtgcgtatggtgtatcagatctgtgaggacattatgtatttgatgattatggaacattttcctggtcctcgttttctaaatttctgtatttaaatcttatgtgaaagatatatttccggtttaat

SEQ ID NO: 247646 - DNA, 260 bp, Gossypium hirsutum
  unsure (1)..(260): unsure at all n locations
gaatgctgcagtgcatagccaaaatgtgaatgggtatttcccaggatggatgctttaattatataaaagaaggaaatatctagctacctacttttcattatttatttaaacaaaaattaacgcaacttgtaattatatttgtgtgaatgacaataaacataaacataaacatgaacatataatatattgtgaggacttaatttctaannaaaaaaaaaaaaaaaaaaaaaaaaaaaaaaaatnnaaaaagggggggggca

SEQ ID NO: 247647 - DNA, 148 bp, Gossypium hirsutum
cccacgcgtccgcttttagtccactttaatatttaacgttatctgatttttccacaaaacaggaggtattcctaattatgaaagctggccccgtaattacgaggttaagtttgcatgtctattcaaataagatcatgggaacagtttc

SEQ ID NO: 247648 - DNA, 344 bp, Gossypium hirsutum
cccacgcgtccgcccacgcgtccggccacgcgtccgcccacgcgttcgcgagaaacaaacgagtactggtaaagaaacagtcagttctgaagagaatggtagtgagaaggagagccctcattgtgaagatggcaatctgccagaaagtttggagcataaccttactgatagtccgtttgcgtctactgggaaagcctctaaagagtacctgtcttttcaacattgcggtcacggagaaggatggtaccatctcggctaacaataattggattccttcaccttactttctggaaataatgcattagacatgttattcttcaacttctttcactggcaaattccca

SEQ ID NO: 247649 - DNA, 379 bp, Gossypium hirsutum
cccacgcgtccggtaagggaggattttttaaggctaaagaagatccatggttgtaataagagggcaatagagaaacagctagctgccgcaaaggatttggtcgaggataagttcgctgagaatatattcttgcacaaagggatttcaataaatgcagcttacaatttgctatctgccgtcagggagaatgatgacgacattattttttgatgaagaggttacgtctgtattttttctggcattctcggtttttctattcgatgtatgttccactgctggagattaccttattttcatgtggtgttttgaataaatgttatatgcatgtctctactggacttactttgtgttatagttaatgatcatacatacaccattt

SEQ ID NO: 247650 - DNA, 101 bp, Gossypium hirsutum
gtgaattctggttagttttagttgggcattaactgagatccaagtagaaatataccaaaggggtatgaatattcttggtggattatagcctggaatgatta

SEQ ID NO: 247651 - DNA, 285 bp, Gossypium hirsutum
  unsure (1)..(285): unsure at all n locations
cccacgcgttcgcccacgcgtgcggctgctcatcccgaccctgctttgctcttaaccaagcaccagagagttgatgttgatgacaactgtgaaggagttgggaaagaggagagcttgatgcgaaaacctngctggtcattgatatattttcctcaaaccaatagcccaggaattagtttgggtcaaatgttaaacaataaggaaatggaatgaattggattagatggtttaggctaattaatggcaccaaaccaattcccttaaaatggaggattccggcggttt

SEQ ID NO: 247652 - DNA, 234 bp, Gossypium hirsutum
gaaccagtagctgcctgatttcccaaaaagaaagtgtacgaacacactcttggaaataaggaaatggtgattggtaataaactctctggtcttggaagaaggggcaaacgcaggaccgcattttctagcccagactgggtaaaaatcttaaattttgggggcgccctttgagggggtcaaatgtttctgacccgggtcaagacggttattacttatttttttgtgacccttaaa

SEQ ID NO: 247653 - DNA, 323 bp, Gossypium hirsutum
  unsure (1)..(323): unsure at all n locations
cccacgcgtccgctctgttgttttccctcaaaattatgattgttatactactattcaaccagctttgacgaaaaccaatgttgccctcttttttttttattagttatttttaatttaaaaaaaaaaaaaaaaaaaaaaaaaaaaaaaaaaaaaaaaaacaaaaaaaaaaaaaccaaagaaaaagataagggtacaaacgtaaacaaataaataaaatgaaaagaatctgatcaaaaggaatatgacttactattcgcaacaaaaaaaaattcccattacattagaagattcctggcgaaaangggggggaggctaataaaaat

SEQ ID NO: 247654 - DNA, 236 bp, Gossypium hirsutum
  unsure (1)..(236): unsure at all n locations
aattttgtatcacaaagcccttccctcccttatatgtacctatatttttaggttttaactttcttgtgtccgttttgttgaactatatattgctggagaatttgaaacatgttttctttgtgtttgacttattgaatgatattccttttatttttcagaaaggaaaattcctttggtttttacttgtnaaaaacaaataaaatatgtaaacttgaaaaccaaaaaaaaaaacaatt

SEQ ID NO: 247655 - DNA, 188 bp, Gossypium hirsutum
cccagcgtccgcagttgttgaaggaataaaccaagcttataccccgctagaaatgaagcaaaacatatgcagaattggaaatgctatccgagtattgaccagttagtttaatgtgattaattgatcatgagacgtggtggtgctacttaatgcatcatactgctgtcgtatttgtgcatgagtacaat

SEQ ID NO: 247656 - DNA, 185 bp, Gossypium hirsutum
ccgtccggtaggattgagtatatacacgtacgaagtataatcgagtatgaggggatgtccgttgcattttccaaaaatggataacggtgggttcttacttgagaaacatgttatcgacattgacaaaaccaataagccgaaaccgcccacgaccagccttaaaagccttgcccggccccttttta

SEQ ID NO: 247657 - DNA, 285 bp, Gossypium hirsutum
  unsure (1)..(285): unsure at all n locations
aaagtgacctttagaaactacaaatataatggtatctccattgacaatgttgacgcccttttcctatttatatgcatatatatattaatgaattttggtcttcctggtattctaggtgatagtttattcttaatggaactttggatatgtggtaaatattttcgttttgtggagtaaattttggtacaaaaattgcatattagtccaaaaaaaaaaaagaaaaaaaaaaaaaaaaaaaaaaaaaaaaaaaaaaaaaaaaaaaaaacaattatcaaaaaaatangg

SEQ ID NO: 247658 - DNA, 412 bp, Gossypium hirsutum
aaataattgtatatttcttggaacaaaatgggagtggagaagaagatcatggtgttgtggatgtgttcattggtaataacctcaatgcttatggaagagggtccaaccccgccaccatttacttacccgggactgggaaaaaatctttaagttccatgcaacctaggaggcggaaattgcttcccaccaccttaaaccggttatgacagaggttgttctcccctaaaactatgtcgaagtctttttacatcgcccttttttatttgaccacatctagaaagcgcacataataaccttctccctttttcctataaaattctgtgaaaaaaaggatttaatcatctcatttgttagttctttccttattttagaaagccattatttccaaaaatatattcaacaattttttttt

SEQ ID NO: 247659 - DNA, 179 bp, Gossypium hirsutum
cccacgcgtccggtttcccctcggtttaaaatttggtgcaaaatctagtaatagaaaggatatgaagcattttgtaaggactcatttgttgttataaactttggagagtattattctacgaaaattctttttcagaagataaaccataaacgtgaaacaaaaagaaacaaattttaaaa

SEQ ID NO: 247660 - DNA, 344 bp, Gossypium hirsutum
ctgcattatccttggcattgcacctacgattttctgactaaggtcaaatacaaagcaatcttgatctgcatcacacactaaatgtctgattctgactgttagagtgaatattcccttttttgcttgcgttttagcttgaaaaaaacataaaaatgcataccgctcttgcatgtaataactagcttgctgaaccttaaaaacgctttcactgtaggtggtctgaattcaatctatttatgaatcaagatttatcaatcgacgaattgtgtaggcctctagctaacacagctctgtatcatatatcctcattctattttattttttgcaactttggataaaaccct

SEQ ID NO: 247661 - DNA, 351 bp, Gossypium hirsutum
cccacgcgtccgaaaaaaacttcaaaacctctccccaaccctctcctttcaggccaaggggcccggccgcaggccaccgcgccgaccggcgccagcgccggtgccgccgtatgcggcggtcagaaggcgaaaggtcgggtttttttaaccccgttgcaaggcctttcatagatcaggctctcctatccttaaagccgagaggaaaacccccaaaagccgccatccccgtccattttcggtgacccgaaggactccggcgacaactcaaacgcggcgttcaggtaagtttcgtttattactttaagcctattaaccgtgaaagaaaagaaagagcgaaaacagaatcgaatc

SEQ ID NO: 247662 - DNA, 177 bp, Gossypium hirsutum
gtgcattacccttgtcattgcgcctttgattttcagactgaggtctgggccatagcaagggggtctgcatcacacactaaatgtctgattctgactgttagaggtaatggtcctttttttgcttgtgtacttgcgtggaagaaccatcaaacttaacaaaaactttgcatttaaaag

SEQ ID NO: 247663 - DNA, 276 bp, Gossypium hirsutum
gttatgaagaaggatgagaccctccgattatgtattgattataggtagcagaaaaagtgaccatattaagttgcccaggattgagaacttttttgatcagctaactggagctagagttttctcaaagattgatctatgagctaggtattatcaagttgaaacttccaaatataaaaacaacgtaggattttaataatatcctttaaaaaataataaaatgacttgtattattaaaacaaaaaccggtaataatatcttacaatttatactatttta

SEQ ID NO: 247664 - DNA, 283 bp, Gossypium hirsutum
gaaatggaagggagtgaggaaaacgaagaatatgtgaacctacagaaacagaaggttagggattatttggatggtgtcatagttgttgattatgtggtgccatcatcatcatcatcatcatcatcatcatcatcatcatcatcatcatcatcaaatctttgatatgttgttaactacaaagaaaaccttgttacttgcttaattaatggttgcttttggaacaatattcaactttgaatgattttgggactgattggattttaaatgcaagattttgcatttt

SEQ ID NO: 247665 - DNA, 389 bp, Gossypium hirsutum
aaattttattctcaattcttatgctcttgtttaaagcaatgaaaaattccgatgaaagctttttcatccaaaaaaaaaaaaaaaaaaaaaaaaaaaaaaaaaaaaaaaaaaaaaaaaaaaaaaaaaaaaaaaaaaaaaaaaaaaaaaaaaaaaaaaaaaaaaaaaaaaaaaaaaaaaaaaaaaaaaaaaaaaaaaaaaaaaaaaaaaaaaagggggggcccttttaaaaaaaaaaattttacttccccttccttgcaaaaaaaaacttttttaatagggccaccaaaataaaattaattggccgggttttaaaaacgtggaaattgaaaaaaccttggtttacccaaaataaatgcctttgaaaaaaatccccttttcccaagttggtt

SEQ ID NO: 247666 - DNA, 353 bp, Gossypium hirsutum
attacacatctcgagtactcatcgatttctgttgtccacacctcttccatagaccagagcgcgcagtcgacattaaccggcgtaccttctctagatgacgcacacggcattgccgaaaaacatagacacaagtgttaatcgtctaatcgccctttgcgacatctttcatatacaagaaccccctcttctctaagactagcagaaaacacaataaaaccctcatcaactccccatattggtaaccttattgttttcggcaactactcaaacccaaggttcatgtaaaattcgcttaatactgtctgccgtttaaccgtgaaaaaaaaaaaagagctaaaacataatcgaattat

SEQ ID NO: 247667 - DNA, 322 bp, Gossypium hirsutum
gttataatcgcgagcactgcacgatttttggcgtgccataacatctatcgagaggagctcaggatttttcttgaaagggctctctaaagatgtaccaatggccgccagatcgatcatacatttgagtcgcccatagataatgacaatatcatgcagaaccccctgtttaatatcgtgaagcatagtttaatgctatgaactcgcagagtgaaatttaattattgcgaatctgtgtatcaaaactacctagtaacagagcttaactagacgttaattcgctctttgtcaccagctggcttttgcataacggtttgagagtaaa

SEQ ID NO: 247668 - DNA, 352 bp, Gossypium hirsutum
  unsure (1)..(352): unsure at all n locations
cttcaattgttaaaatctgtcttggatttcccttgttctgctttttgctgccttgctgactggagtctcgatagattggtttgttttactttgttgttttaggtcgcatatttctcccttcgcttgccatatagtaggatagagggagactttgtatcttggttgattgtataggttatagttccattgaaggatttcttctctcatgttgtaatggagaaatacttggatgcctgcatatccctccccccccccctttcttttgaaatgttattgacttggttgttttgacttgcttatnaaaaaatccaaaaataaaaaaaacctcctccttaaaaaaataactccctgt

SEQ ID NO: 247669 - DNA, 398 bp, Gossypium hirsutum
gtggggtaaaagcaaagatggggaaaacccggaaacagatgtgaaatgcaatggcctgcaggaattgcctatcacaggcaatgctaaatcaatcactgatgatgatgatgatattaatggacctaccaaaattgttactattccagtttcaaacacccccttcactcaaggaacataaaaaatattcccttccaggtgtttgattaaattcctagcagagttgttcttcccccaaccaataaaaaaaaattaaaaatcactatgtaaccatcccttcccctctctatctctctaagctgctctgcatctaatgtaatttagctaattatgttttgattgtactcttgaggcttctgaacttggtgcagtaaaaattaaaaaccacgagtggtttgcct

SEQ ID NO: 247670 - DNA, 327 bp, Gossypium hirsutum
ggaacacagtagtccaaatgaaggaattgaatcaggttcaacttcaagtatagctagagaatcgagggtatcgtttgagggtctaaaagaggctgtgagcctaccaaagcccgagccagccccaaagaatgaaccctgatgttgcacaccatgaaccatttccttgagacgacaatctttcacctctttctataattattgttcttttataaaatttggtaccaataggaaaatgtttgagattgatgaacagtattcaccctgttatttgttctgtatcctaaatgcaaccaacgctgatgaatgtaattcaaccagttgtcccaa

SEQ ID NO: 247671 - DNA, 373 bp, Gossypium hirsutum
gcttatcctagtcttctttttttcttctcctttcatctgtattaatttgtgttggtaagctgaaaaagcttgacgtttgatgtacgttgtgccaggtgttgcttattaagctttttgaatctgcattaaaaaaaaaaaaaaaaaaaaaaaaaaaaatacaaaaaaaaaaaaaaaaaaaaaaaaaaaaaaaagaaaaagaaaaaggaaaaaaaaaaaaaaaaaacaccggggggccggtttaagaggctcaagttttacatacgtttggttgggggggattgttttttttttgggttaaaaaaaatataaatatatggggcggcgttttaaaaagtttgtgaattgaaaaaccctggggttgccaaattttttt

SEQ ID NO: 247672 - DNA, 321 bp, Gossypium hirsutum
cccacgcgtccgcccacgcgtccgcaaatctgagcatccacatgcaatcagcttaaggagagaggacaattatgtgtagatagcatccttgtaaggtaccagaagtcataatatattggattggaaaaaaaaaaaaagattgtaccatttgactgagtactgcaaagacatagctaagcaaatatttgcagtatatacaccaattctcttttaactctcccttttataaaatgaaaatcgaataaattttggaaaaaaaaaaataaaaaaaatacaaaatgctcatagtacaatgttatattgaaagtaacatattagaaa

SEQ ID NO: 247673 - DNA, 405 bp, Gossypium hirsutum
cccacgcgttcgtgggggtttgcttagagaatatatcacatattgcaaagtgagtgggtgccacgttgcgctttgctggttagacttattaacaaatatgtgaggtgtatcctatgccatagatgagactcttggatacattctgtgcctactaatgacttttcagaataataatcaatctcttttagggtgttggtcctcagttcctggtcagtctctgatagttgtgagaatgagtcttgatttatattatcctactaaatgacatcatcttgggtggctaaactaggttcaaggtataattgtttctgatcttaaattgtgcacaaaatgcttctgccttgtggtctgcctccagaaagagaagatgattaagaactactggttgggctgtgaagtgaaatg

SEQ ID NO: 247674 - DNA, 370 bp, Gossypium hirsutum
  unsure (1)..(370): unsure at all n locations
cccacgcgtccgatgtccacttcccatgagtcccaccaggcctggtgctcgtgtggctgggagaaaaatgagcaatggagcatatttcaaacttcttctttttttcagctcctttttagaagtgtttttcaaaagcatttttgaaaagctaaaaatttcagcctaaagcagcttgttcttcacaagttttctttcaaaagtgcttttggaatcagaagtgctttttttaagctatgaagaactggccctaactcatcacctccctctctaagatcgacnncnnanaaaaaaaaacataaaaaaaaaacaatgagctaaaatttataaatgaacatatgcatgaattgttacaaattctttcctactaaaa

SEQ ID NO: 247675 - DNA, 304 bp, Gossypium hirsutum
  unsure (1)..(304): unsure at all n locations
gactgatccgtggaacaacatagacagttcgtacatgcatgactacgaggagttggatgaactagaacaatggctgcaggaaggagagtgggagagtgatgatgaagagatggaggatgctgaagatgatgcagatgtggtggtggaatgatttctgtttgtatttttactttcgtaatgttgtttgttagtgtaactagctactgctgaatgtgctgttaacttattagtgggagtcacaatggattgtgaatattcaatctgattgtttttgtggattaaaatatgggtaaattacacanaa

SEQ ID NO: 247676 - DNA, 243 bp, Gossypium hirsutum
  unsure (1)..(243): unsure at all n locations
agcctaatttgtatgaagttgctgatcatagggctcataaaatntagcttttggtcgggcccagttttgcccatctttactgctttcttaggcgatgatgatttctaaatgacatggcttaccttgagccatggccaaccttattggcctaaaaattttgcgggtgcctgaaaagtgccaccataccagttagtatgtcttattctttcatgtatttttcaattttttcacagaaagaatgga

SEQ ID NO: 247677 - DNA, 206 bp, Gossypium hirsutum
tccaagcctaatttgtatgaatttgctgatcataagctcataaatttagctactgtcgagccgcagttagtgccatcatttctgcttttttctgacagatgatgagctctaattgacatgtctctactttgagcaatgtcaaactttagtgactcaaaattatgctgtgtgctgaataggtaccacattacagcttagtattggac

SEQ ID NO: 247678 - DNA, 158 bp, Gossypium hirsutum
cccacgcgtccgcggacgcgtgggttcactatctatagttgcaagtgggatctgtaatattctttgtgcaatgtccagttgaaaggtatgagtaacaacctccactttccacatcttatgtattccatcaataagatctgatacattttccagctctc

SEQ ID NO: 247679 - DNA, 279 bp, Gossypium hirsutum
gtcgacccacgccatttttacaccttccatttgtttcgcttgtcattgagacagttttcttggaacttaagatcagggggactacaactgattgcttgctttgcccatttttataaacaaattttgcacctcaatttaaaaaaaaaaattaaaaaaaaaaaacaaaaaataaaaaaaaaaaaaaaaaaaaaaaaaaataaaaaaaaacaaaaaaaaaaaaaaaaaaaaaatgataaaccgacaaaaaaaaagcaacacttactaaggattggaataaaa

SEQ ID NO: 247680 - DNA, 357 bp, Gossypium hirsutum
gggcataaattttgtcactactagtactaaaagaaataggtgtatttgggttccaaaacccaaagccttgaaggatttggcaggaaactttggattcgaaagggttggtcttaaaagtgtgttcatttgattttcgaaggaatccatcgtttcttaaaaaaaaaaaaaaaaaaaatgacagacatttaaaaagaaccaaaattaagtacacatgaaataaaaataaaaataaaaaataaaatttggacctaaaattaataaaatgtgaggtcgcaatacaaatttaaaaatggggggggccctttttaggggccaacatttttttccccggggctttgccattttttactttttttt

SEQ ID NO: 247681 - DNA, 412 bp, Gossypium hirsutum
ggagattggatccttcctgatcttacgatccagggatcgataaaactgaacagtaatctgcaaacctttgcgaatacgttctatttcagctatgctacaaaacgtacaaggaagatccttggtgtcacagttccttctggcattcttggtattcatcctatgctttttattcgagttctacagatgagcctgtatcgatatcctaccgatgttcctccgccgtataaaggctaccgggacgaggattggcaggacaacgatggagcacttaatacgatatccatgactcaccctcgtctcccgatagaacacccaagctgttccattgtgaatgattctgattgccaacctttgcagccaggcatatggtattacaagattgtagaggcagatcacatatttttcatattga

SEQ ID NO: 247682 - DNA, 147 bp, Gossypium hirsutum
cacagacttagagaacatacggaacagaggttactctttgatgtatagctccagaaagcggcgagtttccttgctattaaacatggatcatgtaatgaactgtccttttgttttttcttaactattaaatgaaaatgatcgtatccg

SEQ ID NO: 247683 - DNA, 367 bp, Gossypium hirsutum
  unsure (1)..(367): unsure at all n locations
cccacgcgtccgaaaaattttaccatcaaagtatatacgtaaaacttttagaactttttttatataaataaaatcttttcactgattttatttttgttttttgggggatagacaattagtttgtaggtatatggatgatggtgggatggatgatttttgttttgtcatgttgtggtgatgaatgaatgggggggacggcgttgatatttcagtgttaatagaccaatgtctttgctttatcatcaccatcatctattttatctaggaatagtattggttgaatatagtgaaggaattttaattttccaaacntcctctttataaaaaataaaaaaaaaaaaaaatttataaaattatcttattattg

SEQ ID NO: 247684 - DNA, 384 bp, Gossypium hirsutum
  unsure (1)..(384): unsure at all n locations
atgacagtgaatggagctggtgccatccttcagctcatctatgttatcctctttctcgtatatgctcctaaagatgcgaaggtggtattactttataagtttgaaggcatcatatttgtgcgggttgaaaagtgttttgtttagagatttttttatttatttttagattcaagtgtttggaaagttgaaatattgttttagacaaaagaattaataaatttaaatgaaatgtaaataatttaatatatatattaaatataatgataaataatatttaaataatttaatatatcananaaaaaaaaaaaaaaaccaaaaaaaaaaaaaaaaaaaannnnnnaaaaaaaaaaaagaaaaaagcgatttgaaggaccaagcttacat

SEQ ID NO: 247685 - DNA, 385 bp, Gossypium hirsutum
catcatttttgttccttcttgttgctttgaaaattagggatcctctcattcaaacattaaaattataaaattttcccactagaaattgagtttacgcgtaaaaaaaaaaaaaaaaaaaaaaaaaaaaaaaaaaaaaaaaaaataaataaaaaaaaaaaaaaagaaaaaaaaaaaaataaaaaataagaataaataaaaaaactataaaatagaattgtaataattaaaaaatatcataattgttgattaaactgtactacaatatataaaattgcaccgatttaggaggggcttttcttaatacctgtattaacaagtaccaaacaaagaataatgttgtagttttcagttttgcttaataaatggattttgatttgatttctcc

SEQ ID NO: 247686 - DNA, 376 bp, Gossypium hirsutum
cacaagcgtacgattgccggatccaagcgcgataagtgctgaggagcatataggctacacggaaagacctatatctatctatctataatgaggacctgattcacgagttggtaaatccaaagttgcaggattaaggatcacaattgcaatgcggacctggacgttctgggaatttgtaaaacggaggaacagagagaggttaactgacgtatgaagatgtacggtgattggagataacggtaactgattgtgacatagaaaggactatggacgggcgcatatatagtattaagatacatctagtactactgagtcatatgctgacgactagaatcgatgaacatcggatcaaagagataatttaccgtttgtgttt

SEQ ID NO: 247687 - DNA, 388 bp, Gossypium hirsutum
  unsure (1)..(388): unsure at all n locations
cccacgcgtccggcgcaattttacaagcagtttacatgcattacggtaatgatgatgatgatggtaaaatgtttattaaaaatgatttgctgacatttgtgtacttggatcagttcttgttggaaaaccaattacctttttcgtgttcttgaattgcttacaagccagagagaaaatggcgaaaaattcatgaatgtaatccaaaggttcatcgacgatactgttatcaacccaggcgaggatagggtaattgactcttcaaagagggaaaatttgaatttgccagggcaaaatatgaaaatgtgtctaatgtgatgctggatatgtttacttcaagaaaataaagaggaatcttangcatttgttntctcaaacgttctcgccagca

SEQ ID NO: 247688 - DNA, 186 bp, Gossypium hirsutum
ggatgatctgctaaaataagaatgggctcaaactgattcttttaacatattgagttcaaaaactttatgtactgaagttatggcgactccccaagatacaaagatagagactgacttgattctaaaaatgagcatttaacctctctgaatactatttatagcaatcacgagtgtccatacatggaa

SEQ ID NO: 247689 - DNA, 399 bp, Gossypium hirsutum
gcgttgtcaattctcatggccgtagaaggggtgactacaaggatgcaaaatgaattaggaataatataaggcgagcttactcaactgcaagttgaattcactcagttagatgcacgcttcaagaactttcaagaaggaattaagtcggaagttcgttcggagatctgttactcttgcgactttttttggtgctacatcagggagtcgaaatgttttcctacttgagccatttcgtgtattgctcaattcggaatttgaggacctgttcagaaaaaaggacactttcgaaagatgtgctccatggattctttattatttctacatactgggcataaattttgtactccaatgtttctttgttgtaaatttgataatgtgtgcatgtaatttttaataatt

SEQ ID NO: 247690 - DNA, 149 bp, Gossypium hirsutum
caaattttatcaaacttcatttctatttatgggggttattgctaactttcaaaattataaatcgatctcttttagtactgaagttatggctgactcccctaagatacaaagatagaaacatgacttgattcttaaaatgaagcatttaa

SEQ ID NO: 247691 - DNA, 141 bp, Gossypium hirsutum
cgttttcatcgcctcatatgccgaagataattttgcttaaatttcaatgttgttgctattttaaatattgaagagttggctttagatttttattttttgtgaaggttgagtttgatattctataaataaatgttgactttc

SEQ ID NO: 247692 - DNA, 217 bp, Gossypium hirsutum
cccacgcgtccgaaagaaaagagagcagcaaaccggttcgaaagggatcgagcagggagtttgaatgtgttcatcagcatgaagaaaaaaagagaagaaattattaagagacaagaaatctatacgaaaaatatttacaagacttggttttaatttcttctgtgggttgtgtaagaattaataacctaaaaattattaataatgtttttgattagtt

SEQ ID NO: 247693 - DNA, 255 bp, Gossypium hirsutum
gcaaatatagctttagttcagcgtataagttggttttggtctttgatatttcttttgttatttttaatcagatgtaaacttaatgtaaaatattttagaatgattcttttgtgaaaaaaaaaaaaaaaaaaaaaaaaaaaaaaaaaaaaaaaaaaaaaaaaaaaaaaaaaaaaaaaaaaaaaaaaaaaaaaaaggtgggacgttatggggggtcctattttgaggacccaattcttactaactcgtccattcaac

SEQ ID NO: 247694 - DNA, 388 bp, Gossypium hirsutum
gaaatattggaatcatggaagaaaagcagggaaagtgatgggatatacttccctttccatcttgggcagaagtgagtggaaccatttccatagcattatcagaactgaagttttgggattaaagaacaggtcggcacccataggcagaggtgaggatcttcgaggggaagagaatgaagcacaaacagaagtatttccccggaagtgggtcctatagagtaatcctattatcaacacttaaacttcttaggagatattggcaacagatctaacattctaggcaagcagtgttaaacttgattgatgtaaaggtcgaggcttaggcaatgggagaggaagtattgcaggagcagattagaaagcaaaatggtaacagtgatgtgtgtgt

SEQ ID NO: 247695 - DNA, 398 bp, Gossypium hirsutum
ggaaattcaatggctcctcatggtgcttggaagagaacagagttctttttgaatcatgaagcacttcaacaggtcatcagagttgatcagagacaaattacccggagcctctctggaagaacttcagatgtaacagatatggacaaaagggctataagagttgatattccagatattgtttctgtatcagcatgtgctgatctgactttaccaccaggtgcaggtctctgtatcgataccacctctggtccagttttcttggttgctgactcgtgggaatcactagacggatggcttgacgccatccgcttagtttacacaatttatgcacgaggtaagactgatattctggcgggtatcattacgggctaattgttgctttatgtaaggacctttca

SEQ ID NO: 247696 - DNA, 393 bp, Gossypium hirsutum
ggaaatagtgcttcctgaaaagaaaaatccaggattaactcccatggactgggtcaagttccttgcctctgctgttgtggggccggttactgtgtttagttctcttcaaatgcctacagctgatctttgggtcatctttgccattttgtcaactgtgattggttactgcgctaagacatatttcacgtttgaagcaaacatggctacatatcagaatttaataacacagtccatgtatgacaaacaactcgatagtggaaggggaactttacttcacttgtgtgatgatgtgattcaacaggaagtgaaagaggtaatcgaggtaatcatctcattctttatactaatggagcaaggtaaagccaccatggaggatttggatctaaggtgcga

SEQ ID NO: 247697 - DNA, 368 bp, Gossypium hirsutum
gaaaattgcccatccttacctcccatttatgataggcctacgagatgttaaaagctgatagcaatctatttgtcgtttatcgctatcccactcatgcttgtattaaatgcaaagacgcctttctggaaaaatcctcactgtacctgcactatatatatatgcggccactcaatttctgtaaatagtactttcagtgttagtaaacataatttgtgtgatagaggtagtcgcaatttggcccctaaaatctttgaagcccaggcccatattgtgttctgcccaatatttggagttaccacaagtgagcttgaagtcataacacgagcgaactcttgaaattgagttgctcatttctcgtgccagtcgtt

SEQ ID NO: 247698 - DNA, 392 bp, Gossypium hirsutum
gataattcgaaatccaccaaaaaggatcacttctgcttacatctcaaattcaattcgctttaatttaaaatcaaaccaattttttttattgattattgatttgaaattctcaggaatagacaaccaaaacaagtggatttatcagaggttttggatttcaaatacatttcagaaagctgcacttcctcaaggagttgtagcgattaaaaatggattagatcgtccagtttttggcttggaaaatcggtgtggtgtcaatttgactggtctaaggtaggtgtctaggtcatactcatttagtcttcgatcctcttccttgcatcttttgtcgatgaatttgttaactgtctaattacagacgttgatgctcatacaacaccattgtatgcaat

SEQ ID NO: 247699 - DNA, 348 bp, Gossypium hirsutum
cccacgcgtccgcccacgcgtccgagtgatcaaaaatcccttgaagccatctccaaccatagccttgttcagttgagcacagaactaggcgccaatgtggaaaatgtactcggttgtgacaatgctttcaaacaggctaagcttgaatctccaatgaaggacatggatgcaatgcttgcaaatatcattagcaacaccttgaccattggtgtcgacatggtccacttttagaggaacaaacgattaaaaggatgactacaaacacatgaagcctaagtgggatattataattttattgttgtatccttttaagagaagcaggaagtatataagaacctttgtcactaa

SEQ ID NO: 247700 - DNA, 379 bp, Gossypium hirsutum
cccacgcgtccggcttttgcctaaactgcctccgctcctctgccatagggtggaggagattcggagaagcagaaaaagggctgttgctgactccggtgaagatcttatttcccaaaatgataatagtaatgaatcaaatggaagtcaaaagctttcctctgtacaaacaaatgatagcaacaacaacaacaacagagaaagaagaagtcagagtttaaaggttggcaatgtagatggccctcttaattgtccaagctcaacaaaccttcagattttacattacacctttggtcaaggataagaagaatgatgataattgtaattgcaaaaatgatcttaagaaagaaagagtcgtttagcaaatccgatgggacggacg

SEQ ID NO: 247701 - DNA, 393 bp, Gossypium hirsutum
tcccacgctttcttcttttgcctaaactgtcttcgctcctctgccatagggtggaggagggggggagaatcataaaaagggctgctgcttactccggtgaagatcttatttcccaaaatgataatattaatgaatcaaatggaagtcaaaaactttcctttgtacaaacaaatgatagcatcaacaacaacaacagataaagaataagtcatagtttacagtttgtcattgtatatggccctcttaattgtccaagctcaccaagcttcagattttacattacaccttttgtcattgattataagaatgatgattatttgcaattgcaaaaacgatcttaataagaaatagtctcttatcaaatcccatagtacttaccaattccattacatt

SEQ ID NO: 247702 - DNA, 310 bp, Gossypium hirsutum
ctagttctagatcgcgatcggcgccctttttttttttttttttttttttttttttttttgggaaatccaatattcttgtcaagaatttcatattcaaaaacatattgaataactttcacacaaggattttactcaaggcagcaaaatccatagacataataagcaaaagtcgaaaacaccaccaaagatccaccataacaattatattcgaaaattcccatcacttgaattgccctatctgtttgtaaatatgcaaaatgttttctgcataaaaaaactttcttttggacttttatgaaagggtaatttt

SEQ ID NO: 247703 - DNA, 156 bp, Gossypium hirsutum
gttttttccgggtaaattttcctggctattcttggattcaatatacagggatatttggctatcttttggttaataatgtatgtgtgcatgttctaatgcaaagatgtactctttagctatgaaattcaatgataatatatcagattccttggaatc

SEQ ID NO: 247704 - DNA, 259 bp, Gossypium hirsutum
accacgcgttcgaccactcaatcgatttttataagaaagggggtggtaaatctctatagggcgactttaatctagcagggtactatgaagccccaaattgacgatgactgataatgaatgttctgtccacataattatatttcggcggcgtcttatgtgaatctcatactctcatctagcatgcttatatggtacaaattaaacactggcgtgtacacgtatactgaaacctgcgaccacttatcgcttgataatccct

SEQ ID NO: 247705 - DNA, 341 bp, Gossypium hirsutum
  unsure (1)..(341): unsure at all n locations
cccacgcgtccggattcttgagttatgtggtgtattgcatgcgcatactggatggaaacgtacggatatgagaggaataaaaaagaagaagctatggctgaattctaaataaaaaaaaaaaaaaaaaaaaaaaaaaaaaaaaaaaaaaaaaaaaaaaaaaaaaaaaaaaaaaaaaaaaaaaaaaaaaaaaaaaaaaaaaaaaaaaaaaaaaaaaaaaaaaaaaaaaaaaaaaaaaaaaaaaaaangggggggccctttttaaagagcccaaattaactccccctggtttgccaagatatatttgttattagggggacccaaacctaaacttacggccaatt

SEQ ID NO: 247706 - DNA, 196 bp, Gossypium hirsutum
cccacgcgtccgatttaaaccccatcagttttgttgtagttattaagtttcaaacctcaattaagtacaacaaaaaccctgtaacaactaagaaatttagatgcaactgatattttagtctctatcttcttttcactaaatattatagacaaaccgaaaagaaatgacataataacttatttggctcctttcattt

SEQ ID NO: 247707 - DNA, 394 bp, Gossypium hirsutum
cccacgcgtcctgccacgcgtccgcccactcttgcgaacagccgtaaccgaggcgtgaaggtggatgatcctatgctattagcatcttctgttcatgtgatcaataaaaccattgatgaagacaggtttgatattccagatgtacctatggcggaggattgactttactatggctgaccccattgatgccttgtattttgatagggttgctggacgaatccccttaagattaaatgtgaaagctgggttgctgagatgggatattcgctaggagtaagcatgaattctcaaggtgggggcttgccaattagaagttattcgagaaggttataccataatggcatgtaatatatgattgctagtaagggatctttacaattctttgttctttttt

SEQ ID NO: 247708 - DNA, 385 bp, Gossypium hirsutum
acggaacaaaattcacaacggagaaagggttttctccaccctttgagataccccatttcgaactccggggaacggatagctcggaagatgcaagaaatttctctaatgaaacccatctctaatggggatcaatggtgggaattaatcagggaggatgatttgccaagtctcgaccaagagacagatcctgatctgctgctgctgctcctcaaatacaaggtccatatcttgatggagatgatgaagcttttcaccaatggcagtccgaaatagctcgtcttggtatttaggatatataggagattagtatgatgtatcctaaacttaaggataatttagtcttgtaattatccatattttctttatatagaaattcaactttgat

SEQ ID NO: 247709 - DNA, 365 bp, Gossypium hirsutum
cccacgcgtccgggaatataggagctgcaaatgcatagcatatggatcagtctccatgtgaataactgagtcccagtacttgtagaatgggaaatgaaatgaagaataaaataatgaagaataagaactgtttggttatgagaaatggcagtaactttctgtttaggtagctttatgttaaaactagcttttattcctgtttcgtcctttgtacatcataatgtcagcttcaacttctagtctaataaaagcttgtttgatggtcccatatcgcttgatattgtaaattgcaaaactgtcgatacatatttgttacgcatgaaatatgctttaacaaatattttttactaaggggctgccttttt

SEQ ID NO: 247710 - DNA, 382 bp, Gossypium hirsutum
gaataatcgaagacaagttaaacatttcaaagtatttatcctggacattttgttcgtgtatgtatggaaagaggaagcctgatcctgatttctatttggctgttgtggaacatcttaaagttgatccagcaagctgtatattcgttgatgacaggataaaaaacgttgaggctgctgtatgagttggcattactggtcttcaattcaagaactcagatttactacgtcaagatcttctacggttgggggttgacattgcaatagatgcacagtgaggatcatcttaatgctgcagaatgaacagacattgtgacctccaaacttgcattaaactatatttagattttgtccatttttgctcttctgcctttttaaaaattat

SEQ ID NO: 247711 - DNA, 391 bp, Gossypium hirsutum
aagttgcacattgcaagtgattgggattttcatttttttttaaaaaaagaaaaaaagaaaaagttaaaacaggtaaaaagtgttcccatgttattggttgaatggggtgatctatatttatttgatgcatgttgccattaattttaggatgaagctggagacgacatcaaggatgcttccaaacccgagtcaagagagggacagcagtgatgagttaagttcatatgatatgtactctgtaatttatgttgcaagatgtacttttacgtacatgcaacatgagctgatgtataaagatccaacaatcatattgaccttcatacttgcacatttatcaatacttagagtggaaattttacattccaatactattatcattcagacatgaatt

SEQ ID NO: 247712 - DNA, 394 bp, Gossypium hirsutum
tctctattatgatttacgaatataaatatgaagtgctgaaatgatgatcatgtaaaagaatattatatataaaattcttcatattattttaaaagtataaataaatacaaccatttccatattagctgctcacgaatgtttgtagtggttttattatgctccttatggggtgggtttgggtatgaatatgattaggttgtttcattgagggacggaagttttctggctcttcagtcgtaatttgttctgaaaagagaagtaaacaaattgtgctttttgatcttatctggttggtcttatttgttacaaggcaacttcttggtgtttcatcttttccttcccattaggatgttcttttgactcttcaacccaatgtcatttagttttgtaacca

SEQ ID NO: 247713 - DNA, 394 bp, Gossypium hirsutum
gtgggcttgcacattgttggaacctttaatgctgatacggggttcaaagccggttatttaaacgagttataaaaatgttagaaaaagctttacccaatgcattctatgcatcatgcatcatgaattacttttcatcactactattttaattacattcacttatcatatattctctttgtaacctattccaacttatttatatgaaatataaatgagattgatattaattcttagataaaaggatgtgaaagtgtcatggagtttaattattggcacttttcaaagagaagaaggagaagcctagatcctaagtttgcaacaatgaggatatcttttatgatgttttcatagttttttttgggattgaatttaaagcaatgtgtttctcgttagc

SEQ ID NO: 247714 - DNA, 311 bp, Gossypium hirsutum
cagaatcgaacctggaatcgctgatggtacagtaaacagctgttgcaagaggaataaaacgagtgaccattaccccaaagcaggaatctcacgttattgttcaaaggggagcgtctcatgctatcaaggggcagtagatattaattctaggatgaaacgggaaaccagatcaaggactcgtacacaccagaagtctgggatgtacagtccagctcatttaagttgatataaagtgtacacgagcaattagggtgcaagatacacttttacgagcatgcagcgtgaactgaggtataaagggccaactattg

SEQ ID NO: 247715 - DNA, 309 bp, Gossypium hirsutum
cccactcgtacgtccactcgttcgctgtacttaactcagccgatgcaatgcccatatactagcgaccattattcggttgcacgaacctaacttaatatttccaacatgtccttctcatgctttagaggaagatgcaatgctactagaaagcttcatatattatcctggaaaccaactttagcactccttatttcttaataagaacccttagctcagtcagcctgtttgatgctatcaaaactgtataaatgctcgttactcagcatatctagctcgatcttgcaaagagcaaactggcggatcataatt

SEQ ID NO: 247716 - DNA, 222 bp, Gossypium hirsutum
cccacgcgtacgcccacgcgttcgccctcttttactcccacgcatccgggctctgctacgagcgagtaatatacatttttatgaaccaccgcctaaagctccaacaagtcccctttttggtcccatgctaccagccactgttgctgacttgcatcttcttctgtcaaacgctccgtctaacatcactcgttacttttgggcactctccatttacgaggttga

SEQ ID NO: 247717 - DNA, 327 bp, Gossypium hirsutum
cacgagctcccattatcagaggacccgatttgacgctcgcgatcttatgctgtccaagaatctatcgaaggctgcgcaaagctaagacctagtgcggatatatcaatccccacagctgcagattctgtgcctcctgaattgcgccactataggtaacagaggcagagtgaacctgctctcatggtcgcggctggtcaggagtcgaacgttaattcagacatgctcccagtctaaatggcgatctgaacgcacgcttgtccgacgcagtctgcgcggtaagagaagtggtagcacccagctctgtcgttgcacttgatggaacgcttg

SEQ ID NO: 247718 - DNA, 332 bp, Gossypium hirsutum
acccacgcgtacgctgaggtcatccaactagtttaccactcgggtgtcatatagtcattggctcattgctatcaggcatcattataatctgccaccggactctcaacaaccatataactgacatatcaataaggtacatctgaaacatcatccctagtaaaacgacacagctcactcatacagaccatatatatatacaagtcaaagacaatacaacatgccatccttactcttaaccaacctacaactacatttaatatttctgacactccaagatattcacaaggcacgacaccagctaataacactgctattgacattcctacatcatc

SEQ ID NO: 247719 - DNA, 421 bp, Gossypium hirsutum
tactttccactgtagagtccagaatgaggcaaaaacaagaagcacagcagtctcatggaaggaatatgcctcaagaatattattcatccattcaaccagcttctccacatcaggcccaaggacttccagcacaggccagttctcaaggattgagccatctgtatagccattctaggttctcttctgtggcatcacaaccattattgcattcttctggactcacgcttcccatgtatgcaacagcagcaccatatatgacttctgcaaacccactttatgccaattttcagccatctggtctatatgcttcacaatacaatatcggtggatatccattgaatcctgcatttcttcccccatttatgggtggatacccttctcatgctgctatttctttgccatttgactctactgcttctgg

SEQ ID NO: 247720 - DNA, 289 bp, Gossypium hirsutum
aaaaaaccctaaactctttcttctccccactgtcctctttcttccagccacaaacaaggccaacaccaagccttcattcgcctccgtgacgaccaacagagggccgaagaacccctcttgcgaagcgaatcgagaggtactcaccttttccccttttatttcgtattttcggatttgaatggaaataaaaatcaagcaaaagaacgggaaaagaaaatgataaaataaccaccttagaaatattttcttggctgctctttactctcttttttggtatcttttgtatttc

SEQ ID NO: 247721 - DNA, 330 bp, Gossypium hirsutum
cccacgcgtccgaaaaaattgatctcacagtttttaatttaataaatacctacaatgaatagtgatatatataaaattaaaaaaagtataaattaaataactgtctaacggttttacagctttcgatactctaccatacaactgtccttattttcctaaatttacttcttaaatcatatacactttcgcctgctttcactcatccttaatctgccaaaatcttgtccttaaaaaacctgttattcaccctgtacataccctttaaaacaatcctctttataccatcaagccattcttccagaatccttactaacattttaacccccacaa

SEQ ID NO: 247722 - DNA, 203 bp, Gossypium hirsutum
aattaaatgagagccatttcttgaattcattcccacacatacagagatacaaagaaagccatttcttaatatcttagatctgtactcgaaattacttcattgttacttgtttgttttatgtacattaaatgattgtaacaataataaatactactgaaaatagcaccaaaaatggaagactggacagcccctttttttttttc

SEQ ID NO: 247723 - DNA, 417 bp, Gossypium hirsutum
gcagagttgcaacttttgacgttttgattttgttgtatagaacaacatggtgttgctcggtcactgagttgagttcactggttacacaatgtctaatagagaagaatttgctccgtggcacttctttcttcttcttcttcttctatgggggtttgtcggcggcgatgcgccggcgagggaggtgtggtgcgtggcgaagaacaactcggaggacacggctctgcaatcatcggtggagtgagcttgcggcgcatgctgagccgattgtagagcgattcaaggaagaggaccctgcttcgacccttccagtgtgcagaatacggcttcgcatgctttcaatgattatttccgcatacacgctatctctgaagagaattgcaacttctgacacaacgccgtcattaccttcttcaaccc

SEQ ID NO: 247724 - DNA, 281 bp, Gossypium hirsutum
gtttttacagagaagaaagcataactggtttcaatttctattcatattctctgtttctggctactttggttttctcggaagcatgggaacaaacgttatctctgatgaagaagatgagttggaggtcgacgaggaaggagagccgatggaaggggacaatatcaacgaccgcgaccctgatgacgaggatgaagaagacgaggatgggcaggatgagtatgagaatgatggattcatagttgatgatgtggaggatgaagatgtagatgaagatgaagaga

SEQ ID NO: 247725 - DNA, 210 bp, Gossypium hirsutum
ctcaaaaggacgtaatgctccactcaatttacttaacagtcaccatcataaactaccgggccggggtcactataggtccgccgagttcaccagtatgtaatgcacagtcaaagtaacacgctatactgctaaacaacctatcggcaccattcgtataagctcctaagaacaacatgatcctcatttacaacagaaatttacttgcttaac

SEQ ID NO: 247726 - DNA, 421 bp, Gossypium hirsutum
gcgacgaatgctacataacaaaatgatcctcaggttggacgaacactcgttacctacatatgcaggggtgggctcacgcatcatgtggcagggcttgctatatcaattaaaattgatacagtatagacacttgaagttgaaacgttaacgaaaccaccatagtcggctcatatttacccacttattgcataatgaaaactctattgcacgatggccaaaatgacttatttactggttacatctatagtcaatctcttggcatgctctaataatgctttaaagaattgatagattataaaccgttttatgaaacatatacggagtataaacgtaagcctgatgcaaatgttatctggactctctttaatgtacttacatggtgtcttgtgaaatagaatattaaaacatggtttgtcgctct

SEQ ID NO: 247727 - DNA, 385 bp, Gossypium hirsutum
ggaaatgttactcttaaaaccgtacataaaatcggacaaactggagttacctacatatccaggggtgcactcacgcattctgtgacagcacttgatatatcactcaaaattgatacgggattggcacttgaagttggaaggcgaacgaaacgggcatagtcggttcatctttacgcccttattgaataaggaaaactcttctccaccccccccaaaaggaattatttacggattacatcattagtttttctcttcccatgctctaataatggtttaaagaattgatagatgataaaccgctttatgaaagatatagggagtataaatgtatgcatgatgctaatgttatttggactcttcttaatgtacttacatggtgtcttgt

SEQ ID NO: 247728 - DNA, 220 bp, Gossypium hirsutum
  unsure (1)..(220): unsure at all n locations
cgggnccgacccacgccgtccgtgaggggcnntttctttttcttttaatggcgttgggtttttctggctttgggcgtnnttgatattnntagtattgagagcttcgcgtttnntgggtccannggcggtgcaacatgnnctgatggaaannnactatagcgttttccaatttttgaagtggggtatggatggtnnatgtatgcatnnngtgtgcatgcnn

SEQ ID NO: 247729 - DNA, 452 bp, Gossypium hirsutum
aaaatctaccattactacatatacctaatatttcaccgcgaataactcaaatctccaggagcgttcctatttcatctaagccccgacaatcaacaactaactaaattcaactaaaataaatacacaattccctaagctcactgtgattaaagattctcttactaactattgtatttcaaccttataataatacttatagagctttatcagttactttgtctgttaaaaatattgccttctaatgtttatctattttttcttattttagcctaataattttatattttatatttatttattttttttttcttaattttatttacttgatatttttatttatatttattttattttatatattttccaaatattttttattctctttatattatactctcttatttcttacttctacttcttttactttatcttcctttttaattttaaatttt

SEQ ID NO: 247730 - DNA, 279 bp, Gossypium hirsutum
ccacgcgtacgcgtaaccaaagagaaaaaaagagatgtcggatgccatacatgtgcatgatatcagtttatgtcgtcgaggagatttatatgttttgtaacacagattgggacctaagaccaacaaccctagtatctttgtgttcacttctattcgtctacgtggtattgctgatgaagtttgatgttgatgttgtgtaattttacaaagtatattttttcattattatgtagtgatatttattcacccaatgttatgaaggggacttggttctgggtt

SEQ ID NO: 247731 - DNA, 351 bp, Gossypium hirsutum
gcagcccaagaagcagcggctaccaccaagcttcccgtggcaaggaactaccattaatgtcggtgatgcatcaggaaacaccaagaaaggatgctgctctacataaataaataaataaggtgataggttatatttgctagcaagcaggccttatcatttctttattattcttctttctaaaccccttgttttttattctttcttttttctattcaaatgtttagctttgagagagtcttttagattacttatttttacgaaattgatttcatttttttgacaagtcacttgtactaaaagtgtgtctccttttatatttgctctccctatctttttcaacatgacaagatc

SEQ ID NO: 247732 - DNA, 305 bp, Gossypium hirsutum
ctatactatgaacccagtgttgaagttttgttatgaagtgcttttatggattttgaatttgaggaagaaaaaaaaaaaaaaaaaaaaaaaaaaaaaaaaaccaaaaaaaaaaaaaaaaaaaaaaaaaaaaaaaaaaaaaaaaaaaaaaaaaaaaaaaaaaaaaaaaaaaaaaaaaaaaaaaaaaaaaaaaaaaaaaaaaaaaaagggcgccccttttaaaaaaccaaactttacttccccgtgcatgcaacataaaaattttttaaaagggccacaaaaataaaataaacggcccgccttttaaa

SEQ ID NO: 247733 - DNA, 336 bp, Gossypium hirsutum
gcgaaagagtttcttgagcgttctaaagagtatcagaggcgaatgcaaggacaaaggcagcgaggtcgtttctggtggagatgaggagaggatcatgtatagtcgatgattgtggatttcagaaatcataggatggagttatgtatagttgatggttctggattttcagaaatcattctgcaggatgaatccgaagaatgtgaaagacaatctagtttccacccctccaattttgccagtaaagaagccattttctgatgaagatcataaattaaattgattaactgcatcatttaaatgtctgacccaaaggactattttttctctcttcttttt

SEQ ID NO: 247734 - DNA, 347 bp, Gossypium hirsutum
cactaggattgtgcatgatggaaatagggctctgtcttgctcgaatatgtgatatggccattggaggcaatgagcttgagcaaagcttattggaatcatgtgctgcaaaaggacgacttatacattatcattcaatggttgatagccttgttcttagagaagctggtccaaagaagggatcgagtaaaagaaatgctaataatcatgcaagaagcaaggagaatttattgaaaggtgctaatttggacacaaatggtaatgaagttaggttatgtgaaattcatcccaacctatggcaacagtggcattatgactatggtatcttcactcttttgactgatcccatg

SEQ ID NO: 247735 - DNA, 115 bp, Gossypium hirsutum
gattacacgtgtacagtaaaatcatgaattctgcttgttcttaacgattgattaagacttggatgaataataataatggatggtaaaaatgttgagaggaaattgacctgacatc

SEQ ID NO: 247736 - DNA, 135 bp, Gossypium hirsutum
gtttttcatgttgtaagatttgtctaatgcttttttatgctatcaacggagtgatatggtaggtttaaaaaaaaaaaaacaaccagtggatgagtatgattcttcaaaataaataaaccgtgggtgagtatgatt

SEQ ID NO: 247737 - DNA, 221 bp, Gossypium hirsutum
  unsure (1)..(221): unsure at all n locations
naaaaaaaataataaaaaataaaaaaaaaaattataaatataaaaaaaaaaaaaaaaaaaaatgaattgggttaaataacaatcttataatatccatccttactaactcccgctttagaacatctattttttttttttctacactgacctgtaataaattttctatcttgttacataaattatattgacaaaaccctcttttcacctacttaaattaataa

SEQ ID NO: 247738 - DNA, 403 bp, Gossypium hirsutum
tgaggaatgactttcagccttgaaatcttcttttggtttcgactttaacgaagcaaagaaaggaaatccatgtcattttgcaaggtaaaacttaccttttcctttttcttttatttttttacatgtaattatgaaagactcaacaaaacaaaaaaagaaaatggaatcgaaaattaaagagactggaaaatggagaatcaccttttggttttgatagcctttttttttatttcaatatgcatagtatgcgtaacctcgaaaatacattgttttttggctttatagccgaaatccaaaacaaataaaataaaaaaaatacaacatttcttcgctttttcctatttgctgttgtcctgctgccgtttgcttgtttttggttgcaggcaaggtgtacggggccagc

SEQ ID NO: 247739 - DNA, 417 bp, Gossypium hirsutum
ctaagaatagttgtccaagtcctgttcttcgagcagcttcagcttaggacctcaagggctggatgctttttggtttctgataatcttgatggatcacgacagttacgtagtgggatcacagggtctaccgaaggagggtgggcctcagctgtgagagaaaatcaggttttgaaggtaggcatggatactatgagaatgcgggtttccgagcttgagaaagaatgctcaaacatgaggcaagaaatcgagaagctaggccgggtaaagggttctagcacttggggaaacgtatcgaagaaatttggattcaagttgaagtctcaaatgtgcaatgcgcaggaggattctgtaagcaaccagaagaatggaagtggaaagatcgagaaaccgaaaggtaaagcacaagaaaaacacaag

SEQ ID NO: 247740 - DNA, 226 bp, Gossypium hirsutum
ctccggtcctccacccaattccagaatcaactcatcaaagttcaaacaacagtgttagaatcagagagacaagtgacattgaaatcgatttggcttaccttagcttcatttcccataagctttcatttacattttctttttagaatttaatttaatataatttgattttcttttattttactttgtacaacattttgcaattaaatgcaggattagcagattttct

SEQ ID NO: 247741 - DNA, 403 bp, Gossypium hirsutum
  unsure (1)..(403): unsure at all n locations
ggaatttgaagaattttccgagcaatatcctcttgaaagctattatcccatatgggtgtccgatctcctctgtctactctccagcacatccctctttggagaagaccctttgcagcccatatgcttttccaggaataaagagctagagaatactaccaatagccgattgacttaatgaagagatccttgagagacgtggaagatcaaacaatagaaataaaaaaaaataaatagaaaaaccaagaaaaaaatcacagaaacctaagactcgtgccaaagacggcagacagaaccgtgctagggtagcagaccttttagcgtttcagtaattaaaattgaatgtgtatgtaantaaggtataaattataatatttgataaatcttgaacacatcgatattaagt

SEQ ID NO: 247742 - DNA, 279 bp, Gossypium hirsutum
ccgggcccacccacccgtgcgatcataaacaaataaaaagtcgatttatttactccttaattagtactaaaaatttctgtccgaataaaaaaacaaaaaaagaaataaaatatataaaaatttaataaaaaaaaaaaaaaaaataaaacaaaagataatttaaaaaaatatatctattaattatttacaaaggaagcaaaacacctattaaaatatatcattcaacaataaaaaaaaaaggccggcctattctttacctcattcttattaaacccaatg

SEQ ID NO: 247743 - DNA, 274 bp, Gossypium hirsutum
gcggaagcccttggagatgccatgcaagcacaggtaatatccccggagtggcccgcagcgttctagctccaagcagctgctctgtttagccttgggatggacaatgatgccaacgaaaccctaaaagatggtacaaacttggaagccaaaaatcatagaaactgaaactgtataaaatatccttatatcttcctgtcttatgtcactcttttgcatttttttttgccgatttggttaaagattggagcaatgtaattgagattatttgcttgtt

SEQ ID NO: 247744 - DNA, 203 bp, Gossypium hirsutum
gtgccctcaaaaacccaaaaaaaagccttatgttgtatctgttagacatgctatatatgccatgttccagttgttcccatgtaatggaatggtatgggtgagattgtgaagagattgtgaaacaatcaaccttgtgtgatattgttgtatctttcagtagactatgaaatataattgaaaaggccatcaaggatattttttat

SEQ ID NO: 247745 - DNA, 454 bp, Gossypium hirsutum
cgtttttacttaactcggtctctgctaaaagtcaacttttgatagtactgttgttgtaggtgcacttccatatttcaactctgtttcctaagcagcagccagctctgatgttccaaagttctcagcatatatcgccacaaggaataccgaaaaagtcacctcttctagcagaatatccatggagtccgagatgggaagcatcacaaatggcagagcggatattgtgagtttcattagtcttagtagattctcaatcattttcagtgtgttttattaacatgtattgatttcttcagcgatttcttggcggatgagtctctgaacttcaaacggttctgtaatgagtctcaacctcaacactagaacgataaagggatgctgaagtttggtatgggttatgttttattcattcaagttgtctaaaaaatgcttaatgggacatttggtagttttc

SEQ ID NO: 247746 - DNA, 417 bp, Gossypium hirsutum
  unsure (1)..(417): unsure at all n locations
aaaaaaagcaccttgaagattacaatgaagaagagctccatgcctcatccttaccacagctccaaagttgcagaccctaatgttaatggtgatcatttgaaagataacagaggcgtcaggtccaacgtgacagagaaaaagtcagctgctggtgctgccactaataagctggagaaaaatccatccgtcgacataaacgaaagtgcggaggccttcatccagaaattcaggcaccagcttttgctccagaggcttgagtccattgaaaattatgagaaaatgttggctagaggactctgatcatcgatgcactggtattctctgctggccaaacatatttcatttgcttcttttaactngtatactctctattatgatttacgaatatggatatgaagtgcttgaatgatgatcatg

SEQ ID NO: 247747 - DNA, 150 bp, Gossypium hirsutum
  unsure (1)..(150): unsure at all n locations
acgggagccaatagagaagagnnagagggttgctaagatggaaaagagcagagtacatgggggggggcttaaagaagggggggcggacaaacctaaagtgcaccaaatggagcaagactccagcaacgggaaggagctcggcaagagcat

SEQ ID NO: 247748 - DNA, 411 bp, Gossypium hirsutum
  unsure (1)..(411): unsure at all n locations
naaaaaaaaaaaaataaaaaaaaaaaaaatttattaaaaaaaaaaaaaaaataataaagagggggtcgtgtctttatagcgggggcgcgagcaaactatatacatacattataacgtctcccttttatatatcgctacccttcttcattcaacttcccgactttttatatccttttttcttataaaaaactcttttttctcaacatacttttttttcttcttattcatatatctttagttttcctaaatataaataagtccaacccctttcttctattctaatgttatgcatcttttcattataatttacacatcttctcttcttttattttttctcatcaccactaaatctttttttttcccctctccttataatcttatattctttatttttctatctctttctatttc

SEQ ID NO: 247749 - DNA, 158 bp, Gossypium hirsutum
gtcgctgaggtccggtcggattccggtcgccccgcgtcgcttttctaggttgctgtggaaggcaactggttcatacaagaaaagagctgcaagatactggccttgatagtaagggccaaggccaaaacccaagattgccttggtgcgaattgggaaaa

SEQ ID NO: 247750 - DNA, 396 bp, Gossypium hirsutum
acggctgtctgcctggaagataagctgaaggagctgcaacataaactagatttgttgaacaaagagcaacctcaggaacatgatgaactttgaggaacccagatagaagattcagacatggttagaggctgttgacttcataacaaatctatcattagaacacgtatcaatttgatcctagttatgaagcgaagtagaatgtggcctttttgagctagtagagaagattttcaagcgatatctgaaatctgaggtagcctcctgaaaatttttttcgtagggaagtatgcttcacattaaaatcacatagatgaagtgaggtacgggtatatttgttaggttgagctgaactgactatggtgaaaataaactggtcctcaatacttctttgaattt

SEQ ID NO: 247751 - DNA, 272 bp, Gossypium hirsutum
agaatcttgcattctgagatgtggaattcacactatcttacacctacgacacctttattttaacactcacatcatggaaagaatgcccctgtattccgacttctttctattagatgccttccatcacccgaggctgatcctactaaagtattacttgcaaaaaattcaaagacttttaattaacaatgacatacttttgggaacaaagaaaaaaaaaattgattggtggttttaccatgacaaaatcaactacaataatgcagacaacatac

SEQ ID NO: 247752 - DNA, 366 bp, Gossypium hirsutum
gtgagctcttaccaatggctttcaaagctctgctgctgttactattggccacttttctgctggtctcaacaacaggtgcgtgcaatgaagtgggagagaagactgagattaagtatgctgctcctgttccagtgaaggcaccaccaactaaagcaccaactcccccatataagcccccagttcctacaccttcagttaagccaccaacaacttcagcaccgccttacaagccaccaagtccaccattgccgcctgttaggacaaaaaaggattgcatcccattatgtggacaaaggtgcaaattacactcaaggactaacctatgcttgagagcttgcatgacatgctgtgacagatgcaaatgtg

SEQ ID NO: 247753 - DNA, 389 bp, Gossypium hirsutum
gaagaaatgaccttttaggattttaatcgcctttttgtattgcgtattgagccttttgtattctctcttaacgtaaacttttacaattgattctcttcaggctttatagccaagagaagaagagaaaaaaaaataaaatatacaatttttccatttttttctgtctgttattttcttgtatgcatttgctgctgtggtttgtccctttcttcgcaggtacaggtgtgcgctcgggtacggggccgtgtgctggcgcgggcatgactgctgggcggtacggaggccaaggctgaagcttggctggttgcggcgcatgggaaagaaacctagggttctaaaatttctgggccatttgggccaatgtgattttgggtctcgggtttatttgg

SEQ ID NO: 247754 - DNA, 397 bp, Gossypium hirsutum
tcgagacaaagaagtccccctcaccaacagcaaatgaaagcgatcagtgagtactaggacatgtttgagggttgagaaggtccagagtcgtcgtccagcgttgctcagtatgggtgtctgaaagtcagtcttgtcgtcctcatgttgctgcggttatcgagttactctaccttctcatgatcagtgttcagttgtattaatgctatggtatttccggtctttatggatcatagatgcatcattgtgtcagccatctaatctggaaaagattttaatgttgattctggttttatctattacttaggttttgtactttggaatcaactcatctattctagtgacaatgttactatggacttagatatgttgctacacttgccaaggggggaaaaaatac

SEQ ID NO: 247755 - DNA, 197 bp, Gossypium hirsutum
aaaaaaagaaagaaaggaaacagaaaaagaaaactgtaacccgctcttaacttcttcgcatgcagtcggagctccggctcccttaacggagccctgtttgattgtccaattttcaaactcttttagatctctgtccttttatctttttagatctcaactaaacccaacaataaaatattcaacgaataatataaaat

SEQ ID NO: 247756 - DNA, 422 bp, Gossypium hirsutum
  unsure (1)..(422): unsure at all n locations
ctaaacaatggttgggctgccggacgtttgaactcgacggttgccggtgaagaaaacttcgtgttcagctcaaacagagttttaaggcaataaataaactcaaacttgtttcatgtttttttatttgttgttgtattcttcatagttaagcccacaataacgtgaatgtttaagggctaagcatagctggcattatatgatttatccattgtttgaagaacataatatcagatgaaagttatgtttatttctttgaagaactaaatgataatttgttaaaatnaaaaacacacaaaaacatttctctttcttttattcttttctctttctttttttttctctttctattttttatttactttttcctctttttttattttcttttttttaatattcttttttatatttaagggggggccctt

SEQ ID NO: 247757 - DNA, 250 bp, Gossypium hirsutum
ttggaagaaggtgtccgagattacaatctgaagttggccaaattaaagaagaaacaacggctagagtaattgctgcttatcgttatttcgttcaagtaatagcagtcaagaatcttttattggttaactggaatgttgatgaactgctagtaatgtatgcttttgtgtgagcgcttgtgtttgaatcaggagaatgttaagaactcatgtagtttgatgcttttggtatttaaaagttgttttgtgtgtg

SEQ ID NO: 247758 - DNA, 425 bp, Gossypium hirsutum
cgacccacgcgcacggccaggacaaaggaaaccaatgccatattttgaagtataaatcaataccaagcggccctaatggtgtcattgatgcatcttttggctttgatagctcatatgattctttttctgtgacatcttcggtctcatcgtcaccccatccactgttcataaggagtatttctcttgaccagtttttgcgtttactttcactaaaccgtatgtttgtggattttcttattagccctcgttaatctttctttgtcttatttactagtactgttaaacattttattagattttcctcatctgcaaatcagtagtaatctttctttaatgtgcaattgatgtgcttcataacctataagtagccgatgatagccaaatgttctaacatggatcaaagatgtactaatatctgctaaatt

SEQ ID NO: 247759 - DNA, 409 bp, Gossypium hirsutum
tcgcagcacttcagtagaggaagtctcaaacattgagaaggttttgaagcaagcagtgttttgtaaatccttgggtttgctatttacgaactgtttcctactggatcaaaaagctgtgcgcaatcctgaaacaccaaagttggaaatgccatttgagcaaatgttcactgtactaaaagattatcatcaggcacccccagaaagtaaaagaagaattaagatgcgtacatgcgtccctggaagtgaaattccggaatggtttgatttcaaaagcttaggatcttccataaacatccaattgccttcagactggtgctctaataataactggataaactttccatgtttcgttgcttccgccgttgcttcattcccagactcttataatggtatggaatttggcattaac

SEQ ID NO: 247760 - DNA, 354 bp, Gossypium hirsutum
tccggatatgggtatatatatgttggacatgggtgagagcaagagggcccaccaggttccgctgcttctacacgtgaatacaccatgttcttgttagcattgcttggaggagttgcactctttgtttaggacacttctttttttggtttcgtttactttgatgtagattaagctatttatgagtgtattcttttttccttgttccattttatatctcttatcgtcgattcttggagctgatgcttttgtgagttgtgagggctcttttgtagcagttttactttagcttaataaagagagactttgtgattcttggttgtgttactgtaatctttagtccaattattttcttct

SEQ ID NO: 247761 - DNA, 278 bp, Gossypium hirsutum
gcaggttgttgccaaaaccagccaggcctcctccgaaattgaaggataaagttgacaggattggccgccttccttctccaacaaaacctatcccgtttttcactgaagaggaggcatctgcctctcctgctttgtagacagatgctttgtttgttggttgaacagcaagattgatattcataatgagttattttgcaatcaaaaaaaaaaaagaaataaaaaaaaaaaaacaagagagtttcaacaatgttaagcaatggcttaaacgaaatttgacc

SEQ ID NO: 247762 - DNA, 241 bp, Gossypium hirsutum
taacttacacctgcattatagtgtaaactaaatttattgcattacccaaagttaaacaactgggcgactgttaacaccgtggcgactgccaacataatggcgtggcataacataatcgtcttgcaagatatcggattatcgaaaagtgccgtactgatcgacatgtccaaaaatagcgcactctgaatcacgaatgcaacgtgcactgtaaatgcgaattaagctctttcggtgcattaag

SEQ ID NO: 247763 - DNA, 420 bp, Gossypium hirsutum
tggcattttgccacttttccaagctgcatagcaaatacccaattgttagggttttggcgcagcaaccttcatcccctagggccatttaatcatcagttcaccattaaaattggtgagtgacgtagaagccttctttgtttccatcaaaatcgacgcttaaaagccatttccactcgcatctctaaccccgacttcgatagagaagacaaggatctcatcgatgcatccgcgaaggtaaatttctcatttctctttctttttttttagaaaaatgttctaaaagaaaacaaggtacatgcaaaggaaaaaaaatattgaagacgaaaaagattcaaatcaccttctgattttttttgctggttctttgtattgaatttgtgtagtgtgcgtaaaaaaatatggtatggctattacatggct

SEQ ID NO: 247764 - DNA, 344 bp, Gossypium hirsutum
aaaggttcatggagtgatccaatcgctaggggaagcttgcgacctgattatctgcaacaaccgatgcagcaatatctgggggacattggtgatcgagttctcatattttggatggcacatttacggattcatactttctgactatgaagatgttcgatgcaaacaggcatgaattcacatgcattcgttttgattttgattttgggttggcatcatctgtggctgatagtggaaaaattacaatgctttttttttatccatgtaaagtagtttatatgctatatgttactatcaactctgtccatatcattgcatgtatagcttggattatcccccattgagtt

SEQ ID NO: 247765 - DNA, 442 bp, Gossypium hirsutum
cgattatgttgtatattgaatatttgagattctgatattctattgagtgttggattgaattctacattgcaggtggtagaatgttttgtggtgcagaccaatgtgcaaggctgtcaagtttatatcttaattctcccctctgattggcagaggatcatgttctgttcatgcccaaaaacgatttctagcatatgttgaaaaagccaagactgctggagggttggattcgtcatttcattatggcaatggcagaaacggtaaagagaatgggccgtgccaataataacgactgctgtagttatgtaaagagaatggagcctgccaataataatgaagcatgtaagcactaaatctgcagttcaaattcgaagccatgctcaaaagttcttctctaaagctcattgctttgagttcattacaagatttccttgattaagtaaat

SEQ ID NO: 247766 - DNA, 404 bp, Gossypium hirsutum
gaatccatccatcaaccggcagacgccgccaactacgtgcaacccaatggcacgtggtgccgccgacggagcgcagatagccctgctggaagctctgaccattacgaccgctcacggcgacgaagttgtcattcgggaaatacagcggggccggagcattatgcgcctgcggatagagcgcctggaagtcctagcctacgcaagtgacaaacggcatgctgcgccagctctcgaccgactgcccgcgctcgatgcgcatgccggattcgaggatcagcaccgaatggacctggctgaccaactggtcggagatcaagccgccaactacgccggaccctacgatcacgacgtcggtagacacgtagccggtggattcaaatacgggagatctcatgggaatcaga

SEQ ID NO: 247767 - DNA, 382 bp, Gossypium hirsutum
tggcaacgatccaatcgcttttagaagctttagacctgagtatcttcaagagcccctgggggagtatctgggggacattggacatcgagttctcatatcgtgcatggcacatttactgattcatactttatgcctatgaacatgtgcgatgcaaacaggcatgtattcacatgcgttcgcctagactacgattttggcttaccatcatctgtggctgatcttggaaaaattaccgtgctttattctcattcactgtaagtggattatatgctatttgtcaccattaaccatgtgcatatgaatgaatgtgtaggcttggattttccccattttgttgtattttgaaaaaaatgcttttctttttaactaaaggccttttttt

SEQ ID NO: 247768 - DNA, 378 bp, Gossypium hirsutum
catgttgatggggataacaaagtcaaatggcagacatcttggttttattttagacccttagtctacagattgctgtgggaacctaagagcatcgacagtgaagcaaagggagtgagtgcattatgagaaatccagtaaggtctagattgaccagggccctaagagaacagttcagagggaagttggatctctcttcgccgctctaggttgccattggagcccaatgtagaaaggtatgggtgaagtcgcagaggagtgaaccaatggtcatgcggttatgggactttgatatattctttattccctctttaaggggctcattgaagtgcatgattccagtaattttctggtaaaaaaaaaaaaaaaaaaaaccaaaaa

SEQ ID NO: 247769 - DNA, 393 bp, Gossypium hirsutum
gttgactcagtaaaggttgaaaagtatcactttatatgcaccatgtcgacaagtactcgggctgctcacagagcttacattgtgcaatctagaccgttgtctttggtggttgcaccaagcctgcaaagacatctccaaaatgtcatgaattatatatctgacatatagcctcccctaacagtgccatctgagttgaccaatctatctattctctcatatggatctgcaattcctcttgttcataggcctcgtcttatgctacgtggtgatgatggacctgacctgaaacataagggaccaccagtgacgaacgagctcgagaattgagcagaacatcacatcaggcaactcaaatgcgcgttcggatcctagtaccttgacatgagcagaagc

SEQ ID NO: 247770 - DNA, 361 bp, Gossypium hirsutum
aaccattcaccgccacctactgtcacattttgcacctttctcaccacatccacctcctggaccaccagcaccatgtgtagagtacacgccatcaccctcacccgcaattcattacaaaccaccttcatcaccttcacccccaccctccaccaatccattatcattcacctgcaccaccatcacctgcaccggctcccgtatacgaagggccactttcaccagtaatcggagtatcatacgcttcaccttcaccgacacctttctattgattctttcaagaatttccctctaaccctgattaaaaaaaaccccaatatagacgagaaattctctcccataaattattttgatattttggagt

SEQ ID NO: 247771 - DNA, 148 bp, Gossypium hirsutum
atgacattgtacactaggaaaagtgcaagcttggtagcagttacaaaattttattggactatatagttgatgttgctctgagattcctttttgggatgttagaaccgtatttttttgcagacaatgtagcacaatttactgtcttgtc

SEQ ID NO: 247772 - DNA, 250 bp, Gossypium hirsutum
aaaagagagccgggaaaggatgctagatttatcatagcgaaaatgaatactggactttgcggcgagtcaatggacatacccgatggctgttaggagttatgttaaggctaaaggattcacattatataggttcttttgtttgtctagctattgatgcttataatgcattaatttatgcttgtttgtattttacattttatactctatagttgatcgttttaagtttttgttgtaacactatttatggtaa

SEQ ID NO: 247773 - DNA, 379 bp, Gossypium hirsutum
gttggccaagaagcacttgtagaagcataacgtgcgatactggcttctagtgattgctttcaacatggacagatctgcctatgaactgcgcttcttgaatattgccgagcatgaacgggaggaggaagaatgatgaatcagctacacatttctaaaacctagattactggtacattacgtcttaggatcactgtggacatccatttaaggtgtcagagtgcagatttgccacttcagaccgtactgtaacctgcaatgaagaaccgaatgctgatagttatgaggtcaatcctgatatgatatcacaacttgaagcagctggtctatcatttgttggcagagatgaaagtggtaggcggatgaagattgtagaactacc

SEQ ID NO: 247774 - DNA, 273 bp, Gossypium hirsutum
gcagctcgtcctgttaaccgtcacgcctaacatgccttcacacatgactgtacgtatgacgatgaagctggccaagaagatgaggcagaacatgccgatccactagcggatccgtatgcgcaccgatatcaccattaggtacaccgcgaagcgcaaggactggcgccggacctagctagggacctaagctggatgcgccgctttaggagccttgtacgcacgcaaagacttgcgcataggtctatttcatggaatattgaaggggccttggac

SEQ ID NO: 247775 - DNA, 243 bp, Gossypium hirsutum
gttatgatgccataacttcattgtttttatgtgttttcatttgcaattttaatttctgcgagggggatagatatagaataagtttaatacttttcttcaagtgttgttagaagtttttttataactccaaagaacatggaaagacttgtattatttagctcgttaatttattcccttgcttatttatcaatttattaatatgagccccatttcatatttgtaccgtaattaaatcatgttttt

SEQ ID NO: 247776 - DNA, 206 bp, Gossypium hirsutum
caaatatacaacgcctaaccctgtttaatatgagcgtacagaatccggtcatccagttttgtagcttccctatcatattggatcagcaagcatctataccatactgaaagtctttgttttggcattaattttatcttattaaattcctaataatccctgtgacattgattttatacatcaaatgatatcatagtttctatggcctc

SEQ ID NO: 247777 - DNA, 132 bp, Gossypium hirsutum
tatctatgtcgcgagtgtactctacaatttattcaacctggcctacgccttccttcaagggcacttttacagcttggacaggggctacatccattctactcttcaaacgtttcaaaacctaatcgtaccttc

SEQ ID NO: 247778 - DNA, 295 bp, Gossypium hirsutum
gacacaaactaaaatgctatggaagaactgttcctcgatcaaatgagatacagattcagaggggtgaacaccaactagcattgtcattaaaaatgcattatgctgaaagtacgatagatatttcaatatcgttaatgtacccactttgataggaaagaaagcaaaagagtaatattctaacggctgaaattcgtgcatataatcagatcaatgtatgctatatgtgctttgtcgagaaattatattagagtagttcctttcaattttgcttaacttttcttattaccaaacttag

SEQ ID NO: 247779 - DNA, 147 bp, Gossypium hirsutum
taaaataccaaaaggatcgtccctcctttacccggcaccaacacctttacacaggcgtcgtcaatcaccatagaggggcattctcacctcaaattctacccaccataacacatattttaaccgttttcatactccacctaagaactg

SEQ ID NO: 247780 - DNA, 362 bp, Gossypium hirsutum
agaacccacgggtttaatatgaggctttcagaagggaaacaaattctattgctggttatccgaagactgctgcacggccaccgcctaaggtgccatcaggtacaaccaactcttatgcttttactcaaaactactgaaccggtaggtatgcatgcctgtttgttacaccatttagctgatgccggattttttcttaaccctcctgttttgtacagctaaaccagggagaatcgttggatctgtcgtaccatacgagaatgggaaaaacactaaagatggtttcgattctaaaatcttttacagacacgcaatacttttcttcgcagaacatatccccccattgttttttccgaaccaccacc

SEQ ID NO: 247781 - DNA, 404 bp, Gossypium hirsutum
gtggctcgcaagaacggaacgcgtggacccgttctgactggcccaactggataacaaagccttggcctgctacatggatgtgaatgcgatcataaatgggttgcttatgtacacatatgtttactgttgtagatattgtgcctaggactcatttcgacggcatgttcaagcacttgggtacctgcgttctctacaacaaaaaatatcaagctgagatagttgaagaagtaccatacttgaactacttctcgctgtttggattcttgccgatgcatatgaaccccatgtgtgccgtgattagaagctctacaatgaaagttaaatatggagcagattatacagatgggtgggtgatgtttggcatgagattatctggaatgttaatccctggaatatgaaacaat

SEQ ID NO: 247782 - DNA, 293 bp, Gossypium hirsutum
gtcgatcccgagaactatataaatcaatcttttcatgaacctgccaatcggctgccacgggcatcacctctatgatcaggggattgccatacccaatcaactactaggtattttaaatgttatgcagtcgggatttcaagtttgcgaatatcttatcaatacgtaactgctattacgactgttctaccctttcttagtctgacattatcatcacttaaatctgcccacacttgaatgattggttgtatctgtgaaagattatacttgaaaaatatgctatgggtctctttttt

SEQ ID NO: 247783 - DNA, 247 bp, Gossypium hirsutum
atccgtctcaaatcacatattgtcgcctttttggtctcttcaatcttactctctctaaggatcatcttcatctcaaagagggctaactatccaaaccatcccatttacttttgtgtctcatggctcaaaatttatgctttcacacacacgttttcatttaacatcaatgcaaattctgaatacacttcttaatcattatacccaagcctatttccttaaacgaaattaaaacgtttcattttaccac

SEQ ID NO: 247784 - DNA, 320 bp, Gossypium hirsutum
gtgcagctcaaatcacatactagcgtcattttgatcctgtcactatcacaactgcaaaggagcctctgcatataaaaacggttatgctccacaactgaaagcgctttagttatgtctctctttgacgacaacaataatttgatgacacacaccactgaatttttttgcagtacacattatgaaccctttctgtatcatatacacaaactataacctaaatcaatctaaatagtgctatatcgcatctatcaattgaatgagatatccagtcctacacataccgatacaactaaacatttgtcttatattcccaaaaacac

SEQ ID NO: 247785 - DNA, 169 bp, Gossypium hirsutum
aacatatacataacttttggatctgatcttcttattcccaatccctcttccaaccatgaggctccataccatataactggaccatatatcttatctaacacaatcacatattcaataccgtaaaggatctctgctctccgtcctaaacttatttatcgtttgctcttct

SEQ ID NO: 247786 - DNA, 286 bp, Gossypium hirsutum
gccacatgcagcgtgccccgtcactaggttcttggggcgttactctactacgttttcagttacaggcccttcacctgccggcccaacctaccctaccgaggactcagaggattcacctaccaagacaccagtgcctgttgcagaatctcctaccacccccaaagcaaagccgtccgcatgcctaccattggcccctgcttattcacaccttctctcctcctgccaggagaccattaccgccggcacacactgtactaggggcgggcagtcattgataactaccaca

SEQ ID NO: 247787 - DNA, 104 bp, Gossypium hirsutum
gcacatgcagctggccccgtatatcagttcttgggccgctactcttccctcgggtcatttacagacacaagagaggccggccaatcctaccctaccgacgactt

SEQ ID NO: 247788 - DNA, 239 bp, Gossypium hirsutum
agcgctccggactctatcaaaattcaaacatccctgctccaaatgatgtccccattggcctttcatcacgcgagcgagggcatacgtcatacaaagggcccacacatatcacccttcccattgtctattttctcttcatttcataagacatatgtatgctattccctctaaagaatgatagaagatataacaaagtcctcttatttctcaatcccctataaaagcccctccattttttc

SEQ ID NO: 247789 - DNA, 402 bp, Gossypium hirsutum
gaaaaaaaggttctaaataaagcagggatttctgatgacaagaacccttttttgtttctagttaggcagtgtagactcggtgattgaatacaggaagccagctgaggattaaagttaaattagatatcatgggaaagctactatagttaaaatcgtgagcataaggtgagtatataaaggggaaaaataggcatgtatcttgatggctcctctataagacttctgggactgtcatcttcctaaagaggtatgctaactgcatggttccattgggcacagcatatagcacagacacaccatttagctttatgtgggtaatgattatgggtagctcaacttacatgaaatactattagttaactgtattcacttacgaattgaagtctgcatttctttcatact

SEQ ID NO: 247790 - DNA, 317 bp, Gossypium hirsutum
gcataaaaggttctaaattatagctggatttctgatgacgagaacctctcataatctcagggaaggcagtgagaacttgagcaaagaacactggatgccatctgtggagcaaagtttaattaaaatgcttgggaatgctgctattgttaatatcgagtgcgtaatgtatgtctttaaatgggaaagctagtcatttttgttgatgtcgcctcaatatgacttgtgggacagtcatgttcttaaagatgattgcgaacaggttagttacgtttgccacatcaaaattgcacaatctcacatttcaactttatgagctt

SEQ ID NO: 247791 - DNA, 376 bp, Gossypium hirsutum
gcataaaaggttctaaataaagcatggaatactgatgacaagaaccctttttagggccagtagaggcagtgttgactcgttcaaagaatacaggaggcctgctgtggagtaaatctaaattttaaatcatgggaatgctactatagttaaaatcgtgagcataatgtatgtatataaaggggaaaattaggcatgtatgttgatggcacctctattggactgtgtgggactgtcatcttcctaatgaagtatgcgaactgcatagttcccttatgcacatcaataattcacaaactcaccatttagcgttatttatttttatgtattatagatagctcaacttacattaaattctatttggtactgtttttctctt

SEQ ID NO: 247792 - DNA, 402 bp, Gossypium hirsutum
gcaaaaaaggttctaaataaagctttgaaatctgattacaggaacccttcttggggctgtttactctgtggtgacgcgttcatatgtgactggaagccttctgaggagttaagttaaattataaatcatgggaaagctactatagttaaaatcgtgagcataatgtatgtatataaaggagaatattaggcatttttcttattgagctcctctatatgactttttttacagtcatattccttaagaagtatgctaactgcatattttcatgagtcacatcataatagtacagtcataccttttagctatattttgttttgtaaattttaattagctcttctgtatttttaatccttatatatgttatctgttttttaataattaattttatattcttatttt

SEQ ID NO: 247793 - DNA, 326 bp, Gossypium hirsutum
aatccatcaaaaatgttgtattgatcaaccaacctttctcaagttgcatcagtttatatatcccttctgatgccatcttctttcttccctatatatcaaatttatttttctccacttaatgtgtctcatccccgctattattcaccttcaatattacttaacaaaacttttcctgattctcaaataaccaactctaatattctactttttatttccactttattccttactacatacacttgcatataaattatcaaacgcataaatcatcatttcatcccttatctcttcaacttttctcaactttttccctgaacttttttttt

SEQ ID NO: 247794 - DNA, 179 bp, Gossypium hirsutum
gccagatcattgaaaacatcatttgcaccttctatattaacggagccaaggacttctggcgattttaatatattcaaacggagatcatcaaatgacatctgctgacaataccttaccaaggctactattgtgcagacaataaaaaacctgtaatatacgacacttttgaaagaaaacaa

SEQ ID NO: 247795 - DNA, 356 bp, Gossypium hirsutum
ggaacttgcaggcaactaccttttagatcatatgcatgattgtcaggattgacttggtggaagaaatggcttggggaagggcaatatcattttctctgccgctctttgggtccattggcattcttgcccccccccctatccccacaaatctctaccgaatctattcttaatcaacagatgtctgtgttcggtgtagagactacggatgcgaatatcgtaactccattctctcttctctttactttttaatcccgacagacccattatttataatgttatatacaagctcatttccaaacttgtgtgtattgcactttcacatagttactttgctctcactctttgattctcacttg

SEQ ID NO: 247796 - DNA, 336 bp, Gossypium hirsutum
acaaacttcatttttcatgcggcggaggatacgaccgaaaccatggggttggtggtaacggaggtggtggtaaaggcgatggcggttccaactccaacgatgatctatggcagcgctttggcattttgggtcttcttctaagtggatggagagacagggttgcagcagatcctcagttcccattcaaggttttaatggaagaattggtgggtgttagtgcttgtgttgttggagacatggcttcacgtcctaattttggtcttaatgagctcgacttcgttttctcaactcttgttgtgggttcaattttgaattctcttcttatgtatcttttac

SEQ ID NO: 247797 - DNA, 273 bp, Gossypium hirsutum
  unsure (1)..(273): unsure at all n locations
gaaaaaccgggccgacccacgcgaccgggaaaacnaggcaccccgggggacacgggtgccgaagccccccacccggcaaccgaagacgcgaggcanaacaccggagaaacgcgcgagacggcngggggagcccccacaagactggaggaagacccgaaaggcgaaaaccacacgaacagcaacaacggaaaaggccagcaaaagaaccgcacgaggcccgacaaaaaaccaaacggaacgcaagacgcggggcaaaaggaaccgacaccggcc

SEQ ID NO: 247798 - DNA, 253 bp, Gossypium hirsutum
  unsure (1)..(253): unsure at all n locations
gaaatccaaataanctgtgcctttgccttagctttagcctttttttggaacttgaagacctgaaggtgctttgtgatgaatctgaaaaaatgctgttgtcattaatctttttcagtacaaatgcttagaccccttttcccccctcgatggttgaatatggatgcttgtttagaaaaccctgtattcatccacctattgatgaaaatgacgtggaacatgcttatcgtgattcatgatgctgttcacctttttt

SEQ ID NO: 247799 - DNA, 338 bp, Gossypium hirsutum
  unsure (1)..(338): unsure at all n locations
ccggatcggaaaaacggggcgacccacgcgtacgaaaggcacgcgaggacagcanacagtacatttccagaactcaaccaggacaaaaccggggaggacatgagcgtgggggaggcagcgccaggcgatgttaacgaaggatcttttgctgtctctgcagcgaatggaaaagaaacacagaggtttgttattgaattggaccatttaacaaaccctgaattcctaagcctactcgatgaagctcgggaaggatatggatcctattaaacggggggactttctcttcctagacaggctcatgaattataggagattcttgaacacaagaaataaaacaa

SEQ ID NO: 247800 - DNA, 131 bp, Gossypium hirsutum
  unsure (1)..(131): unsure at all n locations
antcactngnctgctctttcttgaaattttctttgtgaattggatgcttgatgtatttgcagatgagttgcattttctatcattattaaaactagttacgtgattgcctcatncnaaaaaaaaaaataaaa

SEQ ID NO: 247801 - DNA, 197 bp, Gossypium hirsutum
  unsure (1)..(197): unsure at all n locations
ggccgacccacgcgaccgctgatccctagcncctagggctagnaaacttgactgaaacaagtaatgctaggagtggatggagggatattacagcgatggggggacaattttgaaatttaacacttatgattggattgctatggtatgttgatagaggtggtgagtcgtttaaaaaaaaaaaaaaaaaacagaacgag

SEQ ID NO: 247802 - DNA, 129 bp, Gossypium hirsutum
aaacatataagctatgcagagcagaatgaattgcttaatttcgtgtttgcttttcttacctgagggtgatttatgaagttgactaaagaacttgtctcattccttccctcgcttgtttgtcataacatg

SEQ ID NO: 247803 - DNA, 308 bp, Gossypium hirsutum
aaaacttcttttcttgcattaagttttacctgatcatcgtgtggaaggaagtatggctgggtagtaaactagtgcgtgatcccatctacttatatatttactatactttctagcagtcctcatacatctgttatcaatacgatcatcaacctagagtcagaacctatacgatccggtacgctgggagaagcctaaccacgttaacatcactgattagaagccgagctagttgatccactatgctgggaaaagactagacacgttgagataatctgcataagctcccttcttggatttgctaccccaag

SEQ ID NO: 247804 - DNA, 278 bp, Gossypium hirsutum
  unsure (1)..(278): unsure at all n locations
gcgggaaaaacactggctangatgnccatttttttatattgaaggtcagcttttatgacaggaggttttcttcgttgaatgtaaagcacgagcattcgatccgggacaaatactcggatcaggaagataacacgcgagcttcgtgaggttcagacgcctgaaacaggtggtgaaaggaaaagaacaacgggggaactgcaccattgtcctgatgccacaagaagcgcgcgatgccaacggcgatgatcggcagtggaccgagacagagggaagggtta

SEQ ID NO: 247805 - DNA, 345 bp, Gossypium hirsutum
  unsure (1)..(345): unsure at all n locations
cagaaangaaaaggacaacaganggcncngctgaaacagctngggctggagctgcataagaggcgggatnatatatgctttggagtcatgtgagaagctgcccattgtgatattgagagctgagcttgaccatttggcttccctagcagttttaaaacagttaaatgacatcttaagtgcaaggtgcatatttggctttctattctagtgttttggattctctggcggttgaattgaaagcatcaaaggactactctaagttatatgcaggcattgcaatacttatgtattaaattacatattgaatcaatgtttatgtattaaatttaaattcattaattttta

SEQ ID NO: 247806 - DNA, 230 bp, Gossypium hirsutum
tcgaagagctcaccatttctattattcaggcttttatttattttaatctcataaactctcagggtaaggggtagagtaacatttattggttgcgagtatttcgtaacatctgttgagaggaatgatggactttgctttgttaatggggctggctaattattgtggagttctgatatttcatgtaatacgaacatatactgatttcttgtgtggatgaacggtttacaacc

SEQ ID NO: 247807 - DNA, 298 bp, Gossypium hirsutum
atgtgtggattatttggtggaggtaatataatcttaggaagggtgtctgtgtttgtaacgaggctgttggtgctaccacaccctttttactgccgtatttgcttacttcatgactttcaagagagaagcttgggtgacttatgctgctcttgtgactgaagttgccggggttgtcattgctagtgggggtgaaccagagtattactggggtggattcaatatgtgcttaagtgcaactgatggaagggcctttaaatatgttctttaggggatttctggtttgtgttgaaggagaaaa

SEQ ID NO: 247808 - DNA, 195 bp, Gossypium hirsutum
  unsure (1)..(195): unsure at all n locations
cgcgacggnngggacggcggcggacgagagcgggnnagcgaacgagggcagcaaagaaaaccagagcgcgangacnngccnaagcnccgcgcaaggaaaagcagacgcgccggcgaaggagnngcgcgaaacagnggcggggaggaaagagacaaaacccaaaagggggggggagatnncgcaacaaacacaaac

SEQ ID NO: 247809 - DNA, 287 bp, Gossypium hirsutum
ccttcccctctaaaaggaagtccactcttccgaggcacctctactacaaacaaaacaaaacctcaaaatttgtcttaaagcttttccaataccttgttcccctcctaatcttggaattggccttcggggtcccttcctataccaaaccaccacttttattttaaccattaaaattccccaaaaaaaaatttgaccatttttaccaatatgataatcctaattaaaatttgtttggaattttcacatactgcaggggggtaaatggttggatatttttatttaaaaca

SEQ ID NO: 247810 - DNA, 362 bp, Gossypium hirsutum
acgcgtccggagaaaagcaaaacaccaattcaattagctaagttaagtaacaaaggcgtacgctcccaatataggggggtagatacatgaaaaacagggatttacgcaacagcagctgcgaaaggtgcaggtggaggcaaagaagagaaagggcttttcgaatggaatcttgggaacttgcagaaggaagagcagtggtatgaaactgaccctatccacaagaaagtggaagaaaagaatggcggtggcagtgggagaggaactaccaggggacgcaagaactctgtgtcaatccctcagaagaagaaggacaatggctggctttgggcgttggaggggctttgaagaaatgaaagaaacta

SEQ ID NO: 247811 - DNA, 222 bp, Gossypium hirsutum
  unsure (1)..(222): unsure at all n locations
gaaagaaattgatgacagcgtggacgncggaagggaaaaaagggcgacgagcgccggaaagacgcgggaggacgggaagaggaccaagctacgacgcgagcagcgagggggggtcaacaaggggagcgaagcaaacacagggcgcggtacaacgcgggactggaaaaccctgcggacccaaataagcgcgtggagcacaaccacttaagcagcaggggaaaa

SEQ ID NO: 247812 - DNA, 432 bp, Gossypium hirsutum
ggtttagatgatagttcgtttgagacatgttttattgatgaggctggaaccgtacaaaatgcgggattctaagtatgggtacatgctctatacatattgaactgtgattcatccaacccttttttcttcacacagatatgttttctgtatcttcaagattgatttcttgtggcaggatgagaaactcataatcttaatcggactagtcttttgaagggttcttaacagaatttgggttgtgtgccattaaccattcataacacagtttagactatttgaataatatgagttgtgaaccaggaacagatgctgatttgcggatcaaaacatattcacttccttctatttttggtttggggtttggaaaccctttctaataaaatcttgctgcacgactaaataaattaataattcagaaaagaagcaaaagtt

SEQ ID NO: 247813 - DNA, 198 bp, Gossypium hirsutum
gcgaaaacagaccagcaaagggaacgacggttaggtttatctaggatcactggacaaattccaaaataatgggggggattgattgtaggggcgtggccacaacaaaggacatggttggactatttactagattcctacaagatatatttacccgagtaggcaaatagttccaagaaattattcagcatgtaattataa

SEQ ID NO: 247814 - DNA, 233 bp, Gossypium hirsutum
tcggttcttagactagtacggaagcaaagttagtttaggagaaacaatgagtaggagttaggggatagatgtgaagttgatgaatgaggctgtttttaaaattagtaactgtggaggataagagtggagagctttacagaggaagcatggttaagtgcgaggataactggaattgatagctcgagataattaacttcactggtaaagatgggaaggtttcatagattgagcat

SEQ ID NO: 247815 - DNA, 378 bp, Gossypium hirsutum
acgtgatgatgttggacaagcaaggcaattgatttggtataagttcagggacttttggattataaggagaattagacatgtggttgctccttcagaagtgaaaaagtgtgctttagatgctagaaaagaaaatttacgatgaggaatgtctgaagattgattacagcgaaaagtatactttgaataagcagttattcgaatcaatatcaaagtctctcaatgaagctgaaacgaataaagagattgatgacatggatgcaaagtatactctgaataagctgttatctaggttcaacataatctgcaccatctacaatttatgttttttggattcattcggttggaggtgttgagtagtatatgtatgatgcatttagt

SEQ ID NO: 247816 - DNA, 428 bp, Gossypium hirsutum
ccgggccgacccacgcgaccggaaagagatgaggttgctaactcacatcatgtatgaccgccaatacactcataggcggcgtaacgcaggtggctttctcctactcaagcatttgaaggtggacgaaagtgagtggagtaagcaatgtcgaaatcaaccacgatttcctcaagaatatatctcccaagatcgattggaaagcgtaatccgatgctgccagaactatgggctacgacgagctttctgagcaggcacctgatccgtcggtgctagagtccgacctggacttcttgacgatatttcaccatgccctcttggagcttcatcttgaggaaggagctcttgtttgtcccgagactggcaggaagtatcccgttaataagggaatcccccaatatgcttcttgcatgaagaatgaggttaaggga

SEQ ID NO: 247817 - DNA, 349 bp, Gossypium hirsutum
acgcgtacgcagaaaggtagccaactctatcatctagaaatataatttcactaataggtgttcgacttactcaaggaagcatggaacaagttcaattcagaggaacctttctgaatttgaatttgtgtagaagttcatcatttggcaagctatgccttgggagttgaatgcataactgttccagcaactgtatcagtatctgttgctgttgttgatacattataccagctggtataacggaacatatgataccagcttcaaaagttttgtgaggaaagtgaacggtgaagataactcttcttttgttcagaattgctggacaattaatcttcaatccaactggatgcac

SEQ ID NO: 247818 - DNA, 394 bp, Gossypium hirsutum
ggacgacccacgcgtacgggtaatgggagcagaacgtgatactcatatagagctatcgcctgccatagatgcgaagctggaggcggatccatcacgagtgtattgaccacacacagttcatctatacggattatttggtctaatattacattcacatttcctcttttatcattcaacattacaaaaaagaagccggcacttttggttttccacataagattttcaggaaatgtaatgaaaattttaacttctatagcggaaagtgggaggcgaaaaggggtcaaataaaaagaaaaaaaaaggagggtgagaaataaaaggaaacaaagagaaaaatagggggcgggggaaggggggggctttagtgggggggggcgtgaaaatggaaaggaaa

SEQ ID NO: 247819 - DNA, 236 bp, Gossypium hirsutum
caaatatgaaaaaatggaaaccaggcatagcctaaagaaacgggaggggagataagaaggggggatgccagagggggggcagagctggaacgaaccatgggaggagatacaacagatgagggtgaggagaacaaatatgcaagggaagaggttggcaggaacaacaaaggaatgctgaccaaaaagggacgggacacatgaggacgaaaggcgcaattgaacgcactaacaaaggc

SEQ ID NO: 247820 - DNA, 352 bp, Gossypium hirsutum
  unsure (1)..(352): unsure at all n locations
ccggnccggaanacccgggacgggccacgcgaccgggcagacnaagaacaancgggcgcccagggcagcggacaaaagaaaggcgcggaaaaggggggagctcgacgagaagaaggggacagcaacgcagatcaaaaccacccaagagggcaggacgcaaaacacaagggcccagaacagagccggggggggcaactcgacaactaaaggaagggtcatagatacgggcgacgcccactgacaaggaggaaagcaaagacaaagggcaagcgataggacgccgggggcgagcaacatgaaaattgccaaggcagggggagacagggaaaaagagcggagccccaacaaaaag

SEQ ID NO: 247821 - DNA, 237 bp, Gossypium hirsutum
atggggtagaataatgtcaggctaagtgacgagtgaaggtcaaggggaagctacccgcaacttaagcacctaaacttgagttccatttataaggacgaaagaccggaagcgtaagctcaggatcgaggcttggttggcttcaggaagaccagcgcgccatcgtacagtttagcgcacgtgagaactatcaccgggtcactaaagataccgtacaagagaggtcgttacgctcacttt

SEQ ID NO: 247822 - DNA, 173 bp, Gossypium hirsutum
ttttggcttagatggtgatcttgtgtaagcgcacaattttgcatttaaagcccaaaagatcatgttattgttggccttctagctcggctctgctaaaggaaatttcagatgtgtttgtggcatacacaatgtaataggggtatcatattcaaaaggcatacattttggtttta

SEQ ID NO: 247823 - DNA, 342 bp, Gossypium hirsutum
tattttagcaagttaacaagggtcgatgatttcttatctttgggactaggcgccagtttatgcattcagccgctgctggtttataatttaaacgccgttgtctgcaacattatttgtttcccattttgctctatagtagacgcagaaggcatccttgtcctttttcctggccaacgtcttttgagtttgacttaagccaaatcattaaaaaaaacttacattattacagcacttgttgagatttgtcgaaaacccaaaataagcatattctaaatgcaccttgactttgccaatgcgttggccatccatttgatttgcttaatacaaaacaaaagctcacat

SEQ ID NO: 247824 - DNA, 422 bp, Gossypium hirsutum
ggcttttgttcagtcattttgggttatttgttcagtttggcttgtttcgggtttgttgactagtgttgttaaattggatttaagttcgaagatctaattaaatctatggaactgagctctttctgtgcgcaagggctctattgatattacttaaagggaaaatggcagttttaggtccattttttttatgcatatgacggaggcaagtaactaagttcagatatttgataagctttctggattttagggcaaactgaagatgcgacaaggtttcatagttcgaaagaactgtggtttgccttttttttccccaatgattttggtcctgaaatgactattgagttaccgcagcttgtaatatataatatagatgcatacacgtgtgtgtgtgtgtctgtgtgtgaatgccatattcttttcct

SEQ ID NO: 247825 - DNA, 349 bp, Gossypium hirsutum
agaatggctcccctaagtagaaaaaacggaattttagaagtacaatcggcaaccgcattgggaagccgagacacagcagagagaactttatcttcagctctcaagagcaaagaggaaatggagaaaaaatttgctgacgcgatgaaggagatggaactgctaaaagagaaactagcaggtatagaacttgcacatgaagaagccaacaacttatttaacatagtccactcggacaatgtaagacttgaacacgatgtggctatccttaaggctggtcttgacgaatctcaaaaggagcttcactcaacgagaagaggcctttgatggagagagggccaagagcatttcc

SEQ ID NO: 247826 - DNA, 190 bp, Gossypium hirsutum
gacccacgcgaccgggaaaacgcgcaaaaagaacgccgcccactcaaaacaaaacagaagagaaactaccaaggggcccaaagccgagaagaagcctgctgagaagaaaccggccgaggagaaaaagactaccgccgctgagaaatcccctgccgagaagaagccgaaggccggtaagaagcttccaaag

SEQ ID NO: 247827 - DNA, 217 bp, Gossypium hirsutum
cagcgtcgggattgcctgtataaactcccattaagcagccttacacaccggtctgttgatgagtgcgaccataaggtctcggatattgaaaggagcgacagtttcctgcatctactctgcctgaggaaccagagatagggggaatgtcatggtgggcaaaagtcatatgacagataaattttggagaccttccatgtgaacctatcaaaatctaaac

SEQ ID NO: 247828 - DNA, 213 bp, Gossypium hirsutum
caaaagagagagaagttgaagtgcaggagtacaactaaggggggatggaagaggattagatttgtatatcaccagggatacttacgtctgcgccggaagcgttggcggctgtagaaacgggaactgtccttgcgccggtgtcagaagcacgaatgatgacgggtccaaatgattggagaccgatgatatgagggagcgggtaaatggcaagtc

SEQ ID NO: 247829 - DNA, 322 bp, Gossypium hirsutum
cacgggatacaacactaatccttatgccgaattcaatatcctcggagaccctatcgcaggggaggaggtgtttcattcagggataccggttactcttgcatctttagatgcaacaaacaccatccctataaccgaggagtttttcaaggcatttgaacagagccattggacttacgaagcacaatattgctataaatccttgaaaatggctcgggatacttggttagaagaccgattttatacgagctatttcatgtgggattcgttcacatcaaggggtgcagtggcgatcaagcgtaattatgggaaaaacaatggggaa

SEQ ID NO: 247830 - DNA, 197 bp, Gossypium hirsutum
gtattcaaatgttgtaagtgacatggtttattttatcaatcgagcatgcattaattctggggggggaatctatgttttctatgtactcacgaatgatgcgaattttttaaatgaatccttctctattctgcactgatcatatatgctttgaaggaagaaaattgtctaaatttggaagaatctgggaaacgagaatt

SEQ ID NO: 247831 - DNA, 317 bp, Gossypium hirsutum
gaaagaagcaggagaggaccggggagctgtaacgaaagagcagcctacgccagaggcgcgggagagctagagcggaaggaggctgccgatgacagccccgatgagaaaaccaagtgccatacatcaggaaatactgagcttaagggagagaagattattgataaagaggagtgcgaaccaagggcaaacgtctcagcgtatggcgacgacgccaatctaaaaggagacaaatcatcaacttgcgcagaagatttagaaccgagacctaacggaagggcttacgggggcgaagaagctggtcctaaaggacagaaaga

SEQ ID NO: 247832 - DNA, 351 bp, Gossypium hirsutum
ggtgcttagagttgtgcactataccgaatacctatccaaaaaaaagggtttcctttctcttgtttggggatatacaactttacttgttgattatggttgtaggagatatattaggattaaaaaacaatgaacataggaggagaaaggagtgaagatacaaaattaagagaagagctgatcctcattcccctctacttcattagttactatatataatatcatagtgggtagaatagaagacatgagaaagagcgagaattgagaaaataaactaatgggtttttaatagaatggaaaaggagagtattttatttgtgctttatagcaccaaatgattagtttttgcctttt

SEQ ID NO: 247833 - DNA, 125 bp, Gossypium hirsutum
cccgccaaagtccatgccagtaggtgaaaactctctgcaaatgtaataactccattcttgtgtacactacacatagtaaaagaagcaaattgccattagtgatcaaaattaacggggggggtgtt

SEQ ID NO: 247834 - DNA, 423 bp, Gossypium hirsutum
aacgtccaagcgaccggacattagatgggagacataatatatacatagtactcttcagtggagcgggagaggataccaattctaggatgggtaatccagcaaccatacatcagatcgtaattggagcggtaaataagcaggagggtgcctgtctaaccatgccatatatcagagaaatggaaataggggggggtcttatgaacaaacaggcacaggtcacagcgatggaacgaatggcgggaattatataaaaaacaggctatgcaaaggggggaaacatgctcgcaagaaatgaagttatgtagtactacgccaaatctgataaacaaacttttgatactgggaaaataaggttggtcgagggaacatgagaaatgatgaaatgaaaacgaatgggagaaactggggaggccaagggaaaaa

SEQ ID NO: 247835 - DNA, 275 bp, Gossypium hirsutum
gcaaagacatgggtccacagagacgaaatgttatgtttgactaggactggcaccaacaggttatcactgacgaaaggactcagtgacccgcaatcactaactaatactaatctaatacaactaatactaatgtggtcctaagaaaaaaattgtcgaaaactgtaatactaacttagaatgaaggacacatgaatataggctgatataataaaaagaacagtacatgctgtatacttgccccggaagcactgctacagaatgctgtacgcaattga

SEQ ID NO: 247836 - DNA, 203 bp, Gossypium hirsutum
gttgaaaccaaaacaactgatttggtaagaagtaaaaaaaaaaaatttggacgtcttctgttccttttgtatgttgtaacgtgaaagggttgaatttgaattgaatgtatctatctaatgggccctctaagcaacacatagagttggtcttatcagtatatgttacggttctatctgcgctcataaaaaatttatatatatat

SEQ ID NO: 247837 - DNA, 216 bp, Gossypium hirsutum
gagcagaggaattaagaagggtttgttagccgatgaatcgagcgcatttttggggggtatctttggatggtgtgtggatcaaaaatagtatcatggaggggcaatgttggcagtcttaattataccattaaagtaaataaggttgttgaagaaggattaacaaggggggaagggacaataaattgtatagttatttataatctatttattttaagg

SEQ ID NO: 247838 - DNA, 120 bp, Gossypium hirsutum
ataatatgacctcaaaatgggcaaaattgaatgtattgggagctgagaatcttcatttcagggcaattaagtattcacgtgttacgccgtacaaataaacagataaggtaataaaaagaa

SEQ ID NO: 247839 - DNA, 200 bp, Gossypium hirsutum
aaaaggcagctaatcggagctctaacattgttggggggaactggaaacaccgagcaactaagctggaaacaggctgttattgcagcctcttctggaatggtcagccaacaaaatattttgcgtgtgctctttgatgtcaggtgaagcaatcagggtttggatcgctcataattcgatacggcattttcatttgattaaat

SEQ ID NO: 247840 - DNA, 395 bp, Gossypium hirsutum
gacgccaggcagaaatacacactggtcaaaaggacccaccgaggctatggtgaccaacgtgtgtgccatgctacttcatggattccggggtatagtccctcagctgcaatatctgaaatacaaccttccccatgtacaacatcctccgaagaaattacaacatcgcgatttccagatatgagtgcacttgttggagcacaaaagccagcatccatgtccattccgcagacagatataagtatgcctgaggcttctgaaatgccggaaatggtccaagaaagcattgttgatataccagcagaaaattacgtggaatctgaaactgggaatggtggatttattgatccctctacattagttgtaaatggttcaattcccttccaacttgatgacct

SEQ ID NO: 247841 - DNA, 386 bp, Gossypium hirsutum
gcgcacttcttggtgttcttcaatcgactaagacttcaaccatagttggctgtacataataatcgagcatgtttattatttggttcggatagcttgggttcaacatgatatttgtcaccctatagtatagcagcaaaaagaatggcagagattttgggatacatatggacaccattggagtttctccagattcagcaacaacaaaaagaaaggtatttgagcagcctaggttcttgaaaattcctttcctatgtagtaagtttgcatcaaatacccaaatttagagccctatctgaatcatcgtagccagccatagttatagctttgagttgctgtaaattctactattactataagtggagttgaaatgctgaaaggcttgtcga

SEQ ID NO: 247842 - DNA, 261 bp, Gossypium hirsutum
gatttagataacgaggactcgatcctgaatgtaaaaactgacgctcgcatgcgtccggagtcttatgtttactacatgataatccatattaactataatgacaagcttgctgacacgcttgtattcgacgagaaggtgaatgtcgaaacgtacatgaattaagacctatcgttgctatatgacgcatcagtatgcccaaatggagcattttgcggacgatctcatggactttgttgctgactgcatccctattatcacagc

SEQ ID NO: 247843 - DNA, 385 bp, Gossypium hirsutum
  unsure (1)..(385): unsure at all n locations
gtgttactgaacctggggattttttagactaaagctgttccaagctgtctgactcagtctccactttagcctttgatcaattcaagcttgttcagatatgaacaagctattaagatcgatgacagcttttggctcctatacgaacagcagtcacttaagacattgcttagtgtttcttttggtgtgtggatttttcagacaattgctgcttcttcataaatgtacgccattgtgctcttttatcnnttttttcgggaaatgcttctagacaagatcggattcaaaaaggttgaagttgtcacttcatatttgtcgggaactataactgggtttaatagaccgatccttgcatactacaaatgaccaattttgatagtttgatttt

SEQ ID NO: 247844 - DNA, 292 bp, Gossypium hirsutum
aatcgccatttaactgctgccgaacgaggttatggcatttcgattgactcacctactggtgcattccgaagacctgctggagctgcggatggatcggatcaaaccatatccaacgcactggcactcctagctggctgaacatctcctggacttactccagaccgtggcctccaagtaaaagttagtaattctacaatgctttctgtttacagactcagggatctcagccatatatcggcccatctacctgctgatgtacaacgtatctacctcacagatggaagctttcgaa

SEQ ID NO: 247845 - DNA, 249 bp, Gossypium hirsutum
gttgcactggaactgggcatttgatgtgctgtcgctacatttagtgaagatgtaccactgcttgcacccttaacatcatatgatgcatattgtgaacgccaaggagacctcattgcgatggctattgtcattggacacaccaatcataacagagagtgtattgatcgtacattcaagcgaccatgatgcattatcattattggtacacatgaacacatcgctgccaagatgggtacaatggctgaacat

SEQ ID NO: 247846 - DNA, 314 bp, Gossypium hirsutum
  unsure (1)..(314): unsure at all n locations
cttcgacattgatgaattcagctgccgcccttcctgccgcacttatgatgtacttgcttgccaaattaatctcacccttgtcattgtaattttgcttgtaagttgtggtggctttttggtttagaatgttgcttattttttgacctgtcccgcctctttgttcgttctatgtaactttgttcaagactgtatttacattttccgggtgggttctcaaaactcactagtgaagctaatttgcttgattgatcatggcagttttcgncctttacaatccttcgttgaaaagggcgaggcaaaaatctgttaatcgg

SEQ ID NO: 247847 - DNA, 161 bp, Gossypium hirsutum
  unsure (1)..(161): unsure at all n locations
gaaattgcaagatattctccctgttcnttttttgtacaacagccccngaaacgagttcggggattttttaattgaaaaacaattccaaaatcaagcacctgctgccggtcctgaatttgatatcaagcatgcagttgctgctgcggttacccttaaaggtg

SEQ ID NO: 247848 - DNA, 146 bp, Gossypium hirsutum
gccgcacagctgacatggttactctagattttaaagagaccctccgaactggcttgcaggccgtgaatagtcgaatagttctacaaaggtgcctactatgcatcaggcacaataacttggacttggttgcaagcttaagcgtatga

SEQ ID NO: 247849 - DNA, 361 bp, Gossypium hirsutum
gctcttgcacacattgcaagacgggcattttttaagagacccttctgcgatgactttttaaggtttcgttttgagaagtttgaagttggtatctggtcttcatgaaacatgagaaccttggaatgagtcgtcgattttctgatcggagacatgaaacaaaatttgcttttttgctgggtaattataacttgttttcttttgctttctgttaaacttgcttagctgcacaagttttcgactttcggtgtgcgtctgtaccctgtatgttttcaagtcatctttgtttacatgtgaaattaaactagaagagttccaacgttcgaccatttgctctatgcgcaatgacttatcatgattcata

SEQ ID NO: 247850 - DNA, 105 bp, Gossypium hirsutum
agaaaccatcaaaaattggaggtttcctattcctattaattctgcttttgcctgccagaggagaaacaaaagagtttagatatagagagtttatgtcaattgctg

SEQ ID NO: 247851 - DNA, 138 bp, Gossypium hirsutum
aaccgggtgagttccaggcgtgcgaaaattagagataattttttctccaaatttacctcgccttgttttcggaaatggtggcggtgtgattggcctgtatgtacacatgtagtgtaatgtcataggtcatgacaggga

SEQ ID NO: 247852 - DNA, 138 bp, Gossypium hirsutum
actcttaatccatatcttttctacttcttataactatcaccgactgcacttcctttacgggggcgagtcttttctcatacctcgatatgaaagctatcgcactagaaaaataccattatgtcctctacttcattgttc

SEQ ID NO: 247853 - DNA, 211 bp, Gossypium hirsutum
  unsure (1)..(211): unsure at all n locations
atcaactctacctctcttacctaactctntaatttccnnctccaaatttcttggttttcattgcttntaatcaaatccccgaaaattattgcttctctagaacttacagaatgagcagaaaagggcactccaataacaagttggtgagattcatcacaattcctttcagagccttgggcaaagctagggatctntatgttaaaagcatgac

SEQ ID NO: 247854 - DNA, 250 bp, Gossypium hirsutum
  unsure (1)..(250): unsure at all n locations
aaggaggagaaatccatggctggcccgttctttctatatttttataacaatggtgaataacccanacagagaacgaaatgatgcatagaaggctaaagggattcggaggaagaaagaagtcacctctgccattngattgctnntttgttttctctatgcgtatatntcgtttgtccaaaatacaatgatntttttgaggcctttatagctgaaaagaaagaaaataaaaatacaattttcattcctttct

SEQ ID NO: 247855 - DNA, 271 bp, Gossypium hirsutum
  unsure (1)..(271): unsure at all n locations
ctcaaccagcattntataaccaagagtacagaaccaggaatattagtggtcttggaaattattctgttggccaaggaacttttactgattctgcaatgggtaatatcaataatttgcaacagttaaccagtctgaaaattcatgtgaatagtggtggtgatcttggtggtgatattggaatgaagactggaacatgccagccactaaaacagttaaactcagaaaatnttggaactcgtggagctggaatcaagattaggacccgtggatc

SEQ ID NO: 247856 - DNA, 396 bp, Gossypium hirsutum
gtgattttctggtgtcgtgaggtattaggagagtcggggatcacaatttataaagacagggctatttccgtcgtctatagagcatgacactgacactcttctaatcaaatgagacctcatcaacaagtccacggggctatttccatggtctaaagagcgtgatactcttgtaatcaaatgagacatcatcagcaagctcacttcaatcaagcatgatgaaccataattactttgaatgtaacacccctccctgtgattggtattttatcattttgttcaatatttttttatagttattgagagtcttttctgtctcgatgacaatccggttttcggtcagaatctaggattggctctatgcttcttgctaaagctgatttccttgctagagttcat

SEQ ID NO: 247857 - DNA, 361 bp, Gossypium hirsutum
  unsure (1)..(361): unsure at all n locations
gattgtgcaaggagcgctaaagccacttgagttgaatctggtacctgtaccatagtggaaagaaataaagaaatagtagtggagggggctgtttttctgaggcctcatcttgctttagcagccgaatgaataactcgatccgctatttgctgttttgattcattcttgattttgtatctatcatcattggtcaattttccaactgtctttgaggtgagtgttgggcatttatttgtttcacaatagggagagaatgggctgttgtatcttcttctgctcgagatatggggggctcccagtcgtctcgaatgcactggctttcaattattatttattttaattttgggtggggaaaaannaa

SEQ ID NO: 247858 - DNA, 222 bp, Gossypium hirsutum
aaactggactgtttacaacccaaaattaatctaatcatcagcccaaatacccgcagcccgagcacaaagaatcagaggcccgagccttagctactgctggccgccgctcctgcctctgcctagctccagcgccgcacgagccactccccacgcacgtagcagtactcacaccagggaccacgccgtacgcacgcccgcgcacatgcgaacctgctggagatc

SEQ ID NO: 247859 - DNA, 411 bp, Gossypium hirsutum
aaagcagttgtgcattagtgcaatcagtttagctatcaaaggggattttggggtcccggtcaccccatgctgtaaattttgttggagagtctgctctaggttcctgtgtgctttgcttgcgtttttgtctttattctatatagtgcggaattgccgacataccaagtccagccggcttctagctatgccaggatggccgatgagagggaaattggaagttttcaaacatacattttcgatgatcatcatggttggcatatcatatggattatggaatataaaaatggagacgggagcatttggacggtgatttcaggtgataaaatctatgaaatttttttcatatgttaaatttttattttattatgaatgtaagcatggttgttgaatcgagtcactttttgttgcagt

SEQ ID NO: 247860 - DNA, 110 bp, Gossypium hirsutum
gccacgcgtacggtgaagatcaaaatgatgcatctttgttatagataaaatatcaggagggatttggatcttaagagcatgaatgcaagctatatcgaaatacgatctcc

SEQ ID NO: 247861 - DNA, 422 bp, Gossypium hirsutum
gccgatctcgtcgttcagtacttgaagctttgtgaaaaataccctgtcccatggaggatgatccggtctcacgttcacaaaatgctaggagactggtttagggttcaaccgcaggttagagaggaactaaacgcgcagtccaggctaacgttagaatttctttacggtctggtggatcagttacgagaattgggtgtacgagttctacttcatcaaaaggatgatgcttcggcaaccggaaacttggccgaggtaatcggtattgattacccggaccaatgtgaattgagtcgtaggtgcttagaataggggaaaatcagacgccaatgaatttttgagctaaaaagaaagaatacccttatgattttttttatgtgtaagattataaatttacacttcttacaatttcgtcccttcattca

SEQ ID NO: 247862 - DNA, 433 bp, Gossypium hirsutum
aaaaaaaaaaaaaaaaaaaaaaaaatttaattaaaaaaaaaaaaaaaaaaaaaaaaaaaagggcaaatctttatataaaaaatccaaggcttacaaacacatacatacaaaaaaaaaatatcttttatataaaccccctaattttttccacttcccgacttttaacactctttttgcctcccaaatccctcccctttcccaacttaatcccttctccttactttccccctttcaacatattccccactccccatttttcccaccccgttctccctacccaacagtattccaccctttattccattttgacccccccctctttttccacatttaccccaccccataatgctccttacacttaccccccccccttacatttcctataaccctttccctcaattgctttcttttttttcccttccttttttccccc

SEQ ID NO: 247863 - DNA, 387 bp, Gossypium hirsutum
tccacgcgtccgaaaaaaatgtaaaataggtggaagggaagggatctaaccgaacattcggtgttctttgatttgttttatgcatttaggcgcagtaaccccatttgtcctgggacgttccatttgttggcttattatttttaggccaaaggtgtctaaagctctaaaaaaatccattctaaattgaattcttgaaggtcaaaattttaataaattaagtcatttaatccttaaagttaaaaggttaactattaaagagtaacatagctattttgaggttgttttagtaatgtaacatgttaaaattgtgtaatgtgtcgaaatatgatattttttatttaaaattattaaagatcataaaaataccaaaattaaaatatatttatt

SEQ ID NO: 247864 - DNA, 361 bp, Gossypium hirsutum
  unsure (1)..(361): unsure at all n locations
aaattatggggcttcaaaatgatttgcaaaagctaaaataattggtgttgggagttaatagatgcggtgcaagtttagcaattgagatctgagtttgtatttattttttatttcacaaacttttttgtagtttttgaggcttctgcttagacaattagaaatttaccccaaagactagataatgtataagctatccttgaaataaagcctgataaaaagtgttactatagccattttnaaaaaaaaaaaanaaaaaaaaaaaaaaaaaaaaaaaaaaaaaaaaaaaaaaaaaaaaaaaaaaaaaaaaaaaaaaaaaaaaaaaaaaaaaaaaaaaaaaaaaaaaaggggcggccgttttaaa

SEQ ID NO: 247865 - DNA, 401 bp, Gossypium hirsutum
gaagaatcaaatctatcagatccccaagatggaagatttttggaagcgagcgaaatcattcgctgaagaagcagctaagagatcgcaaaccctaacttcgcccaacaaattggccgatcttgtcgctgaaaccgccaagaagtccaaggaacttgctgtcgaagccaccaagaaagccgatgagctcaaaactgccgctctcaaacaagccgaccaaatccaaatccaatccatctctaagtccatttccgattttatccctcctcaactctcctccctctccatttcctctcccgcctctacttcttccgatcctcctcctatccccgactcggagctccgcaagttcggactcaccgatgatttgagagattttgtcaaaagctttacttcaactactt

SEQ ID NO: 247866 - DNA, 385 bp, Gossypium hirsutum
agagttcagaatggtaactaagctgcaaaggagaacagcttctcgcagaaagcttcagtgtcttccaactctctccaacaccaaatctgtaatgcaaatatacatttactctttattattttgagatcccttttatttctttatccagaaaaaaacttaaaacatttttcttttgttttggttttcaaaggttaaaaggagttccatagtcctaaatgttcttctccaatgtcacaagctcaaagtcaagctggaagaaatacacagagagtaccaaaatctgatgactatcagaaaccaatacttcactctattgaaacatatacaagtctcaaaggaagtgaaggtggagaaagttggagaagaatttgtagtcaaagtgagt

SEQ ID NO: 247867 - DNA, 242 bp, Gossypium hirsutum
tattctataaatcctttatttcttaacagcacctcccattaaaccggaatgtccttcacactcattcggacgcccatttcccactccaaatcaactcaatctataaattattttgagatcccttttatttctctatccataataatacttacaacattcttcaatgcttttggttctcaaaattaatctcctaatcctccctcccctaatatttttgcatctactacacacacaaattcaat

SEQ ID NO: 247868 - DNA, 409 bp, Gossypium hirsutum
aaatgctccccaatataatgccgcgtctggtggggggctccctatgtggataccgcagccgagagcaattggggggccacagatgcatccaatgcgtgaggcaccacctgctatgcaaaaggcacctgtccaacaatgcatcactatgaatcgaccaccacacaagtctccaacagtgggcatgaacccaaataatatgcctgtgcccactgcagctgattctcaatatactgctgcatcacgtcctcgaccatgagtgtcacttcctgtatccaccaccttatatgcactatgatgcatgcacacttcacctttgcctgaaggaatctctacatcaccaccacctgataaagctccttcaccactttctgatgagccagacccacccagactgtaactctatgatgcc

SEQ ID NO: 247869 - DNA, 326 bp, Gossypium hirsutum
ctatcccgtcccttcccctcggaggctttttatacgactagaagttcccatcaaatttttaagttaatcacatcttctacatcccgcactgctcgttcataatccaagacctttttcaccataatttctcacaattcacattaacccttttcttccataactacccgaaccctacaacttcaagcataacacccccactctgccccttttgcctcatcaccatctttcgattgtcattatccaacataaaatatttctaccacgatttttgcgaagatggtatttcccctaaagttaaaaaaccgacgaagtcgaggaattttatc

SEQ ID NO: 247870 - DNA, 274 bp, Gossypium hirsutum
ccggaacggaagtgcccggccaggcgtcccgtatctttgggatggaattttcaaaatgcaaaattagtctccactttactgtattgaggctgtgggtattttggttcatggcgttggggcctgcatgttggctctaattctatatcctctatgtattggctattttaatgttttaatgaattaaagtttatgctttgtcaatcaaaaaaaaaaaaaaaaaaaaaaaaaaaaaaaaaaaaaaaaaaatgctggtgcaaaaaaatataaaacaaaa

SEQ ID NO: 247871 - DNA, 377 bp, Gossypium hirsutum
atcgatgccatggttatgtatcccatacattgaatattggtgcctctgtcgtaattcgagtcttgcatgtatggtagattgcaactattatagatgtcatgattcaaggccaccttcatttggcctaacttgagtaaattggatatttgtagctgtttttaagctgctttttttactagatagagaattttggttggacataagctgctgcttcttttttgtttggttcaaacttaggtatcggagttaacgaacagctttctcaaagagatggggggtagaatcaggggcttacctcagttaatgcttgcaatcccaacatctgcaattctttttttttatctccagactgccgctttctttgcacctaataaaaa

SEQ ID NO: 247872 - DNA, 237 bp, Gossypium hirsutum
attggattcagctggtttcaacaatatgatttagggttcttcagcaaattctatcaaacaagcaaattgcacttttgtttcaagtgtttcaagtgtttacaagtcgattgtgccaaacaaatcaaaagacaataatagtgagagaacaacatgagagcttttaaattaatttgaactggtgggaaactcgccattaactgaacttttggaagatactcatcttttttcagcattcta

SEQ ID NO: 247873 - DNA, 385 bp, Gossypium hirsutum
  unsure (1)..(385): unsure at all n locations
gtgtaattctcggagggactgatgacttaactgaggaagagtcaagtggtgataacatgagctatggcaggtcgcacgatgaggatttgcttcctagtaaggagttaaggagaagacagatcaaagtctctgaccctatcaaccggttatcattagaaaactcagtgagagacaaccttcaaacttgtgctgcccttcatggagagtcgtttaattctgccattgctaaaatacatccagcagcttttgcacagttgaagcaggcgctaaagatgccataagccagcattgatgttctcttttatcaactgaggtctttcttttccggctgattattttccatttttccaaagattgagaaaacatctangtgatattggaaggt

SEQ ID NO: 247874 - DNA, 384 bp, Gossypium hirsutum
  unsure (1)..(384): unsure at all n locations
gtctgcctctgttgacaccagatgatctcaaggagatgggtatatttgcagtcggccatcgaaggaagttgtacaatgcaatacagcggttaagaggcaatgattcttcttgaagacttttcagataagcagagtttgaagtatcacaagtgatgctgctatgccaactgttgtaattcgaggacaaggaaacgttattgctgcaaagcttaggtatgaattttgtgtttaatgctagtgttgttgttatgagctttatatcaaaaacttaaaccacaaatcacaatcttcattccaaaatcttttaagtagttcagagatctcattttcttagttntgcaaataaaaactatgtttatatatatatangtgtgtgtgcgtgtg

SEQ ID NO: 247875 - DNA, 375 bp, Gossypium hirsutum
  unsure (1)..(375): unsure at all n locations
ccacgcccgtaccgaaagaaaaagtagattttgggttctattcctttgtgtcatctcagaaagatagttcccggtcattgttggtgtctgaaagtttgtcagggatgggtggactatccagaagagttcntggtgatagaagaaaagaaaagcattctgaacatgtgaattatgttcagctttcggcttaatatcgagcgatggggccatctggccttgtcaagactagtggaagtgctaaagttggtgatcatcctgattatactgagagtggaagagcagtatgtgtagaggtagcacaagcagtgatgtaagcaatgaaagttcgtatagcagcttaagtagccgaatcaacagacctaataagacaaacga

SEQ ID NO: 247876 - DNA, 362 bp, Gossypium hirsutum
caactttcttgctttttggaaccttttttacacgaccaaaccaacatgttttggcatgaactcagatgctttgtggagagtccacttaccatggaaacttatgatgcagtagttgagtatagatagatggagtagcggcgcttagccgagttgcatattattttaactgtctacccactatatctctggcgttagagatcagttccttcagagcttgttatcctcgatagtctggtgatggctgcactatcagttgttaagccatcaggtaaaatggcacagcttagagattgaaggatttaatcaaattctgaagctaggatttaactgatgaaaagaaaaaagtgctcagtactatcaaa

SEQ ID NO: 247877 - DNA, 316 bp, Gossypium hirsutum
agagcatcaaatttaatagaagctgatcatcagtccattttttaaaaaaaaaaaaaaaagggagggaaaaaaaaaaaaaaaaaaaaaaaaaaaaaaaaaaaaaaaaaaaaaaaaaaaaaaaaaaaaaaaaaaaaaaaaaaaaaaaaaaaaaaaaaaaaaaaaaaaaaaaaaaaaaaaaaaaaaaaaaaaaaaagggggggccccttttaaagaaccaaattttccttccccgtgtttgaaaaatataactttttttttggggcccccaaatttaattaactggcccgggttttaaaaccgtggggaggggaaaaac

SEQ ID NO: 247878 - DNA, 394 bp, Gossypium hirsutum
aaaaaataagaaagacaaaggaccttccgtttgactcttccaacctccacgatccatttctagttcttcacgctgcgattttgttctagcctgagattatccgggtccatgcatccatccgatttagagattttagaacaaatccacagtgacgtatttctatcaggtatgaatctgagtttttccaaaatgttgtgaatggacgtgatattgtgtcgtgggcagctgttgatcacagtcgacccaatggtcaaagtgatgagcttattggatttgttactgcaagaatcgtaacggcaaaggatagtgagatagcagatttgctcaggtatgatccatcgaaggggcatcaaacattagtatatattctgacgctgggagtggtagatgctta

SEQ ID NO: 247879 - DNA, 286 bp, Gossypium hirsutum
cctgatcttaccaaagaagaacggattaagattagacggtttctggaatccttaactgaagaatagaatagaaaaagcaaacatgtaaattttgtttgaaataagcttgtatcctactgttatcttgtacaattactacaataaattgatggctttaataattgcccacaaaataccaccttcaaaaaaaaaaaaaaaaaaaaaaaaaaaaaaaaaaaaaaaaaaaaaaaaaaaaaaaaaaaaaaaaaaataaaaaaaaaaatataaaaaaaaaaaaaaataatgg

SEQ ID NO: 247880 - DNA, 261 bp, Gossypium hirsutum
gccaattttatttacataataccaaatttattgaactcgccaccacacttaccaatgggaggaatattccaatcgttgggttacctcttctacttttccattctaaataccacttataccttatcatcaacttcattaatcttccttatctaaatttttatctctctttttaatacaataacaaatcaaaaattcattacttatcctcttaatcattcaaatctatactcactaatacatacaacctctattttacaacca

SEQ ID NO: 247881 - DNA, 398 bp, Gossypium hirsutum
cgccagcctcggcctaaggatcttgtgaagtatgcggagagctgcatgtacaaccctgcctatcgaagctaccggtaaagttgtattgaagcttgtcttttggaaacaaaccccccgccctaaaccattccttctcatttcttgtctagcaattgactttggtcgtatttaatcttggaacatcagcccaagcaaggccattggtcatttttaatgtagttagtagcacaccatttttgacacttcaaaagaaccttatatttcaggttaaaacctttttaagtccataactacatgtttcctttttttcaagctacatttatctttcccaccaagggtgttggtgccttttacaagggtctatcagcaggactgctcatgcaagctacatacactac

SEQ ID NO: 247882 - DNA, 312 bp, Gossypium hirsutum
gattgtgcatggtttaacggtgcggctttttggcgtttgatgtttgacaatttgaagtaatgcttcttgctaattgtaattttttttattgtttctatgatatagtgaggcatctttttgttggtaacctattaaaaaaaaaaaaaaaaaaaaaaaaaaaaaaaaaaaaaaaaaaaaaaaaaaaaaaaaaaaaaaaaaaaaaaaaaaaaaaaaaaaaaaaaaaaaaaaaaaaaaaaaaaaaaaaaaagggggcggcccttttaaaggacccaattttacttccccgggcttgcaaggtattagttttttttt

SEQ ID NO: 247883 - DNA, 336 bp, Gossypium hirsutum
gaaaaaacaggtggagtttgcagggaagaagatgataagaacccaaagattgtggcactggctttgggttacattgagcagaaacacaaagggtatgttcaaggattgaatcagattctaagagatggatgggattgaagaaagcagtagctgtcaaatttttttggaacaatttgggttcacatggtttggggccaaccagtccattatttcatgttggaacgatatggacgaggcatgttaaaaatgggtgttatgtcttgttatatgatattgatatctccacctattaccaactgattctatagatagaatgcagatcatttcccttttttg

SEQ ID NO: 247884 - DNA, 252 bp, Gossypium hirsutum
agacccacgcttacatacacactttcttcatcattaactttatttagtctctatcactttcacatttaggggaggttaatatgatgagcaggctgggtccccattttttcaacaacccactatattttatactacactttcacagacgatcactttctctctggaacaaacaaccaccattcagagaaccatatcacatttccaaattccaactctttcacttactatcttttttgtcatagccatattcac

SEQ ID NO: 247885 - DNA, 374 bp, Gossypium hirsutum
gtctaatggacaccattggccaagatctataaagccggagttgtgaggcaagagcttgctaagttgaaaaaggaaaatgcatcttgaagtgattcagaagattttgagtattttgctaattttgtcttctagtattctgcatattagttttccgtatgtttttatctaagaaaggattaaaaagaatcaattgggggcactttctttagtagatgcaacatttgatttcggaggttaagcctgtcacagtttttagttcaattagttgaaccggccaattgattaaatcgattaatcgatggatttgatccgataatttaaaccatgctacgaaataaaactatgagatgacagaaaccctgagctccccccta

SEQ ID NO: 247886 - DNA, 286 bp, Gossypium hirsutum
  unsure (1)..(286): unsure at all n locations
ggccgaccacgcgaacggaaaaaanattatcaccttcnacatttcttataaaaatacaacattcatccatttacaagatttttttaaaaattattatgagccccaccaaccaaataattatatttctatactatttttcacttaaccatatttattttcctattctaatatataatttaaccccatattttaattcaatcaacaaaccaaatcttataaaaatctttttcttacactcatttacctattttatttaatcccccttatattaactctttcttccttt

SEQ ID NO: 247887 - DNA, 427 bp, Gossypium hirsutum
gagggatcctcctgaggagagggatccactgcggatattttatgaaacaatgtaccagcaaattccccatagtgaaatggcacaattctggatgatggagtctggtttgctccccttagcagaagcaaagaaagtcttcgaaaagaaacagaagaagattaagcagcaaaagctgagttccccaatgaaacctggttcagctgtaaagagtagtacaggatccgtcaccgttaagagaactcctatggtctccccaggttcttcgaataaaaagaaaacagattccaaggttgccccaaagcagactaagaaacgcaaggccgaagaaagcgaaagctctgatgatgattttgagaatactttggtcagtagaatgaagaaacagaaagcaaactaattttgatttccaccataactgattgtttct

SEQ ID NO: 247888 - DNA, 372 bp, Gossypium hirsutum
ggatggtacagagtcatctagctttgcttccttgtgtggaactggtacatctcccggcggcgatgactatcgagaccagccagctctttcgttctagccattctcgggatgtcgatggatatgatgcatgtttaaggactcctgcttgtatacgcaaatagccgtgtctgtatagtggtcactctaacttcaatagctacatgtgcagtagttctacaccggcttgactggacatgcctatgggttcatcaactgattcagctatcagcacataagcctttggtgagataggatattaccgattaggcattgattgattgatgcttcgaacatttgctcatgcataatagacaatggctcgcccaatggagc

SEQ ID NO: 247889 - DNA, 318 bp, Gossypium hirsutum
  unsure (1)..(318): unsure at all n locations
ggatgtcgaatgttgaagaagctaccgttaaactccaatagtgcaaaaggaaaaaggctcgtcattgtaggaagggaggaatggtggaatgatctanaatgggaggatgaattcactcgaattgcttttctcccctctttcaaatctcgtgatctatgaaattttggatattaatcaaggcttaaagccctcattgtatcatagcatacctcactataagttgtattttgcctatccctaaattacatgcagcttggttctttgttttacacaatgacttgttcacttacataaaataatgtgtttgaatttgagcgt

SEQ ID NO: 247890 - DNA, 256 bp, Gossypium hirsutum
gggccgacccaagcggacgattggaatcaaaactaattagtgtaaagtttttaaaacaaaaaacgatggaaggcgggcggtcgttttttatcatgagtcgcatcactataatgcgtcccgacatatgcagttaggcataccagaagagaaagatctgcgttaattgtcagcctgacgtgactgataaacctgccagggcggaacaaaaaggcagcatatgtaaagactattgactcctatcaaaaactttgaatgc

SEQ ID NO: 247891 - DNA, 298 bp, Gossypium hirsutum
ctgagttgtatttgatactaaatttataattggcaacaaatagaaatgaacatgctgtgggaatctaggccatgtatatataagtttagatagtaaatattgtagggatcacaggacgaagatgaacaaaagcgggactgagaaaacaaaaagagcaaacgcaactaaaacccctagcaacagagtcctaatatagccagcaggatacaaaagcaaaggggcccgcaccagataagggcttcccaactggtgcccaggaagagcggctaaagggactcgcaatggagcagcaaattaa

SEQ ID NO: 247892 - DNA, 219 bp, Gossypium hirsutum
atccgcatgagttttctcagcagttgctttacctgccatggtttctagtttcttgcaaaggttatgtccatatcctcaaatcttttccataaagtattagcttccaatggagtatttgtttccggatttttttcgctgctggtttctcggcttccctactcttccatgtaaattatcttaagatttctagattcgatggtccaggagactgcagatttc

SEQ ID NO: 247893 - DNA, 353 bp, Gossypium hirsutum
gttattacattattgaagagcatggatgctaacgatggatcagagcatgctccgggtactgaactgaaagcatcggatgaacatcttaagggacatggaccattcatggctggggaaaggagtacggctgtggagttatggttgggaccaaagctgtgccatatagggatcacactacgcacattttaagaagtcgactgatgctgaatgcttgactaatgcccacaattacatgaaggcgattgttcgtcggaaatctttcgcgaaaactacagctgacaaggaacatttgatcgcagaatgggcaccgaatgcgaatgcatgaactgtacttgaacagctttacgtctttg

SEQ ID NO: 247894 - DNA, 407 bp, Gossypium hirsutum
  unsure (1)..(407): unsure at all n locations
ctccgatctctagtttaagaaaagcattgctttttttttactgaaaagtttaaatccaggttttggctagttttacgattttgttcatcaactgtttttcctttggtattcggtttatcgttgtttagacttttaagctcggtgcaatttatgtttcaatggcggaatcaggttctttttgcaaaaaaaaaaaaaaaaaaaaaaaaaaaaaaaaaaaaaaaaaaaaaaaaaaaaaaaaaaaataaaaaaaaaaaaaaaaacaaacaaaccccnccaaanaaaaaaataaaaaaaaaccaaaacccaaactaaaanaccacaaccnnaacaataaaaaaaaggggggctgttttaaagggtcccaatcttaaacccggtggggtggaaacaaattttttttttttggg

SEQ ID NO: 247895 - DNA, 399 bp, Gossypium hirsutum
gttctcaaggggaaagttgtaatcgatgcatgccttggactgacattgcggattcctgacggagttgtgctcgaagatgaggagatcaatgatcccacagatatttaagggagggaatcagttgtagcatttttggtgaatgcgttgaacatgaagcacaacacacaaaaaaaaagcctttgtaatgctttaatattttgttattcaaattttgtattgatcaatgttatttgttattggaagaggaaataatagttagagcttgagctgagtgattgattcctcattataagcagcttaatgtagaatgatggctctaacttcagaacatgagaattgagacttggcctttttgttgctccggttagcgggtgcccattatttatttatcattttaaa

SEQ ID NO: 247896 - DNA, 404 bp, Gossypium hirsutum
aagaaaacaaggattggaaacccatgaaaattcctgatcatttccagcctcagcaatcatgagaagaagctcactgaatcttttttttttttttttttttttgctatttttttagatcgaatgtgagatgtatgtatgtgtgtacaaattgatttgacctttaagtattgttaataccaaaaatcaaagatgtaaatgaattcccaataagcatttttttgataaagcaaagtacatttcaacaaaaaaaaaaaaaaaaaaaaaaaaaaaaaaaaaaaaaaaaaaaaaaaaaaaaaaaaaaaaaaaaaaaaaaaaaaaaaaaaaaaaaaaaaaaaaaaaaagggggggggggtttaaaaaaaacaaaatttaaaaagggggggccgttttaaaaaaaccatttt

SEQ ID NO: 247897 - DNA, 403 bp, Gossypium hirsutum
ggagcttcatgaggaaggctcctcttgattttagccagctggggatgaaattcgggttagatgtcattgtactttatgcggcaggaaatcaacagcgtcaaaaaggtttgagatctccctcccatccttcaccacagtttttacttattaaggggaaaaacagaattaaatgttgtaaattagattaacatgaaatggtattttgcctggattagctggatcttcattacttgataatttgaggttctaaacacacttaaactcgatttttttttccgtgtatttgagaaatctttgaatatcatcgtaccaatgtctggatatgcaatgaagagtcgacataacgagtaaaaaaaaaaaaaaagggcggcccgcctttttttttttttttaatagaaattta

SEQ ID NO: 247898 - DNA, 337 bp, Gossypium hirsutum
  unsure (1)..(337): unsure at all n locations
ccccccccaccnacacacaccgccacgttttattattatgggccacacccaaatcactaatacatccatctattcaacttccccagaaataaccttgatgcaagtctaaacgatcattcaaatgtttaaccagtcttctaacacagcaactaatttgcattacctcaatttaaaccacataacgcttttaataacattcatagtgattctccattgtgcttattgatctacacctgatattttgtataataaaagatcattgctcttaactaacgtacaaaaagcttgcttacatgtcatttaacatacaaccatctttaatctttcttatcataaa

SEQ ID NO: 247899 - DNA, 378 bp, Gossypium hirsutum
gttcggggtgcgtcgatcttgagaactgtgtgcactaacaactaaaagttacaatttttaaggtttttagcgttttaagaggatgtaaatagggaaataaaaggaaataaaggcagccaccaagggaaagcaagaaaattaccttgagaacaccattgaagccaatcttcaagcaattttccacaaagatttaagagtccaagttgattttcaagagagttatcatggatttcttttattctagtggttatatagtattattggtttactcttgctattattaattaattctcttaataccaagagagatgaaccccgagatagattctattgtttgatttctatttttatgcaataaaatcttagtttctttgtttt

SEQ ID NO: 247900 - DNA, 414 bp, Gossypium hirsutum
cattgatgtaggagtcgatgagggtgtgaagttgctaaaggcatctttgcagtccaagactgtgctcactgatgtgttcattgagaagaaggtgggcgaaactgatgctagcaattctgctggtgtagtacattcaatcgagatataagaaatgctggccgattttcagtttgcaagtttgttttatcagtcccggtctaagaagggatgctcattggtttttttaaaaccttagcagtctgtatgaggatcctttgagcctcttttgtgttttaattgctagtcttcgaagcctcttttgtatgtaacttggtttttactttttaaccaatgtttaaaccccatctaagtcaaaaaatcttagctctttttagagctaccatttgtatgttataatagaaatataatatggaa

SEQ ID NO: 247901 - DNA, 402 bp, Gossypium hirsutum
attagttgtggttcacgctagtgcaagaaatgttcccacaaagactactacaatggctgctaacgccgtgcctagtgctgcatctgcgtccgttggtgaccaaaagaacttccttacttacggtggtgcagggggcttcgctggcattggctcaaatggcatgccatttggtggtggtggggttcttggtggggttactccctttggtggtgtaggtggacttggtggtggtggtttgggtggacttggaggaaccggaggattcggtggacttggaggaaccggtggagtcggtggacttggaggtcccggtggagtcggtggatttggaggtaccggtggagccgatggacttggaggaaccggtggagtcggtggatttggtggtgctggtggtggtgt

SEQ ID NO: 247902 - DNA, 243 bp, Gossypium hirsutum
taaaaaaaaaaaaaaaataaaatttaaattttaaaaaaaaaaaaaaaaaaaaaggagaaaggggagaattaaaaaaggaaacaggcaaaaaaattaaatataatttatgtaggggccattttgttgcagtgacctgcttttgatagctttattattgcccttttgctagtattcttatgttaattcgggttttcaacatttccccttttaacaataggtctattagtgaaaaccatgggaatg

SEQ ID NO: 247903 - DNA, 269 bp, Gossypium hirsutum
accgctgcgtctacgcgctcacctatcaaaaatatggtactggaagctgcataaagcacatcagaatggtgcttgcgtgtgtgtttgaatgcggaagcatcctttggcctctcagcttgaacactgctgataactgattatcgcattgcttttattttgatttgatcggttttatcattgtcctgatatatgcaccaacacatttgtgagatgtggcatatgatgcacacttaatatcctttttaaggaaagggaatgatattgatatt

SEQ ID NO: 247904 - DNA, 439 bp, Gossypium hirsutum
cgcgtccggacaaagtttcggagcccgtcggaaagaataagggtgacgatcatcctcatcatcagcctgttactgcgtatccagcggcgcatgtggcggctggatcgagttctgctgttccgtatggtggtccgggggcttatccaccaccaccacaaggtgctgggtacggataccctcctccgccgccgcatgcagtggcgggttatggtgggtatccaccgcagggaccgcctccgcctggatatggatatccacctccaccaccggggtatgcgtatcctcctccaccaccaggggcttatgggtacccaccggtgcaacagccaccgaagaagaatagcaagtttggattgggattgggtgccgggttggttggaggagcgattggtgggatgttgatcggagatatggtgtccgatgcggcggaatatgatgg

SEQ ID NO: 247905 - DNA, 415 bp, Gossypium hirsutum
  unsure (1)..(415): unsure at all n locations
acggtgagttctcgtggcaattatatatcagttgggaactcctttcagaaacgagagagccagtgaactcggctttttcggtctctaagttttgataaaagtcgggtttagtgaaaaaaacaaaatggtagagggggtggagagccatggtcaaattttgatttgattaaaaattcagatacttgataggtaggttccacctttggttaaacatgctttggatagaagaaaatgaggtctttaattgtaatctctgatgttgttttaagcttttttagccctttaatttacttcctttaaaaaaaaaactgaacttgtagatttggccttttcagaatacaaactccatcgaatcctaactntttttccttggaaaaaagattggttttttaggttattctatattgggttaatt

SEQ ID NO: 247906 - DNA, 308 bp, Gossypium hirsutum
gccggatccggcgccacgcgtccgcgaactcgaagcttgaccaaccaaaaccaaattaaaataatccttaaataacctactaaatcttataactctaaaaacccaaattcctccaaaagtaaaaaagagatcggaatgcgaccataatgaactgaagatataccgctgaatcactgatgaggagcttttgcgatgaaagccctcagccagatacgctatctattggccaccggacggaaaggactaatctcatataagatagactgctggtactggcacgggaatgcgaagctgtgtgtgtaaaccct

SEQ ID NO: 247907 - DNA, 224 bp, Gossypium hirsutum
acgacgcgtacgctcacgctttcgttcacgcgtacgggagacgaggacttttgggagctgacagacctataagaatgcacgcttacgagtaccactcgcgtactacttaaagctttgacgctgctctgaaagaatataaaatggcgggcgatgttgatgatccgagcctacatgcgcgggcttgcgacgactgagctgtgctatacagccacctaagtctaata

SEQ ID NO: 247908 - DNA, 422 bp, Gossypium hirsutum
cgacccacgcgtactttttttttttaatttttttttttcccttttttttatctcacaaaaaacaccaccttgggtagggaaaaacttaatttggggtttccaaaaaatccacaatttaatgaaaaccaacatattctttatacttaaatattttctttcccaaaccttttataacaaccattaacattctttccaacattaaatatttcacatatcacttttcacttcccccaaacaagtaatccatataaaacccacctccaccctcttctttaaccttaattgtcctcccctcctatataaatattccacaatttctttccatcccctccgaaataaatattcgtttttttttcctttaacaccccccccgatctttttttctttcccccattatttttaatctaaattccgtttttttt

SEQ ID NO: 247909 - DNA, 393 bp, Gossypium hirsutum
tcatgatccctggcttgagtgcttaagagatcctcaggttgtatctattatggtaatatgaagagataaaagtaacatttagtccttgaacctggtagcatttttcagttttggtccatgtgtgactcacctaaaaatgataacttttaataaaaaaactaggtgatgatgtggtatattatcacagggatcaaaattgagaaaagttgtcaagtttcaagtctaatatggaataaaaaaagtttcgggactaatttgagaaaagttgttaacttctcatgatatgaaactgggaagatagtatgaattgcatgtttggtctgttggatagtattgttgcagatgcagcggctggtggtactatatatactattctttgatagaatggttcat

SEQ ID NO: 247910 - DNA, 366 bp, Gossypium hirsutum
atgagcgataaagggtgggtgattggatgatgtgggcatgggatatcactagcttaaaagaactttgggggaacacaaacaatgatgaatgccctgactcttggttggatgcctacatatttataagctacatttaattatgaatacactgaatatagagagaggacaagatgggaggaagacattctggatatatatcatacaatatcgaacagagcttgagccttcctaatgggcatgaacaccggaaagcatatgaaacacatgaagcaatttgagcttactgtttgaagtctcaatctccacaggtgggctgtttaaacgatgcaatctgaattactcgttcatgcgacgatatcttgaaca

SEQ ID NO: 247911 - DNA, 247 bp, Gossypium hirsutum
gttgcacttcctgtgtgtgttttgggtgtgaaatctgtcggttcactgattgcaggtgcgaaacttgcattgacttcattaggaatgccgaagcttgagttattttaagggtggggattcctttttgttgctctggttccttgaagtcattgtctttcattactattaattgccagtccctgagttcagcactcatggtgtcgttatctggtttaaaaacttcaaattaatttatatttagatctca

SEQ ID NO: 247912 - DNA, 207 bp, Gossypium hirsutum
gtttacatgtatgcattatacggtcttagtgggaaaaaagaaataatggttaggcggtagtagcaccttggctatatatttctttgattcatgttactgtgtcgaattggtgtaccataaagcactccgaaagtgggagtatggacagctatcaagaatgaaagaaacaatatgtttttgatgaatctacaacttggtgatagcact

SEQ ID NO: 247913 - DNA, 180 bp, Gossypium hirsutum
gtttgttattggaagcaataaatggcctactgcttgggctggtatttatatgtggtattgagctatgtatgaaatatacttgatttaatttatttttctatttaaattttatgaaaatttctagttgctctggttgcatcaactaggtatcatgtctttatgacaaatgatattttatgg

SEQ ID NO: 247914 - DNA, 341 bp, Gossypium hirsutum
ctcgcgattcctatggctactgctgttgttgtatctattgatactgctcttgatgaggagaaaactgcatgaattatgtgaggagcaagatgctacatcagatgaagttcttgacgctgctactgctgaagaagcagctgccgctgatgcaaaggaagcagatcctgcagaggcggcagacgcggaacctgcagcctcggctgaagttgaaaccaaagacgtggttgaagaaccaaccgctgttgctgaagaaccaccaatagatgatactgctgaggcaacagtgccagaaactgctgacgaagcaatcacagaaaccactgcacaggccgttgaagcca

SEQ ID NO: 247915 - DNA, 404 bp, Gossypium hirsutum
tcacactctatttcaaagaaaaaaaaaagataaaaacccttagagaaaatgaaaaactgatattctccgaaaattttctatttatgtagaaaaatataaggaaaataaaagtaaaaattttgcaactggactgaaaggatatgtcgtcgaaggggaagggaaaggagaaggaggtggtttatgggaaacggaaggtcagcgccggaagaagcggtggtggagcggaggagaaccgtcggaagcggaagaatcggggagttcttcagttctttgaagacgctgctgatgttgatgacaatgaagccagcgatgacagcgattttgatgattattttatggaagaagcgacggtgtagggggctcggttttgaagaagaagaagaaggaagaagaagaagaagaag

SEQ ID NO: 247916 - DNA, 419 bp, Gossypium hirsutum
gaaaactaaaaattagtgtgagcgggtagaagagatgatgctacccgtagtaaagctaggaactcttgcgctgaaaaccgcttgcaaacccattgctaatcgtctcaagaaagaagctggtttgcatcccagattccgccaattgatcatcaatattgcccaggcaaatcatcgatttacaaccacgatgcaaagacgaatttacggtcatgcaactgatgttgcgatacgccccttgaacgaggagaaagctgtccaggctgctgccgatcttctgggggagctttttgtattcacggttgcaggagctgctattatttttgaggtacaaagaagctccagatcagaagcaagaaaagaggagcagcgcaaacaagaattggaggcaatgaaacaaaaagatgaagatgtagcacgag

SEQ ID NO: 247917 - DNA, 111 bp, Gossypium hirsutum
gtaggccagcagccccagcagacgatctattcgttccaacccgaccttcccatgcatgcgacgtgatatctcgtctattgagtcgcctaaactcaacgcactggcccaacg

SEQ ID NO: 247918 - DNA, 414 bp, Gossypium hirsutum
  unsure (1)..(414): unsure at all n locations
tttccaaccaactttgaacccatcacttcgaacaatgtttctcaaggcgcttaggggattaaacgcaacaattgctatcctagtagacgaagatgcggatttgacatcgaataatttggtatgcagattaagatctgcattcaattatctgtggataccatacgatacagtggatacgttccttccaataggaagcaaacaaaggcagtggtatgaagctaatatttgttggaaagtagagaatgttatagctcatgaaggtttgcagagggtggaaagggttgaatcaaagagccgatgggtgcagcggatgcgaaacgctgagtttagaggggttagctntggggatgaaacggtttcggaagtaaaaacaatgcttgatgaacatgcagctggatggggattaaagaaaga

SEQ ID NO: 247919 - DNA, 331 bp, Gossypium hirsutum
caccaatcacaaacgctgggaggctatcttaatagtgggaaggctacaacccacaacatctactacaagaagagatggcatcttcccccgtggctatggactgatagactgcatcctctctccactccattctccacaaagtacaccagaccgtctatctttgtagtccttaatctcaaccgatccatatgatctccattatttaaaccaaaccctttttccacattctccaaatttaccactcttttcatctcttattcgtggaaaactatgtccaggaaaattttctaaaaaacttcttaacttccccaattacatacacttgcatttt

SEQ ID NO: 247920 - DNA, 419 bp, Gossypium hirsutum
gaaagaccaagcagtgcaagcatctttgttggaggttttattttgggaggacttgtggttggtgcacttggatgtgtatttgctccccagatcagcaaggcagtagctggagctgatagaaaggatctaatgaagagactacctaaattcatatatgatgaagaaaaagctttggagaaaacacgaaagatactgaccgagaagattgctcagttgaactctgctattgatgatgtttctgctcagcttcgatccgaagatgctccgaatggagttgcggtgaactctgatgaaattgaaactgccatatgaatgggctaccttgttattattcagatgctgttttaacacttaactgatattgtcatcctcggtatgaaataatatgtgaatttattgtaattttcctgttttcaagt

SEQ ID NO: 247921 - DNA, 304 bp, Gossypium hirsutum
ggaagagcaagaaaagagattgtttaattcattttcctttgaagactatgcatggagagtttataatgaatgttatctctttaatgatccacttgatagatatcgaatttaatgggtttttttttgtaatttttctcgattttagtactgttgctgttataacaatttgaagatcgtggattcgagtgtgtttaaaaaataatatttttcgatttgattagttgggatttaaagagatttatgggtaatttaagaaatatattaatttttttcttttatctttataaataatggaatttttgtc

SEQ ID NO: 247922 - DNA, 369 bp, Gossypium hirsutum
aaaaaaaaataattaaaatatactaaacaatttatttttttaccaaagcctaaaacaactcaagagagctattcatactacaataacaacccattcaccccctcatgcgatacaagtaacatcgttacaccgtatactcaaccttacactgccctgccttcatcatatacaagcaaaaacaaaacaacatgctcaggggatgatattacgacatcaactgatctatattcccccaccggcaacaacttgagacccaaactaaagaaaaaaaaccggatcccgttgaaaattgatattgatactaaaaagacagggacacccgatggattttatatctataaagtggggattagagttacctgtgaagac

SEQ ID NO: 247923 - DNA, 342 bp, Gossypium hirsutum
  unsure (1)..(342): unsure at all n locations
ggccgaggaggcgtacgatgacgaacaanttacaatatctcaaccctttttatttattcccaaccgtccaaaaacccaagttaggttttctaccttaatgacgacccaacaaccctctgatgcgttacaaggaacaacgatcagtttataagcaacagtacattgcccgccttcatcaattacaacaaaaacgagacaacattcaagggagatgaaaaaacgacatcaatttatttattttctttcaccggcaacaactagagacccgatctgaagaagaaaaacgggatcccggtgaaaattgaaacagataccaaaacgaccagaaaagtggatggactg

SEQ ID NO: 247924 - DNA, 388 bp, Gossypium hirsutum
cgcctcttcccatctctcaacccttttcaacttaaccctttcttccaaaaacccaaattcccacctcaccttcacttacgacccattcaccctctcatgcgttacaagtaacaacgatgtgtttataggcaacggcacattgccggccttcatcagtaacagcaaaaacgagacaacattcaagggagttgtaataacgacatcaagtgatctagatgccgacaccgtcaacaacttgagacccgatctgaagaagaaaaatgggatcccgttgaaaattgagatggatactaaagtgacagtgaaagtggatggattgaagagcaagaaagtggggattagagttacgtgtgatgacattaaagggactgtgccgaaaggtaagtca

SEQ ID NO: 247925 - DNA, 293 bp, Gossypium hirsutum
  unsure (1)..(293): unsure at all n locations
gttgttttggctataaactggcgaaagatatcagcagagaggggaggacttcaatgagtggagacctcactaacacaaagggaactcgtaggatgctgggttactccattttttggagcgtcttgaaccttcggctaccatcacttctccaccaacgggacgctccaattctaaaactgaattttatgtataaaattttaatacttccaactcgatcacaaaatagaaaacttcctcccgnaggaaatcaagtgtatgcaccaaggctggatgatccatactcaaaaaacatg

SEQ ID NO: 247926 - DNA, 257 bp, Gossypium hirsutum
  unsure (1)..(257): unsure at all n locations
aggcgtacgccgacgagaaaccttatgactggtaggagttatatttacttccggacccaaatgctgcaagggcgggtgattgtatagacggtgctcacaccgaaatcgaggaaaacgaggcacccccaccagacagatttttacctgataatccttgtttgataaacgacactgaagcanccaagcaagaagactgacatgatgatgaagaccgtgagaggaaagcccccaaaacccatacccctaacagagagaca

SEQ ID NO: 247927 - DNA, 227 bp, Gossypium hirsutum
  unsure (1)..(227): unsure at all n locations
caaatggtgcattactggatatttgcagacttgtgtatctttctttatgcaaagatgccggctgaatattgtcttgaggcttatgaacgcatatgaactgaaggaggaaggatacccnaaagaaggataaaagatcagcctgaagagataaaatgatccagacgcaaccaagccaggaaaatgggatgatgaacaggacagggagtgggaagcccgggggggcggtt

SEQ ID NO: 247928 - DNA, 285 bp, Gossypium hirsutum
ggaacatgtagtgatacttttagttgcttctcttagcattttcaaacccttttaaagattttgtttaaaatgttgtaaggattgttttcattttgtttggaggttttcattgagccctatgctcttatgttattttggtttggttgttacattagaagatattttacttatttacgtgagttgttcccctctataaaatgtgtgccgcagtttttgagaccgaattaaatctcactgagtattcagaaaaaaaaaaaaaacaaaaaaaaaaaaaaaaacaaaaat

SEQ ID NO: 247929 - DNA, 177 bp, Gossypium hirsutum
cggagatttccttttaggcattcgttcattctgaatgtcatatgttctgcgttagctgctgtggtaaacttgttccattctgtgaaacttaataagcttttggaacttgaagactttatattagcatattcgagaaacttaaaaaagaaaaagaaaaaaaagcgacgttgcttgatt

SEQ ID NO: 247930 - DNA, 115 bp, Gossypium hirsutum
ataagacctaaaatcactttacattttttgtcattaaagcccacaagaatcaaagcggggaaattacacttactgacaagaccattaccatataagttgatagtacacacaccat

SEQ ID NO: 247931 - DNA, 296 bp, Gossypium hirsutum
  unsure (1)..(296): unsure at all n locations
ggatacatcttgcgccgttttttctancgtttgttcaccacgangcaagagggnggaagagcgggccttacgggagaacgaagcgaaaccganggaggnacaggaaaccgcaaatgcatgaggagccataaccacaaccaagaagggagcaaacccaaccctttcaacctatgctgaagtccttgccttaatcaatggagcttttgattattatcatcaaaccttaattaactatgcctatcttttttttgttttaaaattcttacattttcttagtatagggttttagaaatttt

SEQ ID NO: 247932 - DNA, 399 bp, Gossypium hirsutum
ggctcggcacaaagctatggcagtgcaacgtaccctactcaagagggtcacactccctcctatggtggtcaaggagatgctggtcaagcacctacttctacccaaccttctgcggtgggtcagcaagggtacaatacaagtcaggtgcctagcccaaatcctggcagttatccacctcaaggaagtactcaacctagttacagtcagagtggctatgggagtcaaccaccagctcagtcgggctatggacctgggtatggaccaccacaagggcagaaaccactggtcaatcaccctgcctatgggcagacacagcagtctcctaccaccccaggaagctatggccagtcatgatatcaatcacagccttcatcttctggctatggacaagcagaatca

SEQ ID NO: 247933 - DNA, 284 bp, Gossypium hirsutum
gacggtttgaaaactttggatgaatttgtttagttaaattcgaaatgtctcgggtaggggtacatatctaacaagcgacatgaacaatcatggaccatatttggagtaccaaacacctgcccaacagggcaacaccgacagaagctcactccatcaattttttaaaagatgggcacttctttaagatcaattggtctgacaaacacaacctttgctgatactgtgtctgtaccgaacttcctggcgacgattcacttattattgttctaaaccactattattac

SEQ ID NO: 247934 - DNA, 386 bp, Gossypium hirsutum
  unsure (1)..(386): unsure at all n locations
atttacctggattaaatggaattgggttaaaacctaaaaccggcggccgtttaagattgttagggtcccgattgattccccttcggaaaatccgtaaagggaccatttaaagggaccttttcccctaaattatggattgattgggcccgggtttttaaaaccaataaaatgtcacaagggttggcttaccttttattcttatccccattctaatttaatgacatacatatcaattagatccgacaatgaatcaacaaaatccctttatttgaactcctaaattttctcttttgtggaaatctctcactcttttggaatccctatacgaatcaaatcgaaacnccggattgatttattttatttgaaaaaaaaaaaaaaagggcggc

SEQ ID NO: 247935 - DNA, 329 bp, Gossypium hirsutum
gtagtgctggagttcctatcttggttcattttaataattttctgtgtgaaaaaagaaaaagtgttcaaaagaaagtgttgtttaatttgcactctagaaggaaaatcttgagcttaacggagtagggtttttttcaatttgtgttgattcaaattttaagaatgaaatcaacttaagttgcgataagaaatttaagtattgaatttaaaaaaaaaaaaaaaaaaaaaaaaaaaattaaacaatgggtcggtcgatgtattagatctgagctttctttcgctttcacgcaacaatatcgctttattttaaagtcaccaaatttcaatttt

SEQ ID NO: 247936 - DNA, 170 bp, Gossypium hirsutum
gtctgggtccagataaagaatgtattgtgtttctctgagataatgggcaacggctgacatagccctacctcgccaagctatgacaccaattccgacccgaaggtgttcgtcaaaactactggcggaaggggtcactactatacgacttatatccgtgcaagaagtatcta

SEQ ID NO: 247937 - DNA, 302 bp, Gossypium hirsutum
gccaggaaggccgtgagcttcgtcgtaggttgcctcacccaaggttcaatgctcagcctgtgctggtcatgatccctcctggcgagcagaccatgggccgtggtgactgagttcattctggacacgtgctgaattcgaatagcttgttgccgccttgcccatgtttttgtcagcgtgatgtcatgcgataaaatagggttgaaggttatccacgttgttcaaattcttaagtacccactgaagtatgatcgctagttgcggtcaagcacaataacatattgacggacatatggtttatacgt

SEQ ID NO: 247938 - DNA, 304 bp, Gossypium hirsutum
  unsure (1)..(304): unsure at all n locations
ntccgatacatccggaaacctaaatgaaactcttttttcatgcaatcgggatcgactcttaaggagactgtattgttgatggcctaacaaccaattcaactgaagggaactacactactgctactactgcagctactactattgcctacaattgagctacctagataaccatacaccatgaccttctattgctccagatggatgctatatacatgttatgatcagctaaccctttaaagactacacaaaaatcatatgtgtccatgtactaataaacttgaattatctctatacctttttggga

SEQ ID NO: 247939 - DNA, 264 bp, Gossypium hirsutum
gatacatttaagggagggggaaacgttgcacggagtagtataaaatgattaggcttttgaagagcccttaaaagagcaaatggatgggctctatcaaatctgttgggatctcactctaaatggggtcaacagatcgctactatctaaaaactgtggaatgatatggatccacgcttggtatgtaaccaagcccaagagaaaaggcacgacgggaagaatggagaacggtccttaacagaagaaataaatacaggcgggcgctct

SEQ ID NO: 247940 - DNA, 249 bp, Gossypium hirsutum
catggaatatatacttacatttactttattttcaggggcagaattgttcacgggagggatataacagtgcaggaccagacaaccaggaatcttcttttcagagaattatgggaatctagaggatatctgtttctgacctagccttacggtaggacgaaactgttacctcgttttaaagccaagcattaatccatgataattcacatgtggcggcatcgactcattactgcaaagaataaaaatttggtc

SEQ ID NO: 247941 - DNA, 146 bp, Gossypium hirsutum
ccagtgcatgatatctatcattaactttattttaaccaggcccgaatagacctgcccacgcgtattataatactaccctgaccggaccatccaagaaatttatcttttatgccaaacaatagtaagggaagcaagcatagctgagg

SEQ ID NO: 247942 - DNA, 113 bp, Gossypium hirsutum
cgggccaggcccacgcgtgcgctagggcttgatctctctcctctatttgattttagccacagacgcgtgcctgcgacgggggagcttttttatagtgtgaccgaaacccaaat

SEQ ID NO: 247943 - DNA, 411 bp, Gossypium hirsutum
atccaaggtcgaggaagctacgaagatcgaactgaaatgcttcgccttattgttgatctggtggaggcaagcatatgtgcagataatccagaatggagtgtggatgagcaggtagcaaaggacatacaactaatagatgctattgctgagaaacaagccctgatattctccgaggaatgcaagttgttccctgcagatgtgcagattcaatccatatatccgttacctgatgtttctgagttggagtcaaagcttacagaacagtccaagattctctcaaatcttcagcaaaaagttgatgacttggcatcaaagcatgcttacaaccctgatgaggagtatacggaggtggaatcgaaactgcgggcacaattggaatcttttcttgaaactgcaagatcattcaatatg

SEQ ID NO: 247944 - DNA, 402 bp, Gossypium hirsutum
gattttggagtcgcgttacgagctcggggatcgtcagcatagactatcacactatcgacgcggtttggtattttataaattctgaattcgaacctatggcatgtatagtgtagttaatatgtttaaatttgggatttgtgaatatgagccatgcgaaaatggcttattcattttggctaagcttggttttatctttttgatctatttggtatatatataagatgtttaagcttatgcaaatttcggctatatatatggaagtgtgatgtgtgtagcatatttggtcgtgctgataatgccaatcaaccttatgtcatcgaggtatgtcatggaggtccaatatccggtccattagaagctgagttcatattgaaaagaacaaaaggagtttatgggtttttc

SEQ ID NO: 247945 - DNA, 186 bp, Gossypium hirsutum
gattgtggagtcactttacgagctcggggtatcgtttcatagactatcacactatcgaccggctggggtattttataaattgtgaatacgaacctatggcatgtatagtgtaattaatatgtttaaatttgggatttgtgtatattaaacatgctaacatggctgattcattcggggctaactttg

SEQ ID NO: 247946 - DNA, 310 bp, Gossypium hirsutum
  unsure (1)..(310): unsure at all n locations
aagagatttctttgtctgctttgctttggttcttgncctttttcttctcattatactcaggtctgtcagttgtaagatgtcaaatttcttcatttacttgaatatttgctcctcctacacagatttcgagtcaacctatgggtatcttatgtctaaatcaactatgaacaaagaccttattatgactttggtcttggactcaattggacagaacaccatccaatggttcataaacgagtcgatattattgcttttatcaaaggggcctgaactcataacttnttaagtataactgctactttcaaactta

SEQ ID NO: 247947 - DNA, 407 bp, Gossypium hirsutum
gcagcggcaaagtccctggatacacaattcaccgcattgcgtcaggaagaagagctcgagaaagagatggaaagagcagccattaagatcccagttgtgtctgaaaccagaaacggtacttttgccggtggctcattgctaaaccagtcagcaggtgactcgactggaagcacatccaaaacatcaactccaagcaatatctagaaaacaagcagcaggaataagcagcagttctaggttactgctggctctaaaatttaagtttttgttattatagaaagaatatgagtatctaaaactgtactctgtagaattgcatttggatgaacatcaagcaaaagtgcaaacacccttctatctgagttcttcaaatgctgcttatgtcaactgattttacattttactga

SEQ ID NO: 247948 - DNA, 248 bp, Gossypium hirsutum
gcacagtgcacctcaccatcaccaccggcatagctttcgttcaacttcacttttctccggcgcttgcctcgttggtggcgcggcgagggagacacaagtccgtcactgttctactccacgtagagttaatgggttttccggtttggtcaccggcgccggtgggttcatcggttctcactgttcacttgctttgaaaaaacgcggcgatggggatttgggattggatgactttaacgattattacgatc

SEQ ID NO: 247949 - DNA, 156 bp, Gossypium hirsutum
gtcaaagctgatttgaaaggtgaattacatttcataacgggcaacatggcctatcggagggggggcattccatatccgacaggcaaccaaaacaaattacaatcaaaataagcaaaatctggataagcaaatccaatacctcacaacacttattgc

SEQ ID NO: 247950 - DNA, 242 bp, Gossypium hirsutum
ttttttttttttatttttttttttttttggggtgttttcatttgccaaaaataacttgccctatttttccctttttttaagggccaatttttaattttattatatttggtaaggaatatatattcatccattgctatgaaaacatcattttaaaaggtttgtttgctcaaaattttattaacaaaaaaacattggaagatctctattagttattttaacccaaacaaacatttaatttgttt

SEQ ID NO: 247951 - DNA, 324 bp, Gossypium hirsutum
  unsure (1)..(324): unsure at all n locations
gttcagttcactttaccattaccaccgntataacttacgtaaaacatcactaatcatagcagcttgggtccttattagcactgcaagaaacactcatataactattttaacactttctttaataaaccatctactaaattttttaacaataatttctaagcaaaataatgcttttataaatctttcacgtccaaattaatgacctttttttcttattttttcatttacataatttttaaatataactatcaatttttatatctaaaataagtttttacttctttaataaattatatatttttttatatttttaaaaaaaattta

SEQ ID NO: 247952 - DNA, 352 bp, Gossypium hirsutum
  unsure (1)..(352): unsure at all n locations
ctggagagttgatacattctgttaggntgtttctttttgaagaggactgngtagtngangggggcggtctattatannctggctcatcccaacaaatttttagttcataaattttttattcacctttctagtactcgtgtcttgtatatctcaaccaatcatccccatccttcatttctttttccctccactaaatccttgctcccattctccctattttctttattcaaattttttcctttttccccttctctcttaattctctatatatccttatccctctatcttttagcttctcctctttttcttttttttcttctcaaacaccttttccaactccctttttattttt

SEQ ID NO: 247953 - DNA, 168 bp, Gossypium hirsutum
gacgcgtgcttgagcagtgcattaagcgctgtagctgtggatgatacgcgcagggtgaccggtatactcgcaaggtgactagtgcactctccagtggcttagtgcccgttctttttggtcacgtacgttgccttttcgccacgtgctctagatttggcgctccagcta

SEQ ID NO: 247954 - DNA, 329 bp, Gossypium hirsutum
gcagaagagtgttatgagaaagatgaattttttgtgaaaaggaggatgatggcagatgctgatttgtattatatttatactcaaaatcataagccttagaattattattaatgatccataaatatacaatacaaagggctaatatatatatatatataatttagaaaaaagaattgtgttattatgaagttgtatgtatgcatgtatgtatgtatctagcattaatttagcaaagtttgaatgtatctctcttcgtttattaattataacttttttaaaataaataatataaagctttttaaggcacataaaagagaaaatcattattt

SEQ ID NO: 247955 - DNA, 126 bp, Gossypium hirsutum
gcgggtggcatattccactgtcgtcaaccatatcaatatctgataggctcgcaccaaacccactgatcccacatctgatcatcctgaatatcaaatgcgcagccccaatagactttgcaacacgcc

SEQ ID NO: 247956 - DNA, 350 bp, Gossypium hirsutum
  unsure (1)..(350): unsure at all n locations
ccggggcagacccacgcgtccggagggtcagaatttacaaaaggttttagatataccacggacgccngcaagcgacgggcccggttttaaataatttcccctaaattcactacactgaccctcaaaaaacaacgcctttacccaaaaaaccctaccttacccaacttcaatttccaccgcacacatccccctaaaaccagcactcgctatttttaataggccctcaccgaacacccttaaaaacaatagcgccgcccccattaccaatgcaacacaccctgaagcggcgcattaaacgcgccggctgtccgattcacatgcaccgtgaccaattcacttaccaccgccct

SEQ ID NO: 247957 - DNA, 415 bp, Gossypium hirsutum
ccatttttgttactttgaatttgtatatcgaagatgttaaatctgggaaagtaaagtttcactgtggcaccattaacaaaagtttaagtgttctcttgttgcttttacttggttaagaagcgaataaagaagcctatctatgtctactaccaactgggcaatttctaccagaatcatcagagatattgaaggtgcggcagaggattcaatctcttcaagctagaaaagccaaggcttagcacgtcttcaagtggaacgttatttaatgttgcattccatggtcattcatcttagtcaaaacttgaatcttgtgttatggaaacagggttttgtagctaccttgtgtaccagcttctttaaccatgatggttcattattacgagttttgtagcttcttttataattggcctagtta

SEQ ID NO: 247958 - DNA, 398 bp, Gossypium hirsutum
cacctacttccacaccttatccactttcataggaaactgtggcatctcaaactctctatcgagaacctctttaagctaaatttgtcatctaatttgattacttttatttcatggtcattattgtatctactatgattaaaattatcgttacttgatctagtacttgtaatggcccaaattcgtctgacccaaaccaaccaaaaaaaaaaaaaaaaaaaaaccaaacaaaaaaaactaaacaaaaaaaaaaaatacacaaaaaaagaaaaaaaaaatatgaaatctttttcatatacaccctaattcgtgatcaaaaagaaaagggggcggcccttttaaggaatccaagtttaacgcccgggccttggaaggtttaaatttttttttggggcccccaa

SEQ ID NO: 247959 - DNA, 405 bp, Gossypium hirsutum
aggatttgctcggcagtgcactcatgcaaaatattcattttaatttcaccaccttcagaagtcaggaatgcgggcaaacgatgcgcagtaggtcatgatgtgctgattaatatccgtaaattgtctttgcttgtgaagtgaataccaaattgcaccttattgttttcatatttctgcagatggatagcaatttaccaagctgaatgctcgagtttattggtaaagctctatatcagtgatgcagggttcttacatgctgatgtcctgatgttctctcattgatgctcgagtttatcgcctgcgtacaaggaattgtgttaatttcagggtctggtaacctcctcacccttgttcttaatactaaactgctaatttattaggaatgtattactacaatggatagag

SEQ ID NO: 247960 - DNA, 199 bp, Gossypium hirsutum
gaaaaaataagggtgatatcggatcagcttttcattagttttaaactctctctcgctctggggctggcatgagtttcttttaaacggatgtatgatatgcaacgtttaatactaaattattttatttatggctttagccttgaactctacatgttatctatctgatggaagccataatatataaaagctttttaatatt

SEQ ID NO: 247961 - DNA, 353 bp, Gossypium hirsutum
aaaaaaaaaaaaaaaaataaaaaatttaatttaaaaaaaaaaaaaaaaaaaaaaaaggaagggagaaaaaaaaaaaaaaaaaaaaaaataagggtaaaaattaatgaggggggggggttttttaggatccaagtttactttcttttgttttcaatggattagcttttttttatgtgaaggtaaattattttcattggccgtggttttaaaattctgggattgggaaaattttggggttttcgaaatttttcgcttttggaaaatttccttttttcccaattggcatattagcaaaaagtttcgaaccatttgccttttttaaagggtgaagggcttgattggttaatgggatc

SEQ ID NO: 247962 - DNA, 312 bp, Gossypium hirsutum
  unsure (1)..(312): unsure at all n locations
tgcccttccatttttatttctacacaaaatgcatgtaaactaggggattggatgatgaagaaactcatgcaggcttgagctaccatcatatttatattttcatttttataatctgatgaaatttgaataccttgaaggtagagtaacatgtaacaattgattcaattttctttgagcattttttatggatttttttaagtgttcacataagtcaaacttggaatattttcataaaataataatgataaaatttagggacgataatggcgtcagtccctgttatggtttcnaanaaaaaaaaaaaaaaataat

SEQ ID NO: 247963 - DNA, 434 bp, Gossypium hirsutum
  unsure (1)..(434): unsure at all n locations
cggaattacccgggctcagacccacagccgtccggcttatgtatgttccctttagcatacttggaccttgtatccgagatgggtggaataataccttatcaccgagatagctgatagagagaagtccagcaatctttataccgcttcacagtagtcctcagttcacagtaggtggggtgcatggtaggacanttattatgcatttatcagagccgacttctttctgatcaatggtataaatttgatgatgaaagagtaacgaaagaagatatgaaaagggcattggaggagcagtatggtggtgaagaagagttaccacagacaaatccaggattcaataatactccttttaaatttaccaaatactcaaatgcatacatgctggtgtatatacgtgaaagtgacaaagacaagataatatgtaatgtggatga

SEQ ID NO: 247964 - DNA, 149 bp, Gossypium hirsutum
atttgctgcaactgactagttttagaaacattgagtgaaaaaagaaaaaaagaatccatgacatgtttcatagtaaacttgcaaggatgctatgatatgattaataaatattcatgttaataaaagattttatgtacacatttatttgt

SEQ ID NO: 247965 - DNA, 392 bp, Gossypium hirsutum
gagcatttgagtataggatgttataccggctgtttattgtgaattacaaatacatgacctggaaggacacggttagcttgcgtggatgaagtctaaacaacttaccctgtaaagatctatctcactgttgctagcgcagaactatttgacacacatatggcaattgcttatgaactagcatctcccataaagatggtttaacagataataactgcatataatgacttaaagtcgacacgaagaatgtatgatggatggtattaatcatacaaaactatcatttttcctatctggtaaaatgctcatatgattgctcctagcatatatcacctttctttcctcatgtattgaagaagggaccgcaaacaatgaatgggcattatgatccttgg

SEQ ID NO: 247966 - DNA, 288 bp, Gossypium hirsutum
aatcatttcaatatatgataacatttcttctgttcacagcaaaagacaatcacatgaccacggaacatatcaaatccatcgcgtccttcaaaacgaaataccatatcctagtcttacctcattctgttatcctacctattaattacccgccaaaaagataaccatatctaatgaactactatataccacaatcttaacttgctcccccaaaccaacatcaaaccactccaagacgccacttataatataactcttctggtacctatcataccaacatttcttttctcc

SEQ ID NO: 247967 - DNA, 298 bp, Gossypium hirsutum
cccaggcttacgtccacgccatcgtgaaatagcttacttccacagctaaacaggaacagcagtgcgccaaatcttagtgaaataaaggcactacctgctccctgaaataatactcgaccgtcaccaccacagcctgtgcctgctcaacccacggggccacatgaggattaaaggaatgacccggatcatactgtctaagctgatcatcatgggaacacataggctacgggtttataaaatggtccttctgctaatcatgggtacggatcatggaagacttctccatcacatggaccat

SEQ ID NO: 247968 - DNA, 364 bp, Gossypium hirsutum
gatgcccgattcacgttgcgcatgtccgtgtgatgctctatgccaaaccagaaacttacctgactttatgaaagcgtcctgatcctctctgcgagcaagggatgtcgaaacattcaggctggctgattggctaagagccttcaaaacgaaggtgtgattgttgatgaggaccacaaattgcttcataaaatgaaaacatactttgtattatgagggtcacctaccactaaactgttgtcattcgttatgacaagatgcctgtaccggcattggctctcatattattcagactaaaagaaatgcgaattgcatatttaaactcacatacttttgtctaactgtcttggaggtgcacttatattat

SEQ ID NO: 247969 - DNA, 303 bp, Gossypium hirsutum
cacgcttttgctgttctatagtgtgagctagatctaataacctggccgagcatctactacatcgagactgggaaaaccctacctgatacgcaacttaataaccatggaagccatgcgtctttgttgagctgacgtcttatctcaaacagtcgcttattgaaatggaagctaccagattcgccgacacaattgataatggcacgcgcaattgtgcggttcatataacacaggacttgtgcggtacatagcgcttagtggtggatccaccatgtctcctgaaattgctgatatattgagcaagga

SEQ ID NO: 247970 - DNA, 169 bp, Gossypium hirsutum
gaatgacgaaacagaaatgaaaatcaaagaagaatacaatctaaaattaccttaaagctaatttcgaatggatttttagtatctgcatatatttctctgctattctctttgtgacaagaagaaaaaagaaaaaaaccatttacaccgttttttctcggttttatagccg

SEQ ID NO: 247971 - DNA, 203 bp, Gossypium hirsutum
gtatgacaaaacataaattaaaatttatgtttaatacaatctaaaaataccttggcggctagtccgaatggatcaatagtatctccatatattatccagctattatctttgttacaggacgaaaaaagataaataccatgtacaccgttttacactcacgttttatagccaaaaaacaaaccttactcaacttaataaaattg

SEQ ID NO: 247972 - DNA, 394 bp, Gossypium hirsutum
cccacgcgtacggagctctgatgcaattggattagctcctagagcaatggagaaatccaaggccaacagcaaaaaagaatttggatatgggtgctaatttcctcgtgccaaacccgaaccaaaccaacaattcagaggtgaaatctgtagggtgtgttgtggagagtgaaagatcatatcatgcttcatctcatctataggttagttgcaagaaccatttactcatagatatcatatgatctcggaggaacctgtgactataaagacatgctctctattgagtgtagaatgagagcccgatcataaagctggtacctgttatttgttcatcactacacaaatacacgatatcgcctaatgatctgaaggtgttgggttgctaacacgacataag

SEQ ID NO: 247973 - DNA, 322 bp, Gossypium hirsutum
cttagacattgcaatactatatatcacactttaatttcctccaacaaaacagaaattctggggaagcatcatattctaactatgacatatttactaatttacatgcgaccaatcacacgaccatacaaactgacgaggatgctacagatcaagctctatctgctactgttacatctacaaataataactgcttcaagtcctaagcgatctcatgaacttatcacactttacaaatattaacattcctccaagctatagatctatccaatattccatcaggtttatttggagagaatattactaatacctgaaattgatgcat

SEQ ID NO: 247974 - DNA, 226 bp, Gossypium hirsutum
tcaaaacaggaagggcggggaaacttcataactagactaggacatctaaaaaaatgccacccgacccataccaaaccaaacatcaggaggggatgctactaagctggctctatctggtgcagagacatgaacaaagttagctgatgcacgagctaagcgatgtgccgtactcaccataccatacaaaaaggatcgttgcgccaagctctttatctatacaacatta

SEQ ID NO: 247975 - DNA, 296 bp, Gossypium hirsutum
aaaggaatgattttcttatgcacaagaaagtttgaaaaaggtgaaagatttgtgggaaattcatttttggttgatggggttttgttgatcccctcaagcaagaaaaagaaacttcagaaatttttttcttttttttacaaattattgtaataatctgtttgatcatttggactacatatatatatttattgtaagctgaatcattccctgtaaacgtgaagcagtctttaagttccggctgaaggatgtagacaattccttattattaatgtgaagctaaggttcggtagacgttc

SEQ ID NO: 247976 - DNA, 275 bp, Gossypium hirsutum
ccatacgcggcacggcataaggaaggtttattgatctgattttcaacacttatagaccacgcattaacactgtacatgggcgtgtgctagcaaattcatagatcaagtacaacgaaatgagccttaaagtggttaaataccatggacacacacaaggagttattgatctacttgacccatgggtgactggccaaaacctcttatatgcagagagaacaccgatccaatcaatatctgataatcagctgaaatcaccatgctcaatcttgcataat

SEQ ID NO: 247977 - DNA, 220 bp, Gossypium hirsutum
gagatattgaggagggaattgaaaataatgcttcatcagagcgacggaagaagaagaaggttaaaaatgaagttgataagtgattgattttgcggcattttagcaattttgttgttttagatgaccgattgaaggtgggttttgggctttttggatgctatttgtaattgaaggaagtatgtttctaatttataatgaatgaaatctatccatggttatt

SEQ ID NO: 247978 - DNA, 410 bp, Gossypium hirsutum
aaaaaaaaaaaaaataaaaaaaaaaaaatagtttagaaaaaaaaaaataaaaaaaaaagggaagggttatataaatagaaaagaaaggcaaaaaaaaaaaaatgatgaaaaataaaagaacctaaaattaaataaaaggattaatgtagtgcacacctaatatacatcactttaaataaaaatatatcgaaaattttgggctcttttttccagcggagcccactcctactggctcatactgccctttctgttttcctagagagggcaaagttcaaccaggcatgcggcttcaaaatgaacaaattctggggacttaagaggagggaatatgaagcaatctaagattgcattgccgatatgagcgagagcgtgtacaggctgagcagatcaccgcaagagctcacctacat

SEQ ID NO: 247979 - DNA, 147 bp, Gossypium hirsutum
tctcactcttagctcttgtttaactgccatgcatgtatttgtttagataagtctacctaaggtaagacccatggaaagaagctaactccaagtacaacaaacgaaggacagactaactcaccggataagacctcaggaccggtctat

SEQ ID NO: 247980 - DNA, 219 bp, Gossypium hirsutum
aaaccctttggtattaaacctcccacggaacttgcgcggaattacatgggtactccagaggctgtatcagctcagactgcaatgcatgaggagaaacaccaactagtaggcaagggtggagaaatttctacacataaagtacccgctgttgctcctgcatcaaaacctgttgctgaagaaccacatgaagcagtgcctgaagcagcattctgagaaccc

SEQ ID NO: 247981 - DNA, 222 bp, Gossypium hirsutum
cgacccgatggcgatggattcactcttgttttaaaatttttatttcactccgaaaggcaacaacgaacgagagtcttttcttcaaactgagctgtcccctaccttacaatctatatgttagaccctgtcttctcaccaacatattgcaaaaaatccagatcataaaatgtaactatttaatacaacatataaccctaaaacctggcccatttttctgaacac

SEQ ID NO: 247982 - DNA, 419 bp, Gossypium hirsutum
ttttgaatggtgctagcttcaatttttccgataatcacggtctctgcggcatacctggactacctaaatgcggaccccacctctctgctggtgcgaaggttggcattgcctttgctgtatttttgtctcttgtacttcttgttatctgttcaatatgttggtggaaacggcgacagaatatccttcgagcacagcagattgcagctgcatcaagaagtgctccctatgcaaaagcaaggactcaatcatcacacgatattcagatgtcaaggaatcctagtcgtggccggacagcttccgagaatgggccgagcttgctatcgtgatccaatcagttttccatctctttgttgtgtttatttttgaccaggaagatgaattgcagaaacaaccgagttgattttagttcatgatgccct

SEQ ID NO: 247983 - DNA, 262 bp, Gossypium hirsutum
aaaaaaaaaaaaaaaaaaaaaaaaaaaaatatattttttaaaaaaagggcgaaaaaaaaaaggacggacaatattaaaaaaaccaagataacaaacccatacctccgccataatgacaccttctatacaagtccctggccttcaatttaacaaccacctttttacaacaacccggccggtaaaacccttggtcttcctaaatcaaaccccttttttcccatccccctttctacccctgacgcactcgcgaaaagcccttccc

SEQ ID NO: 247984 - DNA, 159 bp, Gossypium hirsutum
  unsure (1)..(159): unsure at all n locations
ggccgggccaggcgnncgagcaaggcaacaactttttatccatcggctatcaattttataccaaagaactcaactatgatgaacggctttttctaaaaattgccaattcccaattccaaaaacttaataaagatgctcatttatcaatgtaaacacaaa

SEQ ID NO: 247985 - DNA, 134 bp, Gossypium hirsutum
ggttattttgattttgtacatttgggctaataaattgttacctttttactcgaatctctattaatgaccatgtcttggctgctttttaacattgtatcatttgtacattattttagttgtcaacaatagttgtt

SEQ ID NO: 247986 - DNA, 269 bp, Gossypium hirsutum
ccggattttctccgatctcatttgagttttctttctctctccttgctttttgtgtttagagcggggtcctgtcgatcttgtctactctcttttcattccccatcctctatcatgatcatcatgcatggcagatcttgtttacaattgcgtgctctgaaaaaatactatatcagtgactcactgtaagtctttcttctcatattattcaaaaccagcatcaggcctgtaaatttcacttttctctttaacaagtataacttttcaacaat

SEQ ID NO: 247987 - DNA, 235 bp, Gossypium hirsutum
  unsure (1)..(235): unsure at all n locations
aacccaanttttaaaccaaatttttttacccagagnacaaggccaaaccctgaagccaattttataacccaaaggaccaccctcctaaagcttgttcgatacctgtcaaaggagattctatagctgcaagtattgcaaattctgttgacccaattgtactctttaacaaaagtactcttaaaaagatgattgaaaaaatatgagccatctcatgttttaccttttttatttaaaa

SEQ ID NO: 247988 - DNA, 387 bp, Gossypium hirsutum
  unsure (1)..(387): unsure at all n locations
gatccttcgcgcctagaggaatttcagcccgaaatccctcctccacttcaattttgaggaggaaaggaggagaaatccacggcttgctcgcacggtaaggctcctctgtcaccgtttttttgtttattttttttaaaacaaatatgatgaatgacccaaactggaaactaaacgatgcatagaaaactaaaaggattccaggaagaaagaagtcacctctgctttttttgtattctttgtgcgtatattttcgttcgtaaaacattacaaggattaaaatctcggctttatagccgaaaaagagagaaaagaaaattataatataataatacaatatttttcttttgtttgtatttcntgtgctgcttgtttgattctttgcaagtg

SEQ ID NO: 247989 - DNA, 350 bp, Gossypium hirsutum
  unsure (1)..(350): unsure at all n locations
ccgggtccgacccacgccgtccggcgatgtccctggtcatgctcaacctccgtatctctattgaaacttnngccgtgaanntctcatccccgggtcgcgtcgtcttcacattttttcatgggggtgggttttgcctcccacttcacttcnntagggggtctcaaccagtactcgagcctctannacagtacctgagcctcacctctagcaaatgtgtggaccgccaaagaacccatgatgtgtgctnnngctgatcctcgtcacccggtcgataccttnngactgcatcttgctatgttcnncgtggtaaaatgaagctactcaaggaaagtggatgagcaagatgtttg

SEQ ID NO: 247990 - DNA, 429 bp, Gossypium hirsutum
  unsure (1)..(429): unsure at all n locations
gaatgganagggccggacccgacgccgacgcgtggcggcgtatatccgctggctcagcatctaactccgtatttctttgaaacttcgaccgtgaactctcataccccgtgtcgggcagtcttcacgtttttcatggctgggtctttgcttcacactcacattttagaggggctctcaaccagtacgcgagcatctaacacgtacactgagcctcactccagcagaatgtagggaccgcacaagannacatgatgtgtgcctgctcgatctctcgtcaccggtcgataccttgactgcattctgctatgnttccgtggtaacaatgaagcacttcaaggaagtggattgagccagatnngttgaatgtcctagaacaaagaacctcctcataccttttgttgaggtggatccccgaaccaatgtgaaaat

SEQ ID NO: 247991 - DNA, 193 bp, Gossypium hirsutum
taaaaataaaaatggcccaatacatctttgtatatggaagcctcatgctaattaattaatgtagacgatgtgttgcagattccttgacaaggcatccattctgactgaagaagatattgtaaaaccatggcaagctcctaatctattgatactgaacactatccatcgagttgtaggatcttaaagcagtgat

SEQ ID NO: 247992 - DNA, 334 bp, Gossypium hirsutum
tccgtcacctccagaaggagggttatgggaattatgtttgtggtttctgtgttgctgtggaagtatggagaagctgctgccctccactgtttgaaccagggccacctcctccgtagatctgcattcttttttctcttttggaatgtatgagtattttacccggatttaatcatttggaacatgatgattggttcttgtggtttgtcattcttcttcttattatctgctaatctatgtagcaactgagattagagttgcaaaatttatgaatttatagctttcttgtaattttatgtcttcaataatatattaaagataaaaaacaatgtcgttt

SEQ ID NO: 247993 - DNA, 102 bp, Gossypium hirsutum
gaggtgctttactaagcaaacacccgtgactcaaccgttacttgaagagcaccttgagcgacataaagtcgctcgccaaatgaacccacaagccccggatct

SEQ ID NO: 247994 - DNA, 417 bp, Gossypium hirsutum
cttaggtttaaagtcactttacacactcattgcggagggtatggcagatttggaatatctacagccttccattgccgttgttctaggttttattggatgcaaaatgatcttggatttctttggacttcatatatctacggaggcatcacttggtttggttgcaactagtcttagtgccggcgtactgttgagtttagcaaagaaagctgactagctgaaatcaaagtgcgagagcagatgaagggtttatattttgtatgtttgttcttctacgttaagtgagcaagtgagctctaaaattgctgctcaattctttgtttctcacctctcttcatcaatgaaaatgaagattaattatataatcaatgaatgattcatttagacgttgccgggaagttgatgctcgaattcaaagca

SEQ ID NO: 247995 - DNA, 277 bp, Gossypium hirsutum
tgaataatgtgcaattttagtttctttggttcctttaagactttttatctggttggtttcaaatattggctttgaattatttgtaaagttgtatagactactccacataaagacgaaatgtacaccaaattggaaggataaatgcctttgtataaaatgctatccgttactaataaaaaaaaaaaacaaaaaaaccacaaactgtatatatatataaaaaaaaactgcgggtaagcgagaatagctaagccactaatgtcttgacgaaagttttacc

SEQ ID NO: 247996 - DNA, 284 bp, Gossypium hirsutum
atttttatgaaagtaaactcagctagagctgggggcattcaacaagttgttaatacttgattgaaagcaattatcatgcatgatctaattactataatgttagttttaagcaaataaaagttaatcccctggtgcttaattctgggacaggcatatgcatacagggtttgcctctcagagccttgccttgtactcttttcaacttaatgaattaaccatttggttatttactcttctttttcttctgcttttttttttggctgccgaatgaacggatgctttcc

SEQ ID NO: 247997 - DNA, 235 bp, Gossypium hirsutum
atcgacaccatagcacattacggtagagcttgtgacatgcaacaagttgttagtactggagtgatagtaattaacatgcatgatctaattactataatgttagtatcaaacacataaaagttaatcccctggcgcttaattctgggacaggcatatgctttcattgtttgcatattagagccttgacttgcactcttttcaactcaatgaattaaccatttggttatttactttt

SEQ ID NO: 247998 - DNA, 297 bp, Gossypium hirsutum
aataggtcaataatttattatctttaagatttatacatccagacgccccagaaggatccagaggatggttctttgaattcaggaagccgccacccctaaactggccaaaggagtatattggggagagcgaccttctattttgtgacacatgccactggccccgtgaccatcatgcaaagaacaatcacgctccagcatgcactgagtactgtacataatattttctagtttgatatcccaaacaataatttgatagacgagtgtatattgctagatcatgctttaccaaataactta

SEQ ID NO: 247999 - DNA, 276 bp, Gossypium hirsutum
gtttagaacatacataattctgtttagatttttaatacgtaatatttgcctgggggcggggatcaaaatcaatgaaagtgcgaattattcacacaggtttgagatgaaattttctggtcgtacgcaactgaaaccgatatcgattcataaggattataacagtgctaacattataataaatttgctttcagatgaccatatctctaagttgcgtatacttgataaatagaatgttgagttttacatattcgatataaacacggcaagacgagtgat

SEQ ID NO: 248000 - DNA, 395 bp, Gossypium hirsutum
ggtacatggactaatttatctatttttttagtataggagccaaaatgcaatccaacttctcgtataggggtctctatgatacttttactgctcaaacacagagtatcagaaataaaaaacttgatttgttattacttttttttgggggggtttgcaggcttttaagaaggctagaagcatgggactgggagacatggatttttcagctgtgtttgagaccttgaaggttcttaaacattcatcttaatatatcatatggatttataaatgtcatgaaaacacgaacaatgtaggggactatatacttatttagggttttgattcttacttttgaacaaccattcagtacgaaactggaatttttagtgctacaataaataaattcaattatgagg

SEQ ID NO: 248001 - DNA, 226 bp, Gossypium hirsutum
gatgaatcaagagtttcctgtttaggagattcaagattaaaaactcttgatggcaacgtagaaattagtgctctattatttcatatttcgaagccactcgctctgaactgtcatcatgacatactttgaagaccgctactttctctgtttgaacacatactgctgtcattgtcattttgatggctgaagaattatgctactggatgcactggagtagaatttataa

SEQ ID NO: 248002 - DNA, 216 bp, Gossypium hirsutum
  unsure (1)..(216): unsure at all n locations
agcgacggggtagctctcatataaagtcacctaaaatcacttctctggccggcatcctacaacattttttttgtgaaaaccccgagcanccccaacctaaaaggcccggaaaaccttaccatttttaaaagttgaaaccctaggaattagaccgaaccctttccccctcccaaaaacccgccaagcaggatggatcaatggacccccccttgaacc

SEQ ID NO: 248003 - DNA, 248 bp, Gossypium hirsutum
gcaagaatactttgagattcctcctaagattgtgaatgctaaaagagctcgtcgatgcaagcatcatcctcattgaatgtgggcattacccatccaagttttagctgcaattttctgctcgtttgtaactgtcacccacgtatattctcaaacttataatccacccctccatattcttgacatcccttttaaccaaccatttatcatgtttcaaaacatctatcctttattgagcacattatctacca

SEQ ID NO: 248004 - DNA, 211 bp, Gossypium hirsutum
cggaggcgtggagcctactctttttaagatttaactgtacaatgcaacctatcgcctaagagggggggctgaacaactccttctatataatcccaatatagatactaccaatctattccagaacagaagaattcaacgtattaaatggctaccttcacattcgactagatacttgctggtcaaaaaactaagaaacccgaccctcaaaggt

SEQ ID NO: 248005 - DNA, 161 bp, Gossypium hirsutum
gtccatctttttcttttaaattcccctttctacctcaattggattggatttggagctcagctggctagctatcagtgtagaccagttgtatttttcaatgattgtcgcaagtgtgtgtttttgtgtacgaccaatgaagcaatcaacaattattttctatc

SEQ ID NO: 248006 - DNA, 343 bp, Gossypium hirsutum
atcggagctttcaagggaaaacaggcttcactctaaccagcacatctacaagccttagtccaagctattgaacgctgagttactatgcaggcaccacagaaagggatgttgtctctaaacactaaaagtacaggctagactccagctgatatgactaaaaaattagctacaatgggtactactactagctctacctaaagtagttcaactacaaacttgactggagacgcgctgacaacaagctcattcagagctggttcagactgaagattctcatttggacttgctacacgagatagtactctatccagagcaacaaatagcttctcttcatctaacatga

SEQ ID NO: 248007 - DNA, 305 bp, Gossypium hirsutum
ggtggaaaatttgaaagagcttggtggtgggaaagcaagccccaacatgtccaagggttcccctagggattggctagacccacattgcaatgaatcagaatttgagaagccataccctcagtgaatcggagctttccttagcttaagatagttatcggtgcaaagttcgacgttccagcaccatttattataagtctttatcttgtatgcaagcaaattatcgagcttatgtattttgacaataatctatcaaccaagccatttggttttggtactaatgagaagacattgaaagatatatttat

SEQ ID NO: 248008 - DNA, 268 bp, Gossypium hirsutum
aacaaaaccatccttcatattttaaaaataaataaaacataaccaatattataattcccaggagaatttttttttctttatattttaaaccaaatttattaatatttatccacaataacctaccaaaattaaactctgcttaactgaaaactcttatctttgctaaacttctacttaccacttcacatgtaatacatcgttctgtctttaaaaaaccaatacttcacactagatcaaaaaacaatctcaatctaaatactcctctttc

SEQ ID NO: 248009 - DNA, 269 bp, Gossypium hirsutum
gctgcaccacaactacagagaatagagttttggggaaaaaaagcgtcgttgttcttgctgcttcttctacttcgctctctctctttctccgaagttcctccttcgttcttttatttattcagtcttgtaaaagatggccgtcggtgaggatatccctcccctcgtctgtgatactggaactggattggtgtttgccggttatgctgatgacgatgctccatgcgcagatcatccctttcttgttttttgaacccctccctcttctgctt

SEQ ID NO: 248010 - DNA, 133 bp, Gossypium hirsutum
tacactataacctgtatatagtgtaacctaaattcaagctactggcctgtgagttacaacgcagggactgagaaaaccatgtcgttactaaacattaatagtatacactagattccccttgttacaactgaga

SEQ ID NO: 248011 - DNA, 351 bp, Gossypium hirsutum
cacggttttgcatggttcggtggcggtgtggagattctggttcgagagaagagtagaggatttggcttgggattggctccgacagacggttggtgacatattgttggctttttcttgggtattctttttggtttactcttggagagaaaagtatgactagatttgaatttgtttttgtttgctgcttggtatggtgtacattttggtgaagttgatttgaaattcagtgtaagatgattgggtatgaatcagaatttgaagattcttcaatccgtcttgctatttttttcttattaactatccattaaaatgctaatgattccgtgaaatgaaattcaaggcttctcccca

SEQ ID NO: 248012 - DNA, 257 bp, Gossypium hirsutum
gatgaatgccatataaatatcttacaggtttataacacataacatgtgctgaaacccgagggacagttactaaaatgactggataaacgaaaactactgcattatttcttttatactactgacacaaatagcataacggctacagaaagattcttcacaagatagagtgatattgagatgctcgagataagacttatgacgtagctgagggtaataactaagtccctgaaaggtctaggatacacatgccctttttc

SEQ ID NO: 248013 - DNA, 176 bp, Gossypium hirsutum
ctctgctacatcctccggaaaggcatactcaatcaactcctgtttccatgttctgctacttgaatcaattagctctgcaactttactatcgttcaaatttgaatttaaaactggtaatctatcacgcggtaaacctggaatccaataatcacgactgattgaaattttcgtacctc

SEQ ID NO: 248014 - DNA, 294 bp, Gossypium hirsutum
tctagatcgcgagcgccgccctattctttttttttttttttttacttattagcttttttggcttttgggaaagattgccactaaaaaaaataacgtccaagcctatttcaaatacaaatgccacggcttactcaccccggtcgctaaaatatatattaaaacccaggtccaaaactcaacccgtgctcaagaaacggccaatgatggatctatacatgttgcgtaattccctgagcggggtacgagacacatacccttccacccctgatctacaatatagcatggatcaccagc

SEQ ID NO: 248015 - DNA, 248 bp, Gossypium hirsutum
cggaaaggctgtaaaggtcaaccattcacttaaacatacaggcagtggtgaacaagatgccacctatgaaattaagctaactgatgcatccttgagggaagccgttgccaagacaacgggcttgtgcatcaacagtggatcatggactggaattccaggctattgtcgcttcaccattgccttggaagagagtgaatttgaacaagcattggcttgcctagtcaaatttaaaagcatagtcgataact

SEQ ID NO: 248016 - DNA, 162 bp, Gossypium hirsutum
ggggattttgcttggtgggctctggttttgtgtggagaattctatgctcttctgttatttccctttgattgaagagagtcccttcgggaggtttgtttatgacaaggatacttatcacatatcatatttgttgaagtttgaggatgatgatgctatggctgt

SEQ ID NO: 248017 - DNA, 140 bp, Gossypium hirsutum
acggaggaatgcactgacaactacatacagctttataaatcaaaggaattaaataatccagggggcgccttgctttagatccatcttgaccaatgactacagcaaaacggcaaactacgataaatacatctcccacgact

SEQ ID NO: 248018 - DNA, 220 bp, Gossypium hirsutum
  unsure (1)..(220): unsure at all n locations
aaaaaaataaaaaaacaatacaattgcagttaaaaacgaaaggcctgacttcaggagccaggggctcgtacacaaggagaagaaaacattggccttttatagcacagctacctgcgaagatatgcgncgagccatcatatagcctcctctgggaataccccggaagttcggatgccaagcggagtgctggatatgccccgtactcaccctggtgggatac

SEQ ID NO: 248019 - DNA, 413 bp, Gossypium hirsutum
  unsure (1)..(413): unsure at all n locations
gttttgtgaaccacagggtccaaaccaagtgaactagggccaggtatgcacaaccagcccacatcaggcacatgaccgtgttaggctgcgaccagaacggagaagaagggtccagccggctctggaaacgcctggtgtgcgcgagaagcacctggggcgcgtgggagaagtgctgaatggtgccaaaaacatacccacaccacgtccaacaagaagttgtggggctttcaattctttccctgaagatttgaaccatgggagttttggtttcaacattgaagcctgtaccaatctttaccattatttaacattgtcatttactcaatagcagacatttctggtccctccccttttgattaacaaatggcattcacatctatattagtcnaaaaaaaaaaaatttaaaaaatagg

SEQ ID NO: 248020 - DNA, 363 bp, Gossypium hirsutum
gtggtgtcaaaatacacctaatggttatctgatcgatttgcctttagatatctgtggtgtccaaatacacctttaatggttatgcgatcgatttgccttcaaattttcatgtcaacccagtttttaatgtttctaacctgtattcttttgagggtttcaatggagatattgctaaaatctcagaccaggtgcaccgacttcctaaggtttagattgaggtttttgaagatgtgttggatgttaaagaagtgaggtttagaagcggtaataactataggagatttttggatggctaggattagtttttaaggcttaaaatctagggtaagaattaaaccttatttgcaagggctaataaccttg

SEQ ID NO: 248021 - DNA, 381 bp, Gossypium hirsutum
attcagcctaatatgggcaatattcgctattccgatttgcagaaatgagcagaaattttgagagaagagatgagagcagtttgtgggtgtggctaaaaaagtaaatgagccgcttagaagcacttttttgccggaaaagtagaaattttctgctttttcatcttttggaaagtgctttaaaaaagttactccactgctcattgattttcacccaaaaagcacttttgggtgtaaaagtgcttttcaaagcacttttaggcgtaaaagtgcttttcaactggggcaaagaactggccctaagtctaaaagtgcttttcaactggggcaaaaaattgggccctaatctagcaggctaattactggtgaattggatcaggtttt

SEQ ID NO: 248022 - DNA, 122 bp, Gossypium hirsutum
gcaactttaaataaacttcaggctagaaaaatgacagtaaagctggatatatacatgaaggtcacacatgcattggcaatagctggtatcatgtctgggggttggatatgttaccaacttta

SEQ ID NO: 248023 - DNA, 226 bp, Gossypium hirsutum
gttcggtcttcacgatcggatgcacctccgattggtaacactcgctcgactgaaactgaaaagaaattaatggcatctcgacctgctgattactcacgttggagccgctacttcctcttccatacggagaaaaatttgatgcaagaactggagttgcgtacaaaaaatttcccctgggggtactattcctcgttagctgattataatcttacattatttttttttt

SEQ ID NO: 248024 - DNA, 118 bp, Gossypium hirsutum
gtgacctacatgaacgaactggaggggataacaccatctttcccctgggggtaatattataggggcggcgccaataacctgtcattaattttttttaggccacttaaaaaaggttggc

SEQ ID NO: 248025 - DNA, 390 bp, Gossypium hirsutum
tgagaagagagttgagtgtgattgatgggatgtctcaacctctaaaaccggcctccagttacgaatgtacatgatgatcatggtaggttaccatcggagttcatttgttgggtttctattatggatgacagtgtgaactgtgatgaagatgtaaggatgtggatattagatgtatcaaccttatttcttagatttagttgtaactcatttcctcaagagaactgattgtagctaaatagtatatgctaagttgttaacaacagtagatgattgtgtagctcattgtgaacctatgaaatgaaaagaaaacatatgcaacttttctattttatttgtaaacaagttactttgatgtgatttgatcaggggattgaaagaaagatgatgaaa

SEQ ID NO: 248026 - DNA, 370 bp, Gossypium hirsutum
  unsure (1)..(370): unsure at all n locations
nccgcccaaaaccctaacaatcaagagaggttgagagggagaaagatgacgcagaaaggaaatctcttcaaggggcaaaaaaagcagaaaacaatccctcccaatcgccatggaaaagttcctcacattcgcaaaggagttgaccaagttcataaatcactgcaatgagataaaagcggccaccgttgctaacaaggatggaggccaactaagtattgtgaagccacccccagaatcttctggtaatgtgaaggaatagtaatgatgctttgtcaaatagggctccaaattctaacgcaagaacctttaacatggattagaagagattttttttcccaagtaatgcaacctaaaccagcctttttgtttg

SEQ ID NO: 248027 - DNA, 274 bp, Gossypium hirsutum
cgtccggtgcgggaaaaatcctaataataaaaagatgttgtaagggataaagatgacatagaatggaggggtattaaagggggaaataaagaataaaataataaatctgaaacaacgttggaaagttcatgagattagaaaaggagtctgctaatttaatgaataaatttaatgagtaaaaaggggatattgttgttaagatggatataggggaacttaatattgtgaatataaccggagaatagaatggtaatgtgaaagaatagaaatgatg

SEQ ID NO: 248028 - DNA, 143 bp, Gossypium hirsutum
  unsure (1)..(143): unsure at all n locations
acgnggtgggggacatggtacacgcctatgatcatgagagggttgcacaatcaaagaacgaacgagatgcacttccatgagatgaatacctcaccaatgtcccgaaccttatcctaagaaacacaatcgatataccctatgct

SEQ ID NO: 248029 - DNA, 204 bp, Gossypium hirsutum
ttttcaagtacgtgacagttaagaaaagtggtggtggggcaaatattggggaacaagaatcatcaaggggcaattgtattgtgggcaatgggcaacaacattggggaattttattcttctcgggggaaccccatttaacaaatttaaacggtcgattgggtttaagggccaaaaaccgaccagagggtttccacccttcccttg

SEQ ID NO: 248030 - DNA, 201 bp, Gossypium hirsutum
gacacagctgaggtttgtgatatcaaattcagcaatgatggcaaatcaatgctattgacaaccacaaataacaacatatatgttcttgatgcatatggaggagagaagcgatgtgggttcaagttaaaaccatcttcaaatacaactattgaggcaaccattacttccgatggggaatatgtgatcttaaggtcaagggat

SEQ ID NO: 248031 - DNA, 226 bp, Gossypium hirsutum
aaataatctttatggtggggtggggtggggtttagagggttggaaaaagaagaaagatttgagtttgacgtggacgtggatgttcaggtattacagcacaacttaaatctataccacaaattttgacaaacgcataatacatcattatttgggataaccataaccaccgatggctaggaaaacttctcacgcggcgatggctgaaaacaaacgatgatattaacca

SEQ ID NO: 248032 - DNA, 243 bp, Gossypium hirsutum
gccactcaagtgggacaaggtccaggcttaattggagctttatcacattgggtctatggctggtttatttgatctgctggctggtaccatattaaggctgttttcttaccaattcccttaaattcctttttggggttggaaattgaataaaaattatatttattccatttaatttgatatgaccgataatgaatggtatattatttacaatttgaaggatattaccggaaattgatttaaggc

SEQ ID NO: 248033 - DNA, 388 bp, Gossypium hirsutum
  unsure (1)..(388): unsure at all n locations
attctagcgacggtggacagaaaacgatgggagtgtggctaattttgttggagggtactgggatggagatgttttggccagatctgntatcttactggtaggttttgatgcggcttcaactttagtcattgctcggtgacagattcagtcggtgttggtgcctttacctgacatgcgtgtgtagctgggaaagatgatggggttcatgatacatgcacaggaacatttgatgtgaactcgagcttgtcaagtggaccaaattccaagctgctcgtttcaagagaggatccaattgaaattcgtattgggcctatgaaaagtccaatccttattgggcccctgataaagccccaagtccatgcaatgttttgtatgtagatttttaatg

SEQ ID NO: 248034 - DNA, 215 bp, Gossypium hirsutum
aaatgcaaagacattttagtattggaatgagccaaatccgtccgggcctaacaaccgaaaattaatcccaaaataaaagcccaataaatattattaacaggccacaagtccaaattgcatgacccaaatttaaaacctaaacctaatacaactcaataggccaaaattcaaacccattccttagcccaactaccctgggccaagaacacaaggta

SEQ ID NO: 248035 - DNA, 147 bp, Gossypium hirsutum
gcagttcaaaaggatactgattttttcaattctgatcccaggaaacactcccggaaaaagggcactgttctatatcccaccggcactacgaataacctctactaccgcacgacacaaattgtttgcatgcataacgcccaaaggata

SEQ ID NO: 248036 - DNA, 292 bp, Gossypium hirsutum
gtataccacggatggtggaagttccaggagttgccatacacacttagtacctgcctgcctactggagagggatcggaatcaatgaaatcaataagtgatagtagtatgttgtggcatattcatcaaaattctcatttactaaaatactttatgattgtttggatcttccattcttgttgttacaaacattcaaatatctgattgacttccatgataacagttacacacattcaaacataggcaacaactagaatggaagatccaaacaatcataaagtattttagttgttgc

SEQ ID NO: 248037 - DNA, 327 bp, Gossypium hirsutum
  unsure (1)..(327): unsure at all n locations
accgggggtggacccacgcgtgcggaggaacagcaccaggtataattaagctaacttataatttgctgtgttgctattagatgcatatttctatattggtaaccatgaattattgcatagagaaattgtgagagttttggtattataaactgagttcaaaactgaagtgaaaacgccagtttattctcatgcatactgcattctcaaaatttaaatatggatattggtttttaaaaaggctatgttcaccaaagtcgaactttggattatgattaaccttaanttaaatgctttttgtttggaatgctggaatgcttggattattct

SEQ ID NO: 248038 - DNA, 208 bp, Gossypium hirsutum
aatcccacttaataaagtgtgtgaatttgtatggtatcttttttactttctttcaactttgcatctatttagtaaatattaataaggttaaattttgttattagcccctatattatgtaaaagttgtgaatttagtctttatgttctaatttggtaatttataaacattttactctttgaaattttaattgatccaaaagtaagtgtt

SEQ ID NO: 248039 - DNA, 265 bp, Gossypium hirsutum
  unsure (1)..(265): unsure at all n locations
gcggcggaaagnaaacattcatacggttaaaaacaaaaactagcccctgtattttgtaaaagtggaaaaacaaaacggcatcgaccaacatgattaacaataaacattgaacgtcatgaaattataaccgatccgcctgtcaattgttaaaaaaagaaactagctaccgggcaggccatctaaaagatccaaactgacccacccagacatgcaatagaaccgctcttcaataaaggtacctaaaataaattaacaagcccatctt

SEQ ID NO: 248040 - DNA, 266 bp, Gossypium hirsutum
ggattagatgatgcagtagaccataactgtttggataatgatgcagaccgggagcttgtggccttgcccattgaatcacgagacttgagtattcaagatacacagtctccgtctttgacgtaggttatgttggacggtgtagacaaactggaacactgaggcctgatgcatgggagtgccacccgtactctatgatataggcgtacgttatacgtgaagcccttctactatttgggaaatacatttggcaaatcttgcgcctaaaa

SEQ ID NO: 248041 - DNA, 111 bp, Gossypium hirsutum
ggagccaccaaccaacttaattgttgggtttgaaaaaagctttgcggttgtgtttctgggaaattattactaaattaataggaggaataagcgaatgccaaggctttcttc

SEQ ID NO: 248042 - DNA, 260 bp, Gossypium hirsutum
  unsure (1)..(260): unsure at all n locations
gcgggcgaatttgtgatggatcaaaataaaaaaatatttttttttttgnnncangaaaaatatcaaatcgaacgttttgatttaaataaggatcctccgacccaaataatggatttctcccatgtttaaacttattatttcgtttttcaaaaaaaaaaataaaaaaaaaaaaaaaaaaaaaaaaaacaaaacaaaaaagaaaaaattctattttttaaaaaaaaaattaaaataaattggctgcctttttaaaatatcca

SEQ ID NO: 248043 - DNA, 232 bp, Gossypium hirsutum
aatataaaatgggaatgctttatcatggaaaggtccgtataacacaaaagactttcacagctctaatttgcattctcaaagggaggggggggggatacacaaatggtttcaaaaagcatcaaaattcaagtataatgtcagaaatgcataaccccatatataattttcaatcaactatgctataaagaacctaaacctcctccaatccactgaaactcaaccatcatgactc

SEQ ID NO: 248044 - DNA, 301 bp, Gossypium hirsutum
  unsure (1)..(301): unsure at all n locations
acccacgcgtccgagcaggcnataaaatatttattacattttcttttaaacaccctcaataaaacaaaagggccgcttatatataaaactagtgcagcccccccccacattgtcaaaactagggctgctgtatacacatgaagtttcaaacagcactataaacgatgcataatgtcacaaaaccataaccccccctataataccacatctactattctcttattaacctaaaccccctacaatccactctaactcaaccattatgactgaatcgtcacaaaacacaagctccacatgtgaa

SEQ ID NO: 248045 - DNA, 216 bp, Gossypium hirsutum
aaaaaatgataccgtttccttactaaaaaattctagttaagagaaactgctggtaaaattcgtgagaattttctgagcaacatcaactggaaaggtattattaattaagtctcaaaaaaataaaagtatctctagatgaccatccgtctatgaaaaaaaaagtttagtcttctttcaccataacgaagaagcccgcaccgatccttctttccaaca

SEQ ID NO: 248046 - DNA, 395 bp, Gossypium hirsutum
cgtcgaaccaccatttcttcggtgaccgacggttctcaggccagatctagccttcttttacccacagacttccctttaaactccgatctcgacgaagtgaaagggaatcaacagcctaatcgtagggtaagtcctcttttcttttttctttcgctcttttttgatgtaaatgataaagaaatcgataaaaacaggtgaaaagaacagaggattaagaggagaaaaaggtcacctttctcggattttttattgttttctattggatattgcctccatttttcgtaaccttacaattgattcaaagcttggcttttatagccgaagagaaagagaaaaatgctagaaaataaagcataaatacaatattctcccttggtttttggctattctgctgg

SEQ ID NO: 248047 - DNA, 409 bp, Gossypium hirsutum
gccaagcggtcagcattgtctcgacacagaggagtttaacattgtctgtgacttaaaccaggctatgaatcaggagcgctacaaggatgccgccgacttgagagacaagctaggtcagtttcgagctcaaaggaacttgaagaaatatacgtgacaggtggtgttaataaacccaatttaggttgaatcttttaaggtgtaattgtgtttcatatatcagtctccggctccagtcaatagaccattgacgagttcttattgatgtctcagtcgttccattggcgactccgattgtaaataggaattattggtggaagccgatagactcagcttggcagtggcaacatacggtagcgaagcaatcaagtcgggtatatatatggtatcttctaccatatatgtaaggggg

SEQ ID NO: 248048 - DNA, 400 bp, Gossypium hirsutum
ctttcatatgcaatttcttcgtgcttttatctgcaaattcaacagctttctgccttttgttctttgggttccatttgtttaatgggtttggattctcatcgtctcccaattggctcatcttcatgtcagctgctggtgctgttctttattccgtaattattgccaatgcacttataatttgtaacttagctttggtttcttcagggatggagaaatcaggtgggtattcagcaattttaagagcttgtgttttaataaagggaagggcttcaactgctttagcattggcagtgccttggaatctggcgttggcagccattgaagctctcttccattaccgcgttgtgagagcctatcatagtggtgatttcaacagtttctcaattgctttagaagtggt

SEQ ID NO: 248049 - DNA, 313 bp, Gossypium hirsutum
ggtaaatataacagcaccatacgatgttattttcatgttcggattcaccgggtcggaacatttactgcagaggaggatttggtagtatgttattggtaattaaagttatggtgtgtcgctgaatatggtcttttgatgctgcttttgaagattgttgtgttttcgcacattttggatttggctgtttatgctgggggctggaatgcaatggacatctctgtatcttttgttcataaaaacattagtattctttttagattacttgcaaatggtgaatggcacggtcgatagactttatttgattcgagctttt

SEQ ID NO: 248050 - DNA, 189 bp, Gossypium hirsutum
gccggagataaacagcattttccccgcccttttggaacttaaataaagaggggacctggggggaatactggatgggatcgcggccaccaaattatacattattgcgggcacatccctcaacactatgacacaggcctacacacacttcggactacagatcaccgcgccttatgtgagataagcaacaag

SEQ ID NO: 248051 - DNA, 144 bp, Gossypium hirsutum
attagatgatacaccagtgatgaaaataactggaaaagaggtgtgactcgatatgcttattgcagtatcaaattggttacttgagaaccgttataatcggttaccactcgtttgtagcaatgttacctacttttctgtttgcgc

SEQ ID NO: 248052 - DNA, 339 bp, Gossypium hirsutum
ctggaggggaactaatgattacatgctgcataatgaatacaaatactgatggaaagccatggacaaacactacagcatattacacatatgcataacgatttcaatataaatcaatgaagcgttgtatggatcataaacactagattccttcgataatttactgaacaagcagcggtttactgaaacaaggagacgccctctctttaggagctgaacttgacaacacatacctgcgaactcctactaataatgtaagtctcgatcatgaaaagaacagaactcttgtattacacaaagataggggtaataatgctgcggtgcggaattcaatgggataaa

SEQ ID NO: 248053 - DNA, 381 bp, Gossypium hirsutum
  unsure (1)..(381): unsure at all n locations
tttacgcgcccgggcaaggtttggcctccttgtttgaccacaaaaacgcatttttgcaacgcgctagcttgggaaccgncgcaacccaacgcaaaaaacggggcgacggtggataaaggggggacggggaacacaaaagagtaacgcatcgcattgaaaaaaccggacattaccgtgtggtcgggggggcggatacgggaagaaggcgagccgcgtggccagtgtctcaagagggaacacatggtggagaaggggtcaaaaggtgaccaaaagcatgcaattcagggggtgggagcagcacccgcagctggaagcgaacgattgcgcatgagccaacgcgggacccatggggctgccttgagctccaccaaggggaaaagg

SEQ ID NO: 248054 - DNA, 313 bp, Gossypium hirsutum
  unsure (1)..(313): unsure at all n locations
cggtcgacccagcgnccgggccaaggagaaaaccccaagagggctggaaaggggaaggacaaagctaaagagcaaaaactgaagccaagtgatcatgaactaaaggatacaatttgtgaaattcttaaggaagtggacttcaataccgtaagaactgtatactaatataatgactgcagcctttactggacttttcttcacaacatttttggtctggtccgactgctaagactatattggttgtgaggacgtgtttcaatgctcattaagatgccattgataacaattgtaatattgttcacattcattgatt

SEQ ID NO: 248055 - DNA, 354 bp, Gossypium hirsutum
gccaagtttcacaatgatttcctgatgaacacatgattattttctgataaattttagcagaaccaaacattctatagtatcgacttagatcgtgtaattgtttgtatatattggctctaccctttagttttgctgagttgggttagccaaattgtttttgttttgttttgtattgtagggttgtttgttgtttggttttggttttagcatctgatgtacccagaagttatgaccttttgacctttctgtggttttttacgattgtagaaacactcaagtatgtcaaattcactttatttcccttggtttttaaaaaaaaaaaaaaatgagaaaaaaagacctacataaaataac

SEQ ID NO: 248056 - DNA, 406 bp, Gossypium hirsutum
aacatacccaattaatatttccattttatattatttctttacttacacaacaaacggcgcggtttttttttataaactaacacccttcaaaaaaaacatttaaatcaaataaggcacatttttaaagaaattttttataaattaaatcatcttgaactttaaaataacctttaaaaaaaacttactgccacttttttcctaaaaatccacaacctaaaaactttaattgacaaacttactacaaaaaataaattccttcttgaacaatcttaacatacataaaaatttacactgtaattccattacatcaaaacatttgttaaaaaaatttgggttcctaatcaaaaaataaatttttaaagaaattatcttgtgaataccattctttttattaaggtttaaaaac

SEQ ID NO: 248057 - DNA, 223 bp, Gossypium hirsutum
  unsure (1)..(223): unsure at all n locations
gtcgcgagcgccgccctttntttttttttttttttttttttttnnnnntttttaacaaataggattgttcttcattataaactaagatccttcaaagaaaaggtttaaatcaaatagtgcagatgttgaaagaaattgatgataaatcaaagcagcttggacatcaaaagaagcctgaagaaaaaggtagtgggacttttttcctaaagatccaaaacctaaa

SEQ ID NO: 248058 - DNA, 290 bp, Gossypium hirsutum
  unsure (1)..(290): unsure at all n locations
angcggaacatggacatttttaacatatttttttttttaaagaacagacaaggacataaatgactggttttatattaatatgtagaagaacctacaaaaacatctttaaattgaagaatattgctgaaataatattacaatattatctgcataaaaccttaacttacaaggtcaattttagaaaaatttacatactgatattattatggctaaacaaactttaacaaatacattgtctccttaaaaattaagaaatataactttgtagaaaactttttatgggaacaata

SEQ ID NO: 248059 - DNA, 392 bp, Gossypium hirsutum
  unsure (1)..(392): unsure at all n locations
accgacgcgtacgcangggcccaaacagacaaaaaatttatattttttgcaaaaacaaaaanaaataacggggagcgaggcttttgaacagggactatgcaaacacaaaaaaaagcgaccgaagtacaatacaaaagatgattcaggatgaaccaagacagcaaaacacaatgcatggccacaacgctggaaaggcaaagcatgaggatcatcacgatgtcaaacgatcaaagcataccaaaatgaaggaaagaatatctgctgaagaccaagaatcaccactaaactaattgcagaaacttacattgaaggaagactattaacactatcatggacagcgaccttgttccatgtgctcagataacaaaatcgtgatacaaaactatctatgc

SEQ ID NO: 248060 - DNA, 392 bp, Gossypium hirsutum
  unsure (1)..(392): unsure at all n locations
ccgaattcngggcgaccagcgtccggccgcggaaaacttaaacaacccaaacaaacagaaaaaaaaaagggctgctgaagggacagcctttgtccaagactggctgtttttcaaatacgtatccttctggatccatggtgtgctattattactcccctccaattatgattctccaaaagggcaaatccctaattaattttctctctggatctttttccattaatggggttctgcaagagtacctgcatactgttctagttgtaagagtgacgattttatttgctttaaaaactttttgtatgaatttccttttctagacttgtaaaagaaaagatattatgtatgaatcaagaatgccattcgaaccctgcgaatatttggatattatgtgt

SEQ ID NO: 248061 - DNA, 444 bp, Gossypium hirsutum
cttgttttttacttcgtttctaatttcctcctctcatcccattttccccttaaacttatattgataatatccttaaactttcactttgttgattactttcctgagccaaatatcagtacaatgtcaagcagaagatcacgttctaggcaatcaggtgcttcaaggatcactgatgatcagatcatcgatcttgtttccaagttgcaacagcttatccctgagcttcgtggaagacgccccgacaaggtatcagcttctaaggtcttacaggaaacctgcaactatatcagaagcttacacagagaagttgacggcttaagcgatcggttatctcagctattagcttccacagacaccgatagcgaccaagcagccattatcaggagtttacttatgtaatgatcagatttttggtttttttttcctagattaagtattactcac

SEQ ID NO: 248062 - DNA, 405 bp, Gossypium hirsutum
cagaaaactgccccctttcctccatattccttttctgctagggttagaaaataacccatcattgccgccgtccgaccacctcgccaccatcacatcggtgacccgcgatgcaccaagatggggtcttttagccctcctttctcatgcttatcggagacatgctcccaaaggccgaaagacaaaggctcagtcccccttttgctcgaccacgccgaacggagaagaaagctccgacgacgcggtcacggggcggatctggctctgagggtcaacgaggcagaggtttgccattctggtgcaaacggtgtcaggggggaagagcatcgggcgttagacgtgtcgacggggcacgtgaggcgcgcgacgcttggaagatactagggtttttaggtctgccaaaattgg

SEQ ID NO: 248063 - DNA, 220 bp, Gossypium hirsutum
acagatagagatcacaatcacccccctttttttctcttttgacgagaaaacaacccctcaaggacagatgttctttatatttgtcaccaccacatcattataccctcgatgcaccaaaataaatttttttatacctcattaaccaaccttatacaaaacatttcatccaacaacactaagacatacgcccaatcacatcttggcttctatacacacatcg

SEQ ID NO: 248064 - DNA, 219 bp, Gossypium hirsutum
gacagactcacaatatggtgtgggggggattattggggcggatccatctttaagagaataaatgtatggctgacattgggtgcaaaggacgagcatgaagcccaaagtgcagttagcacttgggcggccaatctctaggatccaaactgtcatgcgcacgcatacgactacctatctctagtattgtgtcagatgaagtgcactgagcacgcggcatgg

SEQ ID NO: 248065 - DNA, 346 bp, Gossypium hirsutum
ctccttcagcaccgtttttcttattttccattttctgccctcagcattttctcctacatttccctttttttttctattgattgcagaggtggacagacaagtatcaggtaacagacataaacaaatatctccgctgcaatgatgataacattactcttttctagtaatacgggaaagacaatatatatatgtcaaactacagttacatttcggatttaatctttttaccttaaacaagaacattttggttatatttaattttcgatatgtttttattttttgatatgtatcatttaaaactattttagtattttattattaaactatttttatttttgatgtcttt

SEQ ID NO: 248066 - DNA, 387 bp, Gossypium hirsutum
gctgagtttaagcatctcaataaccggagttttgctctttgagatcttgtattgcttcaattctaactttgtcatccagcttccataataattggcagggttttggtttggggccgtcttaacaccggaagctcgaaatgttattgaggggaacgtgttccggcagtagttgaagttgctggtgtaacatatgtaactacttaagatgactagcatctttgctctgtaatttatgccatgtctacatgtttataaatctaatgttagtggtagtgatgacattgtatcagcttaatgaatgtaactatgtttttatttaaccctttgggtttcttttttcggtaaaaactaagaattaaattggtattttgtccgctctactaaaaa

SEQ ID NO: 248067 - DNA, 436 bp, Gossypium hirsutum
agcccttgtatagcagctgatgtctgtgccatagagttcacctaaatgacaggaaatgctgcttttgagggctgatgagatgatgatgcctgccttcggagatgttgtaaatgaggcaaggaccttgtccaggaagcttgcaggcctcgaactttgcatgaggcttcagggacattttctatggtaagatgctcaatcccattattgttgaatgatcgatgaaactttcggagtagatgtcccatggaccaagcttcgaagccgagtggttatgatcacaaccaagcagtggaggttctcagtgcaagttatcaaggtcagtgcaatgacacttctagcattaatccaatgcttggcggtgttaggcgatctcttttcagcttccaccattcatttatagtattttcttcagcaccagagagcggatgtgggacat

SEQ ID NO: 248068 - DNA, 402 bp, Gossypium hirsutum
actggataggtacattgcattaaatgaatcatgcaaggctgccttgctttatctgcattgctgtgacttgtactgggtgttgacaccgttgctggatcgaggatagatgctcgagagtgccggggagcttgaatgaaagagcatgctatgcctgaggcactccatgagcttgtaaggattgaggctgccgttgccaacccagatgagaaaaccaggtgccatacatcaggtaacattgaacgtatggcggcgaagattattgttaatgaggagttcgaaccaaggccaaacatttcagcttacggtgatgacgctaatgtaagaggagataaatgatcatcttttgcagaagattgtgaaccgagacctaacatttcggcttacggcggcgatgatgctggt

SEQ ID NO: 248069 - DNA, 435 bp, Gossypium hirsutum
cttcaaactcgacttctagcacaaaaatcaacgttgaaattgtgtttccggtctcgtcagactctatgacaaaaacatctacaagtgcatcacctgcacttatatcagtcaaagctggtgatgatgttatactccctgttgtacccggagttgcaagcggtgaaggatgctctattcatggtggctgtgcatcttgtccttacatgaagatgaactctcttagctcgctcttaaacgtttgccaccatttgcctgatgaaagaaacaaccttaaagcatatgaaaccgaacgattcaagtcgcaaaccccacaaggaaaatctattgcagatgttggatgtcagcctatactgcatatgagacactttcaggcaaagaaagaactgtcagaggaacttgtctaccaggttcttggttcacacggtaatgggaaat

SEQ ID NO: 248070 - DNA, 160 bp, Gossypium hirsutum
ccggttgattactggttcattgttgtaagctatgacagtagttacctattgagttttattgattttggtatatgtacttttttagtgaagtggcactaagtagtttttcatttttgaaacgtatgtttgaaccttcttatatataacagtattctagagc

SEQ ID NO: 248071 - DNA, 362 bp, Gossypium hirsutum
ggcatcgctgaattgaaaaagaaaagttcaaaacccaagcgaccttccatcaaagcccttttcgaggatgaatcggcagcagctgccagtcaacctgtccaagggagctttataaacctcttgcctccacaaatagaagaagccccagagaaccgttcgagaaaatgaatgctgccatatcctcgtgataaccttgtgttccccggtgcttagcgtttgctttttgccacattaacatttcaaagttttaggggcaaaggtccccaaaacaaagtggtttgagatatgggatttggctcttcctgagccagttaggaaattgttcttttctgtaaaaataatatctgaaagtaaatattttt

SEQ ID NO: 248072 - DNA, 222 bp, Gossypium hirsutum
agcaagcgtacgactgtttgactaagtctaggccatagtagagagtggaagactgatgggaagaatgaagaatgcccaatgcaatgcccaaggatattcacttggagcttcagacgaggtagatgacaaacctattctacctgcaaaagtccatgataagggcgaagcataatgagtctccattgttgtcgtcactgatgacgatgttgctgacaagtctaa

SEQ ID NO: 248073 - DNA, 204 bp, Gossypium hirsutum
gaaaccgggacgaccagcgccgggcgacaaaccaccccaggaacggaaacagaaaaacaggggcgaaccgggcggaaaaaagagagcccgacacgagaaacggaaaaggacgcaacaagcacgcacccgcaggacaagagacgcaaaaccggggcaaaacgaaggaggagcagaggcgagacacaaaaagaaagacaaaccggg

SEQ ID NO: 248074 - DNA, 314 bp, Gossypium hirsutum
gggagcgtatattgactcggctataaaactttcataccacaggaaggtgatgactctgggatgtctagagaagaagaaagcgaggaggacgaagatgaagagcttcctgacgctgcagacgctgctgcagcaaataggaaaagctaatccagaagcaaaaacagtcaaggctcaggctgataaaccaagatgctgctaaacaatctggcaagatagcagaacctaacactaacatggaaatttgaggatgaacatgaagatgacgattaccacgatgagagtggttgtgacgaggaaaatgatcctggagacta

SEQ ID NO: 248075 - DNA, 256 bp, Gossypium hirsutum
gtgattcatctagggctttcaattgcaggaagcaaattttgattcttgattttaacatcgtgacgctgttagtgtaaacaataaaatcattttattctatgtaagtttgtcattacattgatgagttcaaaaaaaaaaaaaaaaaaaaaaaaaaaaaaaaaaaaaaaaaaataaaaaaaaagggaggataatttaaaggttcctgcgctgtacgaacgctctaatgcgacgtcataggattttcatatagggtcac

SEQ ID NO: 248076 - DNA, 188 bp, Gossypium hirsutum
gtttcattgccactggtggagaagcaatttaagttcccacatttgacagtgcttagtgaaactttggtccagtatttgggtttgcttctgggaaatacccacattgaggctggttgtttagtttgagattgatctttttccttttctgtatgataagtgggtgtgccaatttcaaagattttaacttt

SEQ ID NO: 248077 - DNA, 164 bp, Gossypium hirsutum
gaatgtttaactgccaaccattctttatatttttatattacattaaatcctccttgatgaggaatcatttaaagaatgtgccgtcctaataaactcaaagatttccaattcgatcccaaattattgttacaataagaagaatcaaccattcttcattaaaatta

SEQ ID NO: 248078 - DNA, 403 bp, Gossypium hirsutum
atagatgcaaattgcgctaatctggatcaggctgtatatatagcgaacgcggtgtcatgtattgattctgagaacattccatggaggctccaaaaggcccaactttatagactttcgaatgcagatgctacagccgcatgctcaccgattatggtctgaagtggttcttataacaggacaagattagatccttcctcggatatagtgaatgaattggggctgcactgacaattgacaaattacgggtaagctgctttttggtggttttccttgttggtaagtggcatttttcaaatgggtttttcagtgatgaagagttaagagaaggactgaagtggttggccgataaatcacctctacaacctgttcttagcagtgtgaagatgcgcgaacttgtcatgtc

SEQ ID NO: 248079 - DNA, 340 bp, Gossypium hirsutum
tggttccccaatcaccatattccttgtatcctccccaatattcttcacaaatgggagggcaaatcgggttgaaggagacagacgaaattataggcatgaaagctaacaggagacgggtagatgattcctttacagttccttggatcagccctcaatccactagctccaagagatctaagcgtctctggtaggatcagattttcaaagtacaaaaacttcaacttctcttatacttggacaacatcattgccctttctttgcattttctcatttcttgctaatttagatttcagtgtgatgtttacctttcccccctactctaatagagccggtttcgttt

SEQ ID NO: 248080 - DNA, 246 bp, Gossypium hirsutum
  unsure (1)..(246): unsure at all n locations
cgacccagacgaaccaagagcacgaacgcgagcaaacaacgccaaaggtttcagaaagcggcacgaacagccaagagaccggccgacgngaaacaacggcgggaccggaaaaaaccaagaggaacccaacacaaggggcggggagccaaaacaccnanaggaagcagacgcaagagcgaaaaggcccgcaccgaaaggccgcgccaacaggggagacaacaaaaaggcgaaagcgacccgcccaga

SEQ ID NO: 248081 - DNA, 393 bp, Gossypium hirsutum
ggggtcgttatttaccagtcaaggggcgccgtgtggaaagaggagatggtttcacaagtggggcctccaggttacgatccacctacagatacaaacctgaaaaccaggtcagcaaaaggaattgaccgaaggaaagagaaacgggtacaggctgctcttgaaaagggtaagaactcagaagcagtggctggtgatgagattaaaggagacggtttaactgaggaagatttagatcatggatccgaatctattaaatcattgacttctcagatgacagatcttgctgtttttcaaaatcttgtttcaacctctcctctctcaaactcagtggatgcctcagatgctgtgacaccagctcaagatctcgataaaaaatccgggcacttaaaaaga

SEQ ID NO: 248082 - DNA, 325 bp, Gossypium hirsutum
  unsure (1)..(325): unsure at all n locations
gttagactaaatagttttttggtatgatgatcaatgtctctttaatgtttgttttacagtccgtgaagagcaatccctttccttctgggtttatggttgtttctcctgacaatatcatttttaatgttcgaagttgtgttctttttagaactgcaatgtgcttttattactttacctannaaaaaaaaaaaaaaaaaaaaaaaaaaaaaaaaaaaaaaaaaaaaaaaaaaaaaaaaaaaaaaaaccccnnnnaaaaaaaaaaaaaaaaaaaaaaaaaaaaaaaaaaaaaaaaaaaaaaaagggggggggccgttttaaaggatcc

SEQ ID NO: 248083 - DNA, 330 bp, Gossypium hirsutum
gtaaaacaatgaaatgggtgtgagagagagagagagagaggcaacccaagatgaaagtaaggctttgaatctggtggaaaaggaaaattgccagagtgagatgcacattacgatgagaatattagatgcttatttagatatctttaattgggggccaaccaccatgcaagatggaacttgtctgcgcctccatcagatatgtaatttacttgcaagacatgggttcaatttttgggcattgctcttgaaacctacgtctactttaagcttcttgcttgcccgaaatatttatatgaggagaatcctttgaaatgctcattttattattaa

SEQ ID NO: 248084 - DNA, 402 bp, Gossypium hirsutum
agtcaccaaggcgaaaaacttgaaccaaggaccagcatgaaatgcttttctatctctaaactcaccaccaaatctttgtctttgaagtttccgctatccttattccccaactaccccgcatcatcggcggttgccgctgctgcccgatttccaagcctttctcctcgttcaatccggttctctatttgcagtgacgcctcgaggtcgtcgaggggaggtgtttctttatctagtcgtgatcggaacttgttcaccatggctggtgctgatgagtttgtcaaaggaaatgttcacccgaacggcgttgctgtcatcactctagatcgtcccaaagctctcaatgccatgaatttagatatggatatcaagtacaagcaaattcttgatgaatgggaatcggat

SEQ ID NO: 248085 - DNA, 271 bp, Gossypium hirsutum
agtttccaaggcgaaattcttgcaccaagtatcagcacgaaatgcttctctatctctggggtcaccaccaaaaggttgccgtcgaaattaccgctatccttatttcccagctaccccgcattatctgcggttgccgctgctgcccgattcccaagccttcctccttgttcaattctgatctctatttgcagggacaccttttggtagtctaggggaggtgtttctttatattagtggagaacggaactggttcaccatggctggtgctgat

SEQ ID NO: 248086 - DNA, 363 bp, Gossypium hirsutum
gagagcactacctgttctgaagaaggcttatggtgacagcatgcataaggtactgcatgtaggcccagatacttgttcagtggtctctaagttattaaaagaagatgatactcaagcctggggtgtggagccatatgacttagatgatgctgatgctggttgcaaaagtcttgtgcataaaggcatcgtgcgtgtggcagatatcaagtttcctcttccataccgtgcaaaatccttttccctagtcattgtgtcagatgccttggattacttgtctcctaggtaccttaatagaactctttcagaactggcgagggtatcatctgatggtgttattataattttctggtatctaggtcagca

SEQ ID NO: 248087 - DNA, 386 bp, Gossypium hirsutum
cccgacccacgcgttcgggagaacagtgaaacgggtgtgaaagaaaaagacatagccggaggccctcataaagcttgtgctgattgacgctggcgaaaggaaccccgatgagaaaaccaagtgccatacatcagggtacattgagcttaaggaagagaagattattgttaatgacgactatgcacgatggaccttcgttgcattttcatgagatgtcgcttttacttacagggcttgggtttgatctttgggcgatgattttgaaccgtaactctactttttgcttcttgcttggttgaaatatttatataatgagattcctttgaaatgttcattattattaattattggcattgttgttaaggcttgtatgcaaaattttatga

SEQ ID NO: 248088 - DNA, 171 bp, Gossypium hirsutum
ccggaccggatcgccggcgttgtctgtctcatcattatttaagtctgttagcttatagtatcttgcaaagaagaataagtatttaaagatgtaaacgtttgttcgcttcttttacatggaaaatctactgttatcatatttcatacttacaagcaataaaattaattatat

SEQ ID NO: 248089 - DNA, 286 bp, Gossypium hirsutum
gtcgcgctaatcatattattgctagaccatgcaggctgaacgagagggatacagttcactctctagatatggtacgctggcgttggccttgtaactctgaacgactggactcccgagtcggttcatgacgcatgagggccaagcttctatctatgcccatcgctttgctgataaagctcgaatgccccacggaataccgtagagaactcttgctctagaatctgttcgccaaactactgttattaattataagggtttcgcccgtggtctatcagcattgatgtat

SEQ ID NO: 248090 - DNA, 261 bp, Gossypium hirsutum
cgtaaactaagcttattattgccattattttccagcctgaagagcatgattaactggaagctctcgatatggttgccgagcgtcaaccttccgatgttcagtagtccgcacctaccccttttttaatgccgctgacgttcctagcatctttctaaccctttctcttgactaaatacgaggcaacatccgcagtaaaccctaaaggactcctacgctaggtgcttgtatctatactcatgatactaacttgaacagtatcgc

SEQ ID NO: 248091 - DNA, 232 bp, Gossypium hirsutum
ttcccaatgtgagccaatggtataactgtgtgtctttccatctcgctgctagcttccctgggaaaggcgtggcgtttcacttgctggcaaagctgatccagctcatttggtgaacttaagcttccggctgcggtggccaccgatgatacctggaaccttgttgcggttgaaccgggggaggataaaaaggcacctaaggaagaaaaaccggttaaaaggccttttattaaaa

SEQ ID NO: 248092 - DNA, 423 bp, Gossypium hirsutum
cgaaaaattcggcggtgatggaggctcgacgatggtggtgacgaaccaggtactgactgcacactgactttcggcgctgatggagggttgctggaacgatgggaactgaagtggcgtgactcttgggctgactgcgatgctgcggcgcgagggtttcccaagaaaccctaagtctcctgattcttcaagtttgggctttgttgggctactgcttattgggtttgggtgtaaacaggttttgggtagtttagctgggtcatgggtgtaacgggttattgggttagtttagtgtgtcttgggtaggactagtctactaggctttgggttaatgtggttgggcctgtaaatggactataataaaataaacatttggttttttattttttggttttgggggtatttaattatgggcccggacaaaaa

SEQ ID NO: 248093 - DNA, 336 bp, Gossypium hirsutum
tttgaaatcttcacacttcccccctcccctgctcttcgccgaaaggcttatgcgcaggccttcaaccacccaaaagtcgccggcgaccggggaagtaaggccctctcgatggcgcaaacatgaggcgtggtgttgaagttgtggagaacgagaggcgtgaaacatatgcgaaaacatggagcgggacatatggggatggagtaagtggaggtatgggcaatggtacagggcaagtaggccgacagtcaagcatagggatgatggctaggcttttttattctagtcttctgcgtttttcttttgttcttaaatgctatggggtatgtgttaaaaggg

SEQ ID NO: 248094 - DNA, 198 bp, Gossypium hirsutum
tcgcctacgcgtgcgtgattgtcaaatttattctatatgattagaatgatattttaagtatgtgataatggacaaagaaggatgaattttttgaatgtcaacaagccttgttatacatggagagataatcctatcttataggagaattttttaaatacactatctggctatataagataatgacagtatattcaaaat

SEQ ID NO: 248095 - DNA, 260 bp, Gossypium hirsutum
aagaaaactttaccaatgaggctattttgaccaaggtagtcaatattgtttcggattatattttcagtgctattggtatgcatagataacaatatgttttggtgtactatttcgtatttaccgttgtttttattatataattactggttaaactttatatgtaatagtaaatatatcatattatgtttcatattattttttaggaaaaaaaatattaatttaataatataaaaaaattataattataattttattttttt

SEQ ID NO: 248096 - DNA, 181 bp, Gossypium hirsutum
gtgaaatcccagaatctggttggtgatttataaagtcatacatatatgtgtttcttcccttaaaagggcattctttttttaggtcatgttataggagggagtattcatttgtaaatctcattttccagcatctctggatgaatgcttgattttatcttcttaaaggaattcatattcattg

SEQ ID NO: 248097 - DNA, 442 bp, Gossypium hirsutum
gactaaaggaggaaaaatcaagttgactgtttattacgtggatgatgacgtagacgtcgacggtgggatgacggtaacggaatggagtgacggtggtgaagggaggtgctgcggggagtggtgggagagttgggaaagagtgttgaggtttatgaatggtgaagcagttttgtattgtttttatgattttgattgggtttatattgtaattttgttatgttatagtttggattatgtttgttgttttgttgttattttttttgattttgtttttttattttttattattttttttgtttatgtttatatttatattatttttttatttttttttttttattatttttttttttttgttatttatttttttatttttttattctttaagttatgattttatagttatgttgttttttttttgttttatttttatagtcttttt

SEQ ID NO: 248098 - DNA, 431 bp, Gossypium hirsutum
ataataataatcccatggaaaaaagtgggaaagaggacacccagaccaagcaaaccactaaacctgtcaaacatctcatcaagaaaattattaaaaagtttcatgcttcttcagggaaagaagaaactaattccttttcaacaaagaaaaagctccaaaaggtcataaaactgttccacagaaaaatccaccctgaaaactctatagctcaaagagagtctaagatgaatactgctccttatagtgacaatgactatactggtggagacaacatgcggtttcctcagggatcaagatctaaggcaggattaggaaacaacaagaagaagaccatctctaaactgcctcaatacgggcttactggctgtactgctgcaacttgaaatggggagcactggattaaaacagatgcagactatttggtgttggag

SEQ ID NO: 248099 - DNA, 330 bp, Gossypium hirsutum
acctgtatggtgaccattaattgtttgaatttctcttctactggaaaacccttggatgctggtccgctaccttgaacgctggagtctgtcatgctgccggctgagcccaaggccacaaccagtcctatcgatgctatgatgtgacacgcgaagaggacgatcgattatcgtacttacgtaacagacgggccgtctcttactctctatgatatgggatccggatcctgctcacgattgcttcaaccacccctggccggcataccggatgcgtctgcttgcgaactgcctgtgaggctcttccaaaacaaggcaatttgcctgagacgctat

SEQ ID NO: 248100 - DNA, 220 bp, Gossypium hirsutum
catgtagattagaaagcagattccattaggtaaaatttgattcttttggtacaaaacctgaaacaggaaagtccttttttttttttttttctataaagttctaaagtttggttttattcataatgagaaggaattttggacccacgcatccccaccaaattgtaataaaagtaagtgtaggttagttttcctcgtaaaaaaaaagctcttcttttatttt

SEQ ID NO: 248101 - DNA, 150 bp, Gossypium hirsutum
tggaatcccggccgacccacgcgccgcggaactggatgaagcttaagtgcggtattgcattcgaggaggatgacctgctgaacggggcggagaatgcacgaacgaggtgcaactgcactataccgtagtacaacatgccacagataggcc

SEQ ID NO: 248102 - DNA, 104 bp, Gossypium hirsutum
  unsure (1)..(104): unsure at all n locations
gacccacgcgnccggaagaaggcacaaagcaggagccaacggacgccaaagaaggcaaaggaaccaggggaaaaggcgccaaagaagagcgggacacgagccag

SEQ ID NO: 248103 - DNA, 234 bp, Gossypium hirsutum
ggttgggtcggcatgatgtcttcctccatcggaccgccttcaggcggcggtccgcagatttgttttgtgttggttcggatcaggggcggcgcgcgccggtaacggcgcgtcggcgctgtatcagtacttcatgacgacgaggcgcgtctgcgtgaattcgagcatcccgtgcttgccgtcgtcgccgccgaagcccgagcgttttcagccggcgtggaagccctggtacgggtc

SEQ ID NO: 248104 - DNA, 250 bp, Gossypium hirsutum
accaaacgtatgaaactcatctttgagatacatgattatgagtttagcaggactgcccgcgatactaagcaaaccacctttacatcctgagagaaacacactgccgaaggcaagactgtacctggggcggaggccaatcatgctgattccgatactgcgggtgccgggactaccttcatccctaattcatcattaaatgaatgggttgctgaagaaccacctgttgctcccgacggtgctgatgcataaa

SEQ ID NO: 248105 - DNA, 208 bp, Gossypium hirsutum
gctactcgttagtgtggttgttactgatgaagccaatgaaggagctcaactaatggagagagctgttaagaactaactggtagacaaactggaagcgatgcatgctgaggcggatcctcaaccacataggataacactgacattgaagatgacatatggcatgctccatagtgacatccataaggaaatcgccgaagtggtggcaaag

SEQ ID NO: 248106 - DNA, 287 bp, Gossypium hirsutum
  unsure (1)..(287): unsure at all n locations
tttgcttagctagaaaagaaaagaaaagaaaaagaaaatgaaaaagatgattagagataagaaaagatggattgattggattagataggttgtggggagggagtggggggcaaagtgcatgtgcaagtgcaagtgcatgtgcaagttcaagttcaatgcttaaatgcaaatgcaaatgggtagggtgtgggtgggggtggggtgcanaagcatgtgtgggatgtcagttgcttttgaatacatgtgatactggcataactatatatattttgctttctaaacagcac

SEQ ID NO: 248107 - DNA, 378 bp, Gossypium hirsutum
aaattaaaaaaaaaatttatattaaaaaatttttttaaaaaaaaataaaaaaaaaataaaaagaaggaagtataaaaaatttttttttattataataaaaaatatgaaaacaaatataaaagttataaatatattttaaaaaataaaaaaaaaaaaggggggggccctttttgggggtcccaattttttttccgggggtttgcagggttttattttttttttggggcccctaaatttattttcctgggccgggtttttaccccgtggggctgggaaaacccttggggtcccccatttttttggctttggggcaattccccttttccccgttggggtaaataaaaaaagggccccccccatttccctttcccaaaattt

SEQ ID NO: 248108 - DNA, 359 bp, Gossypium hirsutum
gtatacattttgtagttacattggttttttaaatgcaaataataaaatgatttttgttggtatgtttacctttactagtgaggttaggctggttgtagggattgcccaaccggtgacttggaacccttatagaatcatcctcttttcattcacccttgtctggttacagctcaagttgtcatatacacattgttagtgagatatgaagtacagccgaattagccatcgcagaccacaaatgagggtgcaaaaatattgtttttggtggttggttggcaggtttagggatggaatgcttctgagattcatattgtatgacaatgacagacaatgttaaggcttccatttatagggatgga

SEQ ID NO: 248109 - DNA, 283 bp, Gossypium hirsutum
gccggaaaggagagcaagaattagacccgtttcatccaagaaataacaaaaaactgggggacgaaattacagcaaaccatctcagaggcttaagccaaaaactaggattaggagatcaagagttctgaaaattacagagaactttctggaggcgatgatacggcttggaggaagacccgaaaggcgggagaaaaaccagtagccatccgcttgaaaaagagaaaatcaccagaaacaggagaatcattccaaccaaaacaaatccagaagaacgatggaaggt

SEQ ID NO: 248110 - DNA, 239 bp, Gossypium hirsutum
agcagcgttcgagtgatggatttagtcgttgcctttgtacagagtgtcagactgagtggaggcgggatcaatgcccactgcaaggcccaaggatatgcacttggatcataacacgaacatgaacacacaccttaactatctgcaaagcccctggagaaaggaaacgctaaatgagtctctattgtgctccccaatgatgacgaggttgctgacaattctgacactaatgcgaacaccaa

SEQ ID NO: 248111 - DNA, 163 bp, Gossypium hirsutum
gtgaaagtgacgttgaaattgcaatgttaagggaaaccattgcaaatagtttaatgaatcaatatttgtaaaaacaattttgtatcataacctaatttctagtaataatgaaacttgttatgtcttatgttactattttttattaaaaatcattcgtttagat

SEQ ID NO: 248112 - DNA, 247 bp, Gossypium hirsutum
gggcgagcgttaccacctatactaaactgttatcaggaatcatctggggcttccccggagctcctttattaatagattcctgaacactgaaaacggcattatatgtcttcaacgttttatgcattcacctggtacatgacacccttgaaccgtcttcaaatttcaagtcagtagtttgtggcggctcacagaaagaatcactttgtttggattattataagacgactagaggcctatccggcatcat

SEQ ID NO: 248113 - DNA, 291 bp, Gossypium hirsutum
aaaaaaataaaaaaatttttttttgtctagcatttattatgggtccttcaaataatctcggtgcgggtattgagattttagatacctttcattatcctccagatatatccatttaaaccacccctggttgcattcaagacaaaggtattttaaccctaatattaacagctacggattcatttgccttgaatttttaatggaacagtggagctcctgcccttactatattcaatgtgtttctgtcaaattgctcactccttgactgatccaaatcctgattgaccccttttg

SEQ ID NO: 248114 - DNA, 160 bp, Gossypium hirsutum
acgcatacagttggggctcttaaagtctctggattagaaaaaaggacatgttcccgtcttcgttgcagtgggagaccaaagtataactcctccgatttatgcgtgtctccggtgggacaggttcctggcaagagggcactttagcagtgacccaatgggc

SEQ ID NO: 248115 - DNA, 251 bp, Gossypium hirsutum
gcctgtgtgctatactcaacttgttccacttaaaagctagttaccctggtatggttttgcgtgcctgttagatggcgtcaaatagaacggcttcacttgccctcttttttcgactcagcatcctgtaattctccctggtgagtgcatcgtggttcctgtgcttcacataaccgcttacctatgcctgtgccaatgccaaacgcctctccctgccgaccttttatggcgtgggccctatagatgctcttaaa

SEQ ID NO: 248116 - DNA, 379 bp, Gossypium hirsutum
tgttcaattaggagagagatcaaggttggcttggctaggtgttgaggtggatccactggttcagtcagatgacctcttgaaggcttataacagaccttctgaggatgggaccagatcctcctctaaatggtttatatcaaagactgccattgtttctggtcttggacttcttggcatcagacaaggaaatgctgaatctgctgccaatgaagaaacgagagctccaaaggcccggataaagaggattgtgaggaagaaggtaactgcaagctctgcgtagttaattgacataaattcgattgctgtccaattttgctgcttgactgagagaatacaattcgaaagagaacctcttgctaagatttttgtcttggtgctg

SEQ ID NO: 248117 - DNA, 388 bp, Gossypium hirsutum
gaatatttcaactaaggttccatcaccctaaaagagacctctgtttcctgtgccattgacgaacgaagcaaaaatgaagaaagtttgtctttttctagctattttagtgctggtgttctgcaattcaatggctacatcaatcgaaaccaacagcaccgtctttgtcatcacggactttgacgatttggagttcttgatggattcgcacttcggtcgtatccttcaaagcaatggaagcgtgagccgtatgtccctcaatgctggtcaggcagtggcaaattgtggaagaggtcggccttacgatagctgcctcccgaacccaaaccgcccggttacgccgcaaaattgtgggtcttacaaccgtgcctgcggcaggtgaaaggccgtg

SEQ ID NO: 248118 - DNA, 362 bp, Gossypium hirsutum
ctctctctactatgctcgacttctttcacttaaatgcaagtcttcttgctcgggctttgtgagccagagagatgggttcaaaaagaacggcttcactagccctgtcgtttgcactcaacatcctgtctttttacccggtgagtgctcgtggcttctgccctttcctcaaccccaaacctttacctaatccaatgccaaaccccactccctccccatattcttctggcaagcgccctagcagatgctcttagacattgggtctctgcctgtttcgtcgcattgcttgctcaacgtctccattgttacgccctctgttcaaccatgctgctctatcattcaaggtcccgctgattttgaagctt

SEQ ID NO: 248119 - DNA, 220 bp, Gossypium hirsutum
gcacgcgccacgcgtgacggaatgtgggtaagacggttcgtgcgtgggttctaacaaaccgccgctattgctgcggagatttaatgctacttggctgagaccctccctgccaaatgtagtttctacatctccttacatgatcattactttcactatcctcaaatatcttaagtgtgatggacgaagagagggcattgctgctgctggtaggagatttaat

SEQ ID NO: 248120 - DNA, 367 bp, Gossypium hirsutum
caattataagttaaaagggcacatcacagaatggcatcttcaccccttcaattctccactccatttcgcactctcctattatcatcgccgtcgttacgaaaatcccctcgtcttcctttccatccttcattattctcgccgccccttactcagaagaccctcactttttcgattgggactagagccgtttcggggtccgggaagttttattggagagccaaggcgtcgatggccgggaccgccatggagaaagggaaagggaaagggaaagtcgaagtttttgattccgaggagaatctttcggtttcgctcgctaaatacaccggccgatctagccgctaagttctccaaagagaaaggacagttt

SEQ ID NO: 248121 - DNA, 382 bp, Gossypium hirsutum
ggcaaagctaagttcagccaaggatggtatgaattcacagtggagaacaatttaggggaaggagatgtttgtgtcttcgagctgcttagatcgagggagttcgtgcttaaagtgactgtattccgtgtaatggacggcgcctgactaatgcaccgatctcaatacaatgccaactaagttaaaaccggctgcttgagtggaccatccgatacgcaactctttttcaggtgacatgttgactgagcctatgaaagtgaaatacaaaaaattttgtggcttgattaactttgtaaatagattgttcattgaaattgacgttgaactggatttgaaaaatggggttttaagcttgattatcatctggttgattgggttaaaattt

SEQ ID NO: 248122 - DNA, 171 bp, Gossypium hirsutum
gacctttctacctgtacttttgactcacatcgctcttctctcactgcacatttgccatccagcaggttcgttgagacataccgagatcctctacattaatactgtgtattctcatacaagcttggcttaagcatttacttgctaccctttggtagtatgctatttttctcg

SEQ ID NO: 248123 - DNA, 193 bp, Gossypium hirsutum
gtaaatggcgatcttagcttatggtcagcaactgcaacacaggttgggactggtcgtgtagggctcatgtagctgactgtatcggtactgtgcgttctatgcaaaggctgccaatgatcatctagagtttctggcaagctaaacgctgatgcagcagtagaccaactacatcgttgttgcgattgaatacacc

SEQ ID NO: 248124 - DNA, 217 bp, Gossypium hirsutum
gtggctcaaatcaccatacttaccgtcatgttttactttaccgcccagctacttagatccacggctgggttgcttttcactgaaggcgtggacatggtcgtctcgacagttatacatccacggtcttggatctacagaacgagctcttcaaggactgtgttttctgatcaccatcacatttacattggtttacacagtttattcaaccactcttgac

SEQ ID NO: 248125 - DNA, 118 bp, Gossypium hirsutum
acgctagctacaccaccatggtgagagacagttaaacatgtaccccacaaaaactgtgatccatggtaggcgctccctctctcatgagcacaaatcgtctctcgaccacttacatcaa

SEQ ID NO: 248126 - DNA, 363 bp, Gossypium hirsutum
gactaatcggacgtagaatctgcctaaaccatcatttccagagtgaatattcaaatatcatctcttggatactgacatcttgttgttaacgagtaaaatgcagctgcggcattggtgttggttgtttaacagttttgtctggatttcaggttactgaagtcttgagtgtttcattgactggtattattctgcaattattgcactagattttgatatatgttttaatatgtttgcctttttaagtgcttacctctgtaaaatcttatgttatagtatttaatctacatttgactagcgggatatatgaaattgcatccttattaaatggttaaaaaaaattatacttattttaaatttaatatt

SEQ ID NO: 248127 - DNA, 346 bp, Gossypium hirsutum
ctgagacttagccagatgactcttcagagaggatggaataacaaatcaaagcttctcgtgtgttgaattgtcatcgctgtctggtaaaaatttcaccttaaattctatcctggcaaaatggttgaggatttgttctgccagacaggtgtatgagaaacttctagaagctgctcaaccttgatgcattttggtaatatctttgtgttcagattctgtggcaaatcatataatccattgtttctcgagtcctttcacttgtatcataggtgtacactggattttttcttggatgaattgtcttaacttcagactatagtttatttttttcagaccattatatcttttt

SEQ ID NO: 248128 - DNA, 392 bp, Gossypium hirsutum
agtgagatgaagaggtgttgtgagagcttaaatgtcgctcttaataactatttgacacccgatgattatctaagtctgcatgtttggaggaagtcgcaaaggttgaagaatgcttgttacgatttgggttgtccacgcaagaattaccattcatgccatacattgttcgccaactgacaatctttttgttggtccacctctaaagaagaggtagagtcaaaagattgtgaaatagaattttggaggggtggtcaagtgacagaggaaggtctgaagtggttgattgacagatgatttaaaaccattgttgatctaagagctgagactgtaaaagacaatttttaccaatcaaccttggatgatgcttttttatctgagaaagttgatttttt

SEQ ID NO: 248129 - DNA, 393 bp, Gossypium hirsutum
aaaaaattacactaagaacaaaagcatattctttggtttcacagcgtttaggttttacggaagccaaagaataaaaaaaaaatcccttcgtcctcttaacgctaaagctcggttaaacgattttcagtcaaaaaaagggaaatcgattttttttttttgttgtaatcggcgaaaaagatgcattcgactcatctgctactcgaagagccaatcaggattttggagaagattaagaaattgctttcagtcaaagaactaaattctataaaagaagacaaaatgacaaaagaaaaaaaaaagaaaaagagtgtgttttggaacatatattttgggcttttttggaattaagtaggttcaaatacagttgttaagggagacaaaagcttttagatt

SEQ ID NO: 248130 - DNA, 313 bp, Gossypium hirsutum
gttttagttctaaagacaaaggtttgtatgaccggatctctgatcctgttaagaagacaagtatagcgtgtttttacgggaacagctatgctatatagtggacatgacaaaactacatggtgcatttacagacgacgttgattcggaatatgaaaatgtgaaaaagaattggaagatcaggtaatgtgagggatatgaatacggaattcaccgattatcgattgccaactcgatattcggatcaagaagcaatgggacgcgaccacttacatatttatctacagagcattgtcagtggtattcgctcgaattg

SEQ ID NO: 248131 - DNA, 380 bp, Gossypium hirsutum
gctacactcagtgccagctcgccagcacttgctcctttgacgagttctagtccagaattaaattccattgcaccaccaattgccaacaaacgaagtgaaattcctactttgccatatcaaagtgcttctcaggttgcatcctctgtcatcggggtttcaaattctattcatgtggaaacatctacacaatcattggtaacccctggtcagctcttgcagtcaggatctactgttgttccttcatctcagcctgcagtaactgcacataaagatgtggaagtggttcaagtgtcctcatcatttatcgcctgaaccatcaatacctgttgtctcagaagctcaacctccattattgtcattacctgtttcttcacatgttg

SEQ ID NO: 248132 - DNA, 386 bp, Gossypium hirsutum
  unsure (1)..(386): unsure at all n locations
cacaagtcgagatcacaagattggctaaatatggaagagatggatccagagggagttccactaaatggttaattgatttcagagggaataaacttctgacactaaactgttttagtgcttgcagcaagagccattctcttgtaaaaacaatgacagaaatatagcttttaggtctttttttgattcaggaaatatagttcagagctccttgatattgtctttttgagctttcataatttttttaccttatgttgttctggaaacaacttgcaactaaaatggctatgaaaattgaaaatccaaattgtaagaataagacaatttataattacaagttgcatctcgttccattttaccccnnnnnaaaaataaaaatatttttaaaa

SEQ ID NO: 248133 - DNA, 362 bp, Gossypium hirsutum
gaaatctggaggattctacccacatcagctttagtaaagttcgcagttcctaaaacccgcgcatcatctgtcactgagattttctcccttttacccactctctagcacaaccctttctgcaagtcctttcgttgccgatatactctgccaggtataagaagatcaagaactaaagaaatcaaatttagatcggggaaaaatgaaagtggtcgactagttgccctgttccattttacatcgtccgagattttagattcaagtttcaagctcggggatcgtcagcaaagtctatcacactattgaccgcttttggtatttataaagttgcattttggaactatggcatgtgtaggctgcaatat

SEQ ID NO: 248134 - DNA, 156 bp, Gossypium hirsutum
gcagacctggaaaccttgagcgaatctttgttcttagtttccgattttggatatgggtacacgtacgttgggtctgggctgctgtatttgcttcctattgttttctgcattgagttttagtgtctatgctttacattattggatctttaattgata

SEQ ID NO: 248135 - DNA, 282 bp, Gossypium hirsutum
gctgaacgtggagatgatgaacaggaaggtgaacaatattgatgctactatcgcaatatcatttattttgaagatgatgggttgaccctgggggggtatcctgttctttcttattcgggtgaggtttctcaaattatgcctatggaataaatttagacatgtttgcttgtcatttttttgttgttagaaacgctagtcttttacttatgatgctgcataagaacatgaatagccttactcgctgcggttgagccagcaggtgaaaaatgtgctgattcgggc

SEQ ID NO: 248136 - DNA, 241 bp, Gossypium hirsutum
gatgaaggtggagataattaacaggatcgttaacaatattgatgctactatcgcaatggggggtattttgaagaggatgggttgaccctgtgagggtatcctgttcttttattatttgggtgaggtttatcaaattatgcctatggaataaatgcagtcatgtttgtttgtcattttatcgttgttagaaatgcttgtcttgtatttatgatgctgcattagaacatgaatagtcttactt

SEQ ID NO: 248137 - DNA, 372 bp, Gossypium hirsutum
  unsure (1)..(372): unsure at all n locations
aacttcggttaaaaccgaattaaccgattaaatcgatcttattttgttaatcaatcggtggttgaacttagttgtgtcgaaggtcggttaatggctttttgaaatttagcttattggttaattcgattccaaatcgaataattaaccgaattaatcgaacttaataattaatattatgtattaatttaagacttatgtagtgtttttattatgtagtttttcaagtcataaaattttggttaattcggttaacttttaagataaataaatatatttcagtttatttccnttnnnaaaaaaaaaaaaaaaaaaaaaaaaaataaaaaaaataaaaaaaaaaataaataaaaaaaaaaataaaaatattaatat

SEQ ID NO: 248138 - DNA, 420 bp, Gossypium hirsutum
aaacaactttccttctaaattgggttctatagaatatcaatttataaacgaaaccaaagaggtgaagttggcggagaaatagtggtggatggcaagaaccaacaaatatacctccattaatttcaaccatgtcctcgagaaaaatctgactccttcttcctcatctggttacaacaagaatccccaattcaatcaccaaacccagtcctattttgcttcttattcatacgtaggcaatgtgaaaacccatggccgtatgctcgtgctgacccgtccttcccctaagcctatttccactcctcctgtcgtttccccaacaccgcccaaacaccccctacctcaacctcgttctgttttagtcccagatcaaccaccttcgtctgatcagatttctttacgacccggttctgggacataaat

SEQ ID NO: 248139 - DNA, 300 bp, Gossypium hirsutum
ggtgagtctttaccttctgatcttaaaattgttaccggtaggatagatttagatcaataagaacaacatttgacatctattcggtaggcatttcgagtctttagcaaatttgaagctttaagctgtataattttatatctcgatcgatcgaatagcagtcagcaaacctcaaaccagccatgttccccggttgtaatttttcacgcattgttgaaacgagactttatttaaaaaaaaaaaaaaaagactataattaaaaatactgggcgtaccttgtttaagatcaaaacgttcctttct

SEQ ID NO: 248140 - DNA, 316 bp, Gossypium hirsutum
aaaagactataagaatggccactggatccgccacaggattcatcaaagcagatctcatacggagccaataaaaaatgacctttaggctgcgggcggcccttatggaggatctaaggttacaacacgaacaccgaatccataacacattctatcatgcaaaccaaatgcaatcgaccgaacccctgttgacaaccaacattactgggaaaacaatggcgcctcccacattaataaattagcattaaatgcggtttagccaacatgggaaaaaagcgaagaggccatttcgcatacactttacaaaaagtttctcatt

SEQ ID NO: 248141 - DNA, 284 bp, Gossypium hirsutum
ttctctaaaagattttatactgctgttcttatataacagttacaaaacaaccggtcacgaagaggttgcagaaccagcgaagaggacctaattccagcaaccggtgggctaaggtccgatcgacgaggaaagacaagcttgataatcttctgctccaagagcaagctttaactgctgcaatcttgttcacgctacattaacagcaaaacgggggagctaaattgccgtttgacaggtcgactacgttgattaacccgaattaatcttactggtctaagaaagct

SEQ ID NO: 248142 - DNA, 399 bp, Gossypium hirsutum
ggcttataatgctcgtacttttggacagacattttcaacaggatcctcaagcaaagaaaaaaattctaacaaaccaaatagtgaatggaagccatcacaaagacctgaggctgtgagtgatgaatttgggcaacgacaaaataacccaaataagcagcctcgcagatactccgagatgagctttagcaagtgatttactcatttaagatggagcctgtcgcaataaactgataaaggcctttctttcgggccctttgtggtctccagcttttgacctggaccactttgggccacaatttgttccaggatattgtaggtaatcagacttcacccctaggtagtgctgcttattctgttttggatttaaaagttcattctctttagaagaaagtcattagt

SEQ ID NO: 248143 - DNA, 304 bp, Gossypium hirsutum
aaaaaaaaaaaaaaaaaataaaaaaaaaaaaataaaaaaagaaaaaaaaaaaaaaaaaaaaaaaaaaaaaaaaaaaaaaaataaaaaaaaaaaaaaaataataaaaaaaaaaaaaaaaaaaaataaaatggggggggtttttttaaggtgttcgcaatgtttataaacccctgggcgttgcgcaaattataattttttttttagggcatcctaatttcatttgctgggccgatttttaaaaaggccggaccgggaaaaattctggggtttcccaaattattagtgttgaaggaaatcccctttt

SEQ ID NO: 248144 - DNA, 414 bp, Gossypium hirsutum
gccgaataggaataattcatgggaacgtagctatgttcagcataatgcaggttgtgatggaaattcatggggtcggaaagcagggggtaatcatgatgttggatcaagaaagttggactacaaaagtagcagcagcgggggagcatggcattctggttcccggaagagggaaggttctcaccattatacacctggctacaaaagctccaggtttcaacaggatgataatcaagtaaatcattactggaggaacacaaaatctaacaagagggttagctttgtgcgcgagtagccgattttgctggctaattttttttttttttgtttgaagattctgcatccatcaagccatgaacatcttttacttcacttattgtctcataagtaggggatggtggtttctttttgtgcaat

SEQ ID NO: 248145 - DNA, 367 bp, Gossypium hirsutum
gacgctgctcgggtggtcccgccgatgccgacgacgaacgggcggcggtgttgatcgaatgcagtcaaggggcgctcctcgggatggcttgcccggctaagcacaggcttaaaacgccatggtaacgagcgcgccgccactctgaaaacgacttttcgttctatcgatatgccgtgcggcgggggcaatcgtgtgcgcagccccgcagatcgatagcagaaatgcttggttggggcggtgtgcgacggtcgataagatgggctcgtctcctccatgatgtctctactgacatgggttggccccgccgcgcggatgcaagcggggctttttttcgtcctggtcaagaaacggggcgcgacacccggag

SEQ ID NO: 248146 - DNA, 170 bp, Gossypium hirsutum
tatttgcaccttccccacacagggggttccatgggggcccggtgggctctttgagagaaaagggccttactttgggtgggccgatgggtgcctatcttttcgaggtcggcgcctttttattatttctttgagaaaacaatcagataattctgtggatcttttggaatttt

SEQ ID NO: 248147 - DNA, 269 bp, Gossypium hirsutum
  unsure (1)..(269): unsure at all n locations
gttcaattgataaacgatattcttaaatttcagtcancggaaaaaaaaaaaaaaaaaaaaaaaaaaaaaaaaaaaaaaaaaaaaaaaaaaaaaaaaaaaaaaaaaaaaaaaaaaaaaaaaaaaaaaaaaaaaaaaaaaaaaaaaaaacgggcggccaaatataaggatcttgttttgggtgggcgtttatgaaaggccaaggtttttatttagggacctctaaaataaaattatttgtcggttttttaaaactgttgggatttggaaaa

SEQ ID NO: 248148 - DNA, 250 bp, Gossypium hirsutum
aaactaatagattaatcatacataacggattatttacaactatcaaaagagacaaaaacttgggaggacatacatatctaataaagaaaaaaaaaaagggcaagacggtctaaaggataaaatctttaagggcgggcgcattcaaaggcctaactcttctttaggggcacctaaatgtaattcactgtccttacgttgtacaaaatcgaaacttggctggaccctgtttttaacctacttaatgggcaaa

SEQ ID NO: 248149 - DNA, 163 bp, Gossypium hirsutum
accccgtggctcaagaaccctaggggaggcttattatattacgtcaaggtgattggaattagggttggaagatggattgtggatatcctaccaagggccattgctttaaatcctttcactgttgctggccccattattgattctggtcctggtttcacccggc

SEQ ID NO: 248150 - DNA, 428 bp, Gossypium hirsutum
gtttttaatccgtattaccctactttaataagcatttaatcatgtgttatttaggaataattgatccctatcattcgacaactcagatctgggtaacgggtgctggtttgaacatctcgaatcaatagtgaagttgggtttcgttcgcattctcgtttcgcatcaaatcagtgtacgtttaaggtgttatatcggaaacataaactcttacggtttagtgttgtgaaggcgaaataaggtgtgggttctaacttattagaataagtgttaaatttatatttttaatgattaaattgatatttaagcttgttggtcggcttatttaaaattttaaataagtgatttaaatgtggccgaatcaggtacaattcgagcctaattaaatagcatgaatacaaaactactatggttgactaaataattgtatg

SEQ ID NO: 248151 - DNA, 427 bp, Gossypium hirsutum
gtcttttgccattttccatttatttatttattttcgtttcagtactgttattaagatctgattagtttttggtattgggttttcaaaaataaacgaaacccttggaggaatcagatttttttgttggtttatctggagatctatttgtttctgtaattgggttttctttaaattgggttttctaggattgaagaaaacccatgaaggaatcagagttaagcactgaaccaatcggacaaaatctgataaaactgataagcaatctatgcttctcagtttttgtgttttcagtgttgatatttacagttattgctatcacttaccaacccccagatccatggcttgaatcagctccggccttaaccaagctcttcactcaaactgagaatgccactttcaaaaacgacgattctatccttaaaactgg

SEQ ID NO: 248152 - DNA, 255 bp, Gossypium hirsutum
attccatcttaggatggaatttgcgctttcagctcctcagttttcctgcgttgtttcatctgcaatcaaatgccaatgccctgtttctctttgaacagaatacaagcaataaacaacagcatgttcatgtaatgtcatgtcagttaaaagagaaacagggcattggcattacatgaacatgctgttgtttattgcttgtattctgttcaattccaatttctcgaataatgacaatgaattttatatatcactaag

SEQ ID NO: 248153 - DNA, 306 bp, Gossypium hirsutum
ccgagggaaaaaaggaaggggaaaagggaggtggttgctaaaatgcaccgggggcaattcctatcatgcacactgtagtggaggtaagtctaggttacgctgaaaaaatgatgaaaccttttgtattaattattagtcgtaatgaaaaatctttttggtttttctatttaggcagtttttctttcattggtgggatttgacggtggtaaaaaatttgaccactggagaaaaagaaaaaggataattgtatatttggctctaacctctaatttctatacttcatttacagggtttttttttattatt

SEQ ID NO: 248154 - DNA, 282 bp, Gossypium hirsutum
gaaacaagatgccagacgttactacagcctgatatgcgatcaccacctgcgcagaacgcgtggatgatgaacaataaactctgacttatggtgccataacacgggaacatgaaacggacttgaaggaggccgaagatgataacaaacacgttcgatcaaacaggagctataagaacatgaattagactaatgtgatgatgtgatctagacaaaatcaacacagtgtgcacaagtgatgactcctaagagacgtcatacaatgagagaaaaggggggattgaa

SEQ ID NO: 248155 - DNA, 381 bp, Gossypium hirsutum
ggctgttcgggctaggggtttatgaatttgggttgaaattgtatttgggctggtataagctctttatctgggcctaaaaatttgtaaaaggacattggtatgtagattttttttatttgtgtgttttttttttattttttatttatttttgatttttaatttctattttttaatgggcccaggtgaatgggcctattaaaaaatagaaattaaaaaaaaaaaaaaaaaaaaaaaaaaaaaaaaaaaaaaaaaaaaaaaaaaaaaaataaaaaaaaaaaataaaaaaaaaaaaaaaaataaaaaaaaaaaaaaaaaaaaaggggggccctttttaaaggatcaaatttatattccccgtgtttgcaaagattaatttttttt

SEQ ID NO: 248156 - DNA, 158 bp, Gossypium hirsutum
atcatttgctatgcaattccaataaaatatcacacgatattatgttcttccattcttgtagataaatccgatcgaattttgaattattgatttttccaaattataactcaccctacgtcattgtattaaatgtaaaataatactgctgatcttcatgt

SEQ ID NO: 248157 - DNA, 395 bp, Gossypium hirsutum
gcttatcaatgtaaatattaggcactgtctgcatatcaagaatccccataagaagggtcccccaagtaatcatctctacaaagcaaaagtcaaaatcaagcaaagcttcccgttttgcaaggccatggaagttatacacaagagagcagagtttcatcacatgggggggtccaaaccaaccaccataatcaacctaccagtctttattaatatcttttttggttttttgtttttgtttttggttaatgtttttaagaactaagcatatagagtgtacatagataaaaacagtaagttgagactcgacctcctgtacttgtgtttttttattaatgaaagtacgaaggaagtgagaaaagccctcccaaaaacaaaaccaaagaaaaatgagcctg

SEQ ID NO: 248158 - DNA, 201 bp, Gossypium hirsutum
catcttgtgaggaaagcgggggctttatttacccatatcaaacacataacactggtgttttttacaatcacattaatgaactcaaaatacttatagctgattgccatttcctatctatggaatcacttaaccacattcaaaatctttttgtttatatcctgctcatcagaacatatttaaattaggcattaatatattaaa

SEQ ID NO: 248159 - DNA, 308 bp, Gossypium hirsutum
cccacccgtccgaaacccgggtaccttttggcttcattaccaaccccaaacctcctgttaccagttaccaaaaggttgaaatattaggggttggttaggggatggaacctttgttggggccactgtagcctacctttttaatggcaaacctgttgtatttttttatttaaaaatcaaagggctgaaaaggccctgaaaaaaccaaaagggttattgtcctttaaggagaaattaaatattgtgttttaaggaaaagggttttgaaaccctttaattattattattaggatgtattttttaatgccttg

SEQ ID NO: 248160 - DNA, 356 bp, Gossypium hirsutum
cttgttttgatacctgcatacaattttgccacatccatcatttgcagcctgcagttcatcccattcataagccacggtagatactatattcaaatttagtatcggcaattcaggagagtaggtaactctatagtctgttgtaataattttttatcggaaaaccaatataatactcatataaattattttataattttttttttttatttagtaactaataatgcttgttttagaaaaaagaaatgtataacgagagataaaataggagatgaacctgtaagtatatgggtttttcacttcctttttattaattaattttaaacttaggtaataattttcattaatttatttcggat

SEQ ID NO: 248161 - DNA, 320 bp, Gossypium hirsutum
  unsure (1)..(320): unsure at all n locations
ctctattttacttttaatcaaaaagatgaaaatatcatttttgttatgctttaatgctagcccagggcattgttttttatggcatgcttgtaggttctttctcatttccccttttgttttatgtagcaactacagtaagctctcgttctgtaaactaatgtcatgggaaataaaggaaaattgaactaacttatgcttaagaacttgcttttagcgatatggaatatatatttttttttgaggttnagaaaaaaaaaaagaaaaaaataagaaaagaacagaaaaaaatatgaaaaaaaaataaattaaaattataaaaa

SEQ ID NO: 248162 - DNA, 244 bp, Gossypium hirsutum
gaaatgctcatagttatgaaatcgttggacaaaaattctgctctggttcggatcatcggaagaacagcactaagcggcatatgctttgtcccttgtcccgattgtttttgctgtataaaggtccatctttacgaagtatactataattcgtctgttcaggtactctgtcttttgttgcagtattgcatgtggattgtataacttgttttggttattaggtattagcttgctaaaaattcttaat

SEQ ID NO: 248163 - DNA, 441 bp, Gossypium hirsutum
cagataatgaaactgaaaaggggatttatatttcacttcaatgaagtgagcgaagactttgacctaaaaaaaaaaaaaaaaaaaaaaaaaaaaaaaaaaaaaaaaaaaaaaaaaaaaaaaaaaaaaaaaaaaaaaaaaaaaaaaaaaaaaaaaaaaaaaaaaaaagggggggagattgtgaaagaagaaaaaggaagagtaaggggagaaggaaaaaaaaagaaaaaaaaaaagggggggggaataagaagggaaaaagggcgaagtaagagcggggggaggagaataagaaaaaaatttaaggggtgccagcaaaaaaaaaaaaatagagggagggggtgttttaaaaaaaaggaatggggtgggaaaaaaaaaataatgggagacaaaatagtaaaaggttttggtgaaaaaatgagacaatatgaaaaagggggggag

SEQ ID NO: 248164 - DNA, 227 bp, Gossypium hirsutum
tccgatcgggggaggttaccgagacaagctttttccggtttgtttgctctaaactcacattccccagggtggggttcgaagctgctgagatttggtttttgggttttgggctccatatatatggctggcgaatgcaggcgtctaaagaaaactttagtgctgaaacttgttatccgattgtgggaattgttttgcggtgctttaaattatatggatacaccacttgt

SEQ ID NO: 248165 - DNA, 358 bp, Gossypium hirsutum
cgagaatggcggcagttagcctgatgttttataagtttgagatctgtcctctgtattttgtgggtctaaatttttagaagaggggaggcacagctaggcacagcctacaggtgacacctgtattatggaggtgatggatgcattgggaggaagaatccttatgcccattgctgtgccatctttctgaggcgaaggttttgcaattgcgttttggctgagactctactctgatttgatcagtctgtgattttcttttaaaagaagacaaaaaaaaagagtttacaatgaatggtagggaaagtctaaatgtttacgtaaaaaaagagcttgaaaaattagcacatgctggctttttttt

SEQ ID NO: 248166 - DNA, 384 bp, Gossypium hirsutum
atggacggcatgaatccgaatgcagaatcagcatcaagttcagcaacttacgaggatgcaacaaagggagctgatctccatccgtacgataacgattcttttgcttacagtggagccttccctcactcagctgccaagatagagccccattaaatgtgggtttcttttaccatgttttgttagcaatgaacttagtaacagtgagagctgcttctgttttttttcccttccactgaatggtgacttacaaactcaatcatgtgggatcttattcttatttgttggatattattatgatgtaacttttattagaaagaattctttttatgtaaataggtaatgcgactgttgattcaattgctttagcatataattattatatcc

SEQ ID NO: 248167 - DNA, 241 bp, Gossypium hirsutum
  unsure (1)..(241): unsure at all n locations
ctcaacaactgcagcaaccgtgagtttctcaagcccctcttcctatcttttaaaaggttgcagatagtgccttttattattattttttgactaaaaatccctcatgtttgtagtttatatcgtatatgtatgccttttttttttcaaatttcttcaatttgttgtggaaagggaacggaatcaattaattaaattgataaaagagtgtatgaagtgcacaanaaaaaaaataaatattaat

SEQ ID NO: 248168 - DNA, 232 bp, Gossypium hirsutum
cgcaaaaaaaaaaaaaaaaaaaaaaaaaaattaaaaaaaaaataaaaaaaaaaaatcgaactagtataattacaatataaataacacatatctaacaacaataaaaatggttctttgggggggccgctatggaggtccctgtcctacgtccttacaccggtatttctttgataatccttatcgggtccacttattataatatttggccatagtttcccatcgttatatctgg

SEQ ID NO: 248169 - DNA, 418 bp, Gossypium hirsutum
gtggcttcaatatctctctcatttctcactctggattatctctttaccaccatcctttgcttcaaatccattgcttattggtccaaatttccatctcttcactgctctcaaaccaaaattcaaaaaagaagaaaaaaaaacgtaacgtcttctcgaattcgaaacccgaatgagacaatcctcgaatctatttcttttctatcagctcctccatccggcaattacctctctctccttttctctttctgtttttttttctttttgatgtgtttgatcattgagttattgtttaatgcttagttcgatttcaatgagattactctgctattgtagaaatggcttctgcttctttcttatccggtgagtttcactttaaaaatatatatatatttttattaaatttctaagctctccgatt

SEQ ID NO: 248170 - DNA, 192 bp, Gossypium hirsutum
acccacgcgtccggttctatgttagagttaaattgccatctaatatttgcttagtccacacgaaaatcttccttagcaaatggctggcaattggcatccttgttaggcgtcatggattttgactgctgattgtaaccatgtggcagaaatcctggaatgatactggccttggttttgatgtgaacttttgct

SEQ ID NO: 248171 - DNA, 232 bp, Gossypium hirsutum
tcatccctataatggggatggtttgaggaggtgtgggacgccaactcctacaacacattgtttcctgcagatcactttacgcctagcaaggatttcatttactagttgtgggagtatctgatattaaatcactaatcattgcatcatatgtttaacaaaaagagttggatgattacatttcagctgaagtttgtatggtaaaatcatatggttcttcattgtccaaaattac

SEQ ID NO: 248172 - DNA, 427 bp, Gossypium hirsutum
  unsure (1)..(427): unsure at all n locations
atcataatggcactagccaaggaccctatttgctcacttcaaacctcagctttcaataatggaaactttgatgaaggtggtgatgatcacttgaaaaagcttggcggtggtgtcaacaactttccgatgactagctcttcctcattttcctctccgcgtagtattgattccgacagtttcgtattccggccaccgcatgaggaagttcattcattgataaacttcaaaggcagttcaatgtacgacaacttcattcatcaatatcatcatgggactaattatggatctcttcttagctttgaacaaaacgagaaggctccacgaagcggtacttacttaaaaagagcaagtcacaaagataattattctatgntggatcctcgcttggtggaagattttagttgctttgaaacagctagcaatttta

SEQ ID NO: 248173 - DNA, 369 bp, Gossypium hirsutum
  unsure (1)..(369): unsure at all n locations
cccacgcgtccgcccacgcgtccgctttcggcaatatattctttgtttcttgttaaggaccttagtgcttggaaactaagacctaatatagggcttgtcgctattctatactcggtaagcacactatagttacaatggatcatttaaaagaattgaagtcgcacacaaatgacaacatggtgctattgattcaggcaatagtggcaacaaccttccggatcagcttgtgttcatggtgcctatggaaagtaggacctctatacgtttccatgttcaaacccttggccattatctttgcagncgntatgggtatcgtcttcttaggagatgatctttctcttggaaagtatttgagcttttaagcataac

SEQ ID NO: 248174 - DNA, 431 bp, Gossypium hirsutum
gttcgatcatcagcagagggtactgttgaagagaaccgacacggaggaggcggcgacacccagagtgtggaaagtgaagctagtgataagtccggacaagttggcggagatcatggcgcaggaggctcgaacggaggcgttgatagagagtgtgagggcggtggctaagtgtggggatggggtgtcatcgtcgtcggtggctaagtctgatcagtggtgtgtgtcttgtggtgggaaaggatcgttgagaaatcatgctcaagatagatcgtgacctcgttattactgtacaaattaaagggataatatttttatgtttaattaaatttggggtatttattttatgtgtaattatgtaattttcaaaaattatataaggggattaattgtcaagttagcccttggaagttaatcaaatttgcaatatttta

SEQ ID NO: 248175 - DNA, 433 bp, Gossypium hirsutum
agcaatattgacctgactccaattgaatttccgagtttgcagcaggctatacaaaataaacttccagacaaaagtgatcatagcaactcagaacctgaagcatcaagcgtagaatcaactgttactgttggcaattgtgagaatagtcagaagtctcatgtggatgaaccttgtccaatgatttcctttgaagaatcagaaaccgctccggttcatataaatgttaccagacagccatctcctcctcctgtacttgcagaagtacaggatttggttcatacaatatctcctcaggtgaaggagacagattgtagaatagataacccctcaacggaagctcttgttccttctgaatctcctctacagttgcacatttcaacaacaatgatggaaagcttcatgaagctggctaaatcaaatacaaatagggaat

SEQ ID NO: 248176 - DNA, 284 bp, Gossypium hirsutum
gaaataggtaatgacaactgaacaagctttacttgaaactaggccctcaaagggagtgaaatttagtttcaagggccttttcattaggaaggagatgtcaaacctctgcactgccatctaaggatgcaatgaagaactcatagtcatatttccttctagtttgcaacttttcatgttggagtgaaacaatgaactttgagaaagccagtgatttgatttttgttccaaaaaaaaaaaaaaaaaaaaaaaaaaaaaaaaaaagatattataataaaaaataaaaa

SEQ ID NO: 248177 - DNA, 310 bp, Gossypium hirsutum
ctaatgcctcggatactgttttgggaatggagatagaatttaggctagtaagaaaggctttgtggttatgggacaaatttttgtaagacaaaaataagtacaagggatgttttgtacaggctctaatcccttttctaatagcaatgggaaattcatctaaatttttagtagtttcagtagtaggttcagcaattgcctcaggttgtataggaggagaagatgattgatcttgcaccggtgccttcttccttgagtaaaccagtaaaggacgagtagtgtcctgaatccctctttgtgatttgggtgtatt

SEQ ID NO: 248178 - DNA, 436 bp, Gossypium hirsutum
gtaagatgcatgatgattttcttgctctatcttatgttattcggactttttactttccttgaaagtgtacctttcaaacacttatccacaacaacataacatgcagttatgatcttttaaatatataaaaaaaaccctcagaatattcatagattttatctgtgtaaacagggtctaaatttggatttttttgacatttgcaggggagttaagaagacgaagaagtgaataaataaggaagatggctagacttcatatgttaatggcttttgttttctttataggagtttgtttgcgaaactctggttccatttatgttgacacatataactataaattagggaattttggaagcccgggtgctgttttatttaatcaggatgcttatgttttaaaaatataaattcttttataatattttttattttaaataatt

SEQ ID NO: 248179 - DNA, 354 bp, Gossypium hirsutum
  unsure (1)..(354): unsure at all n locations
cccacgcgtccgggccgcccttttttttttttttttttaaattgaaacatgcttgtggatgcatcttattttatactagatgaactaaatatcgaatctcaaatttgtcagatgccacatttcaaagagaattatacaaatcaagtggattaaatccggttcccaaccgactatccctactttacatctagtacaatggcagaacattaacccaggattttgaggcctgtttgttatttaggttttctctttcagttgttcacttgcttatgtttgcatcttattcatggattgtttaatagcttgtttgaggatgaaccttttaagcgttttaatgttatattttactcccna

SEQ ID NO: 248180 - DNA, 430 bp, Gossypium hirsutum
  unsure (1)..(430): unsure at all n locations
acctactacaactttaaccttccaaccttgggaattggcttacctgatgtaaatactcagaaggaatttgacatgaagctgcaactaagtcagaatgagagacaagttgtgtcaaatatgttcacgccaccaaccgctaatcagtcatggagaaaagttttaagcatgggaaatcatctgaacggccatgaaccaatcctcaaggagatcatcttctcaatgcacgataatgccagtgacaatcactactcaagcagcagccacagagattattaacaggatacagaaacatatcggatgtatacatgcggaacctcgaatgatcttcgggtagcactttctattatctcatatgattaaaattcctttttctattaaaatttngaaaaaaaaataaatatttcttataattttttattattaatatttt

SEQ ID NO: 248181 - DNA, 430 bp, Gossypium hirsutum
gccatatccatatttattggaatagcaaatgcattaatgacggtgactgctgtgagcatgcagaatgtgctaatcggtcaagatcttaatggttgcgcatttgtctgtggatcattgagcttcttggataaaatctcatgtgggctcaccctatttgttcttcaatcctttcatagtagctcaccaatagttgctggaaactattcaaccagtaacttttcaatcacgagatacggcttaggacttgtgccggcattttgttcacttgtcggcgtggcggttacttggaccatggaactacgtgtcccgttgtacaaaccactgaccgaaaccctactggaatgacataaaatgttaataataccagtaagtcatttacagcttagaaaagaaagcatagcatcatatggttgattgagggaggaattga

SEQ ID NO: 248182 - DNA, 128 bp, Gossypium hirsutum
cggatttcccggttcgcccaacccgtccggtttggtggtatggaaaaatctggttaatttttgggaccataaccatcttaggtaatgaaggttccccgttttaaaaataatatcagcttctctatatt

SEQ ID NO: 248183 - DNA, 384 bp, Gossypium hirsutum
attttctgaaaacatgagccatgttcttgttgttttcactgttcttgttcgagggttttagcaaacaactgaaagatccaagtagaaacatgctagcatggtcagcatgcatttgtctaagtggatcttcaattattggtttctttttgttgttatgtgatttgttgtttgtttaagctcatgcttttggatcgaattctgttgatttaaatttctttttttactgttggggaatatgttctaaataaacttcaaatgcaactgcttgtcagttgatttttatgaaaaaaaaaaaaaattattttaatattatatataatattttcatattttaaatttttaatattttttacttttttttaatatttgataattttttttata

SEQ ID NO: 248184 - DNA, 104 bp, Gossypium hirsutum
ctttcattgaatgagtttagtgcacctgctccgaggtctgcggccccagtaaactctgtgcggagtcatgaaaaaatgactgcttgttcatcatattcatttgc

SEQ ID NO: 248185 - DNA, 278 bp, Gossypium hirsutum
atttcgagccgcgatcgatacgatattctccaaccaattttggctgaaaaaatgttttgtaaaggtaaccacccaaaaaggaggaaaggtggtgggtttggtccaaaaaacctgttggataatgaccatgtattgacgtattggtcaccgaaagaaaataaaaaccagcattggatcgaaataaaagtacccaatggcgaagaaagaatgaaattcaatgtggtgaggattcaagaaccaattggacttggacaaaagatcattaagcatgaaatata

SEQ ID NO: 248186 - DNA, 433 bp, Gossypium hirsutum
agaaaataaaaaaatatataaaaaaagtctacacaatagtcaattataaatgattagagaagaatgtttttttatatgaaatctttgcttataatatttatgaaaaaaagatttcatataaaaaaataaaataagtcgacattgttttgaatatcacttatccgaatatgattgtaaaataaataacaaaacttgtaattatataaaaaaataattaaaatcaaacaaattagtaatcaaatttgaaaaaaataacttgattttagaatttcctccttgtcattatataaaaaaaaataactgggaaaaatgagattttaagcatcaattaaaaggtatatatttgccctctttactgtttacaaattaatgcgacatgattatgtgaaatgactaagattactctcaacctccatttatactctacttctct

SEQ ID NO: 248187 - DNA, 178 bp, Gossypium hirsutum
atgaatttccatttccatgatatctgggagaataactggaaggtgtcccaataccaccagggctgaatctagccgttgtgtttacttccaagtttatgtattttcatctctgtttgtgataataaaattgtaccttcgtccaaaaaaaaaaaaataatttttaataattttattattt

SEQ ID NO: 248188 - DNA, 135 bp, Gossypium hirsutum
ctttagatgtggcaataactttctcaacctggattttgtttgtatcacgggaattatgactacaggtacaacctatgtttcatgatattctcatacctataagcacacgttatgcatttgtgcgaatttgcatgc

SEQ ID NO: 248189 - DNA, 244 bp, Gossypium hirsutum
attctggtgcctgatgttgattacaagatcataagcggtgaccaccctactatgactgcaccgcttttgcaaatgtacgctcttacaaaacctccatcagagatcaaatgtaatatgatgtggaaggtgatacctaccctttcttttacgctaactacatgtgccttaatgaggcctgtgatatcaatattcttaaagtggatcttcttggtgacaatggaaattacacggatgctgtcattga

SEQ ID NO: 248190 - DNA, 384 bp, Gossypium hirsutum
tctctttctaaaatgcgtacgtactcttatgtactactgtaagcttgactgcaatcgccttttaaagatgttgactgatttatttatttcatttctgggtttgactattttgcttattatctttaaagtttctttttttttaaatgtatatgggtttcaatttatgggataaacggtgatagctcgacggcgccttctcctgcgaccatatgggtctgaagaggggtgctggaaccttgatatttttttctctcttattcctgcctaattacattttcttagtgtgcgcccatttatatatttttgatgttaaggattttaggatctttatttataaacttttttaacgctatatttttattttaaaaagaatatcctcttttt

SEQ ID NO: 248191 - DNA, 380 bp, Gossypium hirsutum
attctttcttcttccagagctgggacaagataaagcctacattagtgagacagtgttcatgtttgtctttctatcatttttcttgtggactttccatccttttgttgtcaaggtcaaaaagttctatacggttcaaatttggtgcagggtgctagcatatttagttgtttctcagactctccgaattttcactttctattctactcagcttcctggtccaaattaccattgccgaccggtatatttgttctctgggggttaatgtaacaaatgaaaacagattggttttatcgttttagtaaataacttttgtgcaaggttcaaaacttgctagattgccagaaccggatggtttggctagaattccttgtaattaaatt

SEQ ID NO: 248192 - DNA, 266 bp, Gossypium hirsutum
attatcagcgtctggcactttttgtattgacccccccccatgtcttctgagtgaaaggaaaaaaaaaaggaaaagagaaggatgcaaatgccttccacccaccagcccaaacatttttatttccccaacgaacaaacatgatctttttcaaagtcttgctgttccctctttataaaaatttgcataaaacctatgtactaattttatgtattcttttttgttgctagaaaaattttttttttgggggggggagataaagagagaaa

SEQ ID NO: 248193 - DNA, 392 bp, Gossypium hirsutum
aattgatgcactttcttccgcaggctaaagtaattttcatcacatctaaggtaacggttggaatcatcatgcagaatccttgaaaaactctggctcggttaaggttctgattgcagcccataaactcgttgctgtgaagaaaaattaccaaaattttccatgttttgtgtttacctttcacaattaggttcatgtttagtgaaaaccaactgatacaatctagcgccaagcttttttttaaagaaaatccagtattgaacagacaagtaagaaatttgtatgcactaaaaagtgtgacaattgtaatcttaagacagtgacttaagcctcctatcggttagcaatttttaattgttgtaaacttgtaagccccgttaaaaaaatatatattt

SEQ ID NO: 248194 - DNA, 399 bp, Gossypium hirsutum
  unsure (1)..(399): unsure at all n locations
gncacgnnnaaaccaacattccaagtaacttaacaaagcacacagtctacataagcgacaggattttttatcaacatcagcacacccccaaaacaaaatcctaagccaccccattgaaagcacccaaaaagtaatctgcaaatgaaaaacaaaaaccatctcaatctcaaactgaaaatactactacctaattaataatcttgtaagatggcaaatcaacgtaagctcttctaatgtgcattactgttaactaactctacatgtagaaatcaattattttcaattctattttaataacgatctaatattattaatatgtataacgctttgaactgaaacatataaattacccaccaataatagccttgcctattgtctaaactaacatacaattttcat

SEQ ID NO: 248195 - DNA, 384 bp, Gossypium hirsutum
gcgcaatgtctgacccggttcaaacctcccttgccgatttaccttccgatccgcttctgggaccgggtgctttcatcgacgtcaacggtgaacgaaaaccggccgagccaaccaaagctcgcaacggttcgatcccgaacggttcccaaccggagacaccttcgcggggctcggtcaactcttcatcgtcggcagattctaaggtcaaaccgcgcgtattggccccggaaacttggttgccgcctggatggttgatcgaagatagggttcggacctccggcgccactgctggactagttgataagtattacgttgatccaacgtcaggccgaaaatttagatccaaaatagaagtgctttactttttagaaaacggatctcccc

SEQ ID NO: 248196 - DNA, 394 bp, Gossypium hirsutum
gtaaaaagaaaataagtactctgttattctttgctattttgttttcctcggactccgtagggccgtttttgcagataatcgtgaagaaacggcgcgcgtggagagggccatctccgagtcttgcggcgactgggcactcgctggaggtgtggaaggtggaggaagttgcggcgctcccctgttgtcactagggttttttctttttttagttttggggtttggtttagttttgggcctgtaaggccgttgggcttgtaactggactgtttttaattgtttgggcctgggtcgattgggccctattacaaaaataaaacaaataatgttgtggatttccaaaagaaaaatcaaaggaaaccatgtaagaaagggacatgaaagatttctttctttt

SEQ ID NO: 248197 - DNA, 330 bp, Gossypium hirsutum
gcaagaagctggtatatgggtctgacgcttgtgataaaggaaaattgtggattccagttggtcttgggcttcagtggtttgttatcaaatggattcaaggagctataaaaagggatattgcaactggcaacgggcctatatgagagccacatgaatgtgaactgctggaatgcaagttgcatttggtctcgttaaagtttctatataatattttagttttcttctatttttttggtaaaaagtacaaagaatcctctgaagttggttttgctatttgctataagtatggttttgggaagcagagtaagtaatggttggacggatgggata

SEQ ID NO: 248198 - DNA, 378 bp, Gossypium hirsutum
gtcaatactgtggtccgtatgtaaacttgcccctgatgaatgctcctcagttgctgtaggggccggtttggcagcaaagctgcttctcgtgattcagagcggttgcaatcctctgttgaagcaaaaatcttcggagctcttgaagttatgtagcctaaattatacagacaccatctttatttcaaagtgcaagctcacaaggacaatcctatgacaagttaaagggcctgccatgattggttcttgaaatcttccaagaatgaacgatcatatacttatgagatagggggtttgaggtatgaattagctctcctgtatatatttaagcacttcaattcctgcaatttgattcaactttacttaaagaacactcataat

SEQ ID NO: 248199 - DNA, 399 bp, Gossypium hirsutum
ggaaaatgtgaatcccaagcaaatctacactaatgcatcctgtgatggtaacggtgattgaggggctaatcttgaaacatttgcggagacaaaaactggagaggcaaaatttggatccaacatttcacatttaggccattattctgacgtagcagagaaatccatggaaagatttgtttcagtaatatcatcatttagattttcatcacccgggtctcgtgctagtggtcttcgagcccctttgaaagatgctcggaacacatgtaacaacaggtcatctgctgctgtggattttagccagtttgcttatgttccaaaaaacaagaatgccaaattagcttcgcctagattttgagttctggtcatatttttagcagaagtaccaaactttgcaatggc

SEQ ID NO: 248200 - DNA, 314 bp, Gossypium hirsutum
gtttgttctttaaactgttatatccctggtattggccgtcttcatgttggaactttatagggtcgtgcatgaaggctgtgttctattccctgttgagggtgatccattccaggtgggggaagcttagagaggctaaaacggcttaaacccatcctttcgtcctctccgtttcaataaatttaggtttgtatgatttcatgtattaggtatattgttttccttttttcttgtatgtgtttgccttttagatagagtcctgatcctcgtgtaaactcaaaaagggttttttggtaatgagaatgtgttttgagatt

SEQ ID NO: 248201 - DNA, 371 bp, Gossypium hirsutum
atctgagagaaatttttgtttgttattatgttgaattgatgaaatgtggaactgaggtggagtacttttctcatttggtagtttcatactgatattattttgctgctgggttcacttgaagacaaatctattgaaaggttattgtttagtgatggttttattaaaaaaaaaaaaaaaaaaaaaaaaaaaaaaaaaaaaaaaaaaaaaaaaaaaaaaaaaatttttaaaaataaaaaaaaaataaaattaaaaaaatataaattaataataatataattaaaaaaatttataataatataataaattaaggggggccccttttaaaaaatcaaaattttttttcccgtttttgaaacgtatttttttttttt

SEQ ID NO: 248202 - DNA, 260 bp, Gossypium hirsutum
aacttagattacccaaacttacggtctctttcatacaacgtcatacattttctatagtgcggcctaatttcaattaactggccaatcttttacatcttacatactgttataaccaataactaatcccaactaaatcacttatacataaatacaactttcgacatctgtcatgataactaaaatgcccagaccgatcatcctttccatctaccacgcagcctaaatgacaaatgctacgcacactatatcccatcattttt

SEQ ID NO: 248203 - DNA, 399 bp, Gossypium hirsutum
ggcaattgatcgagggatccggcagttactttgctggtgtagacgcgtgcactgatgacggggctgatggagcattggtgatggtcataacgtaatttggggccagaccaatggacgaccgatgatcggggcgttgatgagcattgaagccccttgggacaactcattaaacagtggcctcgatttgggggttaccagacactccccgaagctttcagaaatgtttgcggcgccacagcattcaggaaaccctagggtttccctgtttctcttaagtctgttgggccttttgggctgttttgttttgggtcaaggtctgtaatgtaatggattaggtctgacttaggctagcatggattaatgagtctgatggtcctgctggtgtaacgggtcttattt

SEQ ID NO: 248204 - DNA, 223 bp, Gossypium hirsutum
catgcaattagtttcatcaccatttatcgttcctctttgattccaatgtcatatttgggggttttgtatttattttgcttcacactcatgtctaatctagttggattgataatattcacgtcacaattcgatatgatcttattttcaaaacacatataaccagctttctttaatagcgatgatgcccacaccaatctcccttcccaacaattacacaatctaa

SEQ ID NO: 248205 - DNA, 304 bp, Gossypium hirsutum
  unsure (1)..(304): unsure at all n locations
cccaggcgtacgantaaaacccaccctnnttaanttctnnatttttttttctattcaaaccaataaactatgaagaaaagcctttttatcaaaagccactcacccacacataaacctcacattcagttcacttctaacttccctaactctatcaccctctaccattccatcacactatatcctgtacttcctcccaatacatcttttcaacttactaacatatatcttaattaataccattaaacatcccctcataatactaacacatcaaaatttattcctaataaacaaacttaatctcaac

SEQ ID NO: 248206 - DNA, 227 bp, Gossypium hirsutum
cccacgcgtccgcaacattcagttctaagtttctgggtactcaaaactcactatcctgtgggagagagcttcaaatattggaccctctaatggttcaagaactcaatgctggttcaagtttggcaagaatggtgttgatgctgaaggtgctggcatttatggtagtcaaaaaagagatgattttgacaaagatgatgttgaacagtacttcaactacattgggatgc

SEQ ID NO: 248207 - DNA, 124 bp, Gossypium hirsutum
caacacgaaagcttgcgatagagatttaattttgatccacagctaactgaagtggcgcagggttctttcgattcaacgctgcattcattaaaactgatcattattcacactcctatcttccctc

SEQ ID NO: 248208 - DNA, 307 bp, Gossypium hirsutum
ggtgttccactataggttggcatattcattccctcactgctgcttccccttggcgcgccggatctgatggcacggctgatttcccatcataggatactctccatcagtcatcctaatggcagggcaggctaatagtaaataaaatagctacaactaacacctcgcgtggaatgtggggtgcatgtggttactttagggaagatttttaactctattacagcattaatccatgttatctgcactgagagtctacttcacgagaaatctggtactaagattttgcaatatgtttcacctattttcttgc

SEQ ID NO: 248209 - DNA, 205 bp, Gossypium hirsutum
cctagatgtactggaccagatgatgaagttttccatcggtgttactcctgcattgcaggagttggtgcgtggagcttttgggaaagttgggaagactgaagaacttgatagagttttaaatgaaaataggtggagattccctgggcgtcaacctcgaacttttggacagtcaccacggtcaccctccggacatgctgaaatgggt

SEQ ID NO: 248210 - DNA, 269 bp, Gossypium hirsutum
  unsure (1)..(269): unsure at all n locations
cggaatnncccgggtccgacgccacgcagtccggaatggttggagagttctaggagaagatttttcatgtgttatggataatagaggatcccaaatacggagcaagattgggaatagcactgtccatggaactaggtgtagccaatttggcatgagatttaaagctaatctaaactggtcagaagcttatctgttcagggattcaaagctagtaataggctaggattcagatatagctcattaatagtggttgccattcacaatttggc

SEQ ID NO: 248211 - DNA, 212 bp, Gossypium hirsutum
  unsure (1)..(212): unsure at all n locations
ctcgttctacattataacaggcttgatggaactctcccttattttggtggaaacattccctcattaagctgtaacattgctcatatacatgcattgcccctaaacttggagttgcaaaacatgngtctatttacttaagaaattgttcatattatgcacttatcgttcttgacgggtgactcatcactcttgtaaaaaattctattgtttct

SEQ ID NO: 248212 - DNA, 296 bp, Gossypium hirsutum
acgatctaaaaggagataaatcatcatcttttgttttttattttgaacccagacctaacattgggagttacgatatctattatgcttctcttaaaagacaaaaaaaatcattcactaaagatttctaaccacaaccaaatatcttctctttacaaaactaatttaaaacctaacccaactaccatttagattttacccacattctttcaattaatttctttaatcagatatatgtagtaaacttttatgttttataattttttaaaaaaaaaaaaaagtcttttttttaatttttt

SEQ ID NO: 248213 - DNA, 393 bp, Gossypium hirsutum
cttttgcttaactaccttatcaattttactatttaactagcatgtttgatacagagaaagactttttataacctacccgactttcttcttaaaacacgccaactaaaccatctatacgcatcaaaatctattacaagaaaaaaaaaaataattattttttcttaaccaagaattttctaaattacactcagcttgtccagaagcaaatccaacgattaaaaaaattgaagaattcctaaaataatattatttcctcattacataactaataacactactacttccacagatataataacattctttctttttctcactataaacaataaattatgcacataaaattttaattatctacctaaccaaaaaaaataaaaacatattatcttttat

SEQ ID NO: 248214 - DNA, 390 bp, Gossypium hirsutum
ctgaacttccaaaggatgacaaggaaggggcagccaccgcaggcggcatgggcggtctagattagctaagggctttcacagggtacctccattgctgctctgttaagacaatttttatatgatgaaaccttgtaaacatgagatgagaacaagagaatattttactttaggtccccagactgggcaaggggatggccccttttttttttttttaatttgatacatggaatggcttttattccaaaaaaaaaaaatccaaaaaaaaaaaaaaaaaaaaaaaaaaaaaaaaaacaaagcccaataaacaaatataattaaacaaaccacatagatttatacacgcaaagaaaccaaataacatcaaaaaaaaaattgggggggggccctttt

SEQ ID NO: 248215 - DNA, 399 bp, Gossypium hirsutum
  unsure (1)..(399): unsure at all n locations
tcggatacttatatcaagaaggcattggataaaaaatggagagattataaaagcactttggagaaagaatattttaagaaatatataagtctcgaagagaaatttcgaaatgtccctccgggaatgctgagataccaatgagaagatgtggttaaattttagaatttaaagaaaagagaggatcgtgagcgagttggaacaagtagcagacaaaaacaaaaatttacgcacacagcacggtcgaaaagttttgcttgtgtagctgaggccgaggtattttgaatttattaattactttctattaaataatatttttactactatataataggaactctcgtctggtcaaaaagttaaacgccttcagctntttgatattacacataggaagaaagatgg

SEQ ID NO: 248216 - DNA, 412 bp, Gossypium hirsutum
gttggtattttggtgtttctgattaaaaattaatttaaaaaaaaagaaaaaaaaaaaagaggagaggaaaaaaaaaaaaaaaaaaaaaaaaaaaaaaaaaaaaaaaaaaaaaaaaaaaaaaaaaaaaaaaaaaaaaaaaaaaaaaaaaaaaaaaaaaaaaaaaggggcgccccttttaaagaaccaaattttacttccccttgcttccaactttttattttttttttagggcccccaaaattaatttcattgcccgtggtttaacaactccggaattggaaaaaccctgcttttcccaaattaaatccctttaaaaaaaatccccttttccccagttgggttaatagaaaaaagcccccaaccattcccctttccaaacatttgcccaccctaaatgccaattggacccccc

SEQ ID NO: 248217 - DNA, 248 bp, Gossypium hirsutum
ttttaaaccaagcctccacctcaagcatactgtgaacttaacggagcccatgcaccccaaactaataacggttcatcagatagcatgggctactttttatgctaggttatgcatacgtataaatgctaatcctacattaatctttcttcgtcagatggtgacttcgtatttgttcgaaaggtgactaacaacatgttgaccgatatataatgctatgtgaaagctattttgttcccttttagatacat

SEQ ID NO: 248218 - DNA, 393 bp, Gossypium hirsutum
ccctatctccctctcctcaacaacagtcgctatgccaacaccctccgttttcgctatctgggaaccctgcgtctccaatcatgaatcgtaggagtcggtccttagccaggcatcccctgcctcgatccgaacccttcctgaaattcctcaaaccagtcgccctagctcgcctacgggactcgagaatcagcgccagatcgcaccgctccacctccctctttcagatctctccgtcctttcagccttctaacggcggtcaggctttctccacagccatggacggctttccttgctttgtgccaacaccgacagtctacgggccccgttgtccccaaaagaagaagctaatcgcgaccaagggaatgctatttctgggttcaacacaatcagctc

SEQ ID NO: 248219 - DNA, 378 bp, Gossypium hirsutum
  unsure (1)..(378): unsure at all n locations
cccacacctgccattatttatgctaccttttttattttaaagcaccaccaaaccatctgggacgataagctcaactacacaaactataaaaaaagtaaaaaataaactcccaaaattatctactttgcaaacaataaagacccacacccaacattttaagccgttcctgcttctaaaagccngcgagccacatacacaccattgcaaatttcactaactaaataaattatgaatcttatgtaatttaaaataatttgcatatccaatgatgttagtatttttatcttcattttaatatctttgagaatagagtcaaattagaaataaatgtgttccttcctaaaaaacaaaaaaaacccccaaaagcttctttttaca

SEQ ID NO: 248220 - DNA, 397 bp, Gossypium hirsutum
gctgattccatgagctctagatagaccatttagtacagtaaaaagtttgacactgtgtccgtggtaccctctttgaaaacccagggcattgtcaaaagacatggtggttgtcctcttctccgacaaaacaatgaggacatctgacatttgtggtcgcttgtgtctaaagttgactgtgtaaggataaaattccatgagatctaccatactgataatgtaattttttatggtagttttaaatcccataattttctgcagaagtctttaatttcggcctgtattaaataactattaggaatcaagctagcatcttgtaatagtttataagcacttcatactgaatattctccggaaggttctcctttccacacttgaaaatcttcatgatttgcttctg

SEQ ID NO: 248221 - DNA, 410 bp, Gossypium hirsutum
  unsure (1)..(410): unsure at all n locations
aaanccgacccaacccacgcgttcggattattccattatctatagattttttattattccagcaacaacaaatacactggccagtgaaactttttttcaaaacccacttcataggcaaaagacatcttccataacatcttcttttacaaaccaatgaccacaacccacatttttaaacccttccctctaataataactgcgaaccaaaaaccccccatgacaactaccatacttaaaaaaaaaattaatattatagaattaaaaaccataatccaatccaaaaatcttaaaattctgactttcataattaacttttaggaaacaaactaacatcttaaattaatttattccctcttcaaacaaaatattctccagaaggttctcctttccacacttgaaaaacttcataa

SEQ ID NO: 248222 - DNA, 200 bp, Gossypium hirsutum
aaatgatcataccatacttccaacaattttttctaacttttaacacagctccatcctcatagacaattgagaccttctcaaatgcaccatcaatttccacgaagaatttatccccaactctttcaaaccccatccactcctacaaacatacaaacatatattacctcctcaccatcacaatccatataaacccaatccaa

SEQ ID NO: 248223 - DNA, 237 bp, Gossypium hirsutum
  unsure (1)..(237): unsure at all n locations
tccaagtacaatcttcctagaatctccatcttacttaccaaaatgaaaaaacccatggttgataagcttatttttctcaagaaatcaagaaagctcaagaaggttaagcttctgaagcattaccaccatggcgttctatgagaagtttagactgattcccccttaaacactcatcttattcacttctctaacacaaaacacgtgggggggaacacacatatntactccatgctgttt

SEQ ID NO: 248224 - DNA, 274 bp, Gossypium hirsutum
atctgtttggaagaggagtggtttgcctttataggattagctgcagttttgaataaaaagccgttctggatgaactgttagtgattggtaagcgacgtcctctgatcgagatcttcattatacttgtcacttgttcatggatattttggatattttaccgtaatcccggattttatgctccaattttaaatgggttaatcgacactgttggtgacctatttaaaaaaaaataaccatattaaaacttttgatagaactctaaaatcaatccacc

SEQ ID NO: 248225 - DNA, 403 bp, Gossypium hirsutum
atcattacatatttaaatttgagactcaatttttatttttaaaaaaaaaaacataaaaaaggaaaaatggataaatttaaaaaaaaaaaaaaaaaacaaaactaaaataaaaaacaataaaaaaaaaaaaaaaaaaataaataaaaaaactggctggccgttttaaaaaacccaattttacttccccttccatgcaacaaataagtttttttttagggccccctaaattaaattaattgcccgtggttttaaaacgttggaactggaaaaaccctgcctttacccaatttaatgcctttgaaaaaaatccccttttcgcaagttggggtatttacaaaaaagcccccaccgatcgcctttcccaaaatttacccaacctaaatgggaaatgaaaccccccttt

SEQ ID NO: 248226 - DNA, 283 bp, Gossypium hirsutum
gagaaaacactagcgtatttgttatcttcaaaagcctgtctatatagtggatgactgataatgacctgaaacccatagctattgccccagtggtttaccataaaactgtatggcttgaagttgcacttgaaagatggttgttggaatctgcaatggcaacaacttgatgcccaaagatggttactgaacagccagcggttatgccataaccgattgtgagggtgcctgaaggaggacacagaccacgctcagagatttaaactctagtcgggatgaaaagctg

SEQ ID NO: 248227 - DNA, 369 bp, Gossypium hirsutum
atgaaaaacactcaacttatctctattaattcttctattaaaactctcctcctatcatattggactagctcatatatcacttcaaacccatcatctacagcccccatttttttaccaaaaaactatattccttaaaattacacttgaaaaattattcatgaaatctgaaattccaacaacttaattcccaaatattgttaatgaacaaccacctcttattccataaccaattttaatagtcacagaatcagcacacagaccaccctcagatatttaaactctatccacaattaaaacctaatctttttagttcattatatagcatccatctctgactaaatatccaaaatttatttaaacaataataaa

SEQ ID NO: 248228 - DNA, 240 bp, Gossypium hirsutum
taaaggttctatttacggaagaggttttgttttttgggggaagaggtaggggttccggcgcggaaattcgacccacctggttggcacctgggattgggttccatttggtagaaccaaactctttcccagaatgtgtgaacgtgcaagaccaaattaaaagattggcctttgaatgtactcctataatgggttgctgcttttaggattcacactcatgtactctataaaataaaacccatc

SEQ ID NO: 248229 - DNA, 392 bp, Gossypium hirsutum
cttcagcaccttgcttttttatgcaagtctgaagttaattcaatgggtcgtatggctgcaggagtcttgcagctgctcaagcttgaaaactcgctcggcaaggatgccatatataaacttagcaacctaggaattgagggatttgacaagattttctcatcggataagctcaaccgagggaacagtgctggaagtattgggcagtctccattatcaaaagtgattattgaagaccagcgctcaactatcgctttgctcgaggaggcagttttggattcacaagccaagtgtgccacgctcgttactgaattatctaatgcagagtcttctgaggagaatcttacggctattaaagaactgagacagaaattagatacaatgcagattttggt

SEQ ID NO: 248230 - DNA, 202 bp, Gossypium hirsutum
  unsure (1)..(202): unsure at all n locations
acccacgcgtccgacccgcnattaccacactacaacacatccttattttaccgaaaacgagaaaccgagggggcggccttccaaaangatgggaccccacccaagcaacactatcccataactgatacagatgaagatcattctctgctttggacgatgctcgatctccacatcaaaggaagcaactaaagctatccaacca

SEQ ID NO: 248231 - DNA, 151 bp, Gossypium hirsutum
attaaaggagaagctggaacataagttttgtaactattgggaagcccccattttggtgctactatacttttaatacactttgatttgaaatataatttaattctttatttgtattgctttcctaatagagtattggataattgaaaataaa

SEQ ID NO: 248232 - DNA, 386 bp, Gossypium hirsutum
cagcaaataatagatatggcgaaagctgaggttgtaattgttatgactatgatgatggtgataacagtggttgatgggttgggagggatgatgaggataaacgatgttaataacaacaaaaaggtgcaagagcttgagaggacttctggggatgattataacatgcggagcctatggccggtgcataaaagtttgggcaatggtgggccgtcgacggagtacatttgctcttatgtggatggagctaagaaacacgtggtgtgtggaatcaaggattatatcaagattaacggcatgcgaggtggagtcatcaacacattcgagttagctgttttgaattaactttggaatcactctaaggactggcttaattcaatggcttatac

SEQ ID NO: 248233 - DNA, 431 bp, Gossypium hirsutum
cgcggcaagccaaacagtgcgtctcttcttggggttctgcaatccacacaaataacaccagtttaggggcgtggttactagtaacacagtgggtgtggacgcttacttatggagggcagtgtctaccgatggtatacggctatgcttttgccaccaccaaatggcttaggcatgtacgcggctgcagccaccgcatacggggcatatccgatctacggcagtcatcagcagcaggtaagctaaaataataacagcaggagagatgttatagctctacttagacatttgaactagaaaaaaaaaagaggggtaaagggggactggcttgttagttgttactccataactctctctgggttgtgtagaattcttacataaatccctccaaatatggagcggaactgaattttgacccctttttttaagtagtt

SEQ ID NO: 248234 - DNA, 408 bp, Gossypium hirsutum
gtaagatttagtgaaatgtgtggggtccagtatgataagagttcctcctcctccttctcagggtcagtgtttacattgactaataaatatctgctatcttcttcacttaaaaaaaaaaaaaaaaaaaaaaaaaaaaaaaaaaaaaaaaaaaaaaaaaaaaaaaaaaaaaaaaaaaaaaaaaaaaaaaaaaaaaacaaaaacaaaaaaaaaataaaaaaaaaaaaaaaaaaaaaaaaaaaaaccgggcccccccttttaaaaaaacaaattttactaccccttcattccaacataaaatttttttttatgtgcaaccaaaataaaaaacactgcccccggtttaaaaaccgggaacctgaaaaaacccgggttacccaaattaatatcccttgaaaaaaatcccctttt

SEQ ID NO: 248235 - DNA, 412 bp, Gossypium hirsutum
atttccctgacaatccatttcaaagacttttcttttctctctcaatttttgtatttttcaacgtccttggtgttaaaatcagttttattttctctccttttttccagttacttccctcggttctttgttattttctttcatttttgcctctttttttccatacggatcgtttcaattttctttcttgttcttaatccaatttattggttaaacagacaaaacccagattacattgtatttgactcctttcttcctatcaactgcctgaccaagtgacagattttttcattcattaaaaaggatgttaggtttaaagaaatctccattgaagaccgctaagcataattcagttgatcctgcacgtgtggccgcttctcgttccaacccctttgattctgatgacgagtttgac

SEQ ID NO: 248236 - DNA, 418 bp, Gossypium hirsutum
atgggtttcgtgatgttcgcaccaactacaactacacggagccaactctagcaggcaacgcggggttggttgctgcactcgtggcattgtctggtgacaaggcaaccgggattgacaagaataccattttttctgcagttccaccaatgtttcccacaccaccaccacctccggcaccttggaaaccatgaaaactttttgatctttcttctgcccatgtgtgacttacagtctgatgattttggaattagtttttggtacgtaaatgaccttggaagtgtaagtaacgcaaaaaggcaagacaggagatgagtgatgagacaacctgcacaaaactggtggtggttcgtctgtcagattggggagtcagacaagcattcaaacattgataatttgtatatgaagtctatttggattt

SEQ ID NO: 248237 - DNA, 253 bp, Gossypium hirsutum
  unsure (1)..(253): unsure at all n locations
gagtgaccattgcagactgtagagatgttttagccagcacacggtaactagaagaagctgcagagagagccatttatgagagcacacataagcacagcaagctgtataacttgagtcgcaggataccagagtggactcttaatgtggtggctcagattaagttgataattngtgagcatgtgcacttgatgggtgctttagtattgtgttgagtgggtgaagaataggaaatatctctatcgcttgttgctct

SEQ ID NO: 248238 - DNA, 109 bp, Gossypium hirsutum
  unsure (1)..(109): unsure at all n locations
cgctccatgttnttctctacccatctaacccaattgacctaatttcttggacttctatcacagcttactgttatgcatcatacgatcgagactttaagtcagtcattac

SEQ ID NO: 248239 - DNA, 333 bp, Gossypium hirsutum
ctctcttaccctcctttcgtttcatttcatttcatttatctggttttcttttctcttcgcgggggtggatgctaaggattccacaaagacagtgtcctaactcccaactcatgtttctaaattctagtcttgtttaggtgggtttggcttggtttagagctttcttttcccgttttaagttgtgttgtttattactataatttgtcgacgagacaaaaagacttttgtttcgagttttttggtctggtttgattttttaagaatggcaaatgaagaagagaaaaacaatgatttctatgctgttttggggttgaataacgaatgcactcaaac

SEQ ID NO: 248240 - DNA, 277 bp, Gossypium hirsutum
  unsure (1)..(277): unsure at all n locations
aacattgngaactttgcctctgtatcataaaaccattccctaaggctaatcatgccgtatatcatagtcattactatacaaattttcgctacattatctttattagcatattgtattttgatagcggaaacccactcaatttttacaaatactgattttgttgatttacacaatcatctttatcaatttttgaactcaatcacttatttacctttaaaactattaaccatctcccaataatatccaaaactgtcaaccacattttacccattctcat

SEQ ID NO: 248241 - DNA, 211 bp, Gossypium hirsutum
  unsure (1)..(211): unsure at all n locations
ataccgtagttagctatatagcgaganagaactaccagatcctatacgcgacgaccggaagccactgaatcgcgcatcgctcgatgattgaaactctacacgccgccaatcctgaaggggcgaaggtaaccctctgccgcctgcgacagagcctgtacatcggtgtaggatcagctatcgcgtatcgcagtatcgcaagcgtcacagcgag

SEQ ID NO: 248242 - DNA, 418 bp, Gossypium hirsutum
gtcaagatccaagaacagggttcaattctgcctcggctgctttagatttcctagaggatgagaaatgtgcaaatactcatgtgacaataggtgggcagaaactcattttatcaacatggtctcaaaaagtacagctaaagtttctgaagcattttctaggaaatgatggattcgtgaagcatatgatggaaaatgaaaacttccatagtgttttcgacttccttccggaaagaaagaatgcttggggcaatgtactatatgtgcccgaaagagaagaggttactatttcgcttttccaacctatggttgctagacacaatgattgctctctgctaccattgctaaccagagacaagcagttagcaaagaaaaagaccatgtctcccaattcccacttgagcaaggcaaggactcaatt

SEQ ID NO: 248243 - DNA, 210 bp, Gossypium hirsutum
ctgatttaaagacgcttgtgttgagagttagatgtttcccatgcctcaggacattgttcttaatttggttacctgttaaccttgatcatcatgtatgtatgattaatgcttttgtggccaccctgagggatagaggttagaagagtttgtgagacagttgtctgaatttgtagctcaacaaaactaattacttagttcgaggtaacagtt

SEQ ID NO: 248244 - DNA, 352 bp, Gossypium hirsutum
tgattttcaaagcctgatctctgaactgtctctggtaggcttcgtagttggctatccggttggcagacaacgacttgctcctgatgctacacaggtgaagctattcattgatgatctttcagagacgggaaaacttgatgggttaaagtttacgttctgggatgagcgctttacatcaaagaatgtggaattgctgataaagcctttgagcttgcatccagtactagcaaaaactgtagttgataagtttgctgctgttcaaattcttcaagcatacctggattatgtgaacaagaaggaacgtaggtgagatataaccctattggtatacatctaagcgttatgtcatctg

SEQ ID NO: 248245 - DNA, 390 bp, Gossypium hirsutum
  unsure (1)..(390): unsure at all n locations
tgattttcaaagcctgatctataaattgttttttttacgctacanaaacggctatccgggggccggttttctacttgctcctgatgctacacaggtgaagctattcattgatgaactttcagagacgggaaaacttgatgggtcaaagtttacattctgggatgaacgctctacatcaaaaaatgtggaattgctgataaaacctttgagcttgcatccagtactaacaaaaactgtagttgataagtttgctgctgttcacatacttcaagcataccttgattatgtgaacaagaaagaacgtaggtgagatataaccctattggaatacatctaggcgttatgtcatctgaataacacccggatcgtagctttgcaagtgaaaatact

SEQ ID NO: 248246 - DNA, 344 bp, Gossypium hirsutum
agcgaatatcattatattctgcagtataggactcgatgtaggatttattggctcgagcgacgggcgtagctgctgatattatgctaacatgcggaaagtcagtgaccgagtaaaggaaagcattcactattgatgatatgctcaataaaaaagaaaggcattcttcatctttcttgtaaggaaagcctccactattgtaattgtactcgataagaaagaaaggtatgctgcatccactgggataatatgaatcagagactctattgtcatgaccgtattctaagtctaacctagaaacactgaactcctaacacgaatgctgaacccctttttctttggtcggc

SEQ ID NO: 248247 - DNA, 398 bp, Gossypium hirsutum
caaatattcaaaaaaatatggataagacatcaattatttaatttgcttagatttgtatatcttgtgttgctttaagggttctttgtgccttttgaattttcaccattttaatttagttaactatttttggtggaaaagatgcagttcatttcttattgtttgaaaggaaatatatgcttatgtaattatgctactttgaatcaaattctaatatccttaaaatagttgcaaaatcattcttatttacttcatgaacctctaagctatatttacatgacgttcgttcaagtttattataatgcaatatgctaaacctagtatacaaaaatgttttgatgtgatgtatggaaattgtttactattttttctctaatttgaaaactttatatgagtaagtc

SEQ ID NO: 248248 - DNA, 369 bp, Gossypium hirsutum
gaggtggtggaattggacaccactaaactactaagctcacgttgcatggatgcatggattgctgtcattagtccaaaatgagagcataatcggaatgatttgttgaaacattatatattagtaataaattactaaaaagtcaaaaaaccgattccaattacaaaatctaccctaaattaaagctacttttatttgcattattaccttctttttttaattatttgtcatacgtatatattgctaaaagaaaaaacctttttgttatcaattagggtaatatttgatatatcgtaattgaaaatcgaagattcaataccatgaataaatattttctttatttcctatctcaacacgttcgacggctttacc

SEQ ID NO: 248249 - DNA, 412 bp, Gossypium hirsutum
gatttataccattttttcaatcaaaaatgatttgtacgggtataatcattttgacactggcgggccttgattcaattaaagcacatcgaatcctggaattaaccacaagaatgtattggatcaataaaaacagcaatttgtttttacacaatcgagattaccgatcaaattttatactcttagaaacactatcccgatgctttcgagatacatgcatattgttcttaatactgaaacgggaaacttgtggctaaaagagttactttgttttaaaaagaatggggtgcaaaaggagtacacacaagtcgtgtttaaccccataattctttttatgggtcttgaaaacacataatgttttatatgagacctcttaactattattatcttggcgagaataatgctcatcaagcta

SEQ ID NO: 248250 - DNA, 337 bp, Gossypium hirsutum
ccttgatttacttttattcttgaggttattataaagagagatttttacaaaaaaaagaaaggaaaaaaaaaaaaaaaaaaaaaaaaaaaaaaaaaaaaaaaaaaaaaaaaaaaaaaaaaaaaaaaaaaaaaaaaaaaaaaaaaaaaaaaaaaaaaaaaaaaaaaaaaaaaaaaaaaaaaaaaaaaaggggggggccgttttaaagaataaaactttactgacggttaaatccaaggttttactttttttattgggcaaccaaaataaattcaattgcccgagttttaaaaacggggaaattggaaaaaccttgggtttcccaaattaattgccttgg

SEQ ID NO: 248251 - DNA, 383 bp, Gossypium hirsutum
cccacgcgtccgcttatctcctaacctttcttttcgctcggagaatcggcttgggggggcctaaattgcaatccctttcagggggaaagggaaaatgtcatcatacgaaaacgccgcaggcgggaagctgaagctgcagggaaaagccttggttgttcaggctgctggaatcaacatgaaaaagaatcctctcaagcaaattcaacatgatgaccaaattacccagaacgatccctctgatgccgattctgctggtgaaaccacggaagtttctgttgatcccactgaagaagatatcaacaacgcagagagatcaagcggggagaaagccgctcctcattatgatgatcatcttaccccagcacatagacgatacattgagc

SEQ ID NO: 248252 - DNA, 170 bp, Gossypium hirsutum
gccaagcgtactgaacatcataatgaatgtttttatgcttatgtcacacatgaccagtggggaattggttaattcagttgtttgaactcttaattaacagatgactctgtttggcatgttgttcttccaatggaaaaatataacctttgacagcttgggctgatggcggt

SEQ ID NO: 248253 - DNA, 397 bp, Gossypium hirsutum
ctttctcaacatctcgctgttcgatctcttagtttcttgggatttgttgggtggtgataccaaaaaggggagaaaacggagatgattcatttatctttttgcaaattgagatgtggatcatgatgcttttgtaaatatttgattacaacttagattctgggcaaatatcaaatgtaatatgataattatgtattgttagagcaaaaatggaaaggctgtttgccctcagtatagagcaatatcatctttgtatactgtattttatccatttatgtaccccatctttgattaaatcttagattttgagggtatcaaatataatgaaatttatgtatccttaaaactaaaaggaaaaaaaaaaaattaagctctgtggtcacaaactatgattacttgc

SEQ ID NO: 248254 - DNA, 293 bp, Gossypium hirsutum
  unsure (1)..(293): unsure at all n locations
cgggcggggggaaaggatgaaataacttaanaggttatattgtctctcaacaaagcatgcaacggggggggctaatctagtttaaccttatctaatttctaatcctgaatcctacaactaggatattggaacctttccaaccttattatacgttaaaaaaaaaagtcattacttctaatggtggggctgccataatcacaaattcctttaaaaaaccaaactttcttctattctggaaaaatcatcaattgcaaaaactatttcaaataaatcatcttttttcttcaataaat

SEQ ID NO: 248255 - DNA, 319 bp, Gossypium hirsutum
cccacacatacacaatttgtgtggtatcttttctactttctttcaacttcgcatgtatggggtaaatcttaagtacggctaaattttgccattagcccctatattctacaaaagttagaacatctaacccttatgtgctaattcggtcattaataaacattccacttcttgcaaaaaaaaacataagatgaacatcggaattacaaaatagaatacaagcataacacataaactgaatatcttaattaaaataaacaataaatgggcaggcgctttcaatattccaatttatacacccgttggttgaaaccattaacct

SEQ ID NO: 248256 - DNA, 410 bp, Gossypium hirsutum
gcgtgcgaagagcattatttaaattttattcatggtttatttttttcacaaagccagaaaatcatcggtggggaccaaaacatgttaattcttcaacattcaactaacaactgttccacaaaaacccaaataaaagcccatacggtagttggttctaaacttataacacaaggtgttcttcttaaacccaagaatggcttattttttttttccaacgctccggttcaaccaccaccttaaatatttacaaggttaaataacctttatgaaatttttttacatccacatatatttcaaatttaataccaacattttatactaatatttttttataaaatattggattccgatgcacacacatatttactattcttcaacaaaaaaatatcctttttttttacacattttaa

SEQ ID NO: 248257 - DNA, 208 bp, Gossypium hirsutum
aattctctaccaattacttaaaaacatttccacaaaaacccaattaaaaccccatacgttaccttgttctaaacttataacacaaggtgtttttttcatacccctcaattgctcacttctttgtcccaatgcttccctataaccaccacctttaatatatacaaagccaaatcgcctttattaatctttctacaccatcaatattttt

SEQ ID NO: 248258 - DNA, 224 bp, Gossypium hirsutum
ggagaacaatgtactgcatactcaacgggaccgtgcacaacctactgcctttgcaagggtggagcttgcaatgccttcatgtgagttaccagatgagatgctatcattaccacattctgtgttgatcagaacgaatatacgcctgccctgaatacagcatccaaagctagctgtactaccaacttaataggtacaacgaatgcagccattcatgacaaaacatt

SEQ ID NO: 248259 - DNA, 238 bp, Gossypium hirsutum
aagaatcttgacttgaactagagggttcctgctcattttggttagtgcaaatcccaacaggttttcttgtttggctccaagttgttgattttacttggtaattttattgtatttgcgttgtttgcctgttcatttaagtgcttggagccaatatttgcagactagtcactcagaatcgatcaaattcaataatccaaggaattcttttccccgctgaaataatatggagtttttattt

SEQ ID NO: 248260 - DNA, 269 bp, Gossypium hirsutum
acccgatacagacattgtttcggtgattagcatatctccaaaggtacttatatgcagattgatccaatcaagtgttgactgttgtgcataactacttagttatgtatcaaagtttctatgtcccaaggtatgagcatggtaactttattggcccaacaatcttatccaatgttaatgtcactcatggatttgtccaagaagaaatttgtgaccctattcatcctgtgcattgatgctgacatccctttttatgctatatacattgatta

SEQ ID NO: 248261 - DNA, 147 bp, Gossypium hirsutum
cttttcttagcccaaaatgttctttcatatccagtctcaactgattcttactcgtcaaatgctactatatgactatcatgtttgaaattaaatactactcaaactcacgcttattcttgttctaaattaaacacattcatatccacc

SEQ ID NO: 248262 - DNA, 406 bp, Gossypium hirsutum
gagaaatgcaagagcagagcctaaaaacattatcctgtaattgagcaaaaggctaggagagggagccttcttattgggatgtgttttatgtttttttaatgtttatatatatatatttatatttatatttggtatatatagatatgcaaaaagaagaaatcatggggacgtctttgtaatgtacaagaagcaataaacttaaccttatatattgctggcttgttttgttgctgatgatgggggctttgttttaataatttcaccatgtttttttttttttttttgctattgtctttgttgccatagcttattgattatgtgtgtgtgtgtgttttataattattattcctttttcttctacccccactcaaattttaatgctaatggtactttttttccccttccc

SEQ ID NO: 248263 - DNA, 415 bp, Gossypium hirsutum
gtttcctggtccacgtaattgattccctgtcggaagtttatcctagagttgaagaatgggtggagaatgtgatcatggaggaaggaaatgcaacaatattgacactatttgtctgtctactcactgttctataccttcgtgagcgacaacgcaggcatgctattgctgctgcgggggcacacgaacctaatgagcatgttgtacctgctgcacgctaattgtcagtgttggtattaagattagatgtgtttttttcaaaagtaaaatctccatagcaaaaatgtatagatcggcttctttggccctgttctagagagctcctacattgtaccatagagaatattctagtccaaaaaagattaacataagttgaaaaacgatcttttgcctctaatatcaaaacatgtactttatg

SEQ ID NO: 248264 - DNA, 289 bp, Gossypium hirsutum
ggaagagtattattgtctatatagcttgttttctcgagggttttttcttttttaccaacggtaagcttgctgctttgatttgcagtttctgtaacttgatcagttgtggtatccggtatacggattcattgtcatattcggatgcataattggaattatcccaaattgcttcttcttaaaaaaaaaaaaatgaaaaaaaaaaaaaaaaaaaaaaataaaaaaagaaaacaaaaaagataaaaaacacaaaaaaaaaaaatgcaataaaaaaaaaaaacaaattattaag

SEQ ID NO: 248265 - DNA, 395 bp, Gossypium hirsutum
gctgcccaaaaacgccattaaatcattcttatgtttttcatattcaaaacatctggtattgtttttctgattgaaattacattgaaataaaaacagtttctcagcttaaaaaaaaaaaaaaaaaaaaaaaaaaaaaaaaaaaaaaaaaaaaaaaaaaaaaaaaaaaaaaaaaaaaaaaaaaaaaaaaaaaaaaaaaaaaaaaaaaaaaaaattatttttttttaaaaaaaaaaatataaaaaaaggggggggcccctttaaaaaaaccaaacttaacccccccggcttagaaattttttttttttttttttgggcccccaaatttaaatctctgggcgcggtttaaaaaagtcggggatggaaaaaacccggggttccccaacttattttctttt

SEQ ID NO: 248266 - DNA, 271 bp, Gossypium hirsutum
  unsure (1)..(271): unsure at all n locations
catacacaaaacatcaagaaacgtaccctttttaaagcaaagcagacccaccaaatccccnggtgacaataaaaaaaagaaatacccttacccctcaaaccatcttccccttaactgttccgtcccgatcatctcaacgaaagctattcttttaatttccctaatctcttctttctacctgctttttgctgttagatagtgtaaagatcttcaagcctatgaatctttaattgccatttgttttatataaatgggcccctcttcaataatt

SEQ ID NO: 248267 - DNA, 199 bp, Gossypium hirsutum
cgggcgacccacgcgtccggttgaaagactgttcgttgcaaaagagaaatttcctatttctttttctggccagattccggaggccaaaagggatgccaatgtccaaatggaactagccagtcttttaaaccttggggaaggtaaagcaccttcatggggtttgatattccaactggtggaaaggatttaacctattcac

SEQ ID NO: 248268 - DNA, 223 bp, Gossypium hirsutum
gcgctacccgtccaggactctttcattcctcttttgaaaaaaatttataaaagcccacaaaaaaaaaagagggggggtatacttgttaatgacaaaaaacaaagaaacaaattacaatgaaggtgaatggaggaaaagacggtaccataactccaattaaaggggcgggcctttttaaagggccaaaatttgcttccgctgtattggaagcaatagacttttt

SEQ ID NO: 248269 - DNA, 403 bp, Gossypium hirsutum
gaagaacccaagaagtcaagcaaaaagggctcttcaaaaaaggttgcaacagagagtccggagtcaaaaagcaaagataaatccgaatctggaaagaatctcacccctgcaaaatctagcaaaaaatcttctggatcaacttcaaaacaagatgctagtgatggtggtgggacttctggctctaaatcaaagggttctgcatcaaagaagcctaaggttgaaaaggaaaactctaaggatggatccaccaaagagaagcttgcagtcaagaagcaaacaaataagtcatcagcaaaggtttctgctaaatcacaaggtaaaagcaaaagtggcaagaaacctgagcctagtagggaagagattcatgaagttgtcgtagatattctaaaaaaagtggacttca

SEQ ID NO: 248270 - DNA, 377 bp, Gossypium hirsutum
cccacgcgtccggtgaaggcaattcttcgcttgtttagttataattttgttgagcgacgaagcttagataatctttggtttgagcttatgatgcgtcgctctgcttatgcatccaaaaaaacgggtcaacccaattcaaccaacccgatttcctgttctccctccgatatctttcgcaccgcttcaagtaaggcatcttcaaaagagatggagcggattgacaacctattttattcttttgccaataggtcttctgggatgattggcccagaaaggattgagactctatgttcagacatgggaagtgatcacacagatgttatgatcttgatgcttgcttggaaaatgaaagcccgaaaacaagggtactttaccct

SEQ ID NO: 248271 - DNA, 138 bp, Gossypium hirsutum
  unsure (1)..(138): unsure at all n locations
gtgggttctgnnnggatggagtataaagttttgaaattggatttttagatagcatgtagtgctttaaagttcatatgtttgtatgtaagnaagtatgaaattaagtaatacctctatataacctggtgataaaatctg

SEQ ID NO: 248272 - DNA, 404 bp, Gossypium hirsutum
tgaaaaaataccaacgaggagccagttcatgttctgctctggcaactgctgttagggcagggcctactgctgctatagcgccagcttccggttgtgcaagtgcaatacactgtgctctccttggactcagaaatagccttgatcctgaacgcaagaaagagtcgatggagaaatattttggtcccactctgccacaggatccaaattaatcttgcaagcaacagtgtcacttctggtattttcaccttgctacggttcaaaattttctattggtcaactatttgcgcatcaaaagaaattttcagctacttgtttcattttcttatcgatactcaggattgttgtgatggatcaaagagtgttctttcctcgaagagaacacggattgtcatgtacctcgactt

SEQ ID NO: 248273 - DNA, 240 bp, Gossypium hirsutum
  unsure (1)..(240): unsure at all n locations
ctcatgttagactgcntttggggggtggactttcattggatatataatcttatgttaggatgataatctatcatttaagtgggctatattatggtaacccatccaatcaccggatttggggtgaaaatatttggcaggtttattattattatttaacaaatcagactgtcacttacctccacccaaaaaaagaaaaaccataggagactaaacaaaataaaaagaaaccaccaagcatat

SEQ ID NO: 248274 - DNA, 401 bp, Gossypium hirsutum
gcaatttccggccacagggctggtcaccgttcgatcgccggaccgccgtgcaccgccgtcgccggccaccgcgtgagggcgagtgggtggtgctgacatgggcggtggagcaggtggagcaagtggctggtatgaggcgatggacgtcagcggcgctaggggttgattaaggttttagctttttgaaaccctaatctagctagttgggttaagaattcgggctatgtgggtttgggtcagggtctgtttgtaattgggttgttggattaaaatttggacttaagtgtgggtgaatttaaatgggtatttggggttgggatttaaggtttaatgggcccgggtaatttgggctcttacaattcctaaaagtattgtccagtggaaagttgacataggggatc

SEQ ID NO: 248275 - DNA, 297 bp, Gossypium hirsutum
  unsure (1)..(297): unsure at all n locations
gcctattccttacagactcactttattattctcactacgagacnngcttccggtgggtttgagtgtctgataatgtacataggacgtccctaaccttacacacaacactcctgtgaagaaacttaatgcttttgaagttttctcaaaggcactttataccattccgacaactattgatgacaatacggtgcttgaacagccaaatattccctcccactttccttcttatctccacatttaaggactcaatccattgattgttatcatcaatttatctttatgagatattgctgatct

SEQ ID NO: 248276 - DNA, 192 bp, Gossypium hirsutum
aaaaaaggccgaccacgcgtccgagacataccttaatcttcccttttagatttatcctgctactccgaagaagggagactaattccggttttatacgtcccatggatccttcttataaccatccacatgttccttcacgctttgtcgactgtgagaggcgattcggtaacattgatagataccgaggaggtc

SEQ ID NO: 248277 - DNA, 321 bp, Gossypium hirsutum
cccacgcgtccgggcatctgccagggcatggggtggtgagaagagtccatcaccttctgtgcttagctcttcacagatggctactgctaacagtgatggtcattttgattctccaactgtttcaactgctaatacaagtggggttccggcggtcacacatctcggcattgtaggaagaggagtaaagcgtgtattgacaagtacatcaatggtagaatcaaacccaataaagaaacctggaattgaaccttcatctgacaaaggagatagcagcagtgcgtcttgatgtttcggatcttagatcccaggaataggtaatca

SEQ ID NO: 248278 - DNA, 270 bp, Gossypium hirsutum
  unsure (1)..(270): unsure at all n locations
gcaagggtgacgccggngagcttttacaatttagctgtttctccattaaagggcgttttggtatccatcttaaactaaagaacatgagccaacttgtatcatttccaatggaaatgaatttcttttctttatttcatgctgtcattaggatccaatttggataaacatggttttttaggattctttaaacaagttttccttcttgctttaatttattaagtagtttcagttggtgttaaaaaaaacaacttaaaaaaccaaggcaaaata

SEQ ID NO: 248279 - DNA, 286 bp, Gossypium hirsutum
gagacttagtcgcctctcaacatcaggagtacgaagggaaaagacctaaaccgaggctcggatcgatgaaccaaaagttcattcgagcacgtctctgatgtggcctagtagaggagcgcacgacgcggagggacgcgcgacgtgcgatgcttgggaacatccatggttgcggcggctgagggtgttagctgctagagttttcatttttctttaattttgctgggctgatagggttgttttgggtttaagtctgatgggtttagggtttgggtaatgatttgtattg

SEQ ID NO: 248280 - DNA, 298 bp, Gossypium hirsutum
cgagcactagctgacaacataggtaagttaggagccctctagtttctagcccttggtgaatgaaaacttttatgtccaatgggataagaaaaagggaaaagaaacctactgcattagattggaataactagcagattggaggaagagtggattgtaaagttatatgttgatattatcatctgaatgtcaaacttcaaaaactttttcctattagcatattctaatctatttctttcttttaaccttgtttcattgtctgccatgttaagcatagtgacgtatctccgcagtttcttct

SEQ ID NO: 248281 - DNA, 255 bp, Gossypium hirsutum
ctaatcgcgagcgccgccctttttttttttttttttgataatttagaacttgtaatcaatagaaccagctatttgattatcatactaatacaacattgccactgtcaaaacagaatttcggtagcttttcgtacttaaaaggaatccaatatctattcccattgtctcttaaaacaaatatacccctacgaagggggtttttgtacgtttaatttaattctaaggtgacataactcaccactgattttagatatg

SEQ ID NO: 248282 - DNA, 279 bp, Gossypium hirsutum
  unsure (1)..(279): unsure at all n locations
tgagatcagcagctacttcttcttctcatcccctctcgtaaggcaccctaccacgtatgtgccgaaaagggcnaaagataaagggagaagcctggaacatacggtattgaaactatttgggaaagcccccatatttggtgctactatacatttcatagcattttggttgggacttaggattaatgtcttgagttggtgtgtttagttatggatatgggataatgaaataggaacattatcttctttttggttaataaatttgtggatttgctcttcaat

SEQ ID NO: 248283 - DNA, 204 bp, Gossypium hirsutum
cttgagaatcgggataggtcgaatgctcgttcatactatccgaagccctaaattggtaaagtggcttgtatattttgagtgtggcatgtatagcactatactcactttgtgtaaatgatctaatgatatggttatggtttggtaagaaaagggtttgtaaatgattagccattgaaatgaccaatctaaatcatgtttgatgtc

SEQ ID NO: 248284 - DNA, 274 bp, Gossypium hirsutum
  unsure (1)..(274): unsure at all n locations
cgacaactaaaacaaaagattaaacatttccattatacccccacactnanaaaacagggggagcgcaaattaaaacacagatctacccccacataaaaaagccccactcgtacacataaaccaacaatcagacttctaatcaaactctacactcctaaaacccctgcatacatacacaaggactatggtatactgtttgataactgatccacaaccccacaaatgtgatcaataaactatcccacaactatctattacaaccatactaaaaacc

SEQ ID NO: 248285 - DNA, 109 bp, Gossypium hirsutum
ggcagctgatcgtgtgctgttgcataatacaatctatggtgttacactgtggcctctataaaagatgagctcaacgctgactactgttgatggaatactctggtctttt

SEQ ID NO: 248286 - DNA, 124 bp, Gossypium hirsutum
tgtatgatatatatgatatggacactatcatacagagaagcaagactgcgtgtcgagaatctactgtacattttacactcaatcattaagatgcatttttctgtttcgtacaatggactggtgt

SEQ ID NO: 248287 - DNA, 156 bp, Gossypium hirsutum
  unsure (1)..(156): unsure at all n locations
aagatctataagacatgcgcacggactttgtactaagcttgacttagtcacagaganacgctacattaacgtcagcccgtatgtgacatcttatccatatggacttgtttagatgagatgataaggcacagacatgaagtctctctagactttctg

SEQ ID NO: 248288 - DNA, 116 bp, Gossypium hirsutum
cttactgacaataattgaccattgtctcactgttacagtgtgatggtctgctcatgtacagaagtggatattatccaccaccatcatcaatgtattgaattatggaggatgtacat

SEQ ID NO: 248289 - DNA, 217 bp, Gossypium hirsutum
  unsure (1)..(217): unsure at all n locations
gcgctgcggngaactgtgctgcgtctgctgaggtgcagtgctggagatgcagatgtaccaacctgacgtgccaatacacactgatattgtctgtgacacccaaagacacttagactaatgatcgctaacgtgattgacacactcactcatgatatacaacaatctgacacctgttaaaattttggttgttaaaaactgtgcagttctgtcccgtctg

SEQ ID NO: 248290 - DNA, 292 bp, Gossypium hirsutum
  unsure (1)..(292): unsure at all n locations
agcgtcgagctgttgctgatgaaccttctacaagcagagctggtgtgtcattaagtacacgctatctacatcgacacattgagagcctgtgttgacatcgctgactatttcactttgtagctcaacgaagtatgaaaacatctcnctttatctgatgctttgatagatgtactacactacaaatgttgagtagtaccactgcattggagtctgatcaaacgcaatatgagaagatatgtgtaaaaaaagcgcgtaagtcactatcctctcagatattttagactatatatgc

SEQ ID NO: 248291 - DNA, 222 bp, Gossypium hirsutum
acagcgtcggtgatcactagacttacatcacaagaagtagtgacaatggatctctatctagaagaagacaagtatcggactgtggggattaaaagccaacttgtattgtggatgaagtgaagtgtataaattctgcttctcgctgcatgcagaacaaataagttaaaatatattgaactgcatctgagtgatgatattatctagcttttgtacttatggata

SEQ ID NO: 248292 - DNA, 249 bp, Gossypium hirsutum
  unsure (1)..(249): unsure at all n locations
gcatgcttgcatctcttgctaagcatatatggccgagtcttggccgccttggacatgttgttgtctatgtgtcgattcatcactgtttgggtgttgtggtagagcgantaatcttaacacaatcagcatcaacagtgtttacccttttttacgaatctctcgactgtatactttattactacgtacacaccattctgtgatataccaatgcaaactgctgtctcattcgaaatggggaaattaacgttg

SEQ ID NO: 248293 - DNA, 129 bp, Gossypium hirsutum
cgcgggtaaaggctagaaccgtaggcctcgcttcaccaaatacaaccttctgtggttatagctaacgcgtagcttcgctatcagcaaatacagtttgtgattatagctagtaactaaccatggcttagc

SEQ ID NO: 248294 - DNA, 134 bp, Gossypium hirsutum
accaacaaagtgagcatgcacaccaacagacacaaggggggtcaaagcatgcaaacacatctgcacaacccttctaactaaatacaaaggtttgcccttctcaagacgaaaataaatacaaaaagcacactagc

SEQ ID NO: 248295 - DNA, 217 bp, Gossypium hirsutum
ctcttaaaaaaaaaaaacctttcttggttcttaatgcaaagaaaaacaaccggggcctgtcaaattataacactcaaagatccccccaccgaaaaacaccgtattgacctttacaaaacatacttagcatattaccagacaccagaaatcaccataattccttttggtgctcaaataatcactaaaaaggattacccacaccatgttctactcaacc

SEQ ID NO: 248296 - DNA, 222 bp, Gossypium hirsutum
gttatgcagggttcaactttacgaacatttttatgcttcgcaaaagctatgtgataaagtggacggggtgacataaattgcccttccagtgataacaattggactagctgatgctgccaccttctatgtttacatgctcttgtgagatatgagagtaatcattgatagatttataacatacagagcctgaaaagatgaggactccaaacttatgtacactct

SEQ ID NO: 248297 - DNA, 351 bp, Gossypium hirsutum
ccagaggatactctagaggaagcctacatttatgctgacaggcagatacatcggcatagtgggggttagattcgaatgactaatcaaacggactaatgacttgtctaatacatagtatgcttcatgattgctgcatcgattagcgagtcatatagagagtagtcgatgtttatacctataatttgcgctactgggtcaacctattattatacttataatgaatcggacagtggtgctactctgaacgccctggactaatactagtgagagcctttctagtttgttagttgacagactatttaatagctttgtatgcagactgggggtttgcatggattaaaagtataggtt

SEQ ID NO: 248298 - DNA, 433 bp, Gossypium hirsutum
aaaaaaaaaaaaaaaaaaaaaaataaaaatttaaaaaaaaaaaaaaaaaaaagggggcccggtttttattaaacaaaatttcatacacatacatactaaaaaaatattttttttatattgtaacctaaatttaattaactcgccgtggttttaaaaaaccttgagtgtgaaaaaactgtggttacccaaattaatctccttttacaacatattcttttttccaaatgtcgtaaaaaaaaaaaaatccccaccaattgccctttttaaaaatttagcacactttatattgaataggaccctctctctttaggggcattataagcgcggggtgtggtgtttatacacaaaagaaaccctttactttccagagccctaatgcccccgcttttttctttttttcctttttttttttccacaatacaactgtttttcc

SEQ ID NO: 248299 - DNA, 287 bp, Gossypium hirsutum
gattgggtctcgctcgattatcaggatcttgatctgtgaagtacttgttatgatcattgggacacgtacctagttggatattacatgttggttaacagttcactgttcaattttttattctcctggatatttatctaagtattgcttgtttcacaataaagcaaaacacggaggcgtcttacaccgccatgaccacaagcctaaagcacccgtcgcccccaaaaaagctcccaaattttaccccgctggaaatgtaaagaagcctgtacttaataagcgcaagccta

SEQ ID NO: 248300 - DNA, 209 bp, Gossypium hirsutum
ggagatagagcttggaacaataattattgtatatttagtagtcagttgatggtttgggtgtaggggcaagggtcaattttgttctttggggaagtctaaagtgaagagaagaaaaaaaaaatacagtcaagtggtctaaactctaaaagcttgatcctttgaatagatgtatgtatatataatgaaatacatattattcttttcttgtg

SEQ ID NO: 248301 - DNA, 368 bp, Gossypium hirsutum
aaaaaaaaaaaaaaaaaaaaaaaaaaaaattttaaattataaaaaaaaaaaaaaaaaaaaaggggacgggtgaatttaaattataacccacccaaaaaaacaaaaacgctcttcctttttttttcaccccagttttctttcccttgcttcccatttttcattttttttttatttgcccttaatttcattttactgctcattcttttacaaccccccccctgggaaaccccctgctttacccactttaatccccttgcagcacttccccttttcctccccttgatcattattgaaaaatctcccccctctcatctttcccttcttttcccccctttttttggcaatatataccaccctttttttttctc

SEQ ID NO: 248302 - DNA, 247 bp, Gossypium hirsutum
  unsure (1)..(247): unsure at all n locations
gnngcagaggaaggngaaagancgaaaccaagggagaagggcgccncnccncaccgcncaaccnncngcgcnccnccganccaaaacncncaaaggcaaggcnnncnncncncaanccccgaagcccaccgcncncnccgnccccnnnncaaggaaaccccacaaaccccncagnngcncgncnnncaaaacccnggccagcgcacgaaccgaccctacgcccgaanccgannccgacccagaaacc

SEQ ID NO: 248303 - DNA, 398 bp, Gossypium hirsutum
  unsure (1)..(398): unsure at all n locations
cggaaaannggaaggacccacgcgtccgagaagtataaaaaagtttattctaatgcttttaactttaagaagaaagatgacttaaacgggattctgtgactatcaacaaccaccgcgggctaacacactattgcaatcttcacttccatgcttataacaccatgaccaatgactgtataggaatgactctaactatctctatgaagcgtttaacgtttcatatatattgccaagcagagagattatttctttggtttataaacattcttctcaacatcagatgtgacattctgttattagttgacctaactatctctcacatgtaacgcgaaaaacaaactaaactttcgcatacctctgtgaatactaaaaaaaaaaaataaaacggcgttccttat

SEQ ID NO: 248304 - DNA, 419 bp, Gossypium hirsutum
acacagtataatagaatcttactagtgaaataacaccatatgctgtggaagtataatagagattcttgtactagaagccggattgtattttgctcctctactcaaaaaatgagcaaagtagtctttattgttacatcaaaaagcaaattgatcattcttttaaaaattccatccatttatactattataaaccgatccctttacattagcatgaggtttacgtgacatgctacgtggcactacctagttattcagccagccacgttagtatttaatagtacaaatagatgaaacttttaacaaaaatgaccaatttgctttttttatttaaaatataaaaactaatttgctcatttatttagtaaaagagactaaatacaatctgacttctaacaaaaggcctctatgatacttttatt

SEQ ID NO: 248305 - DNA, 369 bp, Gossypium hirsutum
  unsure (1)..(369): unsure at all n locations
gaaannnnggaaggacccacgcgtcccacaattaagaatttgtaaaagttttttctttttaattttttttttttatataggcggcgtagagttaaccttacaatttatctagcctaaattttgcataagatgcaccggaaactattaagaatcttagatcatcagtcatgaatgatataagcaagtaacaaaatgtgaggtacttctttattacctgctcatactgcctttattgcaaaggagtcagaaaccgacagcgaacaatcaaacattaatcgtttttatttatatgacacgtctcggatttcaatggcccgccagctgcaatgcaaaaaattcttttgtgaatttcattcattaatacatcca

SEQ ID NO: 248306 - DNA, 311 bp, Gossypium hirsutum
  unsure (1)..(311): unsure at all n locations
caatgtaagaatcttgctaaaaggatgtttgcgtttttcgattttaattttttaatagggggtggagggttaacattacaatttatcttgtttagattttgcataagatgcaatggaaactattaagattttttttttttttctttttaatgatanaagcaagttacaaaacgggatgcacccctatatcacctgctcatactgcctttattgcagaggagtcagaaaccgacagtgaagaatcagacattagtggtttcgagggagatgacacaaattggatttcatggttttgcggattgcgaagcaat

SEQ ID NO: 248307 - DNA, 266 bp, Gossypium hirsutum
  unsure (1)..(266): unsure at all n locations
cagggaccggaccggaaggcccgggccaacccacgcgcccgaccaaactcaggggggaggaccaacaanggcggcaaacatggatatggacggnaaactaccccccattatggtgggatctcaaacagggataatactcctataggctatggaggcggaagtggaagaaatgattctaatttaagctctagtactcgggatatctggggaaatggaagccttagcaatgccaaatgccaccagccctggaggattcttggggactg

SEQ ID NO: 248308 - DNA, 418 bp, Gossypium hirsutum
  unsure (1)..(418): unsure at all n locations
cttggtagtgtcagctttgaaacttcctgacaaaaattcgaactttgcccaagtttccgaattttggctatctgcatccgctttcattcaaagccttcaacctgaaccccaacactgctttgagttactgaatcttctgtttggaatattcttatggggggaaaagacaaatactagtgaacctgattggggcccttttgacacgtgaattgttatgagataatttgtgaatgaatagctgagatcgagagatgatctatgaaatgattggtttgaagttcacagcaaaaatccaatctaatgcccaagttttagtttgattttcgacggtgttagaatatgcatgtaagtggcattattatacgttacttaagacatgagtgttgaatatatatcttaaatggaaatntggaataca

SEQ ID NO: 248309 - DNA, 187 bp, Gossypium hirsutum
gtttgacatagagagtgtatcggtttatagagcttgtatcaggcatatacatactgatgatgaagtgctgagcaaaatatatatttgttttagttctctagtttcacaaaaatacgaagggctgaaaacatggaattacacacaaaatggaccaacatttgatccaaatgatataactggtaaatgg

SEQ ID NO: 248310 - DNA, 252 bp, Gossypium hirsutum
aaaaaaatctgttgtctacttcatcctctctatagagtgagtaggcatttggggtaagcactttcgcctattttctcctttctttgatgcttcttttaatatgttccattagcctttgttggggatcgaatttctacttctaatctcttgttctgtcgtatgatttcaatttttttatgacaatgaattttgaagaatgtagggtagggaatgttcaagcactgcattttataacatatatatatgtataat

SEQ ID NO: 248311 - DNA, 347 bp, Gossypium hirsutum
ggcgtacggtgcgggacgcatgcttacaggtgaggtgaaaaagcgactgatagaagttgtgactgaaatagtagaaagacatggaagggctcgagcagcagtatctgatgagatggtggatgcatttatggctgtgagaccacttcccaatatgtttgattgaattaataccaggtaatgaaaagaacttggtgagatgttttccaaattatcgaggaagaacacaacatttggttatattttatttgcattcccttgctagaattctctaaattatgagtttagctatagggaaaatgtattttgtggtgcaatttctcaactctagaaatatagtgaagtgagtg

SEQ ID NO: 248312 - DNA, 358 bp, Gossypium hirsutum
ggggaaggggcgagttgcatatctgaagattaaaaggttttgaaaattacctctaattatggcattgatatttccatggccgctcataaagagcatgctccacggatttatgctaatgttcacagaaagatttcaccagagatgaatgatgaatttttctgtcattttcgacctgaggaagtttaggctgtagttaaatctatggaacctcttaaagcattaggtattgatagtttccctgctctcttttataaaaaaaatattagcatgttgtaaggaatgatgttatgagatactgtttggtggtttttcgtggggaggttgttgttgaggagataaataagactcatattatctt

SEQ ID NO: 248313 - DNA, 392 bp, Gossypium hirsutum
  unsure (1)..(392): unsure at all n locations
cgaacaaaaataccttaaatntctttcttttancattttttttattccaanaccnacaccaacactgtgcggtcttatcttaaaaagggcccgaccatccacaaaaacctttacatcttcatcaaaaatcccccctccatacttcttcaaatttccacctccaacacctcaaatcatattcattcaaactttcactttattttaatcaatatcttcactcccaanaatctcaaatatatttttccttctttccacaattattaattttcccatttcaatcatacttactaccatttaatttacatttctaaacattaattttttattttcttactaatttttcaacactaaaaattttcttaaccttccaactttttataaccttttttaaa

SEQ ID NO: 248314 - DNA, 349 bp, Gossypium hirsutum
taggattgagtttggctaggaattacagaccatgaaatgtgaaactctgaaggaagattcttaaacaaggatttcccttgtattagattctgtagttgaatctgattgtgcttgatcaaattgttatgctatttggtaatagtggtgagcttatctggactgcatcaacagacggacacgcggaatatgtgttagggataaagttgtgttagagtctaggaatatgatttgaagcataagagaaaactacattacttttgcactgttacttggagcgcaccatacatgcatcggcgagtagggatggaattgcaggctcacatggagaaatgaagcatagaataagcaa

SEQ ID NO: 248315 - DNA, 261 bp, Gossypium hirsutum
tgaagtttgtgtttaatgattgttttcctttttgtaagttcttgataaatgttaaaaatgatgattgagttggggtttaggttttagagataattaccgtttaatgattttgcaccggtatttatactctatgattgagccatggatgctctttctagctttgaatgttttcatgaatgtgtttattgcctatagaatagcaatggattctcaatgttcatcatttccattgtggaatccctagccttaaatttgaattaa

SEQ ID NO: 248316 - DNA, 399 bp, Gossypium hirsutum
atctgcgtccatgcatatcttgtgagaagatcgctcaattagttctcctatggtgggttttcgcataaactttgaagatcgccatacagaagcgaccaaaggtggttgaaacttggtcttgagtcgtcgagaattttttcctttcgggaaaagggattgtgtgtgtcgaacaagatcgatcgactttgagagcgaaatcttctcgagattcttgaaattttggaaatttatagtatcttttaaaaagattttcaagctttgatttctaatcttttaaaactgtgtagaatggtgtagaggatgtgtttatatggtgccaatgagttgaaaggatatcctaatttgtggaacttctaatacaattgacttttttaaataaaaaagggatttatttttatt

SEQ ID NO: 248317 - DNA, 231 bp, Gossypium hirsutum
  unsure (1)..(231): unsure at all n locations
gacccgcgcgtccgacctttctacanactaatttcatataaacttttttttatgaattctctacatccccactggctcgtttataaataaaaaccggccgcctacccatccaaaactatcaaacacaacatcttccacaacttccatttctctctttctnaatacttatttttaacacaatctctcaaaatcttaaataattctatattaaaaaaaatcaaaaaataaatt

SEQ ID NO: 248318 - DNA, 207 bp, Gossypium hirsutum
  unsure (1)..(207): unsure at all n locations
cccacgcgtccgatcaaagttcaatatctatagaagacaaattagagtgacacttaaaattgtctcatccgtacataattgacatattcttttaccattaaacacttctttgagattttagttnaaaaaaaaaaaaaaaaaaaaaaaaaaaaaaaaaaaaaaaaaaaaaaaaaaaaaaaaaaaaaaaaaaaaaaaaaaannnaaaaa

SEQ ID NO: 248319 - DNA, 379 bp, Gossypium hirsutum
  unsure (1)..(379): unsure at all n locations
cgggccgaccgcacgcgtacgcactgacaaagtttttaatcttatcttttttttgatcgacgctcaaaangaattagggggtgtaaatctataagagagggacgtcatcacacaacagaacatgtatgcacatttgctacctcattcctttgcctcaccttctatgccaggcttgtgatgttcccctacattaccatcaccaccacccatgagacgaatgttaattccttcaatgccaactattaatattccaccaatgggcacctattaagtcataacatgtctgttcaatttaaacattttaactttcagttcaatgccactctatatttctgctatttataacgcttatattccttttcccctttttcttttttat

SEQ ID NO: 248320 - DNA, 243 bp, Gossypium hirsutum
attcttttaactactgccttttctaagtttgaaacgcactttctcctggagtggccttctttcaactcagggcgggactaccaaaatttcttacctatcacatttatccatttgtttatcacatcttttctcactattgctctttcttctcttctgtttaaacataatttaatccattactttatattctttatcacttacttccttatgttcaattttttgttctcttaaccaaaaaattta

SEQ ID NO: 248321 - DNA, 348 bp, Gossypium hirsutum
gtgagctctcaccaatggctttcaaagctctgctgctgttactattggccacttttctggttgtgcaacaacagttgcttgcaatgaagtgggagtgaagactgagattaaatatgctgctcctgttccagtgaaggcacctatccctgctccacccgttaagcctcccaccactccggtgccgccgtacaaggctccaactccagcacccccaactaagggccccactccatataaaccccctaccaaggcccccactccaccatataaaccaccaaccaaggcttcaactccaccatttaagcccccagcaccagcaccaccaaccaaagcttctacttccccata

SEQ ID NO: 248322 - DNA, 317 bp, Gossypium hirsutum
aataaactcaagtacaaaagaagccattgaacttcctgtgtcttcatcaggagttgaatggagtgcagaaattgtgtattcctgtgtggatggtgaacaacatcgtgatagggatgctgagctggaagttggtgaggaccttattagccacaacacgcatgatgagcgcatgaatgaagttgagttgtggcaacaactagagcatgagctttacgataaagccgaagatgatgagggtgatgttgttaaccaaataaggaaagaagaagcggcagccattgcaaaggttggaggtgagggacagtcggatacttcag

SEQ ID NO: 248323 - DNA, 360 bp, Gossypium hirsutum
gaaaacaacaagctacctcatgactttgacagaaggggaaaatgggtgaatgcttctcacttctgtaagctccttgtcgaaccattggacatcgcggattattaccgaactggtatgcaccgcgagcgtgggcactacattgagcacggaagggaaaggaggtatgaagttttcgacaagtggtggagaagtgttccagaggaagaaaacaagaggagcaaatttgccagcttgacacaagattcatgcttctgggccagggtagaagaagcaaaagaatgtctagataatgtgagaagtgagaaggatgcaacgaaacgacagcagttgtggcacaagatcgacaactttgaagcatat

SEQ ID NO: 248324 - DNA, 150 bp, Gossypium hirsutum
ggatgaaaaaagtataggttcagcaatagacaggtttctgtttaagaactatacgttgttgaaaataccttagatgcttttatatgccctttgatggttcaattgtctgaatattttctttcatgtttatatgagcaaattgattccttc

SEQ ID NO: 248325 - DNA, 359 bp, Gossypium hirsutum
ctgaggataaccgtgagccctctgatcattacactaccaaaattggtggacttcctgattggcctcttcctatagaggctttgaagttcaaccctacacttattcactgcacacaatgtggaagtaaactctgtcttgttgctcaggtttatgctccagtttcaagtggaactttgaacatagaagaccgtctacttcttgtttttggttgtgtgacaccaaattgtggtagctctcctctcagaaagtggaaaatgaatcaaaggaatcatcctctgctgctactctggataaagctccttcagcttcatctcctgtttctgtttcaaaaactaactggtgggagaatttgagtgatg

SEQ ID NO: 248326 - DNA, 148 bp, Gossypium hirsutum
ggaaaaaaaacaggaacctgatttatgttccttggctttactatttgcgtgttaagatgtgatcggtcatataattatgtcggctggtatgatggattggttttctttttgctcaatttgtgttaatatagcacttgttttcctattt

SEQ ID NO: 248327 - DNA, 274 bp, Gossypium hirsutum
aggacatatccactcttcctatgatgtgaaacgttacattcagccggtattggaaaacgaatccaaggatagcttatggtgagcaacggaagataattcaagtacgatttacgacttacaaacttgttatatacttttgatttctcaatattcaaagatactttgatgttgctgcctgtgtatttgccttaacaatgcaatatcttgttccatgaaaaacattcttagagattgttcttaactttcaatataatgcttctatatattctttttt

SEQ ID NO: 248328 - DNA, 226 bp, Gossypium hirsutum
  unsure (1)..(226): unsure at all n locations
cgggcggggngcttcattttaaattgctcacctgttttttataatttttaaactatcacatttttcggtacttagctctgtaatgagagcattggggtttccttcacaatgaggtgtttaaaactcaaagtttgtctatggagattcttggttctatggtgattttgcttgtaatacttacgtagctcgtaaacctgattaaattctatatttgtattctcatttt

SEQ ID NO: 248329 - DNA, 383 bp, Gossypium hirsutum
cacaaatccaaattctcaaaaatgaatggctatctttgttacacactcatccctccctatgcactctgtatcttctacaacgaaaacccctctctctccctctcccttctcatactcccaactatggcaactcttcagtctctggctttggcctctcctgtctctcactcttccctcaaccaaccacgctctctctctggaatgccatcttgggttgctcaccggagcgccaattcacaattcaatgggcaatctttacaagtggctcaatcgcgaatatcacctacaagatggaactctaagagatgcagccccatagtaatgatggttaaaccaaaaattcaattcattcaaagaactgatgagcagacaataccagatgt

SEQ ID NO: 248330 - DNA, 286 bp, Gossypium hirsutum
  unsure (1)..(286): unsure at all n locations
ncttcatacatcttatttttttaccttaattataacaaccncanacaaaccaaggggacgcgaacatataaaaatggcgtcgcaccaaacaaaataaatctttttatttaaaaaaaactcaacattaaaaatcctatcatcaatgcctccctctctaaaatatccaatcttacttccccgttcattcaactttatctctcttctataatatcacctaaaattcatttcactctccctttctttacaacttcttaactttaaaaacccttccatttcccaacctaat

SEQ ID NO: 248331 - DNA, 219 bp, Gossypium hirsutum
  unsure (1)..(219): unsure at all n locations
ggggccgaccacgcgtccacatttaaattccgccttttttttatacgtcntactcacaacacaacncangggcnaattgaaaatctatctcggtcttagaaaaacacatacattcctcattctcacaaaaccataccatctttaaacctaatatttcctctaacattaatccctaccaaaaactttttcatcattacattctatacttcttcattaaat

SEQ ID NO: 248332 - DNA, 360 bp, Gossypium hirsutum
atgccggggcggacccacccgtccgcttctttctctccaaacatgggcatctcatggagcaacacaagcaatagcaaccggaggagaaaccaagcttacctgcatggccctccacctcctccacctttctattatccccaagaacccactttccttcctcctccgccacctccaccgccatcccagccttctactagccacccttatcctgcgcatactccacccccaccgcctccaattcccaacaattactactgttccccaccctacaacccctgctgttactcaaaccctgtcatgggtcgttaccctattcaatatcctccatatttcgccaaccaagctagtgcctggcccccg

SEQ ID NO: 248333 - DNA, 432 bp, Gossypium hirsutum
gcactggatatgtctaagcaagtcccccaaggtaacaggtttaatatgcaagattatatacgtgaagattgtggaaagctaaaaaataaaattatggttggagcacatcattctgctcgagattcacttcactgcaagaaagtttggggggccataggagctggacctgatgataattttattaagtcatctggtgcgacatggtcaagtgaaggtagtgtaaatttgggtgaaactgatcatgagcacagcaaggttatcaaatcaagaaactccagcctcgcaacaaatgaggactttcatgtggaaaaacaggatgaatgcttgtcactgaatgctgcatatgacgaaattggaatttatcctaatagaaatcctaccttgaatgggagttctctttctatgattagttggaagtctagttctgataat

SEQ ID NO: 248334 - DNA, 287 bp, Gossypium hirsutum
ttttaatcctttcttctctttctcctgtgaacattgattggagattttaaaaaaaaaatggtgtataactcttcagtcctgcaaatattcttgattcatgtaaattgaaaaagaaaaaaaaccataggttcagaattcagatatggggtttactttaatttagtgtaggggggatccaatgatgatattaatagatgttttgtcagttcaacttcatttgtattttggaagacatagaaaatttcaatctgatgttcctactatatatatatatatttatttttacc

SEQ ID NO: 248335 - DNA, 255 bp, Gossypium hirsutum
gttaatcaaggatttgacataccatcagctattgtaagctttcccaacttccatgcaagagtggttttccttgaaaatgactctttgaacaagtcacccttgttgtcaaagtttcaggaaaagagtcctgtcatgtcttacacagaagtattactggtacctttgacaactcctgattttagcatgccttacaatgttatcacaatcacatgcacagtgtttgcattgtattttggatcattgctcaatgcacta

SEQ ID NO: 248336 - DNA, 340 bp, Gossypium hirsutum
aaaaccggccgacccacgcgtcctctcactcataattattttctcctttttatttaacccatctacaatatctccccaggatgtcttaatataaaaaatcccgcgcacactaatctcaacaatcttatctctctctttatttcttcctttacttcatcttttaaatattactatactttcaatctttatctcaatcactttcaaaccaatttactcccatcccctataatccatttcatattttcttcatatccaccatttatttcatcttaaaattcttaccataatcaactatcactttcataaatcacaatcaattcattacatccatcttcaatca

SEQ ID NO: 248337 - DNA, 338 bp, Gossypium hirsutum
cccacgcgtccgggcaaagaagcagaatggctggcgtgtctaagcagcgatcaggcagtgttgttattttttttttcaaaaaaagaaaaaaaaggaaaagaaaagagtttgacataaagaaatgtgtaaaggatattaaatatgatggaataaaatagagtaggaaaaagacatttggttctggtgctgctgattttctgaagaagttttggttgagagtttggatccttgtagcattctgaaccaaaactcagcaccaccagaacccgagaacctaatccctaaaaaatgcgttttgtccctgtagtatgaaataaagcattttgatccttcatagt

SEQ ID NO: 248338 - DNA, 252 bp, Gossypium hirsutum
gacgaagttcgatttcactcacagctgcaccagagcatttaagtcaaggttggttgtttgtcaaagggaaatctttatacctcccaaaagcaaagtttgtttcgagtgtttttcatgaaatttaatgacatatgaactgggagatggatggtacatgatattatttatgtatggtattgtttattcagtacattttcattcctttaagggactaaaccttaaacataaaagccaaacatgacttaaaagacg

SEQ ID NO: 248339 - DNA, 344 bp, Gossypium hirsutum
gcagaatttggctgcggtgactgcgactctagaagaagtcgtcactcaagtcatcgattgtatcagcggaaagtgcttgcctgaactttgattttgtccctacttatcaccgttttcattctgaaaaatatatggacaataaaaaacttgtaattcttacatccatgagatgcaaacattagagatgagtgtttctcttagagatcaaaacagcaacaaacaatcccatagtttttgagtagtcgagtgtttgaataagacagtcttaacgttacatggtgggcttcattgcacactggcttttggcctatattgaattttgcttacaagcaattttatgcata

SEQ ID NO: 248340 - DNA, 350 bp, Gossypium hirsutum
gcaaagtggattgcacgccttgtctatagtggcaaaaacaccgtctgaagttgaagcaaaatgaagggatgtgtttgtcattgttgtgtgactccaaagccttgcttgttaatcatgataaattaagtgaagattatgtcttgagccttgtggtagacagtttatgagtgaacattgagggactgcaaagtgtcttgtaggtaaagaaagaaaacccattatgttaaatcgcatttagcattcatcttttcactctattgtaaaagttatgttgctcccacttgttactatttctacccttgatttttcctcaccattaaatcagaggttaagacatacttaagctctcg

SEQ ID NO: 248341 - DNA, 294 bp, Gossypium hirsutum
  unsure (1)..(294): unsure at all n locations
cctattcaaataacacttttaatttctagttataaaaccacaccctcaanttaaggccctgcgaatatataagagggccaggggctcaaaaactaaaaaaccttactatttaataataaaacactaaactctttatccctttattcatcccttcatatcaaaatattatttatctaatatttctatcttcttaatatatctcttttaatctctaaataaacataaacccaattattttcaaaatccaacttaaccattcatttcatttcttatctaaatctaaaaaacttatct

SEQ ID NO: 248342 - DNA, 410 bp, Gossypium hirsutum
aagaaattccaagttctggataaatacccttatctatatgaagttagaaaaatatctcgggcaaagggaacctttgaaaagcccaaaaatggagggtgaggtggttagttctcttttaggtattttatgtgatggtgttgactgtttagtctctggggatcatgctgatgaatttaaggattatttctcaaaaatcatgatggagagggagatagcagccacgatgaaagtgtttgatggtgggtgttcggccataattgtgggaagatggggtgaaagaacaaagacagaaactttattgaagaaagtgatataaaagctgtttctgccaacggaaattgtttcaatttcaattaaatggatcatataggccctttaatttatttcttttggtctaaataagtctttta

SEQ ID NO: 248343 - DNA, 413 bp, Gossypium hirsutum
  unsure (1)..(413): unsure at all n locations
tcgcaaaatgtagtagttgaggggcttttttagtatagcctattttttaaacaaaatattatgtggagaactaagggaacaccatgggagtgttcaatgctctgttgttcagactccataataggtagagcacttgtgtcaacacaactcaaaacagatatttgtacgggatctgtgttggatnctctagggagatggcaaaaaaagatggattaaagagaataaaaataacatgagaaggaagattggaaaagcattgaaatgcacacaaaaagaggcaaaaatattaaaaaattttgggttggaaattgcattgaaaagtcaaaaactttaaggctcaaatacatgaatactggttatcttgtttcttacacccatgaacttgtcgntttctattatccattttggtttat

SEQ ID NO: 248344 - DNA, 283 bp, Gossypium hirsutum
aaaccatatatatcctgtagtttatttctggtctgtagaactagccttgggttcatttgttcttgagaacaggatttatttatgggctggtaatcggcttcgaaagttcttaggcttcattgattcactttaagtatacagtttactcgagaatggagtgtttgaaagttaatttagaatttgtgttgattaaaaaaaaaaaaataaaagaatctataataataatcatcatatacaagtcaaaatgataataattaataggtcggctcttttggaggaccct

SEQ ID NO: 248345 - DNA, 224 bp, Gossypium hirsutum
ggataaggtacaagaatctttttaattattttagggaaagaaagaatacaaggatgacagggggctattgagaggaaaatggaacataatataatcgatgttgtctataaagctgaagaattataagagggaatgaaagaaaggaatatagacaaagaggcacaggatattattatcaaattaccaaagccgtattgtcatattgcttaaatacaaattggcaa

SEQ ID NO: 248346 - DNA, 298 bp, Gossypium hirsutum
gaagatggtaccggagaactgaaagtgatgatgatcatgatagggataaaagaagccgaggtgataggaagagatagaatgatgcatgatatatgctttattttcgctagtaaacgcagcaaatcaagtaggcttagcatctgtttttttgataaaacgaccagtcaattaccatattcatatgaatcaactaaaaccttaagcttgattaccaattacgaccttttccaaggtgttgtgttgtatctccatgagttacttttgatttttttttaactacactgagtctttcggtttt

SEQ ID NO: 248347 - DNA, 387 bp, Gossypium hirsutum
gcgtcttcaaaaatttcagagctttctttgttgtatgattggcggagttagtgaaagactatttatgaaaaaaaaaaaaaaaaaaaaaaaaaaaaaaaaaaaaaaaaaaaaaaaaaaaaaaaaaaaaaaaaaaaaaaaaaaaaaaaaaaaaaaaaaaaaaaacaaaaaaaaaaaaaaaaaaggggggggccttttaaaaaaacaaaatttaactacccgtgcattgaaaggaaaaattttttttaaggggccccaaaattaaattccagggccggggttttaaaaacgtggaaatggaaaaaacctggggttaacaaaattaaacggtttgaaaaaaaatccctttttgccaatttgggtaaaaacaaaaaagcccccaccaaatcc

SEQ ID NO: 248348 - DNA, 314 bp, Gossypium hirsutum
  unsure (1)..(314): unsure at all n locations
gcccgagaaaacnggaacggcccacgcgtccgcaaagccaancctctgttttaagacccggtttataaccaacataccaaggtcaaaactatggggggcacggggaacataccaaggagatnaccaatgacttatacaatctttcaacaaatatggtgaagttgatcaaacaacaataatcgccgatcgagatacagccaggtctacaagatacgtatatgacccctacacaactactgacgatgcttcaattgcacttcatgcctaggataaacacactcttcacgtccttcaagtaacagttaactatacaa

SEQ ID NO: 248349 - DNA, 233 bp, Gossypium hirsutum
gtcgccgcggcgacatggccgtgcaggtcgcacgcgaccgctccgaccgtgccgtgcttgcggtccggatcgagcggttcggccggctgcgagtgcgcttgcgatttgccgaacgcgaacgccgccgcatcgtggtcgagcatcgtgccggccgtcgcgcgcgccttgacccactgcgcgtgacgcgtttcggtgtcgaagtagccgggctccgcgagttcgagcccctgcgc

SEQ ID NO: 248350 - DNA, 268 bp, Gossypium hirsutum
gagacttgacacaactcaaaattatgatcctttttagaacaagaccactcagacaatcaggacaaatagctgtgggacctgagaatataaacatgcttgaatgcattacactaatgaacttaattgttcagataaacaaacagaacagcgggaccccgatctgatgaaaccagacaatcagacgcgaccctgctacgctatacggctaatatgacaaaatcaacatccattccaccttccaactctatacatcacgcgaacagggaaa

SEQ ID NO: 248351 - DNA, 385 bp, Gossypium hirsutum
gccggatgagattttccatagggctaaaggggttcagttgtgcaacacccaggcatctcagtgcagtccagccttttttgctgattctttcttcctcaaccagttctcttttgatgttatccaagacaggccttttatacctcctacagcctgggtcatatgcgagagacatatgatctcagtggtgccggtgacacgtgtcaccatgtctcgtcatcgtcaatttttcagcttctacatcgttggattaagccgggaggtgtacttgaaggactactatcctgctaggttttgctggggcttgtgtccttgcctggaatggttgaagacgtattcactaggcagatacgttgtccaccttaaaggagattgcttctcaattatt

SEQ ID NO: 248352 - DNA, 406 bp, Gossypium hirsutum
ggaaaacacccaagattcttaaatttaatcgtctgtattgataaccaaaagaatgaggcatcggggactggaatcaaagccattgtcagcactgtgttgcttggagtcgaacaggggaaaactagttcaacagggcctaatcgacgccctggtaacatatattttaaactcagaaaggagcttggcagcaatggcaatggcgatactagagcaagttttggggatagaaagagcaaaagaagcactgataaagaacccaaacggtgtgaaagcagtggtgaagatggtattcagggtatcagatcacgaaggaagtgaaagtgcggttaactcattgatgatggtgtgtcgggaatcattggaagcaagggaaaaagctatagcagctggagtttaacacagttgc

SEQ ID NO: 248353 - DNA, 365 bp, Gossypium hirsutum
aagaaatgttactttagtgaaattataggcttcaattatttatttaaaaaaaaaaaaaaaaaaaaaaaaaaaaaaaaaaaaaaaaaaaaaaaaaaaaaaaaaaaaaaaaaaaaaaaaaaaaaaaaaaaaagaccaaagcataaaaaaaaaaaaaaaaaaaaaaaaaaaattaaaaaaaaacaaaactaaattggacggtggtaaaaaaaaccacaataccgaaaaaactaaaaatactgaaattaagaaaacttaagcgtgtttcacaataaaaaggttggcacaaatcgccctattcaaaaaaggcgcacacttaataaattttgcaacacacgcttatataaagagacaatcaatccaggtgt

SEQ ID NO: 248354 - DNA, 325 bp, Gossypium hirsutum
ctcaaccattttatttataaaaaaaaacacaatgattaaaggtttacttgtcgctcccatacgtaaggggactaacatgtgattactcgtctgaagagttggtgattcttatcgtttgcgactagatgggcgcattctccagataccaaaccacattcccgatttgaacatgtacgcatgcatacatactatatccgatcatcgtggagctcgtatatgtactagattacatcttccgcatggcttaagttcatgaacataacgactagttttaacgatgtagactttctttagacattgcatatcacatggactgtttccgata

SEQ ID NO: 248355 - DNA, 313 bp, Gossypium hirsutum
  unsure (1)..(313): unsure at all n locations
acaccgnggaacacctgctgactcaccaagatgatgttgcgaggttgatgaaaatggagaggagatcgggaatggatatccatagcaagcggtggtttccttacttggataggtttaagtgtgggagtgagtccctaaacagcagggaggttatagaggcagtcgcacctgtcttgatggaggaaaggaaagaaaggttgaagagggtggttagaaataggagctattcagtttgcttggtggtggaagggctgtgcgatttcggcaatgtttcagccacgttcaggtctgctgatgctcttggcttgcagtc

SEQ ID NO: 248356 - DNA, 245 bp, Gossypium hirsutum
ggaaaacccgaatatggttatatctgcataaacaggttggatgttatggaattcctggagggttttctattatataggtctgtatggtggagaattaccatgtttaggctggttgcttcttactgtcttttctgatgacctaatgtatgtcattggtactctctgcattcttagatatataattaaaatgctaaaagtttgtgttgaagtttgatcgatttctgtaattccatgtctctgtgttc

SEQ ID NO: 248357 - DNA, 215 bp, Gossypium hirsutum
actacatctaaatctatgacggcctacctattttttttcgatgtacaaaaaaacgtgtgcttttctatcccacttcatcgtaacaacttcctacatcaccccctcaaataccaccctacccattgtccttcaaaacatctccataaaatagtctacatgacctccattatatcttcttctctttcatctgctttccaacttatcacctagattct

SEQ ID NO: 248358 - DNA, 178 bp, Gossypium hirsutum
gccacctattcgttaacataaagacgctactgaccctaaaggacttttggagtctgcggcgtttcataacattacgtaaatagatcgtgttactgatactgacaaagacaatatccacttcgaaggtacccatgaacattaacacgaggcctgatgaaagcatataaggtgccgacga

SEQ ID NO: 248359 - DNA, 341 bp, Gossypium hirsutum
gtgaaaagagaaagcttatagttgaaatactagtcagaatgtgttgattttttatgtataagagtagaaaaactcgttagtgttcatagacattggacatttatttgatatcttttcataagcttcgatacgaagtaagttttcctaaaaaaaaaaagaatctgaccaaaatacaacacaaaaataataagagaatggaaaaataaatgcaaaaccctattgagtacgaaaagaaaagagaaaaaggttaataacaaaaggggggggcccttttaaagaccccaggtttacctaccggccatctcgaagtattagctcttattagggacacctaagtccat

SEQ ID NO: 248360 - DNA, 379 bp, Gossypium hirsutum
  unsure (1)..(379): unsure at all n locations
gtaaaatatacttatattttgacctttttttatctaaattcggatccgatcctgtacatgggcatttgtttaatggtgaggaggcctctaataancaaatggtcttacttctcgttgacatgagtaaacaaacttgtaatataactgatgcaactcatatcccttgtaatgccatcttagtggctaataaagagcttgtttctcaaaataagttatttgttaccaatgcacagttctgctataattatcgaattcatgatctgataattgaatgtgactcgttcttatttgaactatccttgccttataattcatgtcgatggaaattcttttatacaactgaatctgttgcttattaagtccaaatttaaccttacca

SEQ ID NO: 248361 - DNA, 210 bp, Gossypium hirsutum
  unsure (1)..(210): unsure at all n locations
gtttattgctattctataggcaataaacacattcatnagggggggcaaatctagaaagaggatccatnnccaaagatttgaaggaaccttgaaggaaattttgggaacttgtgtgtgcctcggtgttcggttgatgggaaagaccctaaagacctgcaggaggaaatctctgaaagggaaatcgatgttcccttggaatgaaaaacaaag

SEQ ID NO: 248362 - DNA, 286 bp, Gossypium hirsutum
  unsure (1)..(286): unsure at all n locations
ctaaaacaatattgtacttcagcagtagactaactttngggagtcaccatagaggttggaggtctaattacaanatcaaaaaaatatcgaattaaattttattgagtctactttctcatagaagaaatggtgtaagcaatggatttgtaaatttcgagatataatgaattttgtgagacaaggtcagaatgatttctggttcccctgttctgactttgaaaaatcataaaaaattgaagaaaaataattatgggattaaatttatatttataaaatcctgaatgag

SEQ ID NO: 248363 - DNA, 322 bp, Gossypium hirsutum
  unsure (1)..(322): unsure at all n locations
aatatccaaactttcttacccgttttttctacaacataactcctctcttntaccgaagaatttctattaatctaaaagagagctttacaacantctaacttttaaaaccctttcatcacccaacttaattccctttcaacacatccccctttctccaactttcttaatatcaaagaaacccccaccaatcacccttcccaacaattacacaaccttaataaccaataatacacccccttttatctctcattaaactcatctaatagttataattacacacatcttaaccactacactttccacctccctaacaccccctcct

SEQ ID NO: 248364 - DNA, 256 bp, Gossypium hirsutum
gctaaacaggcccctagctggccctctctttcttgcaacttgctgcccttcctaagccggcgcatggattttatgcccgggccgtctctaaacaacatcccgactcactcctccggggcctcaccccaccatcttgaactacatccgattccccttatacctcctggcctgcctgctaatataccaagaccgatcatgcttcataacacgatgcgcattgctatccgctgaacagtactcccagtttcatccatct

SEQ ID NO: 248365 - DNA, 181 bp, Gossypium hirsutum
  unsure (1)..(181): unsure at all n locations
tgcctattcttatcttattatcttccatttctatnataaaggtgaggaatccaaggtaggtgtcttcttcccttgatcctnctattccatacaaataacattttttctcatttgcccacatttttgcatattttaatgacactttcattcatatcacttttttatctggaagataaacttt

SEQ ID NO: 248366 - DNA, 371 bp, Gossypium hirsutum
  unsure (1)..(371): unsure at all n locations
aaagcagactgtcatgaagctaaccttgagttttttgagtccatggatggtaatgaacaagagtctntctttcaccatgaagagagagtcttnctcatcacttcacaccattaaatggaatattcttacaatcaacaacctattactatcagaagaacagatacattttattttcctgattattataatgtacacagcatggaactgatggaactgttaaccatgagaaatgtgtctactcttcttcatacaggtttccatgagagccttgaccatatgtttcattcatacgtggaaatacaaaatcatgctcctgtttactagaagtttaaaagaacatctacttctactgcatctcttgaacaaaacct

SEQ ID NO: 248367 - DNA, 392 bp, Gossypium hirsutum
aaaagaaacttaccaggattcccctagtaacgacgacgctccggcgacaccaggtaagcccgctttctctccctgctcgttgattttggctgtttggttaaaaaagaagcagatgaaatgaacagggtacatgaaataaaaacagtataagaacagagaaagaaaacaatatcccaccttcaaaaatgtttcttttcgcctattatctttttgatttcggtataaaaattctgctaaccccatttactaaaatccaattggctgtaatagccgagataagggaatcaaaactcccaaatactactgtcttttttcctttgttcccttgtatttactgctattatctgtgttcgtggtcacgatctgttgcatgtgtgggcgttggagatcgt

SEQ ID NO: 248368 - DNA, 204 bp, Gossypium hirsutum
  unsure (1)..(204): unsure at all n locations
gcaggnnaccggnnccggaagtgtcgcgggtgcagacccatcgccgtccgagccttctctagttgttctcncatttcctgtttgattttagcctctggtagggttcctcgagatggtacggctgcgtccncnncttcctcatcnnnttcgtttcttcggtagagtgtagtgtgttttccataaaacccgaagaagcggtaattt

SEQ ID NO: 248369 - DNA, 288 bp, Gossypium hirsutum
ctctcttgataaacttattacccaatattcatcacatcgtgggggtctatggggggaagtggctaaaacttcattaaacatcatctcccatggttaggtttgatctaaaccacgtttcatcaatattattcatcgcaatgggtacaagaaagctacactgctgctcagaagccaggtcaaaacttcttcaagcatgttttctgccaatgctattggatttacattttctgctaagatgcatataagtactcgacatgaatgcatctgacgaagcaacagatcaatccc

SEQ ID NO: 248370 - DNA, 182 bp, Gossypium hirsutum
gttggtgttgctttgcatgtcagctgtgggagatcatctctatctggtgctctgtattgtgtgggtgagatgttgatgtagatacagtactttgcaggattaggatttccatgctgctaaaccaaattgttccatgttaaccattatgttaaggacataataaaaccataatgatttaattt

SEQ ID NO: 248371 - DNA, 109 bp, Gossypium hirsutum
gtgggatacccttgcttaagaagcggcttttaaagcatacagactctgacgaaatataggaggcttttcccaatgatggagggattaaactatttctaaaaagtgcaac

SEQ ID NO: 248372 - DNA, 208 bp, Gossypium hirsutum
ctttaaaccaatgtttacttttacgatctatcttaatctggtggctttaagggagcggacgtgccttgaactctacatttaatcattacaaaatcttctacaacacaatttcttagtaatcatatcaatttctaattacaatttcaaacatgttcattacacaccgcgaccactatttgactctatcctaataactctctaaatatta

SEQ ID NO: 248373 - DNA, 286 bp, Gossypium hirsutum
aaaagatgaagtttttattcaaaaagtatctcaattacagaaagtcctgaggtgatggggcaagaattgaatctgtcaaacagaaggcaatggattacgtagaaagtactctaacttgaagttattgagatttgagactcatctgatcagttgatctggaatatgcgagtacattggcgtagtcgtcgagataacattatttttgcattaaaatagctctagtatagaggaagaaattatatccatagtttcttctaattttttatttgaagagtctcttttaaaa

SEQ ID NO: 248374 - DNA, 286 bp, Gossypium hirsutum
ctcccttcatctcatctaaaccctttttataccacacaaccatcctcatttctaaaagacctctttaaacaggacgagaacctcctatccccacctaaccattactatccgaaagatcaactttatcaccattcaatacccctcctccatcacctaacaagtttccaccttccaatacctataaacacaatcattccaacaatcactttcatttcaaccacatcctcactaacaataatttaatcaatactgttcactcctaccataactttattatttcctcata

SEQ ID NO: 248375 - DNA, 422 bp, Gossypium hirsutum
gtggactccagtcgtaactgccggctacttgtacatcccgcatcgtaacctccatggctgcgatttctgtgcaataagctttgacaaagctcactacttcattgacttgttcgcgggccccttcatggtaaattttgttccgattataccaaatagcccaataggcaataactctaattttacattcttcattgttcagactattgaactccatatctaaccactttttccaatttggttcactattgtgtgatgatactgtcccccccaaccccttcaagacctgctgtgaaaagagacaatctttgaataggtggctaacagtttcctcctctgcttgacaaaccggacataaagttttgctgccaactttcgaagttttagattatataaagtagggatgtagttattagctattttcc

SEQ ID NO: 248376 - DNA, 342 bp, Gossypium hirsutum
cccgctccaccaactggagctcctggacctagcctcgatgcttcctctcccggtccatctgtcgctgccgatgagagtggagcagcggcaatgaagaacatgaagaagataattggagggttggcgttgggatgggcagccattgctttgagcttctagattggttttgatcacattccacattctgcgttctaattctttggttggtgtactgagaggcggaaactctagtttttttttcctatgtaatttccaccattcttttttttttccccttcatttacccattttctgtcttttatttctctattatattttaataaaatcacaatttattttact

SEQ ID NO: 248377 - DNA, 223 bp, Gossypium hirsutum
atctaattaaactttttttgactttctattaaatttatggtggtcaatggatgcagggagggcattgatattattccttcaagaatgacgttatctatcatattaaataactgtgatcaaagctgccaaaactataaattcttccaatttgcaatcaaaattcgtacttaatcctgttctctttactaattctatattttactaaacatccacctataaacat

SEQ ID NO: 248378 - DNA, 287 bp, Gossypium hirsutum
acacatatgtcatcactcttttaagaaccaaactttctatttattgaaagtacactgttcataagccattctttatacggcataagatccctaaattctctcttaaatttgatcacgtcttcatatctattgatctttcttatactcaaaacttgaaacttaaactacatccccaattaaaatccttcttctttaccaaaactgtcacgtacaaaatcccctataaaaatgattttgatctacatgacataatttacatttttcgtaccaacactattgcttaaaat

SEQ ID NO: 248379 - DNA, 360 bp, Gossypium hirsutum
  unsure (1)..(360): unsure at all n locations
tcctaaaaatcatcaaatcccatttctcttccttactttttttctttccttttcaacaattgcatcaaagactttttatcccaaattataaagatttcctcttctctccatcaatcaattcatactanttactctaaatcgttaattttaagtttaaaaaaaatagaccctcttattttatgttaatcaagttacaaataactattttctcatcttacttactatacctccatacattatcctcaccctatatcctaccctccacaaagatatcctcctcaattatatcccccaacaaaatacccaccatcttaatatcctccaccatcaatatatcctcctcatatcatatacccacct

SEQ ID NO: 248380 - DNA, 417 bp, Gossypium hirsutum
gaaaaggatgagatttctgcaattaaagctggtctaagaaaagtgaaaatttttagagagagtgtttctaccaggggagcgaaaaaagcctgtcgtgaggatgaaggcagtgaaggaaggtgttctgccaggagtgatgatggcgagtatccattggacacagattcacttgacgattccgaggaaggagaatcggatgaggtaaaagatgactctgttgtcaggaagtcatttagttatggtactcttgcggatgcaaattatgctggaggatcagtttactctagcatgagggtcagtgagggagatgaggattgggtgtactacagtaatcgtaagtcggatgttggctgctcaaatgtcgaggattctgctaaactggtgtcagagccatccctactgcagagttccaagcgc

SEQ ID NO: 248381 - DNA, 365 bp, Gossypium hirsutum
  unsure (1)..(365): unsure at all n locations
gccattgatttcaccaactatacagtcactacctgctcggtaaaaggcgagcagaagatatcctttctcctcagtttgcattcaatagtagtctcaacttgcctccaggaaataaagcttgtaaacttgatccagttctacaagcaaaacatactgtcaaaagcagctcagtcttcacacctgttatcactagtatcattgcaccacaaaagaatattttcgatgatgatgatgatgacatgcctgaatggtgtccaccgaatgtaaagcacacatttcttgaatcagcaatggtagcaagaacttctattcatcctactntatcaaactcaaagttagtatgttcatttcaggtcagccaagtc

SEQ ID NO: 248382 - DNA, 252 bp, Gossypium hirsutum
ggtttctcttttctcaccaaatggaaagggtgtccttagaaattgggtggtccataaaggcgttgcctttatttgtttgtttggtctcaaagccttaatcctgcagctttgtctctattatggccttcatttacatcttacttattggctaatttgtgggttttagtaaccaattgtcccaataacttttttatttttaatattcattcatacaatcattttaataaaagccttaaaagataatatttcgtg

SEQ ID NO: 248383 - DNA, 172 bp, Gossypium hirsutum
tctaaatgcagcattgtgtgaatcttctcgcttctacacactttcacactttgagggttacgaatgcaccacatgctgtaaagataccagatgccatgaatcccctatatgagacgaagactaattctcatatatcaccactcgtgagaagctctctcgccatccccaaggt

SEQ ID NO: 248384 - DNA, 253 bp, Gossypium hirsutum
ggggctcgcctgatagctcttctatagaccgctctgttgtcacccttcgttcctacaatggcgacgtgtgtcagaatctaaaggcaacatatctcacgcttgggcttcctggatcacagcctgctgaaagaaatactagagctatgcttgttaagctctgctcaactagatgagaaacccactttccctttgcatacttcaagtgactgacactgcttttcatctcaaaagactgtgggttcaagccacaaaa

SEQ ID NO: 248385 - DNA, 429 bp, Gossypium hirsutum
gtttgtgagtgctggagttgagtcacaagccgatggtgggttgaaaacaacagcaaatcttgaagacattgatttgccagatgaaagtgattcggatgaagaaaaagttgaaattgcacaaaaggatgtcccgtctgctgtgtttggaggtattcggaagagggaagatggcgatgacattcaggatggagatgatgcctcggctgccaaagaaaaaggcggtaagagcctactgggtgcacttgagcgaattaaaaggcagaaacaagcttagaaatattacacatccaactcgtactactgagatatatctttgacaattctatgaactaactgtgtaatgtgtacactataagcgaaatttgagtgccgtctattggatcattttgtatatttggatcaaaatcatatccatttcaagttttggaa

SEQ ID NO: 248386 - DNA, 214 bp, Gossypium hirsutum
gatatatatgatccatccttacacacccttttatacctcatggctgctgttttattttgctgccttagggtaattgattcacagggtgtgctcatctttaagacttttaaaaccatgacattcctcaacttattctcctccatttacatacccttgtttgcatctgtctatatatctaataggcccgcatctatcggccttaccaaattttgac

SEQ ID NO: 248387 - DNA, 391 bp, Gossypium hirsutum
cggcggtggagcagtgaaagtggtgtttccaaatgggaacattcagatgtatacgaaatcagtcaaagcggcggatctaatggtggagaatccgggtcagttcgtgtgcgattccggcggtttaaaagtgggttttcgggttcattggttgacggcagatgaagagttggaacggcggcgactttatttccttcttcccatggaattgctttactcggtgctgacggaagaggaaatgagttgcctcagttgtaaggcagataaggcgttgaaacatgcgagctttaatattgggaagattttacctgtttttaatgagttttgcattttcccatttgaagctaagtccccgccgcaaaacgccgtgaacgacggtgcgaaagattccgtc

SEQ ID NO: 248388 - DNA, 327 bp, Gossypium hirsutum
gcaaccatggtactcctgggagatccaaattgaggccaaataaatgctatgaaaggcctgataaacctgctgctggggcaaaattctttaactggcattataatatcccttcattcgctgatggctacactcacatttttaatcaggttgcgagaagagcggaacaatggatgcaaggtaccatgcattcctggtcagcattctccatacaacactggccgcattcggaaacccactaacaacagtgcataagtctgttgcttcccattttggacgaaataagatctgtaaatcctcaaattccttaatcagtttccatggatcact

SEQ ID NO: 248389 - DNA, 285 bp, Gossypium hirsutum
gacagtccctccttttttttttctcccacctttctaaggatggaatttgttgctacacattggcattgggcattcctttataaagttttattaaaaaaaaaacagcaataggtatttctttaaatcgggttctgctatttgaaacttgatttttttttttttatggatgaaagtatttgaagttatacactgctattattaaattaaagacatgaatcaacaatcaaaaaactatagaatacacctcgtaacagaaatgtaccataaagattttaagctcatggg

SEQ ID NO: 248390 - DNA, 137 bp, Gossypium hirsutum
ctgagctcaattttggtgctagagacatcaattatgatgcagatcttgaaattacaggatccgctgactacataactgatgcatgggctaaaaagtgctcctatgacgggcagctgattggactacttaaacagtac

SEQ ID NO: 248391 - DNA, 171 bp, Gossypium hirsutum
gcagccatggctctcctgatagactcatatcgaggcccaataaaggctatgactgtcctggtaaagctgctgctggtgcaagattcggctactgtgctcagaataaccacttctccggtgctgctacactactattttatatccatgacgataaaagccgaacaatatacg

SEQ ID NO: 248392 - DNA, 277 bp, Gossypium hirsutum
agactggttccatcctctagccgcattagattcgaatcaaatcatgacaaatatttatcaattgcttgatccatgtttagcctccggcaaagtccgggactatactcatcaactccaagccatggctcgagccactttcttgtgcctaagtcatgatccagaatcacgacacccgatgtcaaagatacttagaattcttgaaggaggagataccaacgttcctttgagtttagacctgaactcgatcggcaatcgaagcggccatttacgtgggatt

SEQ ID NO: 248393 - DNA, 304 bp, Gossypium hirsutum
gcaacctcaagtgaatgagagtttttgcagttgcagggaaaggaaaatcgaaggagcaagcaaagcagctgaaaggctaaaccgatttaccgaaacttactttccagtgacaagtttttgaagccactatggagtatacaaatctccattctcaatctaaggttgaagaacagtatgttaagtatacttctctattaactcaaactggccatcgagtatccaccgtggatgaatggaagcccgacctgttaccgaatattggtagcagataccataagaatccggttcataccttcctgaaatc

SEQ ID NO: 248394 - DNA, 261 bp, Gossypium hirsutum
aaaaaaaaaaaaaaaaaaaaaaaaaaaaaaattaaaaattaaaaaaaaaaaaaaaaaaaaaaaagggaaagggtcctcttgactgggcgctcttatctaccctttcttgcctcatcttgatttcttctatattgtatccttttttccaattcactactccgtttttttctggcattactttttgaaatacccatttcgttaccctcccttttttcctacctttacatccttttttaactacctcctttgccaactttagat

SEQ ID NO: 248395 - DNA, 251 bp, Gossypium hirsutum
gaggatcgttgcccatactatcttcctacttaagctggcaacctagcacactgagaccaggtgctggatgctttgactgcttttgataaggcatattcatcagagaatgctgattatataacaagtcagaatttctgtatatgaagctagtttctctttgctccatgtgtaatattttcatgcttgggagcacttaaataatagccagattcagtttcattcttacgcaaaaaaataacttttttataagg

SEQ ID NO: 248396 - DNA, 401 bp, Gossypium hirsutum
  unsure (1)..(401): unsure at all n locations
aaaccctgcattttcaaccaaaaaattcaattaaaaaattctaaataagtaatattgtttggggcaggtggctcatctgacgggccagtgaanaacctaatctacggtctaaccggttggataggcggtctgttagtcaaactctgacaaaacattgaataagatctactagtactattgcacacattatgagaaatctatcccagttgatttcgacataaaaaactacacttcggccctattgctttgaattattcaagcatgttgtgttgcggaaaaattggaacttgatgatgatgattgtagagccatcaactgatactgaactgagcaacagaattccatgaantttgataaacgtattgctccccttgaataaaaatgctacagggtgtatcttt

SEQ ID NO: 248397 - DNA, 379 bp, Gossypium hirsutum
ggataaggtagaagaagctgaagaattagaagagggaaagaaagaaaagaagaaagacaaagaggcgaaggagaagaagaaagaaaagaagaagaaggatgaggtagaagaagctgaagaattagaagagggaaagaaagaaaagaagaaagacaaagaggcaaaggagaagaagaacaaattaccaaaaccggaaggtcaaattgaagaaagacaaagaggcaaaggagaagaagaaagaaaagaagaagaaggatgaggtagatgaagatgaagaattagaagagggaaagaaagaaaagaagaaagacaaagaggcaaaggagaggaagaaagaaaagaagaagaaggataaggtagaagaagctgaagaattaga

SEQ ID NO: 248398 - DNA, 210 bp, Gossypium hirsutum
  unsure (1)..(210): unsure at all n locations
gngggcaaaaccaggaataaacaccagactttaacattgtctccaccgctagtcacacgggcgagtgtcttgacccagtgggtgaggtgaacaacaagatctttcgcattattcatgtgattatgaccaccaccaaatgtattactagaacacaaaagactatacaaaatcctttcaacaaggaatagatacagtctgataattattaca

SEQ ID NO: 248399 - DNA, 302 bp, Gossypium hirsutum
ctctgtctaagctacaatttacatgaccatatctctgctgcatagatctgactattgagcacccagatttttcagcactaacaagaccattgtgagacctgaattgactgattgctcctcttgtaggtgaaacgcatagcaaactcaagttcaacatgcggaatgatgtgttgaactgtagaggatcagaatgtatatggaagagagcttgatactagttatggaggaagagagcttagacggacgtaataaatggaaagcttatggatgctatggtgccaaatattggggaagaactggtg

SEQ ID NO: 248400 - DNA, 296 bp, Gossypium hirsutum
caatgacaatgttcacgattaatataaatttgttcttagcagctcttctcaatacactggggtacgtttaaggggaaagggcagcaggcttcatttttaaacacataaataatataaacatagctcatgaattgctcaaccttaacgatattaactttaactacaaaaaactgttgattcaactcaaacattacaacaaagctgactctcagttttatgaagcatacatccctactaattatgatagattgaagcatcatgaactacattataacacttaattaaccaacttatta

SEQ ID NO: 248401 - DNA, 388 bp, Gossypium hirsutum
gaaaaaaaataatgctaatacaatgtaggcttataacattaaatctgaatctaaatgcaactggtctcatattagggttgccgagaacataaccattttacattgttatactcatcaagacatcattgcaacatgtagattattattattgtggagtaaatctctgcaaatctgattatcaaaatgaaactggatctcctcctaccaaaacacatatcgatggtttgccacctgatccgctcttatccatagaacaatattcagacaaataaaattgattctgttgatgctgggattctatataaatatgccataaatggaacaccatatctatgacataatcgacttaatgcttactcttgataccctgaattattacatgctattg

SEQ ID NO: 248402 - DNA, 347 bp, Gossypium hirsutum
ctctgttatccttcatgctcattacaaattttcccttacccaacaatcaaacatcaatgacaaaattaaaaacaacatggggtcctgttctcatatcaaatttattcaatactttgtaccacaactcataaatttaactttttcattattttacttttaattattatagattatatatatataactcacattacttctctacctctactgccttcatatcttagttcactaaatgaacacattttctactgaaacaattaatataacaatattatactattcatataatttctttacatgtgcaacccttaatatacaactagacttgcttctttacataacttaaa

SEQ ID NO: 248403 - DNA, 389 bp, Gossypium hirsutum
  unsure (1)..(389): unsure at all n locations
ggatcatttatattctccattatgacctgattgaaagttcatgatggagaatataaaaagagagtgagaaaggttttattcctttgcctgattagagacatggagaagtggagttttatgctagttattgcattagttgttgttcacgctagtgcaagaaatgtgcccacaactacaactgtgcccactagcactactcgcagtagtgtaccaagtggtgctactggtgttggcgaccaaaagaacttcctctaatggcttgccatttggtgggagtgggggtctgggtgggattactcccctcggtggtgcaagtggacttggaggtggagtcnggggccattggtggagtaggtggacttggaggangtaatgggactcgtgggctc

SEQ ID NO: 248404 - DNA, 312 bp, Gossypium hirsutum
caatcggatcaagagtggaacgtactaatcaatccactctgtaattgactagcagtgctgtttctggacgatttgatggatctggaatgaaagctaaacagcatgtactgcatgtcgagtatttagaatgaccggaccctatcacaagctagggcaattatgaccatataatcgttcaggatgaggcaagatgtatcttgtttcgtcagtgtatggaggtggaaatgaatgacaagtgctgaatttcgaaaaccttctggtatatgatctatattacatgttgacaagacgaaccttatatcattgatcatt

SEQ ID NO: 248405 - DNA, 191 bp, Gossypium hirsutum
gctgtttatctttcatatcgtctaaaacttttcttatcccaccaacacacatttcgggcaaggtaatcgaccgggggctggataatgacgaatcgttacatactatcttatccgtccattcattgaccgctttacactcttctacaacagaattagattgttgcaatcctaccagagactttcagaactcg

SEQ ID NO: 248406 - DNA, 291 bp, Gossypium hirsutum
  unsure (1)..(291): unsure at all n locations
aacacgcatcaaganccaccccctaccacttaccaacccaaacacaaacacaggggcagggcgaaaaagcatgtgggaacggcgacaaaaaccaatcacataacccaaaaacaacaaggtatatccatgccggtctatataacgctcgacccgaaaagataaaagctcagtacaaccaatatcaatggaaaacagaaccatatacatgagtcagaacgaagagcagaccaaactcagatacaaaagcactacacaacatccggccgcaaactagaccaatccactctcgca

SEQ ID NO: 248407 - DNA, 382 bp, Gossypium hirsutum
aacatccactcatggtaccgtcaattctttcccttccttttcttactttcacgttagctgcccttcatgagggcaaaaaggaggtttgagaagaagggccagagtccgtacttatgggatcaagtgttctgcataagtatattatgcaaaaggttctgcagctgtgaatgaaaaaagcgttatagtcactcttttagctggaggcaaaggcataagaatgggttttatatactttatcacgaatgattgaagtgaaagaaattggcgagggctgcgatccatcgtacgacgacatcttcaaagaagccagagacaaaatttatgtagaccttaagttcacgctccctgggaaggagagacaggattctgttcacagtgggct

SEQ ID NO: 248408 - DNA, 147 bp, Gossypium hirsutum
gagactttccataagccataattatcatccactttagagcagtgaggctctgctcatcatggttaatgctatggtccctgaatgtataggctggctgaatgcattaatcaaaggaagattatgcttcatcataaaaaaaaaattaac

SEQ ID NO: 248409 - DNA, 198 bp, Gossypium hirsutum
ctccaccttacgtcaagagaatgcactgaaattttaggtttttaaattttgcacttttgctctttgcgtaataatatatatgtagaattttcctgaatcatttcaaagaaagtaatcgttcttgaattttcgaaatgctctttgctttccttatgtttatgtttctggttgggtttatctgagaaaagaattttgatt

SEQ ID NO: 248410 - DNA, 396 bp, Gossypium hirsutum
tgagttcctatcttggaacaattatgatgtctgttcctatttttaagtgatcagtttactaatgtaaggaagaagcagatgagttgtgccgaacgctggaggagaaagaggacagttcatgtactgcctcagaaatggcagatgtgatctacgatgctatggtttataattatttttagctttctgcactaaatattcaagaaagttttatctgcttgagttgacctacgtatcttatgaggggctgacaacaagtgctttccttcctctttgtgggggccttcttcaggctcagggcctatacccacgggaaatgagatatagtttctcatgcaagaataaatggggaactcgtatcacaccaatggctctatggcctgacaaatcatttgcact

SEQ ID NO: 248411 - DNA, 360 bp, Gossypium hirsutum
  unsure (1)..(360): unsure at all n locations
ggcattttgggtaccagagcttcttcccctccccaaagagaaaaggaattttcctggaaaatcatatattgagcaagttgtacctctcaaatttgggagcagtaataagcaccacagtcaaagaagcaaatatggtgggagacactccgggttaggcaatagatgaaagaattcaactgttggaaacacatttttcatatgctgaaaatctttcaacttgcatcgcatcgggtacaatcaaattttaatttgacaaaaagaatacagatgcctgagaattataaattaagttactagtgaaaaaaacaattggataactataaaatatatcttttttaatttanaanannnnnnnnnnna

SEQ ID NO: 248412 - DNA, 384 bp, Gossypium hirsutum
ctcaaaagtaacaggaggtagtgctggtccgtttgcaatgggtggagttccagattatcgagtgcgacacagattttcaaacaatgttggtccaggtgccatttgtaggtcgcctaatccaaattgttccccaggtggccctgcagcatgcagagttcgatgaaaatgtcacctacttgtatacttgtttggtgtggcttttgtagcatgaccccctgtcaaaagtgacaaatttgcttgttaaaacaagggtggttttacttaattgtacctaatgtgtaagttgtctgtagtctgtgttgattatgtgttgattatgctattcaactgaagcttgtatcacttttttttgttttatcctttgccactggaatttcctgtcgg

SEQ ID NO: 248413 - DNA, 399 bp, Gossypium hirsutum
ctcaaaagttacattgaagtagagctattccttttgcaatgggaggaattgcatattatcgggtgccagacactttttcaaagatagttgctccaaattccattattatgtcgcctaatccaaatagatgccctggtgaacctgattcatgcactgtacatccaatacgtcacctacttgtatacatgttccaagtggattgtgcaacttgaccatatgactattgctacagatgatcacattaaaacacctattgtattactaccatgcaccttaattcaaatgcatgctatgccatatgtaacaattcctatattatgctatactgctggacctggtgacacattctaagaatgattcacagggcaccaaaatgtaccttccaataaagaatgaaat

SEQ ID NO: 248414 - DNA, 226 bp, Gossypium hirsutum
  unsure (1)..(226): unsure at all n locations
caagaggagaacctgcttttggaagcagtattaccttttaagcactaggacngttatatggatacacttaatgctatataggtgcaagaatcttacaacaaccttcatttactaacacaatttgctcattactagaaactttacaagatcataacatcttaatatcttgttctggctattggggttcaacgatgaaaaataaaaacccagaatggtacatccacta

SEQ ID NO: 248415 - DNA, 391 bp, Gossypium hirsutum
gaccttttgaataccagatcttctaccgcttcccaaatttaaatggtattttcctggaaaatcatatatgtgtcatgttggggctctcagatttatgaacaatattaagcaccacagtcaaataagcaaatatggtgggagacactcctggttaggcaatagatgaaagaaattctactgttgtaaacacattttttatatgctgaaaatctttcaacttgcattgcatctgttacaatcaaatttatatttgacaaataaaaatacagatgccctgagaattataaaattaaatttacttattgaaaaaaaacaatttggataacctattaaaaatataatctttgtttaattatctaaaaatatttatatatttattctatattttatt

SEQ ID NO: 248416 - DNA, 222 bp, Gossypium hirsutum
gagaagttcatgaggccatgggattactatttcgatacctgccctcccggtttaaaaacaggacctctatatggagaaccgaggggaatttccaagggccggaaatttcggcacactcggagacacacacaagggtcccctttgcgtatacccttatggatgattgaacaaagagtgggtgaacattgatccaaagaagcacacacaattatcaccacatgc

SEQ ID NO: 248417 - DNA, 279 bp, Gossypium hirsutum
acgggaacatagccttgcaatcactagcgcgcttttacacaaatcatctgcttcaagtcctcgggcgtactgaaacacgtggaggatagctacctctagattctaacagaaccaccaatcacccctatatcagtctatccccacgattgaaaatcgattacatcgcttactgccaatcggcttaaatgtgagggcatttaactacattctttcaccacatttaacacaggatactccctttcattctacttggtactatccgcataaatgtgcacacaa

SEQ ID NO: 248418 - DNA, 297 bp, Gossypium hirsutum
  unsure (1)..(297): unsure at all n locations
tcccgaatcgacccactcctccgaaaatatggattgtttattcgacagggatttctaaagaggtctttaaaacgggaagtgccacacaantcccaacccatgctcaaaaatactttctccgactaatcaatctcaaccgtcatcatttcacatctagcctctttcatatcaccaccgatactgttcacgctattcctatggaacaatatcgaattgatctacaaaaaaactcaactcatccatctgaaaccaatttttttcccattataccatctatttttcccatggcctttaacc

SEQ ID NO: 248419 - DNA, 284 bp, Gossypium hirsutum
gcaaaagccatgggttggcggccaactctacgtgatgggggcgaaggtgctgacggagggtacaggatcttgacatgtgacaagcgtcatggttgaacaaattggaactataagtattatctgtgatgtttggtaatgcaagttggaaagataattcgacaagcgcagtcatttgcaagcgaaagaaagaagcttgtgtatcgaaatttgaactgcagataagaggattgaaggatgcaagtcatgggacggggggatgctgatgagtttcagctcttataatt

SEQ ID NO: 248420 - DNA, 288 bp, Gossypium hirsutum
  unsure (1)..(288): unsure at all n locations
aaaaagcatcaaggttatcgacatttccttttgtgcagtcataacatccacatggtatgtgtatttaattgcagtacatccatgtaagtatcattgatttctcacaatgaccaaaacttcttcctggtggcggtaacactagcacaggtctcagctggttgagaaagtcatcctgttgaatgaagtcgtacacatgttattttgagtgatttttttcccaattggatacttttcttaatcttcattaaattctatagaaatgttggagctagtttttctaannnaaaa

SEQ ID NO: 248421 - DNA, 294 bp, Gossypium hirsutum
aaggggaaaaacaatttggccccaaaaaaaaaacccccccccccttgggtggggcgtttcattttacaaacccaggtttaaaattttttgcccaaattttttaaaaaaccggattaaaggggcccctttttttttttttaaaacccaatttttgggggggttgttcccccccagcccaaaatttcaaccgggaaaaaagggtttggaaaactttcccgggaaaaaaaaatttttttcccttttcccccgtggacaaaattttttttaggggccccgccttttgcccccccccct

SEQ ID NO: 248422 - DNA, 283 bp, Gossypium hirsutum
  unsure (1)..(283): unsure at all n locations
tgcacactgatattttacccaaatctctccttcaaaggaggatgaatatggtgcggggcgcaatcaaattgcacgtttcggttcgaacggtcaagccgacccacgtcttaccttcattccttcgcgaaccgccgaaacggttctccaccgaaccggatcaacagcaacaacagccgctacccgacgcctccatcaatcaatttctggattcagctagcaaaggttttgtttatgggaaactctntggaatcacaaagtatacaatgaagagcgatataatcag

SEQ ID NO: 248423 - DNA, 214 bp, Gossypium hirsutum
agaccggccgaagccggtccccacctcgatcttccttaccccctcctctcggggcactgggaccgacgcttaaatttcccctatcccatacagaattttctcctactaccaacaaccatcccttctcaaacatctatacaagcaaccccttcccctactacacatactctcatccctatctaatacacacaaagcttttatattcatctatttt

SEQ ID NO: 248424 - DNA, 134 bp, Gossypium hirsutum
tatatacttactttttcatcttctcttgtaccaaatgatgttttattagcgcgtagtgggaagccaatcttccggatttagtctctattgatctacctaaccttcctttacaagatattcagttcttcttctat

SEQ ID NO: 248425 - DNA, 131 bp, Gossypium hirsutum
taggcttcaaattggagttaatctttcccttctcctcgggaccgcttgcatgtctgttttggccaaatgggcttaaattttgcttacccagcctttcagtttttaattaatagagactcttttctttttgc

SEQ ID NO: 248426 - DNA, 281 bp, Gossypium hirsutum
  unsure (1)..(281): unsure at all n locations
cgccaccgctcctccacctcctcccggtgtgaaacgggggcgcggtcgaggtccgaaggtgttaccgtcnntgggttttcagtaaagtaggcaagttaataaatcaaagagaatggagaaaatgactcattccgtcactactcctacccctgccgcgttaggtgtaataattttttaaccttaattttttaggtgtcgtttagttatctgctaattgacgttttagctttttcgtttttttcttttagttaactttgggtggagtactgtaatgaatttag

SEQ ID NO: 248427 - DNA, 397 bp, Gossypium hirsutum
  unsure (1)..(397): unsure at all n locations
ggaacagttgcttacagtggtgtatcttcatcatctaacattaatgttaataatccagttaggttccttcatcttttaagctgaattctttctggttcataatcagtctatggaaatatgctgtgaattgttatttcttctcttctttttttttttgatgtaacgttatcctgtttcataatggttcacagaccaaggtgcctgtctacctgggtggcatttctgtttttgtatgttttatggctgctgtggtgtcccttggaatttctatcgcaattgtgcctccacaatgagtggacgtttacaatcttctttcttttgtttggagcttttcttcatttgatttatcagcggngaaggagaatagtgacgcaactgaccccagtttctgctgata

SEQ ID NO: 248428 - DNA, 236 bp, Gossypium hirsutum
gatgcaccaagttaaacctcataaaccctttcttttcatacacccaccaacaaataaagatgaggatcaacctctaagaaaagttatgatcaatccacctaaataagttattgatttgcatcaacttattcaagaacgaggcacttatccttaatacactaaaacaaaaaaaatacttcaattatcaatctttcataatcattttaagcaacaaagcttgctattaatggaaccaa

SEQ ID NO: 248429 - DNA, 392 bp, Gossypium hirsutum
actggttccatcctctatccgcattttattttaatcaaatcatgacaaatatttatgaggtgctttatccatgtttagcctgccacaaagcccgatactatactcatcaactccaagccatggctccagccactttcttgtgcctaaatcataatccaaaatcactacacccgatgacaaacatactcagaattcttgaatgacgagataccaacattcctttgagtttaaacctaaactctatcagcaatcataaccaccatttacgtgaattgaaaactcaaacacaaccataatctactagacagttttctctaaaactttcgcattgaccaaatcgtttctaaagacctacacctatacttgtataaattgacagtatcatcacattc

SEQ ID NO: 248430 - DNA, 312 bp, Gossypium hirsutum
ctttctgtttcaaaacaatcatcgactcaatctatttcctcaacattagatcaaggttctaatgcccctgaagcttatcatatcggttgcttctcggataacacgtagtcaataagcactaaaactgatttttcacaattttcttcttctatttcaggcattgcaatactttggcttcatctaaagcttgaaccagccctctgttgtatattgtttcttcttcttttctgatctttttcctttgattaatgagatgtgatgatgatttggcattataatttctcaccaggatgaattatgttttagaaattc

SEQ ID NO: 248431 - DNA, 282 bp, Gossypium hirsutum
gttgcggaatataatgaagccaacaacatttgcctcggcggaatgaatggggtggggtgtgtcatctctcagtagtttatgggcagttgttgcttgatgaatatgggtatttgcagttttattttgttgaacatgttaggtatgcagtattgttcattgagatttcgagattttgcatcttattatttctttggataggtttatagattcttccctgtaactagttttttttggttgaattctcttctgttttcattgatactattacatatattttactgt

SEQ ID NO: 248432 - DNA, 257 bp, Gossypium hirsutum
cccacgctccatttcaaaagatttgaaaatggggattttaccccggaaggcactcattttttttctgcaacaattccaaaaaacgtcgtcttatctcacttatttaataggaacatctttattgatacattggatctatgctggtagaaactcataaaggttaaccaatctattcttgttgcaccacatgaattgcattttcagatagatcatcatcttttaaaaaacatatatctgtaacacccgaatacaaagga

SEQ ID NO: 248433 - DNA, 275 bp, Gossypium hirsutum
  unsure (1)..(275): unsure at all n locations
cacgcgtcacaaagatccttgcccaaattataatccaactatattttgcaaccaaacacactaatatcaagggctggattcttagacaactttggatgacacatattcatcanaaaatgctnattatataacaagtcaaaatttctgtatataaancttgtttctctttgctccatgtgtaatattttcatgctttttaacacttaaataatatcctaaattcctttcattcttacacaaaaaaaaaacttttttaaaaaataactctcttccaa

SEQ ID NO: 248434 - DNA, 392 bp, Gossypium hirsutum
  unsure (1)..(392): unsure at all n locations
gacaggtctatgctcgaactcgaatttttttttttatcagattgatacatgatttgtatttggcatccaacaacccgggagggcgggatagaactttaatttcttttgttttatattactaccatgaacattttatttgacccaatcagttcatcatcttattggtgcctaagggctaagattatatgtagatataaatgcatttgtcagatcaaggtttagcttctagtctttggtttcaagttccctccattcattcactttatttgttgtctgttaccactttttgactcttcatatttatacataaatgtattttagttgtaccgattgttatcaatcatgttcttgttctttgtatcgncaataacaaacatcaaatgtatggtttt

SEQ ID NO: 248435 - DNA, 226 bp, Gossypium hirsutum
ggggaagcagtggaatgaaatcaatggctgccaaagtccttgcccagttgaatgttctaggtgagcagtcttcatatttctaaatctgagatatgatccaatgcctgtaattttcaaataaatatctatttttacactggtgaaaaaaaaaaaaaaaaagaaaaagaaaacaaaaccaaaaaaaactacgtgtaaaaaccaaaaaaaaaattttaaatttaaaact

SEQ ID NO: 248436 - DNA, 306 bp, Gossypium hirsutum
cacagagcttgtttcagtcaatgggaagccatcgagtggggaggatacaagtgaagatgagcgtatagttgctttgttcattagcgtcaacttttttttttatatattttactacgcttgttttccagtaaaaaacgctattatgatggcgtaacctcaacaggccttctgtctaggattcagataatatttttggggggttttttttttccacaaggaaaactatttgtttgttagaatgttggagaaacattctttttggatggttcttcctttgattattataatatgtgggcagataaggtg

SEQ ID NO: 248437 - DNA, 202 bp, Gossypium hirsutum
  unsure (1)..(202): unsure at all n locations
cactcctcanaaaattttttaaaaaaaaaaaaaattcctaccgctctaaaaaaaaacaagcgggccgccctcattcattcaactaccatacatcttctatacccccacctaaaattcacatcactctcctatcatttcacaccattttaaactcgtaaaaccctgacataacccaacttaatcacctttaacacatccccct

SEQ ID NO: 248438 - DNA, 268 bp, Gossypium hirsutum
cttgaatccttgatgatttcatcaagaagggtgtctgaaaggaagctaagacgactgggagagaatctggaattcttgtgtattattggtaagtctcttgcatccatatacatgaagtaattaatgactcaacaaactgttaaccgaatgcacaaacattcttgttagaaatagcttagtcaatatgtcagccacttgttctatggctggtacatagttaaagctctacatgctttgatcttgcatggaagactgtatttcttgacat

SEQ ID NO: 248439 - DNA, 222 bp, Gossypium hirsutum
  unsure (1)..(222): unsure at all n locations
cccgggatattncccctatccgtaaaaanctnggaaaagggtaancaattantgcanaangcaatataaaaaatttggaggagaggaaaaaaaatcactgttgaggttagaaatgcaatagtctatgaaggattcggcatttgcatactaattttgtagttatggaatcaaactacataagttgcactcaataggcatcgttttgtccgttcctgtcaatgc

SEQ ID NO: 248440 - DNA, 345 bp, Gossypium hirsutum
  unsure (1)..(345): unsure at all n locations
atcgccgggtcgacccacacattcnactcttatttaccgcattttttctcaatcacttccattaccacgggggtttatttaagctggcgggtaacattaaacctttttttcttcaacaataatattctgttttgtaatttcaattgcagaacctcttttttatttcatcttatcttttccttttccttttttcacctccattgttttaacatcgtattgtgctcccttcaattccatttaaatatcgtgacttttgtttttcaaaaaaaaaaaaaaaattgccgcctctctaaataatccaatcttacttactctttcattctacttcatacctcttttattttc

SEQ ID NO: 248441 - DNA, 250 bp, Gossypium hirsutum
gtgagaaagctggtgagttgatggatcgagtttcttcatttcggaatctttgaagctttgaaacttgaaattccccaaggatcaaattgtaaaatggtcaacttttagagccagcattgttgaaataaaagcgccattagtaggatttcttctgtgtgtttttattattggctaaatcctgctattagtctttatactttgtgaaagttgtggatttggtcccattactttaatttgatcaattttagtc

SEQ ID NO: 248442 - DNA, 330 bp, Gossypium hirsutum
agccttccgttcggagaagggaaaattttaaccaaccaactttttcgccatccaaacaccaaaaaggaaaagggcttatatagtattccaaacctctcaacttcccaagacgttgttattaaaaccgagtctaccacctccggttcatcctttatcaggtaaacttagaaagaatcttacggtggtgaaatgttcgtcttcttctttaattgacggtggagattcctccgtcgctgctctcgagcgatgtttctcggcaccaccggctccagtggagactggttcttcaggttcaggtgaggttggaccggttatgaaaggaggaaaata

SEQ ID NO: 248443 - DNA, 294 bp, Gossypium hirsutum
cttccgtttaagtaacctctattcttaatattaaaataggggcttttagttcttagagaatcatctctgggcttgggattcctacttctacttggaatagaaatactctctttttcccttttcaaaaaaaaaaaaaaaaaaaaaaaaaaaaaaaaaaaaaaaaaaaaaaaaaaaaaaaaaaaaaaaaaaaaaaaaatgcaaaaaaaaaaaaaaaaaaaaaaagagacctaaattaaatagagctggccgacttttaacaacgggggcgactggtaaaaaaatgcacgcacccaa

SEQ ID NO: 248444 - DNA, 312 bp, Gossypium hirsutum
ccacgctttaatttaatttttcatctctccttttatttctcgaacagtaatttcacgggcgggggagactataaaatccaaaacctttaataatgcaacatcaatgaacatcaagactgcacatcatttatctttttgtcgaattgcttagatccttaaaactttaaaatattcttatcgaattacaacttgatctcctctctatctaaccttctttcttcaatatctttccacttactatcttgatctatccaggaattcaatcattatcatcaagaaaaccctcatccttccactttacattcaactttt

SEQ ID NO: 248445 - DNA, 283 bp, Gossypium hirsutum
ctcctgttttaaaatgggtgagttgtattagttgttgatattgcaatattgggggttggggagagttcttttgtcttcttttattctttctctctaaaggctatacaactctttttaatccttagattatgaagatggaaaagagatagagaaaaggtggaggattttttctgttgttgttgggattttacttatgacaaatggtggatattttcattgtttcgattttaatgtatatctgattgttggtgagctaatgaagtttttgttactttgttgcatt

SEQ ID NO: 248446 - DNA, 296 bp, Gossypium hirsutum
acaggcagaaaaacacaatttttagactttttgagcattctaaaggctataaatactaattaggagaagaaataagggggccaccagagaagatcgaagaaaacactcgaagaacactaacgaaatcaactcggaagtggatctctatcaagatcaaagacctccgtttaatttcttctaaagtttttatgagtttttatgaatttttttgcttcttgtcatttttctaactttgagatgtttttatttacgattatgaaacctatgatgaatcttattatatgatttttgattta

SEQ ID NO: 248447 - DNA, 331 bp, Gossypium hirsutum
aaggacatcatcaaggtgaactcggaggccttattggtcgtttcatgtgccaccgagcttttccttcgattcctcgccgagagaacagcccaagtcgccgccgagaagaagaaaaagacggtgaagctcgatcacctaagaaccgccgtcaaaaggcatagaccaacgagcgattttcttctcgactcacttcctattccagccgagtctactcaatccgttgctcgcttcgcgacggatcgagatcgttcccggtccgttggtgataaatccgcccccgctggaacccgccgcatagaccactttttttcgtaagccagaaaatgaagct

SEQ ID NO: 248448 - DNA, 312 bp, Gossypium hirsutum
cgcagaaaaagcactcattgttgatagaccttctgacagcatgcatgcacttcattcaaatgagcaggttaatgctgctgcttatcctagccagctggatagtgcctgtaaaagctcaaagccaattgtgagtgagctgatctcctctcactcgctgcctcctgaaatcacaaatcaggatttggttgttgtgagaggaagaaagcggaaaagtatggtatttgagcttctaccatggcatagagaagtgaaacaagtttctcaaagatctcagaacatcagtgtggcagaggtggaatgggtgcatgcaac

SEQ ID NO: 248449 - DNA, 309 bp, Gossypium hirsutum
cacggctagggaggtcatgaacatggtcacgagggcgaaaagaaaaagaagaaccagaatggtgggaggaagaaaaagagtaaaaagtcaaaggctttgtccagtcaacaatccatggatatctaagtacattgactttccgaaagttagcattttgttcgtatatcttctcctcattgaaagctttttaagccaattgaacccttcatgaggtataatgtgtagttcaccattccccttttttgttaacaatgtcatcttgtctctttatcgaccgaaatatcgaaatgcaaaatgaaaattttggtg

SEQ ID NO: 248450 - DNA, 309 bp, Gossypium hirsutum
gagccaggcgtacgcatggctgatgttgcttattaaataaagatgtctctttacaagctgagggtcaaagccttgagtacggcttaatacaaactccgctctcaactcgacatccttgccccagttccagttctgaatatctagaggctagctagtttcatagaatcttgttaaaggttatcggtttcactatttagttccttttgagatgtggcggttaaaatttctgtcgaatcttgaattgtccctttttctcaatgaactttttggtgtatgaacattcaaatataattcatatatgcctttcat

SEQ ID NO: 248451 - DNA, 391 bp, Gossypium hirsutum
tgaaaataaaaaagaccaagaatatattcaaataaaaggaccaaaaaaaaatgaaatgaagaggaaaatgctaaagagggggggcggttgtttgggttccaaacttgcttccgctggcgtgcaaggagatgttttttatatcgggtcagcctaaattcaattgattggcctatgaattacaacgaaatcgactgtggtaaaacctctgctgttgccaaatttaatttccatgaccaacattccccttgcttcggatggattaatagctaataggccattgcagactgcctttcctaacatttatggcataacagaatggtaaatgggacgcaaccctatagaggggcattaagagcagcgggagtagcggttactctcactaagaccatta

SEQ ID NO: 248452 - DNA, 161 bp, Gossypium hirsutum
ggtggataagcacgaccgtgtttatgttctaatcaaaggacccctacacaggagagggtgatgtacagctagcgctttgcttacattactgctgttaccaattgattccgttggagaacaacgataggtttgttatagacaaagcactgtattcattgatc

SEQ ID NO: 248453 - DNA, 405 bp, Gossypium hirsutum
  unsure (1)..(405): unsure at all n locations
gaaggccccccacgacccacgcgtgcgcgaatatttaatgtatcnttttttttttaaaataaaaacaaactnnacgggtatggttttttttctcctcatacccactttatatttcatacattccacatatattatattgtatattgagttagataaaatttcatgttattcactaaacataataaaaattcaattccatcattattatatccattcttacgattccattaaaaattaaaaaaaaatttgattttttttacaaattctaaattcaaaattctttctgattaaaaaagggaaatttctacaatacctttgttgaatcaaatacaattttaaagatttttttggttcattgatctgtgcttaacacaagaactttattatttttcaaaaaattaaaat

SEQ ID NO: 248454 - DNA, 308 bp, Gossypium hirsutum
accacgcgtccgcaaattcataatcgacaactcttttaggatttattgttgtccggaacaccctacttacttaggatgggagtaatgacaggatagggtttttaaatactaattgttctgaactaaggaggagagttcagctctctggtgctcctgcaccaactactttattctccccaagcaaagatactaaaatggaaattccttctgtactatccccaagtgggtcaccatcaaatgttcttccaggttcatctcatgtgtgatttataacatttcatatgtcaattatcaccactgattcaaac

SEQ ID NO: 248455 - DNA, 236 bp, Gossypium hirsutum
ggggggcggacgcgttgggaatgatcaactttgagacagggttttttttttttcatccccagaagaccatcaaaggcacaggtttttcttattttccccaccactctcattccaagtctaaaattattttcatgtccccagaaaatcatatttttcttttccaacttacaccccagagttataaccattttttcagccatattttatggcgagaccattatgtttccaaaagaaac

SEQ ID NO: 248456 - DNA, 357 bp, Gossypium hirsutum
ataaaaataaaaaaaacaaaaaaaaatttttaatttaaaaaacaaaaaaaaaaaataaggagaaaggataataaacaaaaaacacaaccataccaacaaaaaacatgtcaggtgttctctactgcaatctgataaccagtcttcttgtagtttcaatgtgcttcaatgtctgcgttaaatggcttctaacaacatgcttttgtgtgcgttttacttggtatgcattttccctgcttctcccggttttcttaatattgaagttacattccacatttatccccatggttttgtcactccttcggcctaggataaggccacccctttataacacctatttactattcgttccttttgttt

SEQ ID NO: 248457 - DNA, 188 bp, Gossypium hirsutum
acgccaactcctccggactccgttcgcattttaactaaatgcaaacataagggggctgggtgaacttgcgatcactcaccttatacaaaacgttcattgaatacatgtgctaattaatctgatcaacacataaatacctgtatctacatactatatcgaaaacttcttatacataggactttaagact

SEQ ID NO: 248458 - DNA, 179 bp, Gossypium hirsutum
  unsure (1)..(179): unsure at all n locations
cggaancccggccgacccacgcgtccgaaaaaaaaaatacataaaaaaaaaaaaatatatccatttttatacaacaaaagatgataaaatcggagtgtgtctggggttgacaaattcaaggtcccctatttataaccaggttcctgaaaaacttgacttctttctagctgttacccttt

SEQ ID NO: 248459 - DNA, 219 bp, Gossypium hirsutum
gctctatgcatactattatccctaggaatttttcatttttaacaagtgtatgtacaaagaagaactgtgtcaacaagcttcttatcaagatttccacaccacaacctctcttaagagtatagattaatttcccatacacatacaatattatggtatttgcaaattgtgaaaataactctactcttttaacaccaaatattaaagaaaaaccaatatgcg

SEQ ID NO: 248460 - DNA, 390 bp, Gossypium hirsutum
  unsure (1)..(390): unsure at all n locations
agnnncngaaaacatgagccangnncttgggggttnncacnggnncttgttcgagggtgttagcaaacaactgaaagatccaagtagaaacatgctagcatggtcagcatgcatttgtctaagtggatcttcaattattggtttctttttgttgttatgtgatttgttgtttgtttaagctcatgcttttggatcgaattctgttgatttaaatttctttctttactgttggggaatatgttctaaataaactttaaatgcaactgcttgtcagttgatttttatgtcaaattaattttataatcggcatgtcattgtgttaaatgttataatctgttactgactgggtggcttgaaacaaaaatatcggaaaaattaaaaaaaaaaata

SEQ ID NO: 248461 - DNA, 390 bp, Gossypium hirsutum
  unsure (1)..(390): unsure at all n locations
tatcagcgagttaatcagaatggaagttgtggccgtcaaggtggtgcaggtgccgcggcgaaaccatgatttgattcttcataattgactgagaaagtgaccagatgatttttttttgacaatataaaacaaaggaaatggaaggcactataagaattgaagttcttgattttcataaattcaactatttatgactactgagttcccccccgcccctaccgcccctaaactctctttttcttgtgttatttgttcaagtaatgtgtttgaggattatatgatcaaattttttatataatcgtcatgtcattgttatatagttttaatctgttactgactgattccttgnaacaaaaaaacnngcaaaaaataaaacaaatacaaaagtgg

SEQ ID NO: 248462 - DNA, 405 bp, Gossypium hirsutum
gcggaagagataccttttcagcttggattgtctaaaatggatctccggaagatgttaaaatccagtttgtctggggttgacaaatcaattactgcaatgtataagaagttgcagaagaacttgacatctgaggagctgttaccctctttgtgggacaagtgcaagaaagagtttctggacaagtatgatagctttgcccaacttgttgccaaaatttaccccacggaaaccatcccatcggttagtgaaatgagagacctgcttgcttccatgtaaaagggacagattttgccttctgtataatctttctttattttccatttggagtggagagccgtattagctggctctaattattaaaattgtaatataatagacaatcgccctccaaaacccatatttcaa

SEQ ID NO: 248463 - DNA, 399 bp, Gossypium hirsutum
ccacaaaatatctttataaccaagcattttgcgaaatttgcgaggatactttgcagggggggagcatgatcgaacagtgaccatgcatcactggcttttcaaaccaaagcatccccagaagcagccactccctcacataaaactgcgggagcaaaggtaacgctgaatttacacgagacgttctagcgaatcgttcaaaaactaaacattgaggatcaaagctatgatgcacaaatgctaatctgaagccctactataacaacaatactcaacttgatcaaataagctgatctttagttgaagatatattatcagatctatggcacttaacccacgcttggatgttcctattatcgataaaatttgcaaaaattggtggaaagttgctatcataaatgt

SEQ ID NO: 248464 - DNA, 170 bp, Gossypium hirsutum
gttcataagcttgtaaaaagctgccttttgcggcaaagatactatgaccctcaacgtatactacctgaagtagaaacttttactgttttctttgttagctaagtaataaacttgtcacttactgttttcatgctataaaattgtccactcagattttttaaaaaaaaaca

SEQ ID NO: 248465 - DNA, 274 bp, Gossypium hirsutum
acggtctccgattccatcttacatgctttagctttccacccaaccgctcgtatagggcgcggtgtctattcaatagaatctccgctcttaaataaacatccttcccccaaaccactgctgaattccaaataactcctctttcaacacattcctcttaaccagtctggcctaaactctaaaggtcctgtccaaacgcccaggccaacaattgcgcaacctctatgcagaatcgtactcacaatggaacatctcattcaacgcccatccaaacata

SEQ ID NO: 248466 - DNA, 285 bp, Gossypium hirsutum
  unsure (1)..(285): unsure at all n locations
gcacagttgagcaatatcatgaccaatttgtaagtcttctgaaccaattgcatctacctgagagttatgtgttgagtatatttgttcataaccttaagtccgagattggttagtagttgtagttgtttaaaccaaccaacttggaagaagggttaattctagctttgcaaatagaggacattattagcacaggttcttccaaaactgtttctataacagggaattcaaattattccaaaactttgtttcctcaaaananaaaaaaaanaaaaaaatttttttttt

SEQ ID NO: 248467 - DNA, 319 bp, Gossypium hirsutum
gaaattggctgcacaataaagaagtttccccttttgacacccagagagtatgttcttgcttggagattgtgggagggaaaagatagaacattctactgttttatcaaggaatgtgaacatccatctgcaccaagacggaagaagtacgtccgcgtaggatattttagatccggttggcaaatcaggaaagtacccggtagagatgcctctgagatcagaatgtttcaccaagaagatgctggtctgaatgtggaaatggcaaaactagcatttgcaaagggcatatggagttatgtatgtaagatggataatgcattac

SEQ ID NO: 248468 - DNA, 185 bp, Gossypium hirsutum
gtgagtttcccgtacttacggagatgtgcattggtgtggaagtcgcttaaatcgtcttcgcgagcggctttctgcgaaagagatgatgtgtgggagtcctctcatgcagcaactgacatgatggatacagttgaaagtgcttcagtggggcttattgaattgaacaacctggagatttttttaaa

SEQ ID NO: 248469 - DNA, 378 bp, Gossypium hirsutum
ggaacatttctggtgtttagggcttggtcgtttggatagatgggaggaggccatggacagagtgcagcttacaaaggactaactttgcatcatccaaagcgatggcatgttgccaccggcaaaggctcgagtgccgttatgtggttgtgggtcttgtacagggctaagcaagatggtactgttgtattgggttggctacaccctctggtgggccatgatgatcattctcacagtcatggagataagcattatgatgttgttccaaatgtcttttgtcaatttcttccgttgcaataaagagattgtgactgcagattcgaagcataatgtgatgaaatctgaaactacatttgaacattttgaaacttcaataaacat

SEQ ID NO: 248470 - DNA, 390 bp, Gossypium hirsutum
ctttctcatttctatcttattgtttggtcacccaaccaagaaaagcaatgatgtgggaaaccccaaacagccatgaatcaagccaacatggccaagccttagacccccatgagccccaaggttaccctgaagactatgatagcacctgttccacaccctatgttagtgctccttcaagccctggccgggcacctggaccaggatccatcaatggcgggttcttttatagtgcaccagctagccctatgcacttcgcaatgacctcagtagcttcaattgtgtcctcaacccgaccatcctcccctgataacttagtgcctctaggttttgagtttgagttctctgggagatttgggtcttcagggttgggtcaaacagggtccatgagct

SEQ ID NO: 248471 - DNA, 346 bp, Gossypium hirsutum
ctttaatatgatccaatcttactaacctttttattcgccggtataaaacatgtatagggtggcctatgtaaaatatactcatcgctgccgtacgacgggaaacttggcattacgactaagattcgaacatattcgtgtgtatacgcatgcaccccgcggagtacttttggtattttatgatcttggaacggacaatgctacattttactttgaaacgcaacctgatgattgaattaatggcgccgacacctttctcactaaacgaggtaggagcatattctacatgctgcaaaacggttacactttgcagcgcaaaaaattattgtgcgttgattgtaaagccttc

SEQ ID NO: 248472 - DNA, 262 bp, Gossypium hirsutum
ccaaaatttccagattgaattaaaatgcataatttctataatatggattataagagatcaaattcatgcttcatggttatttctacggttaaaaaaaaaaaaaaaaaaaaaaaaaaaaaaaaaaaaaaaaaaaaaaaaaaaaaaaaaaaaaaaaaaattaaatatctataaaaaaaaaaaaataattaaaaaaaaaaaacgggggcggactttttaaagattcaaagttaactacacgttctttgaaagtggttatattttt

SEQ ID NO: 248473 - DNA, 261 bp, Gossypium hirsutum
ctttaatattataaaatcttactaatttttttatttgccggcctaaaacatgcgtgggtggggcgatataaaattttctcatacctcccataaaacgtccactctttcactattcaaaccttcctcacccttaaaaccacatcctaacacctccttattttcttcttaaatcaaatcaacttgtcacgcactattacatttttaaattgaaaacccatccttacccctaaataaattgcttcccccccatttccattttac

SEQ ID NO: 248474 - DNA, 385 bp, Gossypium hirsutum
  unsure (1)..(385): unsure at all n locations
tggttctagtttagcatcttctatttttatcctctctgttttttctttttttcttggttggggggtcacacaaaaagggaaaggtggatcactctggccaccaaaagggccgtggttgctataaaaaaaaccaaaatcttttttagcaaacagggaaaaccatgaagtctaatggatagagacaaccacacacgcacgccccaagagagagagagggggtggctacttttgttgggttgtagtaggtgtgaattaatgaaggcacgaggttcacgcgaggatgctttgcttaagatcctcttttatctactaaaaatttcctcnnnnnaaaagaaaaaggccaaaaatangnggggtnncaacccatggaaactctttccccaat

SEQ ID NO: 248475 - DNA, 230 bp, Gossypium hirsutum
aatagaatcttatttgtgaagtagcagtggaagaggacttgcctttcttcttcaaagatacaccttttgatctttgttccttcaaggtgatgagtatggttgacaattctaacggtgataaaagtgatgatgaaagggaaaagaaagaaatattacaatgcatggaatgttttaaccgattatttgttgttgcatattattctgtacaattatattatgagaagtatata

SEQ ID NO: 248476 - DNA, 308 bp, Gossypium hirsutum
cggaatcagtgctcttatgaccgggttttacttgtacaagatcgctactggcggcaatcatttcccagccaagactgaatgatgaacactggtacattgacattaccagttgcaacagatctctcaagatcattgaagtttagctgcttgaattggaaaagtttagttacacaacatgtgctgtactttctttattttttggacaatacatgtgttgtactttgatgcgtgcatgaagttaaaatatagcctgtcttgtataccaaagaacctcggtttattcttttaccaaagttatgctgttccgt

SEQ ID NO: 248477 - DNA, 213 bp, Gossypium hirsutum
gttttacttgagtaacaacttgtaatcctgccatgttgatagctaccttcaatccgctaaataactggtttttttttttaattattacttttgaacaggggtataattgagatagttatgctctcaagtcattcaagtttagcttaaaaagaaaaatgaattcaatttaatcgttatcgagttgagcttgaacagcttgagctcattcatctg

SEQ ID NO: 248478 - DNA, 135 bp, Gossypium hirsutum
cttcttctacgtgcaaactcatcggaggaaacgccgaaattcaatagacagaccctcaatatacaactaaagctagattaaaacaatccctaaaccccacttcgacgccttgcagcacatgcgccctacaccatc

SEQ ID NO: 248479 - DNA, 375 bp, Gossypium hirsutum
aaaagactcactgtgctttttgatgatgtttccttttaacttaaactatattctctgatctgcgttttcgtttatttctcatttagatcattgttttcgaggggcgggggccggggggggggggggaagcttatcttgttctttgttggcttcattctcgtaaaaccattgagaggaacacgtggtccattttcttctttcttcttggggttttagcaacttccttgactttcattatgagattctgaaaaatgggattttgtgtcaaagatgcagaatattggtgtgtgttttaaggaacctacttcagttgtttgagattgttttgtaactggttcttgtacaatgagaaaaggcagaggaaaagcaaagaag

SEQ ID NO: 248480 - DNA, 412 bp, Gossypium hirsutum
gtttgcattgtattttggatcattgctcaatgcactaaggcggcgtgttgctgaggaggagagatttcttaaagacaaagctgccaagaaaatgggtcggatacctctgctgctaacaaagttgtttgccaagcttagaggtagacatttggaaggtcctcaagcacccccagcttcatcatccttcattaactctaaatcagtactcaaagtcatactcatatctggactcgcagcgcgttggcaatactatttttcatgaagatataatagaagttttcagtgtacaatacaaggaaaacgaaagcacagtgtacctcaggttagggaaaaaggatcttgtgtatcatgttgagctattgttcatttcgttttagtttaagaaactttgaaccatttttataatttttct

SEQ ID NO: 248481 - DNA, 293 bp, Gossypium hirsutum
gctgcagggcgtggaggtggagctgcagctgctggtgggcgtagcacaagaggacctggtgctagtgctgccgtcagacctctgcctgccctcaaggaaaatgtcaagcgtgttatgttctactgttaagggagtgcttgtattttgagcatctattttgttgggctttgcttattggtatttcgaacaatatctagtttgtttggtgttgcgtggattattgaactaaacttgttgaactttggtgttaaaactatgttaattttatgattattcgcttgtgaacattactt

SEQ ID NO: 248482 - DNA, 324 bp, Gossypium hirsutum
gtttcttgttagttaatcagccaagtattctttcaaaatctcctctctctctctctctctggctgtctggctctctctctctctctctctctcactctctctgtctctctatctctatttaatcgggggatttgggcatagggtcgcgtctttgttaatgagcgatctgtgaagaggggtaagcgtcggtgtgaaaaaaaagcacggctaatgatcttgggagtacaatgaggatcgctatccctatgcatgagaaacatattcttcactcgtgctcgggcgaaatgcaatacagggtctatggagccccaaggactacctctt

SEQ ID NO: 248483 - DNA, 213 bp, Gossypium hirsutum
gtgattttgccaaaagggcatgaactaaatctgtctgtagtagtaaaattgttttggtttgtagttatattgtcatcgcttttgaaacaaatttttatttgatcaaatgacgtgagttatggtctttgtaaaacttctaatactttcttatgtctccttccatggagaactgaaaattccttatggaaaaaaaataaatttacgttcagttcc

SEQ ID NO: 248484 - DNA, 116 bp, Gossypium hirsutum
ctgatgttcaattctcccttaacccactctatataaactttttcaacgcccacattgtcctgacattttgatacatttcttgagatcccttacacattcatctattccctcattga

SEQ ID NO: 248485 - DNA, 433 bp, Gossypium hirsutum
  unsure (1)..(433): unsure at all n locations
aaaaaccaggccgacccacgcgtacgatgattttattaacccaattttttttacattctacaagcacnccaacngcctggatgttttggatattaatacgggctccacagatggtactcacaccatgcttgtattctttaatccacctcctgggcatttggctccacaaaaacagatagtggcctttgacaaaatgcattttccagcatggtcacaacgaccagtaggaatcaacattcatgttttcaagtttttaagtgttgctgataattcttgggttctaagaatcccaacttgtgttcacaatatccatatcggttgcgctaatcattctttatatcttcatcctgtaactttaggggtaaataagtcctatactttttcaatgcaaaataaaggatacatttttataaatgccaaattcaacaattac

SEQ ID NO: 248486 - DNA, 255 bp, Gossypium hirsutum
cgttcgggacagatgttgaatttcattacctaaacgtttttcttttgaaccaactgcatttaccagagagtggtgttttgtttatatttagtcataaccttaaatccgagattggttacttgttttacttgtttaaaccaacccactttgaagaaaggtttatttctaactttccaaataaatgtcattattaacacaagctcttccaaaactgtttgtataacacggaattcaaatttttacaaaactttgttt

SEQ ID NO: 248487 - DNA, 172 bp, Gossypium hirsutum
actacacaaaaaccaattctacatgttgatttcaaattcattcggaaaaaaatgtgcctggtgctgtcgtggaaactgtgatacgaaatgtacagagctcatctaatttttacagtcctgtatgaaagatgtctggggtcagcagcaggcaattttagaccaatccaatttg

SEQ ID NO: 248488 - DNA, 388 bp, Gossypium hirsutum
ccatttcagggaaggcgatcaaagtaaatcatgtgagatgcaacaagctctcggttgggcttcaagtcgacgtgaaaaatacgggttccaaggagggtactcacaccatgcttgtattctcgaagccacctgctgggcattgggctccacaaaaacagctggtggcctttgccaaagtgcatgttccagcaaggtcacaacgacgagtaggaatcaacattcatgtgtgcaagtttttaagtgttgtggataggtctggggttcgaagaatcccaactggtgttcacaatctacatatcggtggcgctaagcattctttatctcttcagcctgttactttaggggtaatcaagtcctagacttctccaggcaaaagaagggatgcatt

SEQ ID NO: 248489 - DNA, 174 bp, Gossypium hirsutum
gcgtgctatggaaggcaattcaaggaattctttttaaattcaacaagccctcaggcggtggtgaagttggcgatgttcatacggttatcaacgatggtgctcacgccatgctagaatgctataagccaccaaccgatcatagtgctccacagaaacaactggaagactctgtca

SEQ ID NO: 248490 - DNA, 255 bp, Gossypium hirsutum
aagttttggtggcttgtttcaatttttactgaaaatggaagcaatcttcactccattaaaaatctaaaactagcgatttttcaatgctaaattttccatagcatgtattatccgattttcttcgtggttctacaaccgtttgtgtagatacccgattatcagatttccgagtctttagcatcccttttcatgaagttaggacttgttactgtaactcaaattctgttgtttatctgaatttacttcatttatagc

SEQ ID NO: 248491 - DNA, 190 bp, Gossypium hirsutum
gaattatcctgacttgaatccatttgaactttataagaaggcactgggatctggcttgaggggcaaatcctcaggatcataccatcataaaacatggctagcatgtcatatgcgagtctgctagccgttatacagccattagagtaacacacacacatgttagacatctcagggattgggcatgttattt

SEQ ID NO: 248492 - DNA, 156 bp, Gossypium hirsutum
tgtcgcagtgggtatacaaaggccgacgacgccttcaaagtgccacctgaggaaggacccctgacggcattaccgggtgggggacccagggcgtaatgaggctacgcgtcttgttttctctttgacttgcgttccgagttaatggtcttagtcata

SEQ ID NO: 248493 - DNA, 234 bp, Gossypium hirsutum
tcgccacgcgtcgcagacagaggcaatgctggaataactgggcagagtctttgctgtgctatactggaaagggaatcattatgagaagatggaaaccatgcggtgatgccctcagaaagaatccgccctgagccatcattggatttgaccacccagcagagtggttctgcgcggagaagttatcaagttttagaagacagcgatatgtgcctgtgagtggaccatctgattcgt

SEQ ID NO: 248494 - DNA, 173 bp, Gossypium hirsutum
  unsure (1)..(173): unsure at all n locations
gcgtccgttctcctctggtccttcatttcatagtttctaataagcacttaatatctntcaattnttattatagttcaattgttntatatataatggaacaactttcacatggtgttatctatatataaaattaatagaagcattattttattgcnnanananaannnnaanna

SEQ ID NO: 248495 - DNA, 376 bp, Gossypium hirsutum
  unsure (1)..(376): unsure at all n locations
agcctaatgccaaaacttgggagatctntntggatntattatttgaaaatggagacaccaagctggctgttgattgtgtggccaatgaatttcactggcagaggagatggcagaaagtgggtcccatcatctgaaactattgggacagtgatgcgtcattttgagcaaggaaagatgttgatggggccaagttttgtgagatttaaagaagctgtgaccgtttgggaggaaggttgaatatgataactatcactgtgaagaaagtcatatcgtgcgtgaaataaagtaatataccagtacatgtgatattggtatatttttatgtgttaattatctgaatattatattatcttgttttttaaatcatgatatgtac

SEQ ID NO: 248496 - DNA, 109 bp, Gossypium hirsutum
tttttcagcctacgtacccggacttagacggtgaagaatgccattcatactgatagttttgtagcgcgatgcacactaaaattattcttacgtcagagtttatatttta

SEQ ID NO: 248497 - DNA, 315 bp, Gossypium hirsutum
  unsure (1)..(315): unsure at all n locations
aagagggaagccgnnaagnactctgagaagctcatggactggacaaagcaatattggaccatccccgtggcaattgttggcatctctgtgttggttggtttcttatacctgcataagaagtaaaccagtataatgttttcccctattggctgctgaatggaaattgtaccccaatttttgataattaattgatatgataagaacagtacaaaagttttttaaattgaggcaggttgacataatatattattattgttacagggaaaaagaacattcngaagtatacactgatcacactgtaataatcatattata

SEQ ID NO: 248498 - DNA, 178 bp, Gossypium hirsutum
  unsure (1)..(178): unsure at all n locations
cgacgagcgtggtagagggaagcagcggctgttttctctttnntgctgaaaattagttagtttgggctgtttgggctctagggttaagtntattttgggcttataattgggttagttgtttttgtaattttggactcttttttttgaattttttatgtcgattatttgggttttattt

SEQ ID NO: 248499 - DNA, 258 bp, Gossypium hirsutum
  unsure (1)..(258): unsure at all n locations
tcccaccagatcagatagagaagatgaacagtggggataacannagccaagacagntnttccaaagtgaagctattaacattgagaatggaaaccaaagctttcagcaggatgctccaccagggttctcatctcctctcaatgcatctntggtgtcgtctactttatcatcaactgctacaggtttccctacacctaaagttggccagttgaagtgccctgatgtggttcttgctattcaagaagaattatttacgtt

SEQ ID NO: 248500 - DNA, 174 bp, Gossypium hirsutum
  unsure (1)..(174): unsure at all n locations
tntcagtctattctcaactcttccatngttattgtgatgcgatgcaatatgctgtcattttcagagttntctttgaaatggtgttcttatgtactaataatggcagaggctacttggaagcgtttangtgttgattgcctgatttggacgaaaggatcatgccgtcggtgatat

SEQ ID NO: 248501 - DNA, 182 bp, Gossypium hirsutum
tggtctcggctgctggggagtggggggagaggagctgcgcgcggtggggtggggtggaaaaatgaatggaagttcccaaaaccaccgggaaaaggctctcgagactgtgattgagcttatcttagtctaagaacgtgcatggatctgaatcagaacctagaaaatggttcaaaagaaaagaa

SEQ ID NO: 248502 - DNA, 339 bp, Gossypium hirsutum
  unsure (1)..(339): unsure at all n locations
gaccacgcgtccgagccctaaatcctncctncctctcaatctcagtcgaaaccaccctaaatcacacacttaaactttcactcacacactatttctcttacgccggagtcgccgagtcagagtgtcggaccaccacaccaataggcaatacccagacccaaggccagaatgtcaaccgaaccaacatctattgagggtagtgttacacctcctacttcggtagcttctgaaaattcggggttgagctcaatcaaacaaggggctcgtcgggaagaaagccctctaaggcaagttggctactatattataatggggctgaggtatgatatggtagattgt

SEQ ID NO: 248503 - DNA, 244 bp, Gossypium hirsutum
ctacgcgtgcgctcgatgtcgatctctctcataaccaacattctctaccctcaaatccgccattaacaaaccaacccttaaaccaaaacccgcctcttctctgcgtggttctcgcacttctcccacattttcaaggtctgtttctcaattgggttgtcttcaatctctgctgcctctccactcagccgtgtcttcagctcggttaacgtcgtgtctaggcatcgattcgaggagctctaggtcg

SEQ ID NO: 248504 - DNA, 374 bp, Gossypium hirsutum
  unsure (1)..(374): unsure at all n locations
gtgctgcgagctaggngttgcggcgctggattgngggaaacctctaggtttctacttcggcaaagaaaggaaaggaaaaagttgacgaagagtgactcgngaaattacggttaggttaaagttcaaacattgaatcagcgtccaaggccgatcccgaactcattgtggtgaaattgctttgtggaacgtccaagctggatcaagtttnaagctacactatccatactatgtagatgacaacgttgaattggtggcatttcctgatgtgaatgattatttatatgttattattaaaagtaaccgtagttgactataattgaaatactatagtatgatagaactatgatttgatgtattatctagattgtataaaa

SEQ ID NO: 248505 - DNA, 265 bp, Gossypium hirsutum
aattcggtaaccaatctccatttcaaaatgcgagatatggtgtatctgttggtgcatacatgtgaagtaaaggtaaatggtcagaggacaaaaaaggacatactcaaatccaatgggaaatctgaggtaaatgagtccttgagggattctgaaaaaggtcagatagaaaagatgcctgattatctatgatggcctgattgagacaattgaagccattgatgtcatgggataaaactgactcatatgagaaattgaattgacatat

SEQ ID NO: 248506 - DNA, 250 bp, Gossypium hirsutum
  unsure (1)..(250): unsure at all n locations
gaattataacanttgaagaatggagagatttccttctactctatcctcatgaagctactatggagaacatctatcatcattgggaaaaggaggaatagccggagcagcttctcgcactgcaactgctcctctcgatcgcctgaaggttgttttacaagtgcaaactacaaatgctgatattctgccagctgtaagaaaaatatgaaggaagatggtatttgggttttcgggtagggtaatgtgaagactc

SEQ ID NO: 248507 - DNA, 226 bp, Gossypium hirsutum
  unsure (1)..(226): unsure at all n locations
ggaaactctagttggttttcgcttgtgatttccactattctcgtgtttatcccttgaggacgcgaggtctggcttttatttgtcgattatataataaaatcacaatttaatttactaataccaangagagctgagcaacctacaaccacgtgcatggggaaagaggaattgcgacgtagaatcatgtagcaaaggagccggcaagaggatgcgactgtagcagcac

SEQ ID NO: 248508 - DNA, 256 bp, Gossypium hirsutum
atgaccctgctatctgtctgtctgtctagagaccttccaggccttacatgggtacccaacaatccagcaccgtaactggatgatggagcacaaatgatgcgcatatcatttacatctgtgacagaagtcacctcatatttcgttcaattctcagagaatcatactatataaagctttgagccattatgattcattaatattgagtattattattagtaattgcatatatatagtatatataataggattctcatat

SEQ ID NO: 248509 - DNA, 248 bp, Gossypium hirsutum
  unsure (1)..(248): unsure at all n locations
attcacccgtagctatggcactccttctcgccagttccagacgcagatccctcgccaacccttcactctccgccttttctccacttcttcaaatgaccgaacaacgagtggcgcgtccacgaacggcaaccactccggcaataatccctcttcagactcttcttacttcggcgatgtcaaaactgaccaaccccaacanagacccagaaaccccacanatccttcgactcccaattccaaacccatgt

SEQ ID NO: 248510 - DNA, 343 bp, Gossypium hirsutum
  unsure (1)..(343): unsure at all n locations
ctttcatcctcaacccttcgagttcagctatgtagtttcaaactntaagagatatactccctccctgtttctgttttctgttcatgtatgagattatgccttgagttccaaataaaccacatgccacaacagtaaatcttacatngctcagaggtactcgttctgaanacccaggacaatacctaaagatgtgggtgatgtcttcttcctctcttcacatcaggacatgccgcgtatactacccgttatgtttaaatactagagaggattagtctagaatctcatatgtatgcttgtngcagagtgtaatcatactcgcgaaatcttaatagcatataataaa

SEQ ID NO: 248511 - DNA, 257 bp, Gossypium hirsutum
  unsure (1)..(257): unsure at all n locations
catacattaagtgcctttcttggaactctctcataccttacatnggctgtttccccttttgatagcattgctgtgtttngctgttaccgcatgtttccgttgctggatggtcaagattactggaatgctttatatacaggttgcaatgtcattcctattaagggaacagttctagtgccttttgtaattttggattgttaaaatgtctaaactatatggctcggatacgaagtgtcattctaatcacttactgggtt

SEQ ID NO: 248512 - DNA, 169 bp, Gossypium hirsutum
  unsure (1)..(169): unsure at all n locations
ggaagaaggaaaacagaacctaggctatatatgaatccaacataataaagtatatacatatatatatatactaatatcagggagtatactagtgtgattntattacgtgtttgcgtattgtatttaatgaaagattatccttataaaaccttaattactggaataattt

SEQ ID NO: 248513 - DNA, 266 bp, Gossypium hirsutum
catatggacaacctaaagttgctgcagccgccatcatgcagctatcgactgtttttcttgccatttctctactgttttgaagccgtcgaaaacctggccttcccctaacacgttttacccccttgttgtcgtatgttattgcttccgtaccgagtagctcgaaggtcttattgcggagtggtgtggcaaataccacttgtcttttggttctctcccttcaaagccaaacaaataatcttcacctttatttgaagtgtatctttttg

SEQ ID NO: 248514 - DNA, 406 bp, Gossypium hirsutum
  unsure (1)..(406): unsure at all n locations
atccggtcaccacgcgtcgccatgaacgggaagtgcaccctgctagctcaggaagttcatgcagttgaggaaatggtcatgagaatgtgcgggacatgctgcatcaactagaatatatatggaggttcgaaatggacaactgcaggaatggcgacaacccgtgttgatggctttggtggtgagcttcctaaacccgagttgtgatatcataaggccggatggtaaaaagaatagaagttgaaacaggaataaaggtaaacagaaacaacctttggaaacttaattttgtagttgaatctttcttgaacctaatgttgtgaaaattcccgatgaataagcaaattaactatgtgtttttttgcggggtgangatgatcctattcgacttcctgattactacaatgta

SEQ ID NO: 248515 - DNA, 337 bp, Gossypium hirsutum
  unsure (1)..(337): unsure at all n locations
ggttagggctctntattttctctgttcatcagtttctttttatctcnttcgaatttcattacagaccctgatcctaaactctcaatcatgtcnttccaagcaaggtggcaaagcanagctcttgaagcaacctaaatctgagaagaaagaatatgacgagcatgatttggctaccatcagaaaagaagaggagagaaggcctaagagctaaacaagcttacaaggacattgtgtctgtctaaaaggcaaatagttaaacactacactaagatttgatacaattcttgttgtatgaatgaatgagatattatgtaactgtatcactaaatattatgtt

SEQ ID NO: 248516 - DNA, 267 bp, Gossypium hirsutum
  unsure (1)..(267): unsure at all n locations
gctactcctttcattttgcactgaattcactntcctactcttcgatttagagctttcaatcaaaattgatctaagcataaatacccatctccgaatagatctgctggtttatcgcctcttgctttcgtctcttgtcaccagaaaaaactattcctcatagtccaaagcttacaacggaggtttcttgagagttctgattgagtcacattgctatgcataaacagtgagacaatgactcgatagtgacgcatgtaaatgtttgtctgg

SEQ ID NO: 248517 - DNA, 232 bp, Gossypium hirsutum
  unsure (1)..(232): unsure at all n locations
gcagttnttaccctagagttaaaaacacaggtgagggagggtcgttttgattaaaaatgtacagttaaattggaattggataaatagatatgcatgcagttggggggtgaaatgaacacanaaganatccacccattttgtctatttttggtcttaagatggtgggataaatagcttgtaatcactaaattataaaaaccctttttattttaatttaatatattctttgctg

SEQ ID NO: 248518 - DNA, 374 bp, Gossypium hirsutum
cagaaatccagaaacccaccctagcgcggcggcgttactttcaacaattgaggctaccctataaacataagtatgtcttcgtccattatgatcactaaacgagttttgtttatcaagtatctatttcttataaaaatccttaccctgatctaatataaaattgggaaataatcaaaataatatcgattggtctatgatctcaaaggctaacataataatctccttctgactcctcatatattttctactattttgtaaaaactcctggaagtctatctattggttactctacaaatttattgggttacccattaacaccccccccttagtataaactcataatggccacaccatcatttctactatattacata

SEQ ID NO: 248519 - DNA, 189 bp, Gossypium hirsutum
gacataggtgattgttaggccgcaacattaacaggatcaggaacgagacggcaactcctgtggagatggatgatcagctcgacattcgtcgttcagagcatggaagaactgaatcaaagagctagcaatcggaacaggtactaaacgtgtcatataggtaatgtaatttcgcagtagacaagctaattc

SEQ ID NO: 248520 - DNA, 233 bp, Gossypium hirsutum
tccggcgacacgcgtcgtagttgcagcggcttgtcactgtcgggtgaggttggaaaggaatttggagctcggaggacctgctgcactgaaggatatgaaaatcgtgctgataggcgagggatagaaggaaatgatctaataagtatgttgagggagctgcattgtaccaagatgttctttatgggtttgtattatgggacttactttaacttgtaaatttgacgataatgcag

SEQ ID NO: 248521 - DNA, 275 bp, Gossypium hirsutum
  unsure (1)..(275): unsure at all n locations
attcccgtcgaccacgcgtcgcactctcagctgattcactcgtgggttcttattaaccctcatcagctaggctgttatgattgattatgttcaattaaaaggtcgcatatctatgtaaggttgctagtggcaacgtcagctcaatttgatctgatgtatatatatatatatattctacagatgcccattttaacaaataaaactggnatatgtttaaactctactgntnggattatngcttagttctctgttngaacactggaaattctaaatct

SEQ ID NO: 248522 - DNA, 286 bp, Gossypium hirsutum
gatcaagcacagaagaagaggtcaagctcgctggctacattctacaggtggatgaatcggtaggttcagaggctgggaaagagtgccctaatgctgatgtgggctggaacttcatggctacattcgatggactatgcggagtggactactatttacagaggtgtgaataatggctcgcaaaatgatcttaggttcaattgttagttaaattagatgcgattgtaacatatttgtggtgaattttaactggctttattgattataaaaaaaaaaaaaagcgcgttaa

SEQ ID NO: 248523 - DNA, 305 bp, Gossypium hirsutum
  unsure (1)..(305): unsure at all n locations
tcgatgattgaagtgcanaatctcagtgaanactgcaccaaagtcagcttctcacccttcgaataaggcctctatggatagtcagtacgagttcacattcactgcttcatattcctatcaacaggcacaacatccatacatttggacactctgcagtgcttgtggtatcaagtaccagttctanttggattgtttgaacagattgttagattgcaagagatgtgggtcttccttcatcgcctntgacttgngtccttacggccactcttggagtcagttctccaatcagaaagagattccaaatg

SEQ ID NO: 248524 - DNA, 264 bp, Gossypium hirsutum
  unsure (1)..(264): unsure at all n locations
ggactcaggctctgcctggctccaccgatggtctcgtaggccaaagcactccagttcgcttacattgggtgggtaactcccagacccagtgccccggcaagtgcctggcgttcaccagccaatctcggaccaanacgcccttgatgcaccaaacacacggggtctgaggcatggcataaactgctgcctttgccggccgcacaaccttcgaaatggtcttcaagcaccgagacgtgaggttatcgtgtcgaatatgaagctatc

SEQ ID NO: 248525 - DNA, 171 bp, Gossypium hirsutum
aaccttcagaatatccgtttacttgagcctcctttttctgatcctgtgcaacttctaatgctactgtgtcaaggggttttttaaaaagtaaatggatctatctccttcactaactgccaaaaatcatatatgcatactttttaaaacataaaaaaaaaaaacaacccttct

SEQ ID NO: 248526 - DNA, 317 bp, Gossypium hirsutum
gggcgaaccacagcgagttgatttttaaatatagcacccccaacccactcaacaaactcatcttcatccccattaacaacattattgctggatctgcattaagaagcataaaaatcagttccaactttcacactgtatgcaaaacataaaaattacaaatctactcaattgactgagaagtacatcatcgtatttcatgaactaattcaaacttacacatggaaatttctagttctctttatattcaatatatatcaaattatttttgttttaacattttaataaaaatcttgttaaaaaataacacaatttatttt

SEQ ID NO: 248527 - DNA, 281 bp, Gossypium hirsutum
  unsure (1)..(281): unsure at all n locations
ccagtcttgatcctttacggncagaacccctgtgttgagggctactaaactcctgggggttattttggcaaagcaatcaatcctttggacctgctaaagggtaaccttgcaaaatggtaaatcgagttatggcaggatactacttcgcctggggggtgaacggggtatctctgatatttttgtcaaactgcagtgcggttatctgttgctgaaacttcactagtttaaccatcatataataaggtctagttcatacgttgcggcagaacaaagagttaaag

SEQ ID NO: 248528 - DNA, 404 bp, Gossypium hirsutum
caagcagcagcagcttgtgtcagagcatttatcaccagaatcacctcaaggagaaaattctaaacccgagactgaaaaagttgttaactcttcagggaaagatgttaaaaaagtagataccctcaggaatacacgaagaaaccagaaacagtctttcccgacgtggatgatgttgttgcttgtttccatctttggtattgtaatggcgttgccactgcttcaactttgatataggtgtcacaacatggaaaaaaaattgtagtgagtggttataacagtctctactttagggaatccttttaaatgctccaaaggtttgctctgtactagaaattatgtatagggggtttggttccttgggagggagggtcagtggatcttgactgatgtttctactatgttaa

SEQ ID NO: 248529 - DNA, 270 bp, Gossypium hirsutum
gattccccttttacttcttcaaataagtttataggcaccataaccatattagtgagaaatgtaattattgtattttatttctccattgttgttctcatatatgtatatatagtcgttagccatagtcatagatgatatgccatcaacgaggcctccaatcccccccccccaaagatttttgtattctgaagcaagagtaaaccatattcttattaacacttaatcaaatttcacgaggtagttttgtcctcgtagtagattgcaagaacc

SEQ ID NO: 248530 - DNA, 432 bp, Gossypium hirsutum
  unsure (1)..(432): unsure at all n locations
taagcgctgccattaagacgccatgtccggtttgcttgccatttttgcttgaaagatcaaaaccagccgttaagttcaatctgtggaaaaggagaatttttcttctgttatttcatgtaagcaaatgaatgccagtggttgaaaatcttataacatatatcacgaacatcggcaaaatggtttcttagcctcgaacccggagataactcgtacaccgggcaatattcttactctccacattgaagaaatttcttttctaattatgcatatccatatatgtaaccgagtatagagtcgtactttgttatgatctttgctgatcgtgaggtcaataattgcgaaaatgtactgaaaaagaaggtaaaaattccatgtatcatgatcaatgctncgcaagaatatgtaaacactgattagtaatatatgcttttt

SEQ ID NO: 248531 - DNA, 280 bp, Gossypium hirsutum
gcttatcaccttcaatttccaaattataatgtttgtgataagcacaagcagcaattgggaggggggcggacactttattattttatcatatcataacctataaataaaacaattaaaactcactggctctatgccttattttaaattccccactataaaaaacatagctgatatcttaaataatttttataaatacagtgattgctatactatcttttttaaaaaaaaaaaaaaagtgaggtcactctaaaagatccaaattttccaacccatacttaca

SEQ ID NO: 248532 - DNA, 247 bp, Gossypium hirsutum
gacccacgcgtccgaaataaaaaaaaaaaattaaaaatttaatttttttatcatttaaccaaaaacaaaaaaaaaggaggccgcgccatcttaaaaagccaatcctccaaacacgggcaggcaaagagaaaccaacactattttcttctcccacacccaatacactgacctcccttttaaaacctcatcactacaaaaaccaagccctttccaaaccaaacccctttgcacaacatccccaataccc

SEQ ID NO: 248533 - DNA, 243 bp, Gossypium hirsutum
  unsure (1)..(243): unsure at all n locations
aaaaaaaaaaaaaaaaataaaaatttaaaataaaaaaaaaaggaccaacaagcacgagagagccaaacataaaaacgcgaccatccaaaataccaanctctataacaataaaaaataaatgccattcacgccccttatacatacaacacctcaactggaaaaaccatatcttaacccaacttaattgatacaaagaacatcaatctttcgccagcaaaaaaaaaaacaaaaagccgcccccct

SEQ ID NO: 248534 - DNA, 274 bp, Gossypium hirsutum
cttaaatatttcagaggccaatgttaattttcttgtatatgatcaatggactggaaggaaaagactgtacaggtaattttacattctttttaaagatgaataccatagccaaaattaagtgtttcataggagaatattggtttcctctattaaattacttgaatagtttagctaatgctagggtaactgataaattgcacaatcattgatgttaataggctgtcagccctatttttgtttttatactatctttggcattccactttcatgcttt

SEQ ID NO: 248535 - DNA, 273 bp, Gossypium hirsutum
acatcccacctgaactcacggggagggtggcttttaaaagcaattccccccccattccaaaccaacttattcactgcaaaaaccctgtttacacccaacttaattgcctcacaaatcaccattcattcaatagatagaaaattaacaaacatgcaaatacctatttcccttataaacacttccataatcttaatgccgaaagagccgcccattgaagagtttcacaatgcacaccagataatctattaacccccactaaaacagtttcactag

SEQ ID NO: 248536 - DNA, 119 bp, Gossypium hirsutum
tgccaatcccttcgcgtgctatacaaaggccgacatccccttcacagtccacctgagcaaggacccctgacggcattaaccgcgtgtgggtacccactgccgtcactgccagccctacg

SEQ ID NO: 248537 - DNA, 275 bp, Gossypium hirsutum
aaatatttatgcattaggcgggaaatgagagagattccatgatatggttgaggaaatcgaaagagcttggataataaagatgatggaaagcaagtgtttcggagttctgcacatgatgaaaagcagccataaagcttggatattggtgcttaaaagtaaatcatatatgcagctgagcacacaaggtaaggtatttgtagaggaagatctaaatatataattgaaagttacaaagttgatagtttgtctgatactattctctgactttatctgca

SEQ ID NO: 248538 - DNA, 211 bp, Gossypium hirsutum
aacttaaaacttaagggtgaataacaatttccgatcacacctgtttgtgaggggatttgttccacatttttttaccagacgccttctacgttggccttgtttggtcttggtgcaaatggtgtgcgtgtttttaatgcctgtatatattccatttcattttgatttttatattcagtgttttccggataccattacataaaagtttttatga

SEQ ID NO: 248539 - DNA, 241 bp, Gossypium hirsutum
  unsure (1)..(241): unsure at all n locations
ggggccgacccacgcgggcgatatttcgactaattcttcaaatttattataataaccccgacgactccngaaccgagcggctgaattatcactctcactctcatcacacgagcatctgctttctcttttggactcattaatagtaacattaaactcaagtttcttaaggccaaagcaaagtctcaaatgaaagctcaagcaaaggcttaccactgaatcaagggagatttttgatcataat

SEQ ID NO: 248540 - DNA, 350 bp, Gossypium hirsutum
  unsure (1)..(350): unsure at all n locations
gcaaacccgaacgagttcttgagcttagattgagcttggacagtcatccagataatacaaggatgaaaaacaagttttagaaatgccttcaattgccggctagaatgatgatgtttttgtaatcaactttggccgaccatcaccagcacgacccagcgagtatcggaactccgaggccaggatgtacaatgatgtcatggaaactttcttggaatgaaatgtattangattgtggaagaggacataggtgtgttcttttttatgttcttttatgaatgtctcttaaagccactaaactcaactttctaatcatttgttgtagtttatccttaatgtaagtcctttttaaa

SEQ ID NO: 248541 - DNA, 296 bp, Gossypium hirsutum
  unsure (1)..(296): unsure at all n locations
cgggattaaatattctgctctatcntggttacatatattccttcttaacccctcctcttctccatatgttaattagttccttcataaatattctactattattggaatgtaattccacttaataaagtgtgtgaatttgtatggtatcttttttactttctttcaactttgcatctatttagtaaatattaataaggttaaattttgttattagcccctaaaaaaaaaaaaaagataaaaaaaaaagacataagagagtaatattttatgatattatataaataaaaaatgggggc

SEQ ID NO: 248542 - DNA, 355 bp, Gossypium hirsutum
acgccttcggattgattattacccgagattggaaccttgacaggttccgaccctcttaattcagggctctctgacatgtacagattttgatctggaagattgaaattcctttttttttttttgggtgagagaatgaactgtattacggcttttttttcttagctattctttttcttggtagcgaaataagagtgaattcggaatgaggggtaggttcatatagctgatgatcgattgagtcaataacacgccgccgccacgttttgtcgttgagacatctttgtttcacatctcgagctggagaagccattgcttctcgtcgatattccaagcacggtatcgatgtacgagaact

SEQ ID NO: 248543 - DNA, 215 bp, Gossypium hirsutum
tgcctgcaacaccggagggggtatattgttccacatccattcctttcactgcccgaagaatgacaacaacgtgactatgaaaacccgtgcgttccttaactgaatcgccaaggatcacaatcacattgctccagctggcaataacatcaaaattctatcaccaaccgcacttctcatcaaccacacatgccaaatgacgaacaagactctcacaa

SEQ ID NO: 248544 - DNA, 275 bp, Gossypium hirsutum
tccggggtcgaccaagccgtcggttcaaacctccttccttccttcctcctccttcttcctcagccaagaaaacgaaaaaggaaagggctcccacaccatctttttcttcgaaattaagccaaacccatatgagaacaccccaatcgaagcagcgtttaaacttctcgtcaacacgaaacaacccccaacacccatctcctaacccaaactccattgcagccaaagaaaacccaccaggggaacacccagttgaagtcatcggcagaataagaaac

SEQ ID NO: 248545 - DNA, 309 bp, Gossypium hirsutum
ttccaatctcagataaaagagccaatatttgggaagaaatctcgctcggagtttgcacttctatggaacaaagctgtggaccagatatttgtgccggtaattgagtccattagttcacttcgatggtagaaatttggagtaattttaaagtcaactattgatgcgtctattactacaaatcattgcgtgcattagcttgtactcagctgtatctctctaaatcttttgaacttaaaaaggaggaatgtatcctggggctatgctatgttgtattacataacataaaataatggtaaattctactttcat

SEQ ID NO: 248546 - DNA, 254 bp, Gossypium hirsutum
  unsure (1)..(254): unsure at all n locations
cgacccacgcgtacgntccaaacttacaaaaaaaagcctttatgtgggaagaaaccnagcacgnaggcgcggccgcgatcttacaaacctgcgcaccacatcaccgtaccgacaaatgactccatgatgtcagcatgacggtagaaataagaagtaatagcaaagccaacgaccgaagcgcccaatacgacacatcagcgcaagcaccaactggtgctcagcaaaataactcgaaagccttcgaacgtaaacag

SEQ ID NO: 248547 - DNA, 271 bp, Gossypium hirsutum
  unsure (1)..(271): unsure at all n locations
ntccaatcttatataaattaacttttttttggtaagaaatctaactcggagtgcgcaccgctatttatacaaacctgcccaccacatctctgtgccggtaattgactccattacttcactttgatggtacaaatttcaaattatttcaacgtcaactatttatgcaactattactacacatcataccgttcattagcatcgtctcaactatatctttttaacatctttcaacttataaaggaaaaatcgatccataggctatactattata

SEQ ID NO: 248548 - DNA, 282 bp, Gossypium hirsutum
gcaggttctaaatccggccgatggggccatcagcggcgccgccgtgcccctcaccgtcctcggtgatcggagcaacgcaaaggtcgtccctttggtccgtttttgaaacgcttgaaggcctaaactcctaggcttcaaggccgaaaggagaagaagaagccatgccctgtcccgtcccgatttcggcgaccgaacaaggctccggcgacgggctttgcgggcgacctccggtggtctgacacgcgtggagggccagcgattggcgatcaacttgggtgggca

SEQ ID NO: 248549 - DNA, 140 bp, Gossypium hirsutum
gtccgctcagattctatttaaaccgagttgtgattttgtttcgattttcatgtttggaaactcttcgttggcccctgttaaaaaccaagattctggtctttttgattgaatggtaatttatggatattttgcatttcttg

SEQ ID NO: 248550 - DNA, 268 bp, Gossypium hirsutum
gtttgattgaatattaaaacacataaatattgcatacagaaacaattactacatggcgaagggctaaaactataattattgatctcaacatgaaaatttcataccatttatgctattaaggataaacagaacattaaaactataaacatgaagactataataactaatgatttaaatgcttacactttcattgttgactcaacatacttatcctccattgcttaacatattataggacgtatgaacatgccccgagaagtaatgaacc

SEQ ID NO: 248551 - DNA, 287 bp, Gossypium hirsutum
  unsure (1)..(287): unsure at all n locations
ccaaagatctggtacaatattncctttatatgactctcctccnnacaacctccacccgcccgcttcattatcattacacactcacccatacactctnaacaaactcccaagcagcattaaagtaaaactctatcattacttatcgaaaaatctattactaaaaacatcccccatacattcatcgactctacatattactcaaatgaacatctaacatccataaccatattcaactctacattttactctcaactaaatatagatctggttattcttcttcaatttac

SEQ ID NO: 248552 - DNA, 236 bp, Gossypium hirsutum
  unsure (1)..(236): unsure at all n locations
ataaaaaccaaanannncaaaccgggcgactgttttattaaaactcccgacccattttatacattnncttaaaccttccanaaaattnatccttctttanntttcaatatttaattnaaatttcataaccatatnttttaccaacaaaaccatctcatccatntcctccaantcatcttncaccttttatctcattattcttaacataaccccataatcttctctaactttcaccc

SEQ ID NO: 248553 - DNA, 389 bp, Gossypium hirsutum
gtcaaaaggtgccaaggcaacactaaatgctcagattctcgacctaccagctcctggtaggttcgacaggtgaaatggagtggtggcgataaactgacacttaatttgccaattagtataagaactgagcaaattaaagatgaccgacctgagtatgcatccgtgcgggcaatactttatggcccatacctgctcagcggttatagcagcggtgactgggacataaaaaccggctcaacaggttcagatgcggactggatttctccagttcctgcttcttataacaatcatcttgttactttttcccaagagtctggtgaatcaacttttgtcttaacaaacatgaaccaatctatccgaatggagaagtttcctaaagctggaactga

SEQ ID NO: 248554 - DNA, 288 bp, Gossypium hirsutum
agccttcgggggaaaggaatgggaggggctgatttcctttgttgtggttgcaccacggtggcgatcttgctggaaaaggttaaaacctaaaatccgaaatacaaatcatagattatatggtggctgttcgaaacattttcaaatatttattatattccaataactataactgaatgggtgtaattaattaaaagttatattatttgattttttgaaaaaaattataactatttaaataattatatttgaatagttataatattaaatgaataattatgtgtttatttt

SEQ ID NO: 248555 - DNA, 381 bp, Gossypium hirsutum
agcgagctgtggaggaagaatgggcatctatgcagcgagagttaaaaattcaggctgaacgcgctcaaagattgcgaaaaaggaaaaaagctgaaagtatgcgtgtattggatatggagagacggcaaaagcaacgtctggatgaaatgagagagacacaaaagaaggatgaggaaaatatgaacctaaaggaacaactaagaatggaagtaaggaaggagcttagtaaattggaaatttcatgcatcgatatggcctcattgcttcgtagcttgggaatccctgttgatggtggttcttatcccttgtccaatgagattcacgcagcttataaaagagccttgctaagatttcatcctgaccgagcatcttaaactgata

SEQ ID NO: 248556 - DNA, 309 bp, Gossypium hirsutum
  unsure (1)..(309): unsure at all n locations
ccgggcccgacccacgcgntccgaaaaaaaaaaaaaaaaaataaaaaataaaataaaaaaaaaaaaacaaaaaaaaacttccccgcccaccttttaaaaacaacaacacaccacccaaacccacactcatatntactactccaacttcaattacatcatccattcaatcattaacatccatactactctgatcaccatccacaactcaccttcatattaaattctcctttctctatttctctaaatattaaaaaattcctctctaatccctcctcccatctattacatacactttaccacaataccatc

SEQ ID NO: 248557 - DNA, 358 bp, Gossypium hirsutum
gttgaatggtggcattgcttaaagaaaattttgagtgccagaagattgacatacttttttaggctgaattgaatgtgacatttcctagacccctaagtacacatgtaaacattttttttaattagagttttgtcaacagtaaaaaaggcccttacatctctaagctccccctccccctcccttaagaggaatatattgtgtcctcatttttcgaagctgcacaaggtcaaaggtgaaagtatcatgataaccaagcattaacggtgtagcttttctttggtactgctgtctgactcacatttctctttgaaatccttgggttgaattttatcctgcaggttgattatgcatgcacact

SEQ ID NO: 248558 - DNA, 222 bp, Gossypium hirsutum
gtaatgaactctgtactgtccttattgacttgatgttttcaaacatcaacaaaaacaccgtgagggagtctttcatgtgctacatacatttgtctacgaactctgcgaaacgttacgttatacataacatcacattcattgtgctgatcttaagcccattatccacaatagagacattttactgttgtatgacttgaaacaattctactaatacaattcatt

SEQ ID NO: 248559 - DNA, 286 bp, Gossypium hirsutum
  unsure (1)..(286): unsure at all n locations
gcacagtggaacaagaaatggttgaagtaggtggggcataaatgggatctactcaacctaggccaagttgataagatggatgaatgggatatcttcttatatacagtgaatacttggccttaaaagacaatgtgatgatgttgagtttgttatttgatgttgaaaattttaaggaatctcgggttttagtaaccccaacatttgaaatattcagtgttcatgtgtagggtcatttggcttgggaaatttggtaagaggggggnccagnnncaattnanttttattt

SEQ ID NO: 248560 - DNA, 406 bp, Gossypium hirsutum
ctcaaaccaaaaatctttgtcctctttttttgtgtctctttcaaattttcatttcaaggtttttggtatgaggagatacagtcctcaatactatagtccaccaaggagaggttacggaggcagagaaaggagtcccccaaggaggggctatggtggtggtggtggtggtagtggtggcggcggcggcggtggaggagggtatgggagaaggagggagcagaataatggaagccttttggttagaaacattcctttggattgcagacctgaagaacttcgaattccattcgagagattcggacttgttcgagatgtgtatattccgaaagattactatacaggggggtatattggtttgaagtaaaaaacaagccgaagccccacatttgatgaatccgaggatttt

SEQ ID NO: 248561 - DNA, 337 bp, Gossypium hirsutum
  unsure (1)..(337): unsure at all n locations
caagcgtacgcttagaccaaaaatctttttcctctttttttttttttcttccaaaaatccatttcccgaagatagtttttattaaattcaatcccccatcccattntccaccaatgataagtttccgaagcaaaaaaaagaatccccccaaaaatgactatcaatccaagagcaacaatcaatcatttcaattgctccttttccataccatcttcaataacaacacaaccttattctccaacacttatatgttcaaaccttcctttctattaaataccaaacatacttttcatcccattcaacatattcgaactcctttcaaaatacatttttttca

SEQ ID NO: 248562 - DNA, 392 bp, Gossypium hirsutum
gacaacttttatccccttttccattactatttatactttctcaaccccaacccttaaacgcccaaatgtgtaaccctatatcattctctgcacaacttttcttaatccacaacctttagctgctctatgctattccatcacggatccaaataacttttcaacatgtacagttccatttcactgccccccctcttactgatcctgttacttcaactgaaattgcaaattttgatagtcatactgttaacagaagcctgcaactagaaagacaatgagcatgtcaatattctcatttcagtgactgtgcttctattagcaacaattatgaaaaatttataggtgcgttcagttcgccgttacaattgagaaaagactgatatctctagagtctt

SEQ ID NO: 248563 - DNA, 225 bp, Gossypium hirsutum
acccaacggccgcaaaatcccaccacaatccaatcgattttgtttctacaattacctcatctaagaaagttttttttttcttactcaaacacccacattttcactctctacaccatataagtgtcccttatctctcttatatttaatctcttatcccacaaccatctaggatcctatacccaacttttactcacattcccacacaagaactcaaactacaataaa

SEQ ID NO: 248564 - DNA, 240 bp, Gossypium hirsutum
caaaatattatcacctattatctaccctttttattatcccacacccaaaactgtatacgcaaatgtgtacatttaaacccttctatccaaatctattaaacccatacaaaacaacaacctttacacaaaatccacttactaaacaatccacataaaatcccttcttctttttattaaaaaaaataaaattccaaaataccctcaattcttaacaagacaactttattattacaaaatctt

SEQ ID NO: 248565 - DNA, 402 bp, Gossypium hirsutum
gcaaaatcccacgacaggccagataggatgattggctcgtccagtttacctgaaactgggagctgtcatcttcatggctagactgaaatatttcacattttctgttctctactcccagttaaggtgtcgtgttatctctcttatattttaatctgctaatagtgtcaaccatcttgggtcctcggagccaaaggttcagtcacattcccacagaagagctgaaaagacaataaaatcttttgctgcacgcattgtccaagagaaataatcttgtttgggtggttttcgattgacacgtcaatgctgccaagaataaggtggaaatcatgaatttgccgacatgaaaatagattccccaaggaagcactcatctattcatatcgttaaacgagaatatttctg

SEQ ID NO: 248566 - DNA, 404 bp, Gossypium hirsutum
tatttttcttctttctcttgtttccttttctcttcctcctttattgtcctttataacaaaccgctgccgctgccgctgcctctgcctctgcctccacaccttccagcgtcttgccttcgattgaaggtcagcttccttcccatcaaccttttcctgtcattcttttttagctttgggtatccacaggccaaacaaacacacgctacaggaggaagagagttttcgtgagagagaaaccctaaattttctctggcgtttctggtttttgtgatttttgaaatccgctgcttcatcggagactcatttcaggatttaagaacagatatatggttatggaagtactgttggatccaaataaagaaatgtcaggggatgattccattgtaattactcaatttaacatc

SEQ ID NO: 248567 - DNA, 322 bp, Gossypium hirsutum
gtgaagtgttcggatcgcggcgacgtgggcttttcgttgcccgcgacgtcgcgagaagtcgggtgaagcttatcatttagagggagagagagcgagagagagagagggagagagtttgactagaaaaaggaaccatacaacgggatggcttgtttttactaaaatttattgatgatttgtggttagatggttagattttgattttggtaggagtttgtgtgtggggtggatggaaagtttcggtggaagacaaatgacgtcagtgcttgaactaaaccaaatggggcttgaatagggaaatgatgattgattggaagatcat

SEQ ID NO: 248568 - DNA, 294 bp, Gossypium hirsutum
  unsure (1)..(294): unsure at all n locations
gaccatgaactagaattgttggcctcttatttagcaaatataattcaagtgangagcaaagaagaaaagaaaaagaagaaattagtgttgatgagaactttaaagcaccttttttttagtgtggctgaacaaaggcgttcaagccccatttttattgtatcttcatttttgttgcaatgttaataatagtaaaaaaaaaaatataaactatcaaactncnnaaaaaaaaaaaaaaaaaaaaaaataaaaaaaaaaaaaaaaaaaaaaaaaaaaaaaaaaaaaaaaagataaaaa

SEQ ID NO: 248569 - DNA, 320 bp, Gossypium hirsutum
ctctagcattttgactgcatgccttggtaccactccttccaggtaaaatcctctcatttgctgtagactttcaatggctatgatgtctgccaaagtgtttgctatttgatggacatgttgaaattttacgtcttcataacatgtgcatgtgcctctactgcgaaagtcaaattaacattctcgtgtatgatcgctctaaaggcaatcactcttccttttctgtttctggcaactatccccgagcttgatctaaaaagatcttgattaaaccctgcgtcaaattaatttttatgtcttctcagcaattggacccatgagtc

SEQ ID NO: 248570 - DNA, 300 bp, Gossypium hirsutum
aagaaatgcttccaaccggataagttgttttctcactcgagctaccctcccacttcttattgttcacaatacaggaagactgccgccacctattattttaatctcttatctactcacactgctaaagatccaacttttggtcacttcaagtacccaaaacatactctttgattaataccctatccccaatttaatcccactcttatttatttgtctctatacacacctaacaattattcttctgttaccaaaaactttcaaatattgtatcatgaataattaccatatcttcctaattta

SEQ ID NO: 248571 - DNA, 393 bp, Gossypium hirsutum
gaatcatataccacaaaatcttcgcactttttcctcaatgtgaaacttgcggtcatgctggaggagggaccttattatcctggatttatgtgagattctcattgactactaggctgcggtcccatgaatgtagacactcctgtactatcaatccacccttaaagaaaagaaacggtgctacctacttgtaacgcacataataattgaatatggtgttggggtgtacaaatcaaaaaccatcctgattgacgacactggtagacaagaccattgccaatgctaatgctatgtgacatgatcaacaggtgcatgtaactgatcctaaactcactcacagccacgagatctttgcttctttaccaccgatactaaccaaatatcttatgccatatt

SEQ ID NO: 248572 - DNA, 273 bp, Gossypium hirsutum
attttaaacagcgactccaacatcattctgtataagcttaaacccctctttcaattttccatcgcacaggcatatgaacgtatataccagatccagatattcaacgtcttaagataattcgtgaaggaatatatggaatattatgcctaccctgaaattattttcataatttgcttaaaaaatttaattgggatttttattattcaaaacactttttttttttttttttggaattttaaacctaaaaatttattaaaccaattcttttacttt

SEQ ID NO: 248573 - DNA, 319 bp, Gossypium hirsutum
  unsure (1)..(319): unsure at all n locations
gaaactaggctgttcaatttaagctatacagaagtgattgaggaagtgatctagagcaagaatgggaacttcaatcaagcacggggagcaacaaaccatagcagccctggacgctggtctttctattgatgaccaggctcattcaagtgttattatgggcatcattgatgtgtgtgttctttgttcctctattgtatattttacctgtgacacagttttctggaatggtggttgttcctttgaataaaaaaatagtttatttcttatagtaaaaaacaaagacnagagctacgacacgatcgacaacgttaaagaaaat

SEQ ID NO: 248574 - DNA, 269 bp, Gossypium hirsutum
ggtttattagttctgaggaaacttgtttgtgtcaaatcgttggacttgtttgggtttgctttttgacccttggctttattttcaatgaagttttggttgctgatagttaatttttttgtttatgtattaatatattagattctataaaagaagtatgcacatttcttttcaaaaaaaaaaaaaaaaaaaaaaaaaaaaaaaaaaaaaaaaaaaaaaaaaaaaaaaaaataaaaaaaaaaaaaaaagaaaaaaaaaaaaaaattaaatgg

SEQ ID NO: 248575 - DNA, 389 bp, Gossypium hirsutum
accaatttggcgcaagttcatgcagcagaaaatgcaaagagctttgatgaaattgagttagagacgatgctccgcaagaaatttgcacgccgtgatgaggaatatgattcaatgcttggggttgttcgtgagacacctcctgagcttatccttcctgataacattataccagataaagcgccaaaagctgcttaggagtggtaattcaatttttttttttgagattcaatgttactggatattttgtaatcagctgagaatggctgcattttagctgcaataattttggtggtgctggctgaggtgttgaaaagtgaattatagagcacacttattcgctaaccttatcatccgtttgggtattagaagtcgaacttcattttgcaact

SEQ ID NO: 248576 - DNA, 372 bp, Gossypium hirsutum
gctgctgttactagttcttcttaagaggggttcatggcaattatgaacggcttgtgatcagattcattaattaagtaagatgggttcggtttgcttgctgctttagctgattcttcaggttacagaattttgtagctggattttaatctttaaaccttgaagctgttttataactgtattaatgtcatataaaacataaatcttttagcttgagagtactgtctttaattgaccatatggcaagaactgaatttatataaaaagcaaaagaacggtctctaatcacccttttcttgaaaaaacgtgtgcttcaccaataagtggttcttgtgtaatagacaatgaaaaatgacttggggcttatgataaggg

SEQ ID NO: 248577 - DNA, 286 bp, Gossypium hirsutum
gcaaacgataaggagtcccaatcagaccggttagaagctaatccaaaagtcaccgtggatgagttaattattggacctactgctattcaaaggaaaacgaagtttcttggtttttgtactaacaatactttcctggttgtgtagtctgccaataaaaattctatcagaaatcgttgcgttgggtgtttttgattgttttttgtgaattcaattcgcttgaaataaagatgaattaaatcgtccatgttatgagcaacagcatttggcctttaggagctggttttgg

SEQ ID NO: 248578 - DNA, 355 bp, Gossypium hirsutum
  unsure (1)..(355): unsure at all n locations
atttaatttttcttctccaattataaaaaaaaaaaatcatattttgcttcttgcatgttcgatgtaccatgtcttctctaaatgtattgttttatatatagtcaatgaattttggccttttcttatgcctaaaatgttggtttcatatccaagtttcagctgattctttacttgttcaaatgcttattatatgattatgaatgtttgaggattgaatactactcaaactcatgttgtaatttttgtattagaaattaaattatattttattttacaaaantnaaaaaaaaaaaaaaaaaaaaaaaaaaaaaaaaaaaaaaaaaaaaaaaaaaaaaaaaaaaaaaaannnnnnnna

SEQ ID NO: 248579 - DNA, 393 bp, Gossypium hirsutum
gaggaggtggagagagaagaagctggatttcagtggcggagaacggcgtcgctcgcggtggaggaagagtgtgaaattggcggggctgatggtggtggtagatcggacagtggtgatgataacgaatggagctcgtgggattcgaataacggaaacgatagtaccgagttgtattatcagaaaatgatcgaggctaatcctggaaattcacttctcctcagcaattacgctagattcttaaaagaggttcgtgaggaccttgctgcacttgagaaggattatgaagaagtcggtgctgagtcaggcgagggtgatgaggaagatgaagatgagtactaaataagtaatgtttgagtggagggcttgcattttgctacccaatgatttgtttgc

SEQ ID NO: 248580 - DNA, 366 bp, Gossypium hirsutum
atttgaaatgccattcccatgccttaatagtagtctaataaagatgttcgacacgaacacgtgaaagtcagagaaacttagttcaccatgtactaataaccaaaatggctggtcattttaatgatccttcgcttataacacattgtttattgacctctcaaaaaaaaaaaaaaaaaaagaaaacaaaaatagaaaaaaaaaaaaaatatataaaaataaaaaaataaaaaaaaaaataaaaaataataaatataaaaaaaaaaacaaggggggggccattttagaggatccaattttacttacccggctgtggaattaaatagtttttttttggtggaccttaaatttatttcactgtccggaggt

SEQ ID NO: 248581 - DNA, 233 bp, Gossypium hirsutum
aaaaaaaaaaaaaaaaaaaaaaaaaaaaaaattaaaatttaaaaaaaggtaaaaaataaaaggggaaggggaaattaataacgcatgcatgcaaaataatatactgtttcataaaatccaattaatttcaatgaaatgtcatgacgtttttcaacgtgaaagactgtaaaaaccgcgggggtttccaaaattaatggtcttacatcgtttccccttttcgacatatggctttt

SEQ ID NO: 248582 - DNA, 230 bp, Gossypium hirsutum
tcgggcaaagttttagggttttgcctttaaaatttaacataggattttgtattttacggcaaagagttacctgggagtaagaatcttgcattgggacacagccctttagagggctacttatggtgccaacttggcagaatatgattcttctgtgctattggatttatgaaaaagaatattttcggatgatgtgaaaaagacaaaaaaaaagtcctgcgttctaaaagagg

SEQ ID NO: 248583 - DNA, 408 bp, Gossypium hirsutum
aatccctccctctaggtcaaaagccgcatcaaaatagatagccaccttcgccctctacatgttctgtatgggtctcgtttttgcttccaagataagtactttgtcctctataccatccaactctgaaatgtaactggtaacttgttttgagatatcttgactggtgcttgatttgccttcatagattaacttgtttctatttgtccatattaaccagagtccgcaacaaaagattctacattgctcattcgtcccttgattgaaaaccaaagtaagccaagtccaaaaatctggattgctattattaagaacccatgagaagtttaaatgtctccacacttccttcgttgtagggtacaatcagaagacatggttactgtctccttcaccttgatggcatctaataca

SEQ ID NO: 248584 - DNA, 191 bp, Gossypium hirsutum
cgtgattcctatgagttgggtgttttacatatggacaatcaagtttttgcataaatggatctggagggttccaggaaaatgtctttaagatgtaaggtttgggattttaaatctagatttggatttccagattctttgtattactcaaattgaggatattttgaattaatggagttttcatatttagatct

SEQ ID NO: 248585 - DNA, 404 bp, Gossypium hirsutum
gcaagacgaacagacctttcaactgatattttgatccacctaaagcaaacaaatgtgggagtgatttattacaagatattagcctctaaagaatgcaatgagacacgatgatgcttatccatcatttccgcatttgaatgatgaataccaacatgcactaccatctgatctcttgcatgtttctcttgaaaaattgtggtcaattttcagtgattataactgattctagtgttctttttgggcgggaattttctgcaatctatgatggaaatgaatcatcagacctgatctacctgtgatgattatataaataatcaccatctttcgactgagaatgcacatattctctaaaaaaggttcctttatgctaacattgatttagtacgtcaagcattcatgtattt

SEQ ID NO: 248586 - DNA, 419 bp, Gossypium hirsutum
gaagtgtaaaaaccaatatcatgagggaagtcccttcgtgtctttcgagtttggcatttcaagttttgaagtcttcgggccttttgcagtcaccaaagaatggggttagctctcttattgatgcagcccttgccccacctgaagcctctggggtatacttttttggtggaaagggtaggactgtggattcatcagtgctatcacacaataccaaacttgcaaaagaactttgggacatatctgataatttgttcatggaagcaagccttgctttcaaagaaacagctagctccgagtcagataattggttgtaaaatgaaggaagtcaagaccatgagaaagaaatgtgaaggtgatttccaggaaaaagatttccccctcgtctacttcgactgatatttgaaccagaaaacatactt

SEQ ID NO: 248587 - DNA, 139 bp, Gossypium hirsutum
ctttctttatttcttccttagatccattttttctactgttgtagtgttgggctatatgtgtaatgctttgtcacgtggaactgctgggttatatatataatattgatttgtgacactttgttgtggttcataaaacaaa

SEQ ID NO: 248588 - DNA, 274 bp, Gossypium hirsutum
  unsure (1)..(274): unsure at all n locations
tatttagaagagaagtttagtcagaattcaaattaagaggtattggaagaaattcaaactcgaaaagagtanncctaccgtaggcattgaatagagaactttggtgagtcaaatttgtagtagtaatagtatgaagttggcatatagttaatcacttcagagattaaagagagactttgaagtaatntgggattggcgtcgagtcttctccttgatgaaatttgacgccattcctgtaccaaaggttttgagtgctattgtgccaaaaaacaaa

SEQ ID NO: 248589 - DNA, 421 bp, Gossypium hirsutum
cttaagcactgtctgcctctatcaatagtgacgaacagattcgggcttcaagggacaacaagctcgaccacgagattccttctacgctccgatttcaacgaagaatacggaatctcttagcacattgcaaggtacaaacggagccaactagaggtggtgacacacatgggatgaggcgtgaagatgcatgtggggctgacccggagacaacagtagtgctggaggctactggaagttgctgcagcgcaggtgacctagggcttccaccgaaaattccataggtgttttgggcctggggtattttgggttatttgggttaattgggttaggtttaatttaggtttgggcttgtaatgggtttatttgtaaaatggaatataatttagactataatttgtataaagactgtatttggactttg

SEQ ID NO: 248590 - DNA, 423 bp, Gossypium hirsutum
  unsure (1)..(423): unsure at all n locations
aaatatttccttctacatctcttgagcagtttgcctaactaggtagaaaagatgctggaaatcatggtgatccatatgactctgggaatgatgacattaatgaccacagtgatgatgaaaatgatggtcnnnnaatgaaaatgaagatagagaggatgatgaagatgacaaagaagaaccaagtgcataactgcgaagactgaataacttatgcaggataaggaatctgtgcgtaccccagaatctttaatagttttcgtcgacctctgctctagactagtttccagttatatgttttgcgatggtcgtatcttttaaccattctttttggtcgtaagctttgatggaaacacatgcccttaccctacagcttgtggtaaagatgttctgttggcttaacaagttcttacaattgtcttaaga

SEQ ID NO: 248591 - DNA, 369 bp, Gossypium hirsutum
cccgattcaacgacgagcatccggtgctacctctattaacatccccagcaacctcctcagggggaggatgcgtgagggtgaaattcggcagatccacctgttgacgaatcgagggatttgtttgcctcaccgagatggccgccatcgcaacattttcgccgtggcttaaaaaaaaccaagatatgagaacaaaaatgtgagaggagagagggagatgataaaattaagtaacaaccttggaatagtgtgggtagtgttggatctgtaaatagaaaatttaaaatgagattgatgggtgttaaattggtgggtctttgatgattttgggatggggatttcctttgcgtaaaagaactagaggggagcaaa

SEQ ID NO: 248592 - DNA, 343 bp, Gossypium hirsutum
cccactcttagattcgtgggaattgtgttgttgactcctaggaatctcacaaaaagttacccgatttactagatgagtattgatctcagatccggatgtgaggccttttggattgttttttgttttgtttttgttgtgttaggtttggaataaattctggcttcatattgaaaaacaccatatataaaaaattatgatactgcagtgaatacttggtttgaactttcagattattttgaagtgacttgaaaagggcgcataacatatttggcatatatatatgtatctatttgttgagatcttaaatgaagaaaaaatttaagaatgtcattgatgagctcaa

SEQ ID NO: 248593 - DNA, 377 bp, Gossypium hirsutum
gtcttattaccaaaggttttttaaccacttttgttttcgtcctaagctccctcccatggagtgggagctcctgttgcaccttaatgatcatcataatcaccatcaaattcttccggttccaagaaaccctttcttctccttctagatccttctccgtgcggaaacaagcgagcttcacagtggtcagatctgatggaagtgtaaacttcgatcttaattccaaaggttgaagagctcaacaattgattgctaatgcagttgcagtaatgattttctttttcttttttttttatttatcgtttgaattttaattagttttttttatgctaaatttgattgtatttttgtttatttcttttagactaaagctgatagct

SEQ ID NO: 248594 - DNA, 316 bp, Gossypium hirsutum
agctcagaggtatctttgtgtataggcgttgcttcatcattcctttttcatttcattcttcattgtcgccattaaaggtggccaagttgagagtgaccctgtccatggtccatttcgttgcagggtcctcgactccctttgtattatagtatatataggttttctaaattttcacaatcttttttctttttccttctgttagcaattttacaatatatataaaatataaaatatatatttatattaaaaaaaaaaaaaaaaaaaaaaaaaaaaaaaaaaaaaaaaaaaaaagaaaaaaaaataaagaataaaattt

SEQ ID NO: 248595 - DNA, 229 bp, Gossypium hirsutum
aaaaaaaaaaaaaaaaaaaaaaaaaaattatttaaaaaaaaagacaaccgctctcgatgaggggggcttaagttcacgtgcgtgcgcctacaataactcttctttttttttaccgtaaacctaattcaattcacgtgcgctttacaacgacaacgattgggaaaaccataaccttacccatccttatcttaatcggagttcatccccttttcgccttctgccgttatag

SEQ ID NO: 248596 - DNA, 247 bp, Gossypium hirsutum
gatttggcctgagcctggagggcacatgcatttgactgctcctgattacgccgagccttccgtgaagattggagtgtcggaggtggatctggttgcgttgtcgatcttacatgtggctgctgacaagagatcgaacgcatggcgtcgcaagttggggaaaacttgatgaactgtatgcactagctctgtggagtcgatggggctaacgtggttgtccctctggacattccgtatagtatggttaaga

SEQ ID NO: 248597 - DNA, 300 bp, Gossypium hirsutum
  unsure (1)..(300): unsure at all n locations
ggaaaattgctggaggcatgagatgggacatctatgatgaatgatcacgaggatcggcccctcgggccagagaagattctaggtgcagataaacagcactggggtggtaggctcaaaggaaacagnncatncaggctgaataagccaccatcaacaggtcgaggggatcaaggtaaaacttaattgctgaggtgaaaatctcggactgatgatgaagttggttcagactgaaggactagagagatgcgatcatcaaccctgacaaagataccgaagctgctacattgggttattcactat

SEQ ID NO: 248598 - DNA, 231 bp, Gossypium hirsutum
  unsure (1)..(231): unsure at all n locations
gccgaaggaactgtaacatgcattttcaagtctgaaacttggataaagggaaacattccaaacattacttagtagaatatatgtaaaccgtagtcgactgtgaaattaatctgtctgcaattnttgctctttaatgcatcgcagtggttttaagaaaaaaataataatatttaaaaattatttaatttttattttatttaaatttttataatataatttaatttaattaat

SEQ ID NO: 248599 - DNA, 336 bp, Gossypium hirsutum
gaccacgcgtccgctcctatactaactacttccactgaaaagcacgttagctagctagggatttttgagccagagagatggggtcgaaatgaacagcatacctagccctcctctttgcactcaacatcctcttatcttcccgctgagtgctggaggctcctgcccttaccccaaccccaaacctaaacctaaacctcaaccaaagccaaaccctactccctgcccatctacttctggcaagtgccctagagatgctcttaaactccgtgatgtgctgatttgctgcgcggctcgctcaacgacaccataggtacccgtactgatcaaccctgctgc

SEQ ID NO: 248600 - DNA, 322 bp, Gossypium hirsutum
tttattcttagatgtttgataaaattctttcgttctcttttatttatttaacatctaagggtgagtcctttgaaccattagagaaaaaatgtaataaaatcatgtagcttttaattgattgcccatacttatgggttttttttttattttttttaaactagtactagattatctctcttaagttagcattattactacaaaaaaaaaaaaaaaaaaaaaaaaaaaaaaaaaagacaaacaattaaaaaaaaaaaaaaataacataaatgtgctatgcaattataatatattcataaataaaaaaatgggggttttgtttaaa

SEQ ID NO: 248601 - DNA, 124 bp, Gossypium hirsutum
gttccattatatgtatactgcttcatctagttctaaaattttataattgtttttgccattgtatcaatcgagttaatcccttgtggatgaatattggaagacattcaacagctttgatttattc

SEQ ID NO: 248602 - DNA, 437 bp, Gossypium hirsutum
  unsure (1)..(437): unsure at all n locations
aatnnccggggcggaccaaggcgtccggaattttttttcgagggagaaagaactgcattttttggtgcttcaactgcaacagagtattgggaacctacttgaggaattgctgagacagaaaatgaggaacgctcagttagagaaacaattaaatgattggccaacaacaaagagtgaatgtgaaacagtggtgaagatgtttgatacttaaattgccagataatttcttgatcgatgttagggatcatatttttttttctttaggaaaatagaagtgtatttgttagcgtttttatttcccttggtgtacaccatatccatggcagtatcttaagctggaactcgagcaaattttgagatgccattgcttggatctcagtagactttgttgcattgattgacaccatattgtaatataattacactctctctctaag

SEQ ID NO: 248603 - DNA, 419 bp, Gossypium hirsutum
aaaaggaacagcagaaaatgaaaagataattaaaagccaaaacatcgaaacccagaaataaagattttgaatttgcaatggcggtactcaactataagctcgttgtgatctgcgcgacgctcatggagcagctgcggcggcggtaatgactgttgatgcgagtggggaccaccacctgcaacacccgatcctggggaggataccgaccagatcgccatgcaagggctccatagccgaatgcttagccggggaagagttcgagctggattctgagagcatccggcgcattttagccaccaccaggtacatcagctacggcgcgcttcagaggaacaccgttccttgttcccggcgtggcgcttcctattataattgcaagcctggtgctcaggctaactcttacaaccgtgggtgcagcc

SEQ ID NO: 248604 - DNA, 370 bp, Gossypium hirsutum
gtcaaataaaacgcgtaatcgttgaatattctcatttctcaggtactcataataattcttggttatttttcccatattctggctgtctagaaccttttatcatttgaaactcagtctaaatctctatttaatcatatccctttgacctaaaaaaaaaaaaaaaaaaaaaaaaaacaaaaaaacccaaaccaaaaaaaaaaacaaaaaaaaaaaacaaaacaaaaaaaaaaataaaaaaaaccataaaaaaaaaaaataaaaaacctaaaataaaaaaagaaacaaacaaaagggggggccccttttaaaagatccaatttttccgccccgtgtaggaaaaaatattttttttttttggggcgccctaaaa

SEQ ID NO: 248605 - DNA, 172 bp, Gossypium hirsutum
aatcggactaagctggtccataaagcgggcttagttaaagaataaaacccacaatagctgcttgagctattggtgtatggatgatgcaaccttgaaacaaagaagctaggcgtgcccctgaatctgaattgaacactcttctccctttgaatcggcattcataccgacatat

SEQ ID NO: 248606 - DNA, 414 bp, Gossypium hirsutum
gctgatggctataatggttttctagaacaacgtgcaggaaataatgttggtcaaaattggtttaggggtggtcaaactaattgtgtgtctggtcaaaatgtgtgtgctcatggctataattgtgcaggacgaatgttgggctacatggatggctcaggccaggtagtcttgagtttagaccacctactaatgggccgcatgatgttgggtcacctgatggaattaatggcagttttggtcccactgatattgggccaaatgctccccttggaccgaatgctcctattaggcccactaatcctatgttgaatcatgtgcagcttggttcatctacaccgaccagcaatgctgtagttccatggcgcactaagccgcgtgctcaggtgttttcagcgtcaaatccatgttttgggc

SEQ ID NO: 248607 - DNA, 224 bp, Gossypium hirsutum
gaagtctcatcgattctgtctgtggaatgtctctttgttgacagtgtatactggcctgcatgattaactagtgtggaaggcctatcatggcggcttctttttaattttgatgactacactcggtttttgaagtaaaagaacctgcggttctacctgtgctagctctgctctagggatgcctattgcatgacgagtatcattcatgatctttgggttacatttgg

SEQ ID NO: 248608 - DNA, 172 bp, Gossypium hirsutum
  unsure (1)..(172): unsure at all n locations
ntctcatnctcttaattttatcatattttatatctacccgacaatgaactacggggggccgggatgtaaagattaaattatgctataattatggcactttgattcttttctacaataatttaaaacctacaactaaaatcaaaaatcctattctgtacatcttctttgcctt

SEQ ID NO: 248609 - DNA, 386 bp, Gossypium hirsutum
aatgaaatagaccaagtggctgaaatatcccctgcagaggtggatctacttgaggaagctttgaatcatttttacgatcccatgatggagccactattttctccattacacaatcagattgaagcagagcaagcaccttggatgtttgatcatgtgggaaactgttacaatgtggaatttggacacggcacaaacgaaaatgatccttatatttctaacttcctggagtctatacttaaaaattcggatgactaccatggtgatgacactggtagtcagaagaattcagaatctgagacccatacaaccctgaccattggcaaggatggtggattttgcagtaaacctgattctgaagtggcccaagtgctgcttgggacagacac

SEQ ID NO: 248610 - DNA, 416 bp, Gossypium hirsutum
cccacgcgtccgcttcccttttctaaaaaaatagagtaaaaaatttcaaagccattaccccattcggctaacccctaaaactttgagcaaatcaatcgccaccactgtaataggtggttatcgacatgcacggatcacacttagaaccttggttcaaagattaccaatctcagcccttgaaatctcatcttgacctttgatttcgacaaaggagatgaagattccaatggcctatttgcgaaggtaagcactccccttcccttttttgtttttaaatgcaaataaaaaaacaaaaatgcacataaaaatgaaggaagcagataaaaaaggcaaaagatccagagacttaaaaacagaaatcaccttttaaattgcttttgaatttttcttttcaatatgcttctctcagtgtgcat

SEQ ID NO: 248611 - DNA, 351 bp, Gossypium hirsutum
tgcttgtcttcttttacaggtacggaggcaacgtggcgggggtagctggcgcgtacggaggctgctggtggcgcagttgctgctagggttagggtttgctgcaaacatggtttaggttttgggcctttttgggcttagggttttattagttttgggtttttaatttaggttatataatttggattttgatgatggactattaattatttggttttttttatgttttttaattgtttgggctggttaatagtttgggcccgggtaaatttgggtacttacaacggtaattatacttttttaatataaaaataaattgatgtatttatttctttaaatgtatagaattgaatc

SEQ ID NO: 248612 - DNA, 276 bp, Gossypium hirsutum
gcggcggcttacccacgaccaacaacgctgttgcttgtggcggaagatcccgtgtattagcaggaatgccgcgtgggaggcagatccacaagaccttcaacaacattaaaatcacgatcctctgcggcttcgttaccatacttgttctacggggtacaatcggcgttggcaatttgggaagctccgaagccgatgctgttaaccaaaacctaatcgaagaaacgagccggatcctagctgagattcggttcgacttcgaccctaccgatccggacg

SEQ ID NO: 248613 - DNA, 304 bp, Gossypium hirsutum
agagaatccattcgactgatcatcttcgtgcaaattattagtatttcaagcgatcacagcgaagaagagcattcgagttaggttttttgtagctttccttcaggtcatatgattgataggacccttttgttttagcctgtattgttttatttattctgggtttttcacttttctgtttgctttgagatttcctggtatgttttttcacctgcaaagtttggaacttgttatccaaataaaataacctagaaacaaacatgatatgatacaaattaattcaatccattaaattggctggatcaat

SEQ ID NO: 248614 - DNA, 182 bp, Gossypium hirsutum
  unsure (1)..(182): unsure at all n locations
cgacccacgcgtgcgnccaaacctaatgaactttctatacccatgttttttttaaccaaagccagcctaaataacggggcgcattcatcaaaagacgatgaccccaaactataataaacctatacatagcctgacacaaaagacagtgcacccaaatactactacgctattgcctcaaacct

SEQ ID NO: 248615 - DNA, 381 bp, Gossypium hirsutum
gctttatttctggtgttcttcttctcttcttcctgtttcttatttcctcttcccatttaggtgctcgttccctagcaaacaaacaaggaaaagaagaggtagagcttactcaaacagcggatatggaagacaatgaactaatgaatcagctattgggggtagaagcttgtgatgctggagatgatgaatgcttgaagagaagaataatctcagaggctcacttggactacatttacacccagcatcataagccttgaggactattccttgtatatattcttgttaagttgttccatgtataattaagttgtctgggaacctccagaatggattatggttaaggttaatgaatatgtatgttagtataaacttaattatgat

SEQ ID NO: 248616 - DNA, 282 bp, Gossypium hirsutum
actttcaataatccaatcttaatatcgctatcattcttccacacaccacattcctaaaaaagaccgattttttttaaccaatctcaaccatacaacaaccacaatcataacaccataacgtcaccccacctaattcacctattgcactcacccctatatttacttctaaaaacatctaatacaccattattcctacaccttacaaacaaacacccaccctcaatatataatccaatttaacctatccacccatacttaaatacttacctctttttcattatt

SEQ ID NO: 248617 - DNA, 378 bp, Gossypium hirsutum
atctcgaagctgaatctagtgggatgactctataattctgactgtgtgcacttgaagctttaattgcttctcttatagagtaggaaataagtaacacaagaatgccaagtttaactttaattttgaatgccctttttagacttggtgcaaattttgatgtagtccatatctaatctcctaccgtaaaagtttatgatattataaatgcggcagtgcattttgctgataggattcaattactttcgaaatcagagatgctctttggatccccataattttgcacgttaaacaaaacgcaatatcctttgggcatttaaatttggagtattcaaattgtaaaacaaagctacttataatctactccattggttagcacgt

SEQ ID NO: 248618 - DNA, 194 bp, Gossypium hirsutum
gaattacactattctggttcacatagccttttactattccacacgacaacccattctaccggacggatgttacaaactgcggcccatccttcttcacctcggatgcttttgatcaagctctttccctctttatcaaacgaaacaccatatcgcaatttatcatttcttctctactatcaaaagcaatgacaaat

SEQ ID NO: 248619 - DNA, 283 bp, Gossypium hirsutum
accgtattcaccatctattaacattttctttgtcgcccccggcaaaagcaagaagaccccgagaacttttatcaagtctcagcctatatatctcaagctcctagtcaagctttaccgattactccaaataaggactggcagcaaattcaatacattaatctttaaattccttttgatcatcaaaaccaacacaaccatctttaattcatatctaagttgatttaatcccttttatggcaagcgtcgattaatatgttttttataatcctcaactatcacccct

SEQ ID NO: 248620 - DNA, 193 bp, Gossypium hirsutum
aaaaaacgggccgaccgcacgcgtactatacatttccatcttaattaagattttttttctcaaacagacaaaccttccactgaggacgcgtcttataaattgacgaaagcctcaacaaatcttatctgaaggcctaatcctcatccaaacccacaacacaaaccaaaatgaatgtcccacataattcaaaccc

SEQ ID NO: 248621 - DNA, 378 bp, Gossypium hirsutum
cggggaaaaacgaaagttgtcgactagcagccccgtcccgttttacgacgttcgagattatggattcatgttacgagctcgggaatcgtcagaggagcttatcacactattgacagtcttcggtatcattgaagtgaactttcgaatttatggcatgtatatgctggagtttacttttgaaatgtttaattttggttatatattaaaagccatgcgaaaatggcttaactactttgtttgaatttggttttagtttagttatgttttaaattgatgttgggtcatgatgtcgtatgctataaagagttatgagtggtgctatgtgattgtatatcaaggttggtttatgatttagtaagtgacagagtagtttcgatc

SEQ ID NO: 248622 - DNA, 248 bp, Gossypium hirsutum
gccatttttgaagcatcaaggcgaaataaattttcatcctaaggcagtccaaattatgtatattaagtcatgatataattaattttaatttatatccaatttaatttggattacataaattattattaattaattatgaaaaaatggtctagttgagccgaaccgagtaaatcgaactggccaagaagtggacagcccaaaatcatccatatgttgacccaaatcagcttattagctgattatttagc

SEQ ID NO: 248623 - DNA, 261 bp, Gossypium hirsutum
gcgtccgttaaataataaaaaacccattctcatacgttttgtttaatcaccaaatacattcttcatgggagtgataattaaaatcttggggagcataacaaccctatatatccacttttaaacttacctggtccgttcctacttctaaacgatcctattccaaccgactggcattataactacactcactgatggctgctcaatcttgaaaaatgtttactaaatcatatccatcgcctactagaacttgaagactagttt

SEQ ID NO: 248624 - DNA, 164 bp, Gossypium hirsutum
tatgactgcaaggatgcagatatttttcttttacctggctgccaacaccataactgtcgaggttcatagcattacctcgaacttacaattcttaactcttgatacactataaataagggatttgaccacaacaacaaaatatcatattgcctacaaaaaagatc

SEQ ID NO: 248625 - DNA, 416 bp, Gossypium hirsutum
gattcccggtcaccacgcgtccgggagagagaggatgaagattttggagaaggtcagatgaagcaaccatgtctggaactacgagtgtagcaggaagtgatacttatgaggttgataggaaggctggtgagtttatagccaagttcagagagcagattaggcttcaaagaacaacatcaattgatacactaaaagggttcaacgtgaattttttagagtgagtatttgctggctgtaaatttctaatagaagagttatatcactcgtcactcttaggaagttgaggattcttcattctcgtagtcctagcgtggtgaccttaatatttgtcattctataatgtctttctttatatggttgaagaaatgatttattaggattattcttttttgtttgaacaagttcatgaaaaacca

SEQ ID NO: 248626 - DNA, 291 bp, Gossypium hirsutum
  unsure (1)..(291): unsure at all n locations
cggaanacccggggcgccccaagcatccggagaatggctcagcacgcggctgtgaaaattgtgcctcacaaggcgtggcttacgagctgatgtgctctgtcgggtggcatagcaaagggtccctgaacacagatcctcctgatgatacacagattggaaagaactcaaaatccgctcctgaaggtccgccttccacacaagattatattcatctatcgtacaatgcatgtgcgaaggaggaggctgtctattgctataagcctaaagataaatgcttcacgacatataaaa

SEQ ID NO: 248627 - DNA, 357 bp, Gossypium hirsutum
  unsure (1)..(357): unsure at all n locations
gttttatatcttgaagcaaaggaaaaaaaataaagaactgtgaaactttgtcagttgtgaattttgagcttgggaaatgcttgaagaaaaggaaattgtgtaccatatgttgtgaatgtgtcgtagttagctagattaagattctttgttaaataattagtgagagagagagggagagagcattttgttattgattgttttcattgatcaaggttggtaataatgcttatagacttggtaacttttttatcanaaaaaaaaaaaaaaaaaataaaaaaatataataaaaaaaatatttatttaaataataaaaaaaatttaataaatattaaagggggggcccgttctaaaggatcc

SEQ ID NO: 248628 - DNA, 401 bp, Gossypium hirsutum
gagatcccggtttgttttcccctgctttcagctgtttttagtaagttacctgttcctttgattttgtctgcaggagcaccgacaggcacgggagagagatactgttccaccctctgtgccgaaagctggtcatccgaagcgtttcggcaatgttgacatagagaaatcaagatggagataagttattgtttgttaaaaggcattacgattgatggttcctgaggtcagcttatgttgtagaataagttttatatgaaaagatcttacacacctgcgatgtgcatacgcatatacatatatataatctttcttacattgttgttgacacactgcagcgttttagaattcaaggagccttgtaaatatgtagttgccatttttaatatttgatattatagatt

SEQ ID NO: 248629 - DNA, 358 bp, Gossypium hirsutum
agccttccgaaaggtttccgttccacatgttccctggtcttttgggcgcccggggccgtaattaatccaatgagtttttcaacaaaaaactgggtcggccccgtacaatatggttcaaggatgggctgagacttacatatttctggatcacaggaacacttggacaaataaatggctcaaggcattgatctatctgatgatggatcatctaaggtggccggaacccaagcaccgagtcagcactgggtcactatgtgctgctgacagctaagaatgaagatcacttgctattgaaccgagtcttattatgatatagctatgctaatggcatcgaatccaaaaagtgtcaacccatatc

SEQ ID NO: 248630 - DNA, 431 bp, Gossypium hirsutum
cacacacatgacagaaaaaaaaccctaacttttcaagtttcaaactcctaattgaaaattgcaaatctctcaaaaccttcaaaatcttcaaaatctcccaaaaccttcaaaagtatcatagctggaggctagagctacagctggccgctgcccgctggtgttgccgtcgaagcacgggagcagaatgtccaccgaaccaacatctattgagggtagtggtacacatcctacttcgatagattctgaacattcgggagttggagcttcaagccaagcaaaggtgactactaggaaaagaaaagccattccttaaagatttaatgcaaatggagatcttgtggagagaagaaatggatacaaatggaaaatattaaagacttaaatttcaattatgtgttaatttcaagacttatgtaatgtttttaattatg

SEQ ID NO: 248631 - DNA, 281 bp, Gossypium hirsutum
cgacaacaagctaaccgttaaattataaggctttgtttgtattgctaggagccggacatcttgtatgcggtgcagataatttccatcatcttgctcaaatctatattttaatttcaagtttacccctgtattactaaaacctcaaatccacatcccaacacatattgcaagcttatttctctttgctcaaaacgggaacaagaatgacttaaccaaacatcccaacaagatgccacatggtgaataaaaacaatcttaagttcaacctgcttggtacttta

SEQ ID NO: 248632 - DNA, 226 bp, Gossypium hirsutum
ccacgcgtccgcggacgcgtgggttagttttagccatggcatgtggaacatagattggtacagtctgtgttaagcacatgggtcctcttgtaaccaagatgaatattaaagtcattcggagtccatggtcagattctaacatctttgcacagtggggaccccatattcccacctcgcattgtcctaaccccgaaacctctactgggggtgaatgctcgaagaatcc

SEQ ID NO: 248633 - DNA, 253 bp, Gossypium hirsutum
aaaaaaaatacatttctttttcatttttcttttgcgggccgggcctttctaatttgcgtgggctcttttcagatgggtcatctacaataaattgagtcattatcaaaatatatgatgccatgattaaaaacaccatgactgtaaaaaccaatgcgtaacccaattttaatttacttgcaacacattcccctttctccatctggcgtaatatctataaggcccttacctatctcccttaccaacagttttgcat

SEQ ID NO: 248634 - DNA, 436 bp, Gossypium hirsutum
gcttcggaaatggagaagtactttgggaatgcgtatagaggtgacccgggggtgccccatgcgggcccggaccggttcgtgaatatatggatagggtcggctgctttctctgtactcacttggttcaacccttacatgtggcagctcacaaatcaattcaattggcatgacaaagcaatgatatttgaacattaccattggaagaaggcaaaggctaagaaccaaccatacaaatttaagtggaatgagtacatggacaaggatcacagggactcgtattatttcaactggcctgtctacttcccatagtgtttctttcatgtaggcatgctctttgataagtagttcagacaaagaagactttacctgcctaaaaaattatgttatctttattgctttgtcccttcttcccgactcattatgcttgtttaactct

SEQ ID NO: 248635 - DNA, 291 bp, Gossypium hirsutum
  unsure (1)..(291): unsure at all n locations
aaaacccgggccgacccacgccttcggccctttttttttttttttttttttttgtttttttcctttnnnnnnncctgggccggcaaaggaggataccacctggttagtaaatcttcttttggtaaacaaatttaaaaaatagagattgttttcggtcactgctccaaccaaaattaaatcatagtttcaccaagggtcgtatataaattttggaatctcatcatatacttgagaaaattggaaaaagaaaaaaagaaaagaattttgttttaacgggtcatattttttcac

SEQ ID NO: 248636 - DNA, 457 bp, Gossypium hirsutum
  unsure (1)..(457): unsure at all n locations
ccggnctggaanggccgggccgagccttccgaacgatttaacaataccttattatggccaatcattttatctaaaccaccttaccttccagccatggccaatttttaggaaaaattgggatttttcaaggccaaaatcctttttaaaaaaaaatcaaaacccctttttacattactgggaggttaaaacactgaagttttaccttagaaatcttaaaggtttcttaatttctccaggatggggtttctcttccaacacaagctcaagaattatatgagtggcgtaaaaaagaaatcttaaacattacttaactcctcgaagattgggtttctcttttcacacaagctcaagaattctatgggtggcataaaaaaatcagggttgctttaaactccacccactttgggtttttaccctagaattgcattcttctttttttatcgggcaccattttgag

SEQ ID NO: 248637 - DNA, 440 bp, Gossypium hirsutum
  unsure (1)..(440): unsure at all n locations
ccgggccgcccacgcggccgnctatgccttgtttttgggtnatttttcatgtctgctaggagtcaacgggccaaatttcggttttggtgcaaaggggcgagtgaaagtcgaccctcggccgacgttcgcgcgagggcacacttggtggctgtggcgctcgagagagagctagggtttctaccctagctgagagtggtttatgtttttgggccttttgggcctctaaatttgggcttagtttttttttgttntgggtttcgatattttttttgaggcctggtcaaatttgggcatgtacattcacaagttcaccttttgttcatttcaaatttttgttttaaaattaattattcatctcgtttcaagtaaaaataatgccttttaagctggttntataatcatatncttaaaaaatctataaaacgaaagcaagttcgatg

SEQ ID NO: 248638 - DNA, 460 bp, Gossypium hirsutum
  unsure (1)..(460): unsure at all n locations
cccacgcgtncgaaacagtctgagggaagatctacctccagcacatattctcaagcccctgcaactaacggttcaactcctccggcaccagtaaatcccaaaatggaccttcttagtggtgatgactacaatatgccgaaggcagatgattcacttgcccttgttcctgtgggagaaccacaacaaactactcctgcgtcatcacagcaaatggccctcgtactctttgatatgtttcctaacagcaacaacacttctaattctgtaaacacccaatcttcaggtttgtccggacaactatatcctttggctcctcaaattcagcagcagaacattttggctcctcaaattcagcagcagaatggaaatgcaccaaacatcaggttacctcgatatgagcaatcatttgctcaaggcactggtcctgcctggaacaatcagcttgttcagcagcagcagc

SEQ ID NO: 248639 - DNA, 336 bp, Gossypium hirsutum
tccgttttttttatatattccaaaaaacataaaaccatcttttattatttctgcctgtgagaaatataatgccacaaagctatgcaggtagtacatattgtaagaaaacaacacgcatgcttccatgatggaaacatgattttattttatgcaacacgcattgacacaccaaacgacatatagatatagtaagaagcgacatgcatgcttccatgaaggaaacacgaatttattttatgcccacacacacacaatctttcactactgtaaatctcaacatatgacccagtggaaatttgcatatatggctctggctcactccagcgcctctttttt

SEQ ID NO: 248640 - DNA, 428 bp, Gossypium hirsutum
ggagaagagcgttaaggttttaaaaaacgcagcgaaaactaggaaagtcccagctgaggaagtgctttcagctttttctgttattgaaaaagctaaaattgatccatcggcattccttgaaacgcttggtggattggattcacctgaaaaaattgaaaggcggccgttatttccctcttacggcggttcagaggttcgatgctgctggaaggaggattgagaatggtatatttcttggaccaattggtttcttaacctttgaaggaaaattttcatggaagaacagaatattatcctttattttcgaacgaatccgggttaaaattggacttttcaaccctctggagatcggtcttggccagaaagatgatagagaaccaaacaccaaagatcctttctttatctggttttacattgacgaagaaatc

SEQ ID NO: 248641 - DNA, 428 bp, Gossypium hirsutum
gaaaattctcgggctgcaactgtacaggcaaaatcccatcttgtgaaagctgcaaagactcagagatcaaattcttccctgacctgtttgctactggtgatatttgcaattgtgattctgatcgtgatcatagtactggcagcctgatcaacaagctcatccaatgtgtttgaagaaccatttaggtagtgttcggaaagtcacctagttcggtgtaattgtttgtaattacacaatgatgacatgtttgggtaaccattgtaattgataagtctcaccaaattgggtgaccttaaagatccttaagatcttctcgggaagaggagggtgaactttttggtaatgcatttgatcatgttgttttgtgaggatgatgtctgactggagtttcactaaaattcttagtatatagcatgtggttatcggtc

SEQ ID NO: 248642 - DNA, 440 bp, Gossypium hirsutum
cctagccacccgttccttttctcttttatcctttttcaattttcttcttttctccttcattgtgtcgcccaccaaactcatttttccttggcgtccttcccttctccactggtgctaatttttgtcatttttcttcctcccttttgattttatttcattatttttttagccttgaattagtctcttgaaccactcaaaaattggatcgcactgttgccacaaagatctccattgtcgcccctttaacttgctagagcattgatttaaacatcccagaacagcagtgaagccatttttcgtccgcgctctcgcttcgcaccatatcattgtacgtttaagtttggtgaaggaagcgcagatttcacaagtagtactgcggttttgtgaaattaaggtgaagttggcaaggcaattaattcttcagaaacctagaatcattg

SEQ ID NO: 248643 - DNA, 217 bp, Gossypium hirsutum
cacgtggtgttcattgcgcgccctgcggtccttgaaaattcataggacctaatttcttctcgtccctttcgtactcataatcctatcaagtgtccaaagttaacagcctttggtcaatggaacaatgtacgctttggatttcctccaaatgcttccgtaacctgcgtataaagattgtctctcacggctggtcacgtacgttccattccctaacccg

SEQ ID NO: 248644 - DNA, 232 bp, Gossypium hirsutum
gtcgtgtcttatcactctccgtaattaccgttccgtccaaaaagcttcactgggaaaatggcttggcgtggtgcaggatccctctctcgctccgtcatgtctgccgccagagctccatcgctccgcacccctgcgcctatgcctcgcgtccgtctccctacttcctcagcttcccgccttcagtcacgccgtctctccttcgccccttccaggaatttgggagaattgggat

SEQ ID NO: 248645 - DNA, 450 bp, Gossypium hirsutum
  unsure (1)..(450): unsure at all n locations
gtggtgtagcatccacccggcgccgcttcagtggcatccctacctcgtctctccacgtagttccgtccctggtcatcaaccgccaactaagctatgaactcccggtctcagtaccagtatcagcacttttattttatttaattcttaaccaataatttacctacccgccgcagcctaccttccgtcgacaaccatttaagctgtaggttttaatcaccttcctcactatggattcaaccttcttctcatttctctaacaaccaaaaaagtaggaaaaaaatggctactcataatcttgctgttatcctcaaaaacccgtcaaacgacgctgaattcctcctccttaagcaaactccaccgcctaaattcagcgaagaccagtacgattcttatgtggattctgatctctgggaccttncttncacgcttctcaaccttcaacacgatcac

SEQ ID NO: 248646 - DNA, 201 bp, Gossypium hirsutum
gaaaacgaattttttctaagaagagctttttttttttccttcgaaagcatggaagaattctactctgaaagacggcagccattggaatggaaaggctttgatttgtagctttcaactcggctctcttatatattagccctagcaattgtttgctctttagggcacaacctcttccccttcctcttgaccttggccatgccc

SEQ ID NO: 248647 - DNA, 352 bp, Gossypium hirsutum
cccacgcgtccgaaagacatcaatgttttggtggtgggttctaccggttatattgggaaatttgtggtgaaagagttgatcaatagagggtttaatgttatagtcattgctagggaaagaagtgggattagaggcaaaaacagcaaggaagatactttgagtgatttaaatggagctaatgtatgtttctctgatgtcaccaatttagacatttttgagaaatctgcgaaaaatttatggtttaccattgacgttgctgactcttgtcttgctagccgtactggtggtgtttatgattcatggaaaattgattatgaagctgcaaagaacagccttgttgctggtaagaact

SEQ ID NO: 248648 - DNA, 382 bp, Gossypium hirsutum
caagaacttggctctgcatttcttctcgcttttccttgtaaaacaaaacaaagcattcggggaaggctaaacagtcggaaaaggatacatcaggatccaagattgagaaaaaagaggcaccctctttcaatttcatactccaatataatcccccaccccccttccccacccaccctttttttctctgatacttcaccatctccattttcctttttgtctacttctgcatcctcataattgcgctcaatcaactatgagaacagatatgagaaaaaactccaagtcttcgtggcctaaagtaatcgctcgaaaatggctgaatataccgagtggagctgacgagtttcagtccgattacgccgtaaacggcgaaactggtgac

SEQ ID NO: 248649 - DNA, 397 bp, Gossypium hirsutum
ctattacaagtggctgttgaagtctttgttagttgccgaggcatatctcggtcgactcaactccactcagtccgatccatggcgtctcttcaccccacgatatctcctcaaagcctcctttctttaacaaaacctcgaaaacccatttcgaggcacctctcagcttcctcattaaccacctcaaaactgcccgagggccttgcgttctcgggaaccaaacagaaaaacaaaagggaaaactcggtggtggtggtgaagtcattagccgaggagcttgacgtgataccagttcaaagtgaggatgttacagatatacaagaaggagttgcggtgagtcaggcgccgagagaatcgtcaggaggagagttagtgactcaagtaggtgggtttagcaatg

SEQ ID NO: 248650 - DNA, 392 bp, Gossypium hirsutum
ggaggtggaagtggaagtggaagtggtagcttaaacattttattttacttcagatctcagctgaagcccttttcctttcccttaaacatcattttttttatttttttatttatttctcatcctattacatggcttccatccgtcggactctctcaccggcatttcacggccgttccacccagaacggcgctgctgtgttctcctcttctccctctaataagcttttacataaacatttcccctcttctacttcctcaacgctcctcaatttagtttaccgccgagggtggcgccggtcttttcgccgctgtctcttcttttttctaataggggtgctttttggaattactccggttggacaaatggatgccgatattcgacccaaggatttc

SEQ ID NO: 248651 - DNA, 408 bp, Gossypium hirsutum
ggaacctttcttatgaaccctaaactctttaccatttgaccccccaatttctcaaaccctctaaaaaggattatcttttttttttccatggctgcattcagatgcaaaccttcggccgaaacagcctctttaacggtctctcagttcaggcattttctatctaattacatgcactatggtcgcatggctagttcctctcactgtaccaccatccgcaacaaatgggatgaccactttgtcaacactccttatcatttcacttctttcaagcccgtctcgcttcgtggcgaactcgtcgaaaagggttctcggtttttggatattaggaggaactcccacgatttaagcaaggatgtcgatagagaattgagagagaaactgggttgtaatagttttagggtattgagt

SEQ ID NO: 248652 - DNA, 344 bp, Gossypium hirsutum
ggggaaaattaatgggttccataagccttgggggggtaaatggtcctggctgcccctaatttaaccttttggtgggggttaaaaatgaaaaagtagttaggtttttggccgccggttattccctttcttttggcttggctctttcccttcccaaggcttcttctaccaatccacaggcaaggagaaaatgactaatcccaaagataataaggttgaagaggtaaaggaaagtgaagaaatatctaagcctttgcagcggttgccgagtccgaaagaatagacagctctctgaaagagtgtgcatagaagtgctgtgacagtggacaaggtaccgacaggattgt

SEQ ID NO: 248653 - DNA, 297 bp, Gossypium hirsutum
cccacgcgtccggttttctggcaatgttagaacccactggactttcaggtttgaacccaaattttcagtcgtaagggaatgcaagaccctgttacacgcaaatgccctttctctcttcatcgcatctcagtcaccccatagccataactctctgtttctctgagctctctcacgtcatgggcgatctggtattgcagaaaatagcaatttctgggccaacgctggcctcaatgatccaacgcctatcatcttcccctgccgacttagacggcctcctttttcggccacgtcactttg

SEQ ID NO: 248654 - DNA, 374 bp, Gossypium hirsutum
gttttaatagtttattattagttcatctttgtccgttggatcattcagtttgctggggagggttctttgatttgatttgatttagttactggggtattgatttgatatttttggggttttggattcaactttaaagttgaaagctttttttttttctgggaaacgtaagaagttgatctttcagtgtttgggtttaatcattgagtttctctttgggtaatgtgaaaaattttggtcaaagcacagagctggtagatgacctaaaagattatatatatatatataaagctgattgactggtagattaacaaaagcttcaccaaaggggaagaaaagaatttttttttttgggtccttagaaatttgaatttttt

SEQ ID NO: 248655 - DNA, 136 bp, Gossypium hirsutum
cggactcgtggtcggacgcttgttcggacgcgtgggctgaaattgtatgtaggcttcagactgtgattggtttcagtaccctttatgttgtaaaacctggaccaattatcttattatatttctaaatctttctatc

SEQ ID NO: 248656 - DNA, 389 bp, Gossypium hirsutum
  unsure (1)..(389): unsure at all n locations
tcttctttcaccggccgccatagtcactgncgcgggcgccacttctatcacggaggtttccctccatccgtgctgcaaatttcctgtacgtaacttcctcttcaaatccatttctggaaacaacagaccgtcctccaggctccacgtgtcctccccaactgaccaacccgccgcatccaccactcccgcccaacccttcttcaaaagccccaaagaagaaaccatcttcttcgacggcggagcccactacggggacctcttagccaatctgcttctgggtttcactcttctatggctgccgttgactctagccgccgtttcgagggggtttttcctcaggtacaggttcaccaacctgcgggtgacggttatttcgggactgacgggtc

SEQ ID NO: 248657 - DNA, 382 bp, Gossypium hirsutum
cccacgcgtccgaagcggtagaccaggtccagcgtatgccagaagtacctttggggattcggcgttgcgatgctaactgctaaccgagagacactactcatcagctccatgagtcattgctgttcactactctctcgtcgttctcacacgtcaatgctcctccctccacctgaccctgtttccttcatccctgcttccttcaatcaccttaatggatcctaatctttcaaagttccccattttgtcctacatcttctcccaacaagatccttacaattacccatcactccctccccaaatccgccaggatctactcacccgtttcccccatttacccgatccatcaatccttgcttcactttcccgatccatccccaccttc

SEQ ID NO: 248658 - DNA, 303 bp, Gossypium hirsutum
  unsure (1)..(303): unsure at all n locations
ttcttctccatatttgcatcaaattcttctcactagctcccctctcaatgcagtagagtcanaccggaagtgactccattctcaccactaatctccacctcatgccacacctcaacatagtatccccatatacttccttaacctctctctgctttcccaacctactcccaagactacatctacaccactactatctcatgcaattagaaacagattccaaaccaaacatttctatccatctatttggacgcattagctcgaacactctcatatcctccattgcaacaacgactcacccctcta

SEQ ID NO: 248659 - DNA, 393 bp, Gossypium hirsutum
gaaaagcagaggaaacaagaaatggaaaaaacagcagctctgaatgcttctgttacttcatattctttgtcttttaacaagattttaactcctaaaaattccatggcagcagttagttttttggcttctttttcaccaagaattcactccttatcttcaccttttccttcactttccatcaaaccaaagcgacccacaaacacttttcaagtgagatcagtggctgctccaacagaagatgttgcagggtttgatgacatggtttccgggaagcaacgtaagtattacatgctaggcggcaagggaggtgtaggaaagacatgttgcgctgcttcattagccgtaaaattcgcaaataatggacatcacactcttgttgtctcaaccgatcca

SEQ ID NO: 248660 - DNA, 251 bp, Gossypium hirsutum
cccatcgcgtccgcccacgcgtcctttttatctccctgtatcgagccctctagtttgtgggagcgcccagattttaattcagggctaaccttatagctcattttggaaccatcgccatacttcagatagatgagccaaagatgttctcaaatcttctgggtagcattgagtattggacaataatattcgatgagagaaacctgagaggagggcttcttgctgcttgaagcttgaggcaagcaaggcgctgt

SEQ ID NO: 248661 - DNA, 369 bp, Gossypium hirsutum
ggagtctcaaatcatcagccatttatggcgtctttcatcttatccttatgcggtatacccttccgcggcctgcctccgccgttcacctctctcttcccgccataatcttatacccgcctcaacatgccgcccgctctatcaccaaaacacaacctcgttatgcaaaccatctttaatatcaaagacccgaaatttaaaggtccattcacagcttagatgcccaatcatttctcctgaagaccgttggggcacttgggcttctctcttcgccatcggtgcttttggtctatggtccgagaaaacaaagattggaagcatggtgagtgcggcattggtgagcacattgtgggggctggcagcaagcaatct

SEQ ID NO: 248662 - DNA, 343 bp, Gossypium hirsutum
attcccatggcaaccctaacctcttctccatctccctccattctctgttcctgggccgcctatcctaaaaccccttatctgaagccgccgctcctcttcttccccaagcctcttaccaccgctctaaccaccgctttagccaccaccacctttctctccctccctctccttctccgtctctttttatatatatgtatgaggcaatgccatttttatatataagcaaagccattttactctttttatatatatattttgtttgttgctctaaaaccaaaaaaagagcaaagataacaaagaaaaaaaaagacaaaaaaaaggttggcctcaagtggagcaaaat

SEQ ID NO: 248663 - DNA, 330 bp, Gossypium hirsutum
acggatgactcatgacatttgccttactttgtcgcaaagtttttctacggcactgattatttgttgtttcttgtttggcacgcagtacaagttggtttgttagagcttattgtagacacatgctggttgtatgcgaaatgcattaggcattcgagttaatggaaactctatatttttgtaagtaggacaaaagcaaacattccatttataaatggattgtaatgtaaaaactcgaatttattttcttttgttctagttattcgcaattttataatttaaaaaaaaaaaatacaagtaccaggctccaaaccatggctgtatacccttttt

SEQ ID NO: 248664 - DNA, 251 bp, Gossypium hirsutum
  unsure (1)..(251): unsure at all n locations
ggtttacagtgattgagtcaattacatcaacctatcttcttggtcatagcacggtgcatggtgatagactctgttaaggacattttcngcaaacagaaaccaatcagttatccactcctagttacacaatttaccgtcaaaagaatctttgtgtcgactctttcacctaggttgtaagccgatacgatagtttaactaagggtcgaggctctagctattgatctgcccctagacgtgcctgcgcgttgaga

SEQ ID NO: 248665 - DNA, 292 bp, Gossypium hirsutum
ctgagtccaggacttaccacttttttttcgctctacagcaaattttttccctagaacgtcgcagttctcatggacaggctcgtccttcacatctacccaaactacattgcccaatctaacattacactaacccgtttttaaggcgtacaggtatgtcaattgtctgtactgacagttgcaatgccagctcctaactaccatctctaaattaacctcatcaggattcgtcccaaggtatcagtaaatagttacgccagagaaccagacatagccctcacgcaaaaaaaacaaa

SEQ ID NO: 248666 - DNA, 401 bp, Gossypium hirsutum
aaattccgggggggcccaagcctgccgaaaacccaaaaaagaaaccatggcttcctttttcttctccttcatctttttgttgtgcttctggctctaaatctgctcctccacctcatcagtcccctttttttcactccaattcaagaatgtgaaagggagggacaagaagatggtggtactaccccaaacgtatgcagggacaaagcggtgaccccaaagcactttgcaacgcccctccatgcttaaaccactgcaaaatccaacgccaggaaacgtcacgagtctgctggaaatggtggtgatggtgaagattgctctgtttcttgcaacaagtgcaggcctcactccagggagaagatcttcgtggttcctttagacaacaacaatggagtttacaagca

SEQ ID NO: 248667 - DNA, 333 bp, Gossypium hirsutum
gacctattcaacaccatcatcttaactgctgagattacacacatctctatacggtatgtacgagtattgaccatagctccttcaatcctctactacactttgatatgccattctaaaaagcaacagacgtataggctacccttgcttaccttgctgcatatatctctccctctctatatattgaacccaccatttgttttgcttcagattctcgattctgatgtccatctttgcagatattttgccgctgctacgccttgatcgcatggggtcgaagagtatgcttttaccagcgtccttttcgcaagcaataaccgatgccatgagcaacac

SEQ ID NO: 248668 - DNA, 371 bp, Gossypium hirsutum
cccacgcgtccgatttttcaaagatctaactgcctttgtgcttgggggtttaagtttggcgggatttagttgatatcaagaaagcttctgttttgtaaaaaaaaaaggtaaatagagaaggattatggatctaagtttggttgaatttgattattaatttcgatctgaagatatggatagcattttttggttccgttccgttaactaagacctttattaaattcacttatggaatttgctcgctagcacttaggccccttgactttttttgcagacaaactgaatttcaggtgttttgattcatatctaatttgattcttttcacaggaatatatttaaatcattctttacacattcattgaaatgtaagt

SEQ ID NO: 248669 - DNA, 244 bp, Gossypium hirsutum
cttaatcgaagcctttacacattcttcttgcactacaccttgtggggaccctacaacttgccagattgaatggacaatttaaagcctaacataaacaacaactgcatgaccttctctaacattaaagttacctatattttgcatgtctgaggggataaagggccaaaaaaatcttcacaatgtgagctgttttgtgccatgatacgatacataccccatctgattcgttcctgctaattcatat

SEQ ID NO: 248670 - DNA, 162 bp, Gossypium hirsutum
ctgaatcgaagacttaagacattcgtgtagaactacaccatgtatggaccctgcgacgtgctagattgaatggacatgttagaggccaacataaccgagaactgcatgagctactctaacaaaaaagttacctattattgacatgttcgagggggttaaggg

SEQ ID NO: 248671 - DNA, 168 bp, Gossypium hirsutum
caggatcgaagacttacgactttcgtgtagaactacacatagtatagcccctacgactggctagattgaatggacatgttaaagcccaagaaaaacgacaactgcatgggctactctaacaaagaacttacccattatcaagacgtccgagtggattaagggccaaaa

SEQ ID NO: 248672 - DNA, 343 bp, Gossypium hirsutum
ggaagacccaggcggacgcacacgcgttccgcttaaagggagattaagttcatataactgggatggcttttgtgacgtctggggaattgctggccactttggtgccaattgctttttattggatatactcaggtatgtatgtgatgtttgagtcaaggtttgagaagtacaagttgcactccaagaaagaagagggggagaagaatttgggtttcaaaaagggaggctttaaaggctctctttggccttaaagttttgctattggatattaactttttaacgtttccggtaacaagagaaaaaagtgggaggcattttcaaagaaatcacttacctttctttt

SEQ ID NO: 248673 - DNA, 352 bp, Gossypium hirsutum
  unsure (1)..(352): unsure at all n locations
caaccacctaatactaatgtctatggcaacctcaatctcatgtctgaaaatcccaaacccttcttctgcttcacctccatgttcctcatcaacctcatcttcgaccagttgtagattgtctgtaccacccaagccttatattgtgacgataagaagttctcaaactgagggtcctttgagaagacctgtggcaccttctccaccacctcctttgaaacccgtcccaccttcttctccctccgcttctcctccgccacaaccgacacctncttctttttcttcccctccgtctccgccgccttcagcggcagctgttggggaccagaatgtgatcactttggagtttcagaga

SEQ ID NO: 248674 - DNA, 394 bp, Gossypium hirsutum
cccacgcgtccgattcaagcttaaagtctctctctttccttccttcaaatacaatttcacatggctggtcttcagtataattttttccccacagatttcttctaccctcgtccgccacagcctgctcctgtcctcgactctactcctccctccacggtgccgatccaaaagagagaggttgttgttgatggtaataatgacggtaagcagcggcagcctggaactccggttgttcaccgccgcaacaacaagactagcgtttcgatgaggaggaggcaaggcgaaaaggtcggtagtactagtattgacgttcaaaatccaggcgatcagcgagttaagttgccgcgaaactcgttttcttccttgattttggttcctgaacaagacgattccg

SEQ ID NO: 248675 - DNA, 358 bp, Gossypium hirsutum
cccacgcgttcgcccacgcgtccgcccattcgtccgcggttttgaaaagaaaaaaagaaaaacttttgcaaaattgaatttaacattggtcgaggcaaaattaagggggctgaaggagttcattgatcagtgcaaagctaatcctttcattctaagcgagccttcactctccttgttccgtggctatctccaaaggctgggagcaaatcttccatcttcagctagcggccatgaagtcggagactacaaatcgaagagttatgtgatggaggagagtgaccaggtagtggcggacgatggatagaaagttaatttacaggacgtggaagaagagattattgaatctgatatcgatctc

SEQ ID NO: 248676 - DNA, 261 bp, Gossypium hirsutum
  unsure (1)..(261): unsure at all n locations
agtcattttcgatcagtataaaaatgtatccaaaactaatcgatcaacgccgctgggatgtccaactttttctccaaggcggaggtgacaagcagcggccgtcctgtcctcccccgcaacgaagtcgaatgccaccttctctccgccgtcgacctcgaacctgaagaccaccgtcacttctccctcttaaaatcggggctcctcatcctcaccacccaccgnctcatctggctaccttcttcttccgcctncacccctact

SEQ ID NO: 248677 - DNA, 202 bp, Gossypium hirsutum
cccacgcgtactctacagattattaatggttctggctgtctgtttgactgattggaaaggtttactacaaactgtgggccccattgctgctcttaactcttgtctagaactcaacacttaccacaggttgcaaatgatgcaaaccaagaccttcaacatgtcctagaagtttttgcgctaaggacacacaccagctctgtgt

SEQ ID NO: 248678 - DNA, 399 bp, Gossypium hirsutum
  unsure (1)..(399): unsure at all n locations
gtgatacccatcatatatatgtgtgtatgtatggattagtatctactgtcagtgtaggtgttttaacttcacaagcagagttgaaaaacatgttatattatatttgaaaaaataaaataagaataagaatagagataatgacagtttttttattccatttgtagagctaaaaaaaaaacctttactagcagtggatatgataaattatcttttttcaagattttggttttaactgcgggtaaaaaaacaaatgtaggcaatactaaagctcttggacagaaagccaactgactttaccttgtcaggtggttgctttgagccaagctccatttctgctagatgatcctaatgtaagacttatatttncttgtgatgccgttgcacgagcaaaagattatc

SEQ ID NO: 248679 - DNA, 211 bp, Gossypium hirsutum
tcgatcagaagccgggcacagtcccttttttttgacccaaagccggctttagcccggcgatcccggccgaagacattgtcaggttgggaggttggctggggccgcacatttttttaaaaattacccaagtgtccctagatgagctcaaccaggaccagaatcttctgggggaccaaaaggttaaaagctcgttggttcttattttccattc

SEQ ID NO: 248680 - DNA, 218 bp, Gossypium hirsutum
ggtcaaagccctaagtatatgattcttttcatatcttaccactctaagaagggaacatcatttaattctgcaagatctactctctacgtcgaagaacttttccgaactaaacacttatactcgtgagtctctttaacccaagctacaccgatattttaaagtctaatatcttaggttacgacacttcttacttcaaaactgctttccacaagagttcc

SEQ ID NO: 248681 - DNA, 226 bp, Gossypium hirsutum
cccacccgtccggagagaaaaccattcttctctcccgaattggctcgctagaagatcagagagttcgatgccatgagtttgtggaaagatcttgccaagaggcttcacggtagagttaggccaatcaaatgtgcacatattacagaatcaactcatttcaatcagctagtacgagatggagccatggctgtcgtcacagatactggcttgtacaacctgtgtgttg

SEQ ID NO: 248682 - DNA, 129 bp, Gossypium hirsutum
  unsure (1)..(129): unsure at all n locations
gtcaagccctagtatatgattcttttatatttgccancaagaagggacgtagccgtgttatgaatcaccaagggtgtggctgcaaggctactgggaaggatgcagaaagacgcgttatatgcaccacca

SEQ ID NO: 248683 - DNA, 242 bp, Gossypium hirsutum
  unsure (1)..(242): unsure at all n locations
ccacactgcggctggcggggcgaaccagaggaaactctgtggaggctcgcacgatactgactgcaaattggtcgttgactcgggataggggcgaagattatcaaccgttagtagctggttcctcgaagtttctctcacgatagtggagccttagcggttgtatcgggtaagacatgattagaggatgggggcgcacagcctaacctattataaactgtaaataggtaggacgggcggntctt

SEQ ID NO: 248684 - DNA, 468 bp, Gossypium hirsutum
tcgaccacgcgtcgccacgcgtcgagagctgtagacctttatggttgcattaaacaaagccttcatactggatggcagccttcagggattatggatttgacccctgggactctagaccctgaagtcaggagggtatcgagcctaaatggctagcctacgggagatcataacgcgttatgctatgttgggtgcagaggtgcgattgccctgaaacttggaaggccggcttatccagcagaaacagcctccttggttaaaccgggtgatcccaccacggacatacagtttggcagaccctacactttgttggttcgagatggcactcagggattgagagcacaaagttccagactggccaaaccggttcgaggggaacaatatttttgggttcgagaagaccttggaggctgggagccggctacctggagacactgttaacccattggttttggaaagatagaagcattg

SEQ ID NO: 248685 - DNA, 237 bp, Gossypium hirsutum
  unsure (1)..(237): unsure at all n locations
gtcaaagccctagtatatgattcttttcatatttncttctgagaaacgaaccttctttgactatatgtggagctgaacctatgttccttgctttccactttagatgctttccactgtttggatggctgagttgctaattacagatggtgaagcatgaagcctgggtaccatgcatactgaccatctagaccattggaaagtagtgtttgggagtgctgaaccaggtggttaggtgcc

SEQ ID NO: 248686 - DNA, 448 bp, Gossypium hirsutum
gcgtccacgcgtacggaacgactctttctttgcgttgtctctgcagtccactaaagaggtgcgaaccagatcttaatgaattcaagaagcactgttgcatccacagagtcctgccaatcgggaaacaagaacgactttctcttctggattgtggctagcttgcttccaagtttcctcggaacccttgttgcatacgttaactttcagatgtttaaggacattgaacagtgcccttgaggggagatgtatcttcgagcttctttacaactatagcctcaaaggctttttaaagtaatctgcgtcatttcttaaaagcagcatggtttcctcacacttatctagtttaaatgggtcccgcttgtacaaaggcttccagaattcagtgctttttgtcacccgacaacctgatacaccgacctttgatcatcttgagatagatatatttttt

SEQ ID NO: 248687 - DNA, 181 bp, Gossypium hirsutum
aaatccaagtttgttttcgaagaatctacaatacctgagggttgttcatattgagaggttggggctgaaaacagaaatatattatatgagttcaccgcaaactttgcttacactttcctacataagtggttcgtgatgttttcgtcgtatagaacacgatccttttacatagctggagaaa

SEQ ID NO: 248688 - DNA, 114 bp, Gossypium hirsutum
cccaccgtccgctaaccgttactcacggggatggcaacactagggagtccaaaacgtgggtgttttcctcggggagagttagtctatctaactaacctctgcccaccctggaaa

SEQ ID NO: 248689 - DNA, 370 bp, Gossypium hirsutum
tttagctcagcagtggtacaccattaagtcctggcagcagtttttgggaacggattatcaacggcgtgtgttgtaaatttgggtgctcaagtatcatcagttatttgcattgaggatggagtggctctacctaatacagagaagactttaccatttggtggagaggatatatcaagatgtcttctttggacccagaggcaccatcagacatggccacaaattcgtactgatattttgacaaagcctatagatctattgatgctgaacaggttaaaagagtcctactgtgaaatcaaggagggtgaacttgatgctattgctgtagttcattcttatgaggatgccatgcctgcaggatctcataagacga

SEQ ID NO: 248690 - DNA, 198 bp, Gossypium hirsutum
aggacgcgtgggctgttaaacgatttcttgctagaccacgcctgcctatatggggacattatatctgctgcctgaatgttattttctacaaccacattggctgcgtgccagttttggcaatcccaggaggagaacttaagttattgtaagatagattataagattgacttcctttggtgggctgcaggctcataacat

SEQ ID NO: 248691 - DNA, 209 bp, Gossypium hirsutum
gaaaccctaaatcaacagataatggcgacgtcggacagtgattggaggtggaaaaacattgtttttggtgaacttcggagaactgctgcttattacaaaggcccacatttcatctactctcaatcttggttgcaacagaaacagcccttaagggggaagccgtctggctctgtccaccagactaagcaacagcataccttgttaaattt

SEQ ID NO: 248692 - DNA, 389 bp, Gossypium hirsutum
aacgactcgagaaaagcaatccataacttctggttattattcatctgcatttgggtcccttccaaactctacactgaagtctgaaagaacattctttattaaaatccaaaacccatttcataaaatccgataacattgctcaccatcttgattctgacaagttgatccatctgagatgtcattttttcacttgagattgtctgctcgacatccacattcaagcaatgttccagacacccttttgtggcctatttcctctgtggtggattatatgcatcgccaaccaaacgtgttgctctcaaattaccatcaattttttgtgaagaaagtattttccctctattcctgtagatgttcattgagccttcagcctgttagagctttgcaaa

SEQ ID NO: 248693 - DNA, 225 bp, Gossypium hirsutum
agaaaagtttctttccactctatatggcgtctcccttcccatcataccaactggctgctttgtatcattatctcactccatctcctgcccttttctccaaccagcttcttcctgaaaaccatgttaattggactcaaaccccagaggctcacgtctactctgctgatcttcctggggtgatggaaggcggaaataaaagtggaagccgaggactcaagatatctt

SEQ ID NO: 248694 - DNA, 307 bp, Gossypium hirsutum
cccacgcgtccgaccatcctcatcttttttcacttgaccacctgaaaagagaagctagaaatagagaggagaaatgatgcaatctcgctttacctctgttgttcgtgccatatcatccgccgcaaaggcaagacccttctcatccaccatcgattcacctacccccaccaaacccgatttccctcccacccttgctggcctccgggcccgccttgccgccgaatctcccaccctctccgattttttcggtctccaaaccaataacctctattcggtcgaagtcggcaccaagaaaaaaccgctccct

SEQ ID NO: 248695 - DNA, 394 bp, Gossypium hirsutum
cccacgcgtacggttttccccattttccagtgtttgattggaggaaaatattttccttttggaaaatcaactccaaaacacgggaaaatgccttacaattttgggaaattgtcttaccgattcaatctccgtaagacattttcctaaagctctcatgcattcttctcccttcatccagtaagcttccttcatccattcttctcccttcattccttcaaatttccgttcttgaaagcttcattttggttcagaactggaaaccgctgctgttggttgtggaaagaatgttggcttctgaaggaataaaagggatagaattgggcagagatgaatttgaaaaacgagtttgggagtggaaagagaagtttcgaccccgcattcttattgatgttaa

SEQ ID NO: 248696 - DNA, 389 bp, Gossypium hirsutum
cccacgcgtccgcccacgcgtccgttctatgctgccttgtggaaaaaaaaaaaagaaaaaaaaaaaaaaaaaaaaaaaaaaaaaaaaaaaaaaaaaaaaaaaaaaaaaaaaaaaaaaaaaaaaaaaaaaaaaaaaaaaaaaaaaaaaaaaaaaaaaaaaaaaaaaaaaaaaaaaaaaagggggggccgtttaaaagaaccaaagttaaataaccggggaatgcaacgtaaaaattttttaaaggggccaccaaaataaaattaatgggccgggttttaaaaactttggaacgggaaaaaccctggcttaaccaaattaaatccctttgaaaaaaatccccttttcccaagttgggaaaaaacaaaaaaggccccaacaaatcgcttttc

SEQ ID NO: 248697 - DNA, 391 bp, Gossypium hirsutum
cccacgcgtccgcccacgcgtccgttgacgcgtgggtgcgaaccaagatgatcggggaaaagcagatgatgccgccaaggaactcgaaacggttgctggacctgtggacttattgaccgatcttgataagctgcaagggagatggaaactgatatacagcagtgcattctcgtctcgtacactcggcgggagccgtcctggacttcccactggaaggttgctccctgtaactctcggccaggtttttcagagaattgatgtcataagcaaagattttgataatatagcagaaattgaattgggagctccatggccattacctgcacttgaagtactgctaccttagctcacaaatttgaaatcataggatcttcaaagatcaaaataacat

SEQ ID NO: 248698 - DNA, 372 bp, Gossypium hirsutum
gagacgcgttggtcagctactggatcatacaaagcaccaatttcccataagccggggtcacccaatcttaacgctaaagccctgataacaatcatttttgaacctcggtaccaccagtgggcgctctgtcccgctctttctttgctctgctatcctttccagcatccacagcttcgctctaggcaaggctaaagtgcttaaagccaccagcatgcatgcattggcgggcaattctgacccagagtgtgaagctgaggccgactccggccagctgatcagtcagggcgagctcgacgctttcatggtgaagaaaagagggattgtattgtatgacccgggggacttcacataagcttgccacacagagactac

SEQ ID NO: 248699 - DNA, 394 bp, Gossypium hirsutum
ttccgggaaaaataaaccataggaggcaaatggttaggctggtgggaggaaaacccagaggggtagaaaatgggttcggttccccaaaaactgaccttggattttaaaccaacttttgtacccaaaacgatcagactttttttcaagggggtttaactaatcgcaaacgttctgttaaggtttaaaactcgatgcttttgtaaaaagattggaagagaaatgagaaagatcgatcctttaaacgtgaacttcctctttgcatgctccttctcaacgatgccattgtagctttaaaagaggagtcagtgcaatgtatgtcaagaaatgttgaaccagttttagaagagttcattccattgaagaacaagaaggagaataatcaaagtgaagaaga

SEQ ID NO: 248700 - DNA, 346 bp, Gossypium hirsutum
gttgtctggatatttgagctcttttcttataaatttttattcctttcttatggataaaagagaaatggatgaaaccaagccatgaagttgtgagagcagccacgtttacccccaccaggctcagtcactaccttttctctactttcttgatctgcatggttccacttccaatgttaacgccttttttctatgaattccataccctacttgatttatggaaaccattctccgtgtaaaacaatctcttccttaccctacaacagttttcccttgcggcaacgtagtgtgcctccgtaccgggaagccttcatccgtacgaagatggcggcgctccgtgcttcacggt

SEQ ID NO: 248701 - DNA, 391 bp, Gossypium hirsutum
ctcaaaaacactcacgaaacccaaaggccttcttttacgaatccctcacctacggtacacgatggtcatagttacagaaaacatcatttgctgaaacttactttccgactctgaaagaggggtacagattggctcgatcaagggcctgatgtgatctcagaatttctcaaattggttaatttgggttagagaatcgtcgtgcaacggataatctattttacaagcgttaaccagtgaagcccgtgaatgcggatccatagaggaacgattgcatgctttgtaatagctgaaccacctctggtacgggagtgtcagaaaaagtcgatgtggacgattttgacctattgggcaaagaacctaacagggcttcttcactcgaaattatggataa

SEQ ID NO: 248702 - DNA, 391 bp, Gossypium hirsutum
cttttccaaaccctaaatcccctttgaaactgccaattctccttcccctagcaggagtcaacagatttagactggagagaacacctttcagcctttcaatctcctcttaacttcgatattaactaagcaagaggagatccacggcgtgctttcaagataaactccctcttttcccttttttattcatgccttagagtaaaaaacaacaaataaacaaaatatcaagccgaaaaaaaaggaacgcctccgagatttcagttggaaaatcacctttaagaatcgattgttttctattgcttttgtttttgtatgtgtatttctgtgtttatgtggcgtttgagtgtgtaatatgcgtgtatatattgcattcgtcaccaaaatacactgattt

SEQ ID NO: 248703 - DNA, 195 bp, Gossypium hirsutum
cccacgctttcgatgactttctttttttactgcgccattttctctatggggaggttcaaatacctttgttcaagtgctctctacgaaccattcttgactaccaagacctgcgctccacctggatataacaacaaatctctgactgttgttcctaaagtaccaattctgcttgaggactctaatccggcttaaaag

SEQ ID NO: 248704 - DNA, 172 bp, Gossypium hirsutum
agtaccgtaccggccgtcccgacccaacccacccgtgcattcaaaccttaaaactcaatcaaataggtggaagctttggtaaagagagtagatatggtggtgggattggcaaaggaagaagacttgatagaggttcccccagtaacccctgacaagagcctgacatcaccat

SEQ ID NO: 248705 - DNA, 384 bp, Gossypium hirsutum
ctcctttgcttttcatacccaaagttattagcaaaatcaaggccatggttccggcaggaaacaacccttttgaattctcaaaagaagcctcatatctttatagtttcttgctcttcctctccaacttcccagtccccagaggccaatgtccagactgctgagtcttgtgtcaacctgggtctgtccctcttctccaaaggacgcgttaaagatgctttagtccagtttgaaacggcacttagtttagacccaaaccctgtggaagcccaagctgctctctataacaaagcctgctgtcatgcctaccaaggggaagcaaagaaagctgctgagtgtctccgtactgctttgagagactacaaccttaagttcggtacaattctc

SEQ ID NO: 248706 - DNA, 133 bp, Gossypium hirsutum
tccacccataccatacactactacttccttctactagcaatggcattcgaagtaatgagatcaattaccattgtcactggctgtctgacacaagctatcattggggttcatgtcaccgaccgaaagtgtgact

SEQ ID NO: 248707 - DNA, 385 bp, Gossypium hirsutum
gctaaattacaaaagcaactcaagatctttacagtcgaaattgacatgctggggagggcatatactctttgcaaaccgataggaacaatcttcaagaagagattgcacatggagcttctataaagaaggagctggagagtggctaggaacaaaatcaaggagctacaaaggcaaattcaacttgatgctaaccaaacaaaagctcagctattgtttgtcaagcaacaagcttctggtcttcaagcaaaagagcaagaagccatcaaaagtgatgctgagcttgagaagaaattgaaagctttaaaggagttagaaattgaagtcgtggagcttaggagacagaataaagagcttcaacacgaaaagagggagttcactgttaaac

SEQ ID NO: 248708 - DNA, 265 bp, Gossypium hirsutum
gccacgcttccaatacgattctatttctttattcgagcgagcacaaacccggggaaggcccacccaaattagctcgctcatatacacaatacggccgcctacaacgcataatgctccatagcacccaccgccattttaatgcctcatgtccacactgacgccttgatcacccactgctatctcttgccaactatacataatcgcgattccaaggcttatttttacgaacccgatgagctaagtccaaaaacccggaagctctctc

SEQ ID NO: 248709 - DNA, 199 bp, Gossypium hirsutum
cacacacttcccatacctttttttttcttcaaaaccaataattaaaaagaaaggttctttataaacccttcaatcacacaattaaacaatactctataatataaaaacaataagactcatctaccgctctatattataaattcctaacacctacttaatacaacttccgtaataaaaaccaactcacgcccaccaacca

SEQ ID NO: 248710 - DNA, 355 bp, Gossypium hirsutum
ctcaagctctctatgactatttttgtgtactaagccgagctcatcaaggagaggtacatgcaccgtcaatcaagggcttacaatccaccgttcctgactaccaatccaagccctccactgagaactaacaactatagatctcactagacggttcccaattgtgacaactagtagcttgaagactatcatccacaggaataacttgccaactgcaaccaagcgctacatagcaacacgtgttgtccatgctatgagagcaagcacaaatatcatcttcaaggtgacccacaacaattgtgaattgacatacgctcaatatctaacagcgacgctgaggttagaccgccgttataca

SEQ ID NO: 248711 - DNA, 216 bp, Gossypium hirsutum
gacacacttattttacacctctatatctcgacaaccaatagcactagaaaagaattactttataacccgttcgataccacaatacaacatcactcttggataaaatgccagtgtcgctaatcaaccgtgcactgtataatggccaatcaccattctgttaaatttcgtgctaaaagcgacccacgcgcccgttacaaaatacccgacccatattat

SEQ ID NO: 248712 - DNA, 189 bp, Gossypium hirsutum
gccccacttcaaactcaatttcttatcacgaattccaagtacacagaggggaaggcctctatcaatgctgcccaaccagcttcacacaatactgaagccaagttcctaaaatgatctcatctacagattgagctcaaaactcctaaaccctattttgtagactctctgaatcccatcaaacgttacacc

SEQ ID NO: 248713 - DNA, 213 bp, Gossypium hirsutum
accacacttcacatacaattttttatctacaaatccaaaatctataaggaaagttccaatataccttcttcactcactaactaaaacaacacagaagaccataacaccaatagaactctaatatcacatcaagattaaaatacctaacatctatataaatcaccttccttaacaaatccacctgatcccaaccacacaaaacatcaaccataa

SEQ ID NO: 248714 - DNA, 264 bp, Gossypium hirsutum
gtcccacttaactttcacatatatttcttgtcatccgtgatcggaaagcgaagctagattctctcttctgcatccactacctccgacaacacttcagtccctgtccaaaccaacactctagaccgattcaccatcaaaatacctaactccgctatccctgcctctatgaagcccaacaacctcatcacttctgtaacaaacaatagtgtgaaagtgcaatacattcaagttttctcttcttctcatacgaaaaagaagcagaca

SEQ ID NO: 248715 - DNA, 211 bp, Gossypium hirsutum
agcccacacttccgaccgaattttttctatctataacaaactacaaaaaggatggctctaatcgtccttatgctatcactacctccctcgattctgacaagcattcacttagcacacctgtagaaccgatatctatttacatgattaaaatcgctagtcctaactttaaaaatatcaaccaacatacacctgctagagatagcctaatgta

SEQ ID NO: 248716 - DNA, 379 bp, Gossypium hirsutum
cccacgcgtccggtggagttctttttttttggttttgttcgccctttagcagggaaaaaaaaacatcaatcaattccctgccatggaaggagacttactagattgggaggtgctccacaactcggattctgactctaattctatcctggttaactcgccccaggtgaggaatcttgaggtaatcgaaggtgatactggagggatgattaggtctgattacttttctcttgataatcagagtatgtatgcgaaggaaggggatgcgagtgaagaaggctctattgagtcagataatccgagttggattgatcccaagccggagactcagtttaggaggaataattcgggtgatttttggtccgattcgggtagtgatcgg

SEQ ID NO: 248717 - DNA, 225 bp, Gossypium hirsutum
aaaacacttaactcacaactttttttctctatatccatgaactgaaaggggggctccatttccatttctgcaaccactacctacttccaatctcacatccacttccaaaacaatcttctacaccaattcacatttaaaacaattaccatctctattaatacctatatatccacatccacctatacaattatcagtataatccttacatccaactacacaacatct

SEQ ID NO: 248718 - DNA, 120 bp, Gossypium hirsutum
aacacgctttcgtttcaactttatttcaccaactccgtgactggcaggggggggacgtcctttactgttgtagccaatgcctgcttccagcctgtcagatacgggcggagagacatacct

SEQ ID NO: 248719 - DNA, 362 bp, Gossypium hirsutum
cccacactttcctttcaacttttttttttttgctccgcaacctgtttgggggggtcaaactgcccttctttaacccatgccaacttaccatctttaactacaaacttaaccaattcctacatttcatatcaatatatatatgtctaatcatcacaataatcacattcctacactcatactcactatccatgtatacactcctcattttccacaagccaataacatcttacatacctcttcatcatctacacaaatcgaacctacattgcctccactttcctttaaaaactctttctgtatattatgctaatctacttcaccctcccttactttaaacatccttttttctgggatatactaca

SEQ ID NO: 248720 - DNA, 351 bp, Gossypium hirsutum
aaaacgcctagctcaaaaccttttttttttattcccataaattcccctcggggcccgggtctcttttcccacataccgccccaaaaagctccccattccttgtcaatcctaaccctataaatcccattcccagatccctcacaaagcaattccttgacagacccaacgctgtccaactcgcatcaagagccatggacatcatccaatcgcctactgccacgaggcaatccgcagtcctcagtcacctcttaatcttccccgtcagcaccccactatcagtggcgaggccctctctatgcagaatatgtgctgcgttcttgcttggcactctgacttagcgcgcttttggct

SEQ ID NO: 248721 - DNA, 379 bp, Gossypium hirsutum
aaaacccttctctttctcccttatttatttatcaccgcaagtggaaagggcggaagggccttgattgcccgagagaagaactccttaaagccaactagctgctggcaaaagaaaccatcttgagtctaacaagaaagccatgtccatccactgcaagagactgtctgcaaacattcatatgtaccacaacgttatgaaaataccattagcacgcttatgcaaaacattcaaaagtcctcttgtacccgtgctttcctgatctcaaaaaataaacatctacactccacagaaagaacggatatgtcaagacagattgcaaagcatatcatctatctatgtcgaatcttggtactatataacatatcataaatgctctttc

SEQ ID NO: 248722 - DNA, 369 bp, Gossypium hirsutum
tcccacttctctttacacttcttataatcttaaccataactgctacaccgagatcagctctttttctccgatcacccacctcctctaatcctaccaacccttcccatttcaaaaccccttccctccaattccctctcctttccctcactcctcctaacctcacccaccattccaccttccttctcaccatcttcttcccctataaaatctaaaaactcttcacccaaatctccaacttaaccctctattaatcccacaccctttttgacttccttcaaaataaactcaactttttttccctttccttttctccctcaacccttttattttccctcccccttttttcccttttcctaatcatcttttttt

SEQ ID NO: 248723 - DNA, 243 bp, Gossypium hirsutum
aaaaccctctactttcatcttttttttaccaactccttgaactgtatggggggctccaatctcctttctgcacccacttcctacgtacaaacttcaactcctgacggaagacattcctctataccaattcaatattaaaataattcatctcaccaaggatacataaattacctaagactaccataccatgatcaaccttttccctttctacatagtcataacatcttaccgtaatccccatca

SEQ ID NO: 248724 - DNA, 213 bp, Gossypium hirsutum
cacacactttcctcacatttttttattattaactcctcgaattataagaagggcttgaacctcatttctataaccaatccctacttacaaacttcaaccacaaaccaatacatccttaacatcaattcacactaaaatacccatctcacaataatacaaactatcctcattcaccataccattatcaacactatcatttatttcaaaatcata

SEQ ID NO: 248725 - DNA, 249 bp, Gossypium hirsutum
aacacgcgttcgtccaaactttttttttacaattccgtgaatgggaaggggggctctattgttacgtctaaaggcaatgccaccgtccaatctctaatcacgaaccatagcaagcgtgtacatcaactcactattaaaaccctacatattgccatagatacctatgttatactctgccacctcatgcgttatcactataaacgtcatcatcaacttcacaacatttacaagtacttttcaatacataca

SEQ ID NO: 248726 - DNA, 276 bp, Gossypium hirsutum
  unsure (1)..(276): unsure at all n locations
ntcacgcgttcctttcatctctttttctagagctccgtgaccagtaaggggggctacaatctccgttcttcaagcactgccaacgtacaaacttaaactacaaaccgtagcgactccattcatcatttcactctataaatcactgatatcgccaaaaatccatatgctaagcgacaaccaccatgccagttgtaaacctaaccatttgtccacacggtacacaacatcaaaacgtacttttcatgccatacgcacatgaacgcgtaccataccaac

SEQ ID NO: 248727 - DNA, 244 bp, Gossypium hirsutum
agccaacactttcctcacatcttttttttttcatctccttttactataagaaagactccaatcttctttctttaaccaattcctacttacaaacttcaacaacataaccaaacaattcttcaactccaattcaaaattaaaatattcaatctcactaatgataacataacttatactcatattatcataccattatcaaccttatacttaattacaaatgcataacaactttactatactttca

SEQ ID NO: 248728 - DNA, 386 bp, Gossypium hirsutum
gtaaaaatgtcagctgccccttcttcaatgcgctgctgggtggattttaatggcaagaattatctgtctcatggtaaattagtgtgtttgcctcccagaatggggtcatcaatgctttcataccattccagagctgattttctgaaactcaatagccttacttcactttcttctttccagcataggaatgggaaactcaaacttcagtcaaagcctatggcaccatcaagaaagttacatcaaccatgtgcattggttattagatgtgatcaccctcaaaatgcggatttgcctcgctattattccaagaaagagaagaagcccttccctgtgcccatagtggagctgaggcgagctgctagggagaggttcaagaaaagcagagg

SEQ ID NO: 248729 - DNA, 287 bp, Gossypium hirsutum
gtccgtctttctgttttactccacaaccactatcactaccattatggcttcggctactggttctgtagccaaacccaaccttcaaattcaagccaaagggaagggtggtgggtttgcaaatttcttaaggcttcacaacttcttttcttacctttcctttggcaagaaaacccttggtgacctccattcaactggtggttttcaaaacttttgttttagaagcaattatggccggttccagaaaaggattgccaaagccaaacttaagggggcttttaatgggtttg

SEQ ID NO: 248730 - DNA, 151 bp, Gossypium hirsutum
tcggccaagcgttcggatgacttcaacaacttcttgattgtttaggcttcacccgatacatttggttaacacagagacaccattcccgatggggcactttttttggtgcgacacatgtgggccccaaaatgggtgtgtatccactttcatg

SEQ ID NO: 248731 - DNA, 417 bp, Gossypium hirsutum
gttgagcagcaaaagcggtcacagtcccaagctgaggcccaagcagagcagtccctatctcagtctcatgctcagtagccatgactgcctcctgtgccaaatgctgttgatggccgagtatcattttgccttaattttatgtttgttttggtcaccttgttccattctatgtatttaaaggaggcggctttgcttcatggtggaagatcacctgtctgacccccaagttattcatttgtttgtgtggaagaatacatcattcacagaactatcgaagtttgtaaaaaaaaaaagggcgcaaaaggaaagaaaaaatccgagtttgagcttaaatgtatgtaaatttgtaccattgtaacattgcacgactgtaatcatcctcagattttttagagtgatgtttcttgttttgcaatc

SEQ ID NO: 248732 - DNA, 422 bp, Gossypium hirsutum
aaaaaaaaaaaagaaatctccaacccaaacccttcctccgccggcatttgtttgcaaaaaaaaaaaaaaaagaagttcaaattgaagaatgcctgttttttcttcaagagctttgtccaggacctccgccaggcttagaaggcaaaaaggggcccctaaaggcaattggcccgccgggtccaggacctttgctgtttctatgggggagctaaccagggaaaggctgaaagacccttttttacatttggttgctgccttgccgacccggcaggccgaataagccctccgtgtcgccggcaaaggcttttcctttaccttcaaggttgaacccgcccttaacaccctggtcgactttgcttacaataagggttacgggttttcaatttgataagctaatttttaagcttattttctttttcttt

SEQ ID NO: 248733 - DNA, 203 bp, Gossypium hirsutum
gaccgaaagtgttttaccaatacagagtacgtttacttaatgataacgtgcattgtaggcgctacaactgcccattatctttgagccaaagctgtttctgaaatctaccatctggggggagaaattagccaggggacaggttggctaggggcggacatttacgttacgttcaaagggggggactttggtgttggcaaagggat

SEQ ID NO: 248734 - DNA, 424 bp, Gossypium hirsutum
cccacgcgtccggcaagagtacataaaagggattagtgcttggaatttcaacctagaggacttaaaaagtcaggctgcactcattcaagatgacgatgatgcaccaaatgcagaagatcaagatgggagcaggaaacaaagggaccggcatgatgtagttgggttatcagctgagaggatatctcctgaaatgcctaataattccattgctgcaagtagccaggaggacggacttagtgatcttcatgatttggagagttcacttgcttcatttcctattaagccacttcaagcactcaaaggctgttttgacattggtgaagctgagggtacaaatggtccaaattggaaaggtgttacccaattggaaagtgaacagttaattacaaagtcatcaagagccatggaccaagatgctggaaga

SEQ ID NO: 248735 - DNA, 156 bp, Gossypium hirsutum
ttgttgttgaagaagtgctactaccatggctacaaataagagcgttggggacttgaagggagctggtttgaagggaaagaaagggtttggtagaatcgatcttaacgttccattggatgattacttcaacattactgatgacccaaggatccgggc

SEQ ID NO: 248736 - DNA, 111 bp, Gossypium hirsutum
cccacagcgtccgtaatacttctccatacgactttatttttgagaggcgcgtacagcgaggagggatgtttccggtgacgatgatcataacactatgtttctcttctttgt

SEQ ID NO: 248737 - DNA, 292 bp, Gossypium hirsutum
ctcaaaccctaaaagaaacagcggaagggcgctgcttgcactttccatcaatggtgtttgggagccataagagcacgagcatgagggcttcactcaagcaaaactacaaggtttttatataagtaaaggagcatcacatgaagtaagctattgaagcgaagatagtggtattgaaccgttagagaaaggttgagaaagaccctggcctccccagtgattgggctttcaaggaacaagaactcaaggctctcgaggctcgccgagctcgggcactcgaggaattagagcaaaa

SEQ ID NO: 248738 - DNA, 424 bp, Gossypium hirsutum
cgaatttgtgctagactttgaggagatatatgtgattgattcaaagaccaagtcaattaccagagcaaaggttttggtcactgttccaggaggaagaaaccgggatagaaagaatgacctacttgttatacgtgataacggaaactccttcaaaataattcattcgagtgaaagagatgatcctacaactgtaatcgaaagggaagaatgggacaaaaccagacaagacatggaaagacatctcaggaagctacgagatttcagcatttcgaattggttctaatcgaacgtcgaggttgtttcatgaagattgcctggatttatcagcacggtgagaaaatgaaggatgaacttgtaaaatcaaaacttgagacttaggattaggaaattcactttcttcaccaatggttcctagctgaagctg

SEQ ID NO: 248739 - DNA, 348 bp, Gossypium hirsutum
ggggctctcttgccttgtcttttgccactttttttgaatatacttgaaccaaagaagtcttgctgtaatggcggggcgagtatcacttctgtccaaaactactttcaagctctactctatcttatctttttcggtctctatcattccgtcgtcctttcgcccctaccacaccaggaatctacatctatgctctgtgcatagatcagttaaaccccaatcctgtcaagctaagatctaaggggaagagtgaatgctatgtgcttctgcctacttatgactcagctgagaggagacaaatcatggagaactaataatatagctgttctgtgctgctggatgatatctaac

SEQ ID NO: 248740 - DNA, 327 bp, Gossypium hirsutum
  unsure (1)..(327): unsure at all n locations
aacggaatggcccgggctccgacgccgatcgcgtccgcgataaataataaaggatcacaaataaatacagtatctattactactctttnntagatttctntnnttctgcntttgcgagtttgctcntnngaaaatatnnngtgtaataccannaatttntnnttttnnnaaaaatgggaacccnncctccttacccattggctnnntcttttcggggcccctttaaacaccaatttagcaagggaccctattttggctttattctttcgcttacctggttggggctaatttttcttttgctttggcgtgttggnctttttctttctc

SEQ ID NO: 248741 - DNA, 410 bp, Gossypium hirsutum
  unsure (1)..(410): unsure at all n locations
cccacgcgtncgctcagaagggaaaaaagtagcgtatccgtagagggaggaccagaaattcaatgggtttcaccatgggtttgaacttcgttctcctcttagtcatggtagctaccaatatcctttccctttatcatctctcttccaccgtccaatctcccaaccctcctccccctgttcccgtccctgaccaccttctccgtcagcttaacaccatacgcgccagcattaaccacctcacgcgccataacccttcttcttcatccaccactgctgaacccagttctgctgtacctcgagatcttatcctccactctcagatcggtcccattgcttcttcttgtcacaaccatcctgatcttcttcataggtatatgaattacactcctttttcgacttgcccttacgat

SEQ ID NO: 248742 - DNA, 407 bp, Gossypium hirsutum
gtcagccgccgctcaagtctttactcaaaagacacacacagcctctctccccttcatattcccacttccaaattattcctccctggttttcttccgactatggaagacggtttagggcagtcgccgacatcagccatacgccgccgctactccatcacaaccccagtacaaatccctacaaagctaactctactcacaccaaagccgctccaaaccgccaccagcctctcaaacggcagcgccaccgctcctttgtctcttgacctcgagcttatctctctcaaagcttctttcgcttcctacacttcactcaaagacatcctcccttcccccgctgtcgccgtcaactctccgaccgccgccggatccgctaccagttccgggtacgaaatctccatacgtaaccg

SEQ ID NO: 248743 - DNA, 189 bp, Gossypium hirsutum
ccaggtaagccccaggggggcagggggctggttccggggttaaattaagcccctaattttttgttccatccaattggaccggttgtttagggttgatgaacaattccaagtcattgtttccaaataagaaggcttttttcgatttcccgggggcccgtccagttggggcttacttgacataactggggc

SEQ ID NO: 248744 - DNA, 332 bp, Gossypium hirsutum
gccaatctgtaaagtccaaagaagtcagcttcagctatcgtttctcaatgtctttcttcttctttatataatcttatatgtagtctaactctgcaatcttccaatcccagcaagcggcccaaccaaagtcagatgatgatagatcgttattcaatagctttgtttctggttttttcatatcttgttggcctcttggatgctagtgctggtgatgctgatccacgttacaggggttgtgtggcagaatgcgagaaaaactggttgtgctgggggaacttgctttccacactgcaagtttcctttccgatggtgttgcccaatgatggtcccat

SEQ ID NO: 248745 - DNA, 189 bp, Gossypium hirsutum
ggcagccgtgatggcgaccttgactatgcagtcttcagtggagaccaacaaagtcaccatgccagctgttgaccgagcaccggttaatatgtatggatcatgagacagagcttatgctgctaactcagctactatgaagaacatctttgaggatagtgggcgctaaacacaacaacatctgcatggctg

SEQ ID NO: 248746 - DNA, 187 bp, Gossypium hirsutum
ctcacgcgtactgtttgggtggccactaggggtttgatcatcgaactcatataggatggatacacagtcaaggaagaaccaacgcagaagattgtggaatcagacggtcacacccaatgttacacattgcggacatgacagttatatacaaagcatgatgaggtatatagcatgtgcgaggctgacg

SEQ ID NO: 248747 - DNA, 382 bp, Gossypium hirsutum
agaaaatataagccacacaaaaaaaacaaaaaaacaaacaaacaaacatttccgatccggaaaaaagttagatcgttgaccatgaactccggcacatccgacggagaattggcggcgcgtggatcgagcgggagggtgtgctccacatcgtcagcagacaagaaaaaagagaaggcaagagtgagccgcacgtcgatgatactgtggcatgcccaccaaaacgacgccggcgctgtccgcaagcttctcgaggaagatcgagctttggtcaacgctagagattacgacagccgtacgcctctccacgttgcttcgctccacggctggatcgacgtcgccaagtgcctccttgaatatggtgccgatgtcaactcccaagatc

SEQ ID NO: 248748 - DNA, 253 bp, Gossypium hirsutum
ctcgcgcgcctgtacttaacagtaaatacgctaattcaatgggcgcttagaaccatatccatatattgcaaggggtcagggggctgatattcatgttaatagcccatgacttgacctagcttatatagtatatagattgttcataagtttggatcaaaaaacgccagtgctagtgacatatatcatatttaacagattatgtttgggtggagctccttgatgtacgtctcggatgagctcaacagcgagggga

SEQ ID NO: 248749 - DNA, 400 bp, Gossypium hirsutum
gctttaagcacaattttcttgctctagctattcttcttcccttccagactaacctatactgttccagatccaaactatgcaattaccgaattgccgtctataaatatcttagcaaaaggcttttgacaaacaatcttctttctggctgattttaaagagagactattcacaagaactcttcttcgtcttattagagcaagcaaattcaaaacaataaattagaaaagaaagagagaatcaaagatgtgcttggtgttcgtatgtgatgaggatgaaagggtgatatcgaggcagccggcaccaggagcctgtccctactgcggtgggatggtgcaagccatggatgttgaaagccagtggaggttctgctttttgcctttgtattttaagaccaaaagga

SEQ ID NO: 248750 - DNA, 254 bp, Gossypium hirsutum
gaattgcccggcccacgcatccgtgtcaattcaatcaaaacaaatttttgttgatacgatgtttctgcgcctcctacagattgcggttttggatactggcgaaaggcaactatcctggaacttcctctttttgtttttcatctctactgtcgagctgatactgctcgccacatggatgtcatactaaaggctctagttggaacaaatttgccgccttttcaacatctgaggcgtgcgcaccagaactacacctg

SEQ ID NO: 248751 - DNA, 222 bp, Gossypium hirsutum
cccacgcgtccggtattgtttgtgtgtgtagtctaacactgttgcaccaaacgcttgactagccaattgtctttgtattgcatttactgtttccgcattgagagcctgcccttgattgccgagtgccggtctgtctggctactgttccaatggagtccttcgctgctctacgatcatttcactattatgtgagtgctgcttcacaagctcgtctgacgcatg

SEQ ID NO: 248752 - DNA, 158 bp, Gossypium hirsutum
tcgatcgtttacatgcccgacaacctttactactttttaagatgatgatactgggttcaattttgtgaatcaggtgaacccgtatcgcatcctgaagaaccaggctcttgaatctttgtaccgagtgaatattgggggcagctccatttcacctacac

SEQ ID NO: 248753 - DNA, 171 bp, Gossypium hirsutum
cttccgtatgtaccgcacttttcctgctattaagttttttcttatcttcccagactgacctatgcggtgccagatccaaatctatccaatgacggcattgccgtttaaatatctgaacccacacggctttggtgacagcatcttttgtgtggctggttacaaacgagagac

SEQ ID NO: 248754 - DNA, 389 bp, Gossypium hirsutum
gcttggcagaatcagtgattggtgcggaccctttcgacccggcgctctcactcagtgcgagcccggacctgttttgtttttgtaattatgtatttttcggacgaaatggaaatacacactactttttaggttgaatcactgaatacatagaacgaaagcgaagaaaatttcttaaatttgtagaaattgtcagttatcacctggcgttatatgtggatcacattgtgaggccggttcctgcgcgtccagttgaatcgggggctggtccctcgacggaggaaaaggagaacgcgaaggatacggaggttttccaaggaagcaatggggaggacccggttattcacgtggcggaatgccgcatacgacccgaggaagattgcacttataat

SEQ ID NO: 248755 - DNA, 418 bp, Gossypium hirsutum
cccacgcgtccgcccacgcgtccgctgggtttctttcaaaacaaggtttttctttgacgtatttcctcgctttcttttaaagagaaaccacaaagaaaaaggaaacgggttttgaagaaggagatggttttcatgtgtgagattttcttgcccggaggaaagttggaagaaagagagtgggaaaaggagagataataaaaaaagaagaagaaaaagatcaaatttgcctaaaaagccgtagtagcagaagtggaaaaagggggtaattcctttttaagcaaagaacaagaaccctaagtttttgtttgtttaatctgcttatctgctgggctaattggcaatgtctgctacgataatgagtgaaccaatggtggtatcagcaccatcaccagaaactcaagcaacatcagcaaaactt

SEQ ID NO: 248756 - DNA, 418 bp, Gossypium hirsutum
cccacgcgtccgagacgaggttacagtcctacagagcctccgttcctcttcttccccttgtttctattttttaaattattattattgtagcattcgtctttcttcgattaaatccctacattttttttcctgaaaaatcccaaaattttcataaccagagcattgaattgaactcactttccatctttctcgccccattatttttttaaattttatttactaatcaacattttcttttctgttttcaagtgtttttctccgtcgatgaacttttccccttagaaaattaaaagtaatcggggttttatatgggcgcaaatattaatatggctaatttcagtacctccgctgtgctgacagcagttaatcactctcccggttgccctgaccaatcacatcctgccacgaggcctatttc

SEQ ID NO: 248757 - DNA, 313 bp, Gossypium hirsutum
atccggcgccacgctcatttgatctactctttgactatgaagcctccctttctcacccaaagggatctttaagggtttattagtggaagtgtgcaggcacatcctacttaagccccgattctttgttaaagtgtctcagacccatgaagaagctagccctatttttatttactgcctgcccatttgttaccaccacggtttcagcaacgccaggatttaatttgttattatacacaaatgagagaggacttagtacttttattactttgggagatgcagtaacacatgggccactttaccatgacgacgcttt

SEQ ID NO: 248758 - DNA, 417 bp, Gossypium hirsutum
cccacgcgtccgcccacgcgtccgccccccactttcccccacatatccttcatttcccagatctgtgccactttttacttcttttttttattcattttatgctattttccaatgtcccaactccccatacccattgcttgacttcatgatcggtttttgtgttttcatagtggaatttgcattgcaaagattttggtttttttagctttcattgtaattagcttgtttttgcttctacatcaaacaaagatcccatcttttaaatacccaagagaggaaaagaaaaatatggcttcggtgaatctgtgttcttgggttcaatcttactccattttcaaccaagcttctagatccaaatattctcttttgcccagatcccttccattcaaccccctcatgaatctgtcatcttcaacc

SEQ ID NO: 248759 - DNA, 413 bp, Gossypium hirsutum
tgaagctgagtaagtctcttctttctcctgtcgtttcaagattgaacgctggaaaaagctggcttttcttcaagctgattgaacgcaggcatccagccgcttaactccttcatatagtgagaatcagatcaccatgaacgcttcagcagcttccctatctgcgtgtattgctatcaccagcactaatgaagagctctttatcggtctcaacaaattgactagtggttctcctctaccgtgcaatgttatcgaagtaaatccttacagcttcaagcccgaatacttaccagatggtatgtggtttttgactagctcaaatgataacactgatatggaacatggcctctggaaggtcaaagaggaggcccgtgaagtcttctcaaactctgatattatcggttggagaaccactc

SEQ ID NO: 248760 - DNA, 440 bp, Gossypium hirsutum
  unsure (1)..(440): unsure at all n locations
ccggcgggtcccacgcgtccggnttttcccttctctgctttaacgntttagtcccttgcccatagccttcttcatggatgtccctttcactcagtcctcagattctccgactccttcttgcaaagacaccttcttcatcacaatcttggccgattttgcattcaccctgttgttgttcatcgatctcttccccgatttccctggttacagtaatggctcgtctgcctttaattgcacaaagtgtgaggcgtaaaagaattggtgctgcattgacaatatggttggaaatctgtataattgcgattaggttcttatttagaatgggtgccaaccttagcctacatacttatagaccaatgattaggtcctacaccttagatttttatacaaaacgggattatgtgaaaaggcttgtatatgctagtgacgagacatgtatt

SEQ ID NO: 248761 - DNA, 174 bp, Gossypium hirsutum
ctaacagccatgaaaatgttggagaaacatcgatggtcatcatacatacacctttttagctaatcagcaaggagatggaaatatgtgtatggggatgctttcattgtaatgcctctgttgagtgttgtacaaatacctttatgaaattagacgcaatgaatatttattaaggtt

SEQ ID NO: 248762 - DNA, 179 bp, Gossypium hirsutum
  unsure (1)..(179): unsure at all n locations
ggggnaacanccataaaaaagttacaaaaacatctttggtgatcatacaaacacctatgtcggtagtcagctttgagatggaaatatgtctatcctgatgctttcatcgtaatgcctctgacgagtgttgaacaaataccttttatgaaatttagacgcattgaatattcatttaggtt

SEQ ID NO: 248763 - DNA, 428 bp, Gossypium hirsutum
cgaagtctgtttttcgttttctctctctatagctcaaagtcttggtttgctggaagagaagccaaaaccgcgaaagcctataccttccaaatctcttcaatctttcgtaagactattgcacagaaggttttttcttcttttttttcctttttatttgttacgttgttcgttcccttttaattccttttttttaccttcaactttcttccctttatctaattttggaaaattggagttctttggttcgcgccccttttaactttaatttcccttcaattccttaatttttttgggaagaattggttcgaattctgtgtctttgtggcttttgcaaaaattagggccttttgagggtgtaggtaccctctagggttcaacttttaaagggtcgatttttgaaggaaaattttgcttattttggggctttt

SEQ ID NO: 248764 - DNA, 419 bp, Gossypium hirsutum
  unsure (1)..(419): unsure at all n locations
cggtcttacttcttgctanctctccttccactaagatctaggcttgccttcactcactttcttttgtaattatattgttaattattactgttgttaatagactccagttttagtaatttcggtttgatggaccggaagcgaacggagagccccagctacacgcgccggtggagtagtcactcgggcacggggagcactggcggcggtgttgagtcacctgcattgtcgccggcgcataaccagccccgccacgcgcgttcttcctccgccactggcatttccagcataaagcgcacccaaaacttcgccgcgaaagctgcggctcagcggctggctcaggtcatggcttcgcaaaccactgacgatgacgatgaagaagatgacggcgacgatctaggtttccggtacagtgctccacc

SEQ ID NO: 248765 - DNA, 415 bp, Gossypium hirsutum
caaaattgatcattctttatatgtttttctctcaaatcccgaatctgtctttacaatcaaagtgtcccaagctatggaaaatgaaacccaatctttattacccaaaaacagatcatcaaatccaagctattcaactccagaagggctcgaattaaggagtttcagattaggtctcaactggttttgtttagatcaatccaatttatggaaagtgagtctttcttggtctttcttcttcgtgcttgctattggggttccgattatttcgcactatgttcttttatgttcaaactgcgatgaaaagcatcggcgaccgtacgatgcgggggtcagttatcactttcctcttttggcggggtttcttttattagtttatcttcttgggctcggaaatatgggaaccaggagttccttt

SEQ ID NO: 248766 - DNA, 320 bp, Gossypium hirsutum
  unsure (1)..(320): unsure at all n locations
tccacgcgtacgatgatgatgggtccattctatcaattatcacagatcatattggtgttgaccttggttcaatcaaaggaagaagagccaattctggcggctttagaatagaaaacaggtgttaaaatcattattatgattatatagtattatttcctttcgcgtgctttagttgatcaagatcgagatcaaaaaaagggatacattttaataacggatggattgatctcattttctggtctacgtatgagaattggcagagttattatgttgctacttttatgcggnncaatcatgatgcacaggtcatattggggcct

SEQ ID NO: 248767 - DNA, 209 bp, Gossypium hirsutum
cccacgcgtccgcggacgcgtgggcttttttttcttttcccacttcaccttctcggggggcaacctctccacaccgccattgcatcgtctgcactctcaactggatcccctagtcttttaagctttaagtgaaaccgacaaccaattgaaacattttctttgtcccctgttagcaaacattgggaagcaggattttcaacatggacaag

SEQ ID NO: 248768 - DNA, 315 bp, Gossypium hirsutum
gatcctctttgcatgaccttgacatttggcatatgaaggttctataaatggtgacgaaactaattgcatgaccttgacatttggcatatgaaggttctttgacatcactgcaacagcaaataacatatcctgcaacgccaaagtatcctaagatcactcaataatagactgaataaccccggctccaaccgtcttccctccttctctgattccaatgtcatattttggagttttgtatttcttttgcttcagactcatgtctaatctagttggattggtaatattcatgtcacaattcgatatgattttattttc

SEQ ID NO: 248769 - DNA, 435 bp, Gossypium hirsutum
  unsure (1)..(435): unsure at all n locations
ccggnccgaaanccgggggggccacagcgtccgcccacgcgtccgttgccctttgttataggatcgccaatgagaagggcctccttcacctgctgcatcctttctaggaccctctccaccgttcacgacggaggaacagtcaaccttcaccctcgtctcctccgggtggcgctctttagcagcagcagaaccgacaattccaattctcgccgccattggatctctccgcttctcagttccttttcgaaaagctctggtcaagccgtctctctcggccttgtcggcgttgtcgcctctgtggccactgctgcttcggtctacgccaaggagccgccaccagctgaaatcatcccaaaggacgttgttctttatcagtatgaggcctgcccattttgtaataaagttaaagcattcttggactactatgatatacca

SEQ ID NO: 248770 - DNA, 416 bp, Gossypium hirsutum
caaggcacaatgattatggatctacatccttcctaggaatagatgatgcaattgaaaatgcagagaatctgaacactgccgaatcatggcatgtggtacaacatgaagtttggagagttgctagagctgtcaagcatgcctccttagtccttgatggaaaactcacatgaattctgcaagatggacctacccttgagacagcaatatacttcagtgagagtgacgaacatgagagagatctagattatagaaaattcacttacttccttgccagattacattaaaatcaatcatcagtactgagccttatttcaggtatttctatgtcagaatttcatactatagtcacagctttcatgaagggaacaacaaaatgggaatagcattggcatcgagaattaaggcaaatagaccaa

SEQ ID NO: 248771 - DNA, 218 bp, Gossypium hirsutum
attaaaaagggggccaggaaatttgaggaagtcctctttaaaaccaaatttgcatttaccttgctggtattggcaaatttttattcttccctctttcttctgttaacactttaatttattgtttactttaaaattcaaagaacaacctatttataactttggatcagccagtgttgactcttaaataatgtgtgctgctattacttattctgtctctt

SEQ ID NO: 248772 - DNA, 378 bp, Gossypium hirsutum
ctcgaggaaggttcgttcttttgtaatttctcatcatagttcttgtttaatttcgtttgggtttatcaagttcttcatgcgttttagttttatttaagcattggtcatttgttattattattattatttagggcttcacaattgatgatgaaaaggtttaattccccccccccttttcttttttggttcatgttagaagaaaaaatggagcaagagtcaacggggtctggaagttcaaaaatttcatcgttacaatgggttttcaaggacaagaacatggcttgggaagcatacaaaagcaagcccttttcacatagggttctgctttttctatccagtatgggaacgcttgtggcattccctgcctctagcctacta

SEQ ID NO: 248773 - DNA, 400 bp, Gossypium hirsutum
ctctttctattttcccactatctctttccatcattctacttttctactcaaccaagcgcgactcttaatgtttagaaaactgatattaaattccgattactactcttagatgtctcctttttcatttgtagtaaatgaatatcatgctaccgtgtcagtttcttgatatcatattttatgatgggattaggaaaaattttctattgttctttccccctccaagaaaagaagatactctctagggtctatatcaaatttttagtactgaaattatctgttttacagccacaccaggatgggccagcttattaccctgttgtagcaatcctgtctctaggatcacctgttgttatggacttcactcctcattcaagattaaattcatgcaaaagtacggtga

SEQ ID NO: 248774 - DNA, 176 bp, Gossypium hirsutum
accacgcgtccgcccacgcattcgatgaactgatgtttgctttcacataccaaaacgaggagggtgtatttaaaaacgcatcccaacacccattaaacgacttattaaatgaatcacatcatcctgttgtttctttggaatacacacgctatgatatttcctccaccttctactat

SEQ ID NO: 248775 - DNA, 306 bp, Gossypium hirsutum
agccttccgccgggggtacctttaaatctttaacggccgctttatacgtgccaagctaatgagcgccgggcagcaatggattaactatatataactcacctgaatacaatccactgaacccacattcacagcgaacgggactggcagaaccatggcgtaaccgagaccaatcggagcgcgactctagtccgtctctgcagcaggactagtgacgtgtaggctcagaccgagctctcttgcgaacaggagcacccactgcttggaacatggtacgacttatgtcgcgaatcataaaccgcgcacggt

SEQ ID NO: 248776 - DNA, 404 bp, Gossypium hirsutum
agcattcgagcggccataaatccggctccgacccacccaaagtagcttgattttatttgatatatggtgaccgccgcagcatcctccatggcggccaccgccattttggttccacgtgtccacactgccgttaggatcacccactgctccgccttgccgtctctccctcctcgcgtttccagctcttctttttcctcttccgttaagctaagtccaggtacagctcttatacatggcctttttaacactcacttccaacatcacctgcgaaatgtaatcactagttccaagatttattttcttatttattaacttaaattttgaatgtattgaaattaaattgtattttttatgatagtaaaaatataattttatcgattaaataatttatattatcatgggtc

SEQ ID NO: 248777 - DNA, 344 bp, Gossypium hirsutum
gaaaatctttccaggatcaattttctcacaacaaaactgaaaatgtctcgctggtcaggaaaatgtggctgcggcgctgattgcaagtgtggcagtggctgtaacggatgcagtatgttccctgacatactagagaagactacaactgagactattgttcttggcgtggcaactcagaaaatgcactttgagggatctgagatgggagttggggttgagggtgtatcccccatgggggacgaccagaactgcgctcttaaggacatgggtccgagatcatcagaggtatgctgattgtaactttgctattacacaaaataaatggtattacttttataagtggc

SEQ ID NO: 248778 - DNA, 413 bp, Gossypium hirsutum
ataaaatctcctcttttttttgttctttcgaatgctcctttgaaacgtggcgttgcttcgatttatgggtttatttccgattcgttcaacttgtttttagttgaaccagcattggatgatggcgtattattattccaagcttttttactcgttcctagcttcagctctgatcatattttctcttcaaatttatgggtgttttttttaatggtcggcggatcaagatccggttttgagggtgttataataaagctttgattgtctatgaagacatttcaatcatggaatgcactggtcaagaaaagaaatgctttagctgaagggggaaattgtggatttaaaatgaggcagcttccatttatgggagttatttgtacaggtatgttggtcattgtgtatagaactacggatta

SEQ ID NO: 248779 - DNA, 106 bp, Gossypium hirsutum
tttaaaagacccaaaactaacgatatccacccacttgtaactgacaatggatctgaaatcgttaaggctacaattcctgggcatgatgctccacaacccttattcc

SEQ ID NO: 248780 - DNA, 309 bp, Gossypium hirsutum
accacacgcgttcgtccgacgcgtacgtccacgcgtccggtttagatggtgatgaaaaactctgtagtccggataaatttattttggcaaagatttcgttaaaataattcagatttagtggggactggggagttgctctccaaacaatttttctattttaccatgaaagttttgctttagaaaaaagctgataaaaagagcagtgactaatgccattgccgcctctctgatttgttggtttttatgaattcagggatactttatatttaaagttctaattttaataattggttctggttcaaggtggtt

SEQ ID NO: 248781 - DNA, 520 bp, Gossypium hirsutum
  unsure (1)..(520): unsure at all n locations
gggaatggaccgggctcgagcccacggcgtcacgcnccacagcgtgacgtcaaacttcaagatacacccaatttcactagttttgttttctgtcacctcnntctctctcagcgcagtggcnntgcagccnnatctccaaaccgtcgcccgccccgctgccccgccgcccaacccccgagctctgggaggtgtnncagtcccaaacctcagnctttcatnggggaaagaaaagtgaagctcgaagattcacacaacccaccacggcaggttctcttcgggaacgttttaaaggtgatcggcggcccgaaaatagagatacgaccgaagagacacccagaccgaaaaaggacccgatgggaaaagggggttggcttaccgaaatatttcggaccgactcaacaacgacaattactnnncgagggaaaaggggatgggtgcgattccttggttccaaagcctcccatgaatggatggaacctnncactatgctgtcatggaagttcctatgaaataccatcag

SEQ ID NO: 248782 - DNA, 430 bp, Gossypium hirsutum
  unsure (1)..(430): unsure at all n locations
ggacagggccgggctcactgtttaacaaaaaatnggacataaactctctagcctctctttttttttctttaacnaacccaagntttctatttggtctgggttctttgcatttnnccattagctaaaccttgtaaaangaacaaagannaataaaactctttgatggaagcgcgcaaggaatggtggctaacagggcaagtcctgaaacgtttggttaatgaatccaagcaatcacgcaatggtgaaatgagttctagatcacctgtttcctacactccatcaaggtatgtatcttcattgtcaccttttggttccaagaatcatagcagatcagattcataggtgctagaaatgtgtcgaacaatgttggttttggtgttgggccaccaattcgatccattactggcgaggcattgaaatgaagcgatac

SEQ ID NO: 248783 - DNA, 421 bp, Gossypium hirsutum
gaaaaaggggaaacccaaaatgtttgcctttgtttggtctgccgttcaaccaccatcagtgcaccatgaacgatggatggtggtctaccaaagcgttccccttatgccttcatttaaagcccagcctcaaggctcatcaatttcggcctcaaaacccctctcaaccttcgacgccggcgaagaagacgaggatttggtggctcgttcgcaaagtaagtcttctatcttctctttattatactaaaaagcatgcagagcaaaaaagaaaacaaaatagacctgagaaaaataatgtacagacttttgaaatctttttttctttttgattgctcttttttttttatgtttcaatctatgtgtgtataaaaataccatgtttttttttattcccgaaattcccctattttcaatcagttccctc

SEQ ID NO: 248784 - DNA, 289 bp, Gossypium hirsutum
cggacgcgtgggcggacgcgtgggttccgttgtagctgactatcatttctacttctgttacgatggcggctactaccttctctccttccttctccactccctcggtcaattcttccttcaaaggccaaaaaactttaaccaaccctaatctaagctttttggccctaagttccaaaatcctggaggtttttaaaagcacccagcctgcctcctgataaggctgggggctaacttttggcctttcgattggcttccgttcctgccgtccaaacacacatatttttcgatt

SEQ ID NO: 248785 - DNA, 427 bp, Gossypium hirsutum
cccacgcgtccgcttctccagtcccttgccgtctagtaagcaaaatcgaaataatagaacaaggattaagagggaagagatcgctatggtggttacgaccttattgtctccctgtaattcaattctagtccgcgggtttcccataagagaaaacgaatcatcatctcccccattgtttttaagcgttagagacaggtttctgaatcggaacaaaaggttatcccgtggcggtttgcttgtgcagcttaatgcaaccgaaggttcagccgattcaagtaagtccgaagaaagtataccttttgggctaaacccgattccgacgagcctccaccttgggctcaaggtgaaggcaagagttccacagcacagcagagttttgaggttcctttcttcgtttacttgcttgcttcagcggtgaccgccattg

SEQ ID NO: 248786 - DNA, 397 bp, Gossypium hirsutum
  unsure (1)..(397): unsure at all n locations
cccacgcgtccggggaaatgatttcaaanaaaaacagaaagcctccccgttggaagagtgagctcttgtacatttaagttcctttagtgccatagaataagaaaaaaggttatcccttttgcacaaaaaaaaaaaaaaaaaaaaaaaaaaaaaaaaaaaaaaaaaaaaaaaaaaaacccaaaaaaaaaaaaaaaaaaaaaaaaaaaaaaaaaaaaaaaaaaaaaataatctaaaatatagagacacctaaataaaattctctggccgtatttttacaacattgggactgaaaaaaccttgggttgcccatggggtgcgttctttaacatatccctttttagacagctggcataataacaaagaggcccacactaatccttcttcaaaacatttaccc

SEQ ID NO: 248787 - DNA, 410 bp, Gossypium hirsutum
ctttagagttctttacaatgtgaccgttttctttctaaatctaaataccactacggggggcgttattttacttattcaatcaatacaattgccaggcaataactattataaactgcccaatgccagattagtaacatcgaatctaatcaaagatatctgtaagaagtgcgacttctttgaagcgctgcaccactggaatccctatgcaattgatcgacagagtgtcaagcttgacgaaggagcatttcatgaaatacatggtgcaaacgcttatggtactgaagccaagcaaggccctgaaggtcaacaggctatacatactgctttcgactcagaaagtaccttctatatacgccgtttccatgaatccaacatggctgcaatcccagggctaacctatgaacacagca

SEQ ID NO: 248788 - DNA, 424 bp, Gossypium hirsutum
aaatcaagcacggtttctttaagagacatattttgtctccgtgtgtgtcagaggtcggggatgatttgcaaaaggccatgctgtcatgtcagggtttcccagcagggggctgaattcagcacatgtattcagaattctcatgatgatccatcaaatgtagaagtagcctccccaatttttaaaactgatggagccagtgctcagcaactaattctggatgaagacggttctgagcttcggaaacagcttccagcttttgttaattctgcaactttgggaggaatggaatctgcccatcatgtggctcaaacttagagacaatattctctccttatctggagccaatccaaatacacagtgagctaaatgttgacaatgatgcagggagtaataatggccttgaactgccagaatttggggctga

SEQ ID NO: 248789 - DNA, 410 bp, Gossypium hirsutum
  unsure (1)..(410): unsure at all n locations
ttcaaatccgtacggaacttagcggtagatcgtttaaagaggcttttaatttttccggtggagtgcgacggaaagggccagacctaatgatgtagtggtcttcccggaagatgagaattatcagtctttcacttcatttttgctgcagcgattccgctagctataaggtttggcagtcatcctcaacaagtcgtcttctccttcttcccataagggtaagggtcctgaatcagctcctncaagatcacatccaatgtcaagcagaacttgcagtttttgaagttgtggaaggattccaaaagagtaaatctagtgcacctaagcctgcaactagttataggagaaaagaggtgcaaaaggaagagcttcctgaagacataaaactttatcgtgatcctacaacgaccctt

SEQ ID NO: 248790 - DNA, 422 bp, Gossypium hirsutum
gatctccaacgttgaaaccttatctacaaagtgtagaagctctcattcactaagcttgggctttcgctttcaatattatatcctataaggaattgtttgataataaaagtatggtataaaatctagtgttttctatatatgaatgtgatcccttggcggcaataatgtccacggcttcggtctccggcttctgcctctcttccaataccacctctccttctaactcactccggcaacccacattgcggcggccctctatcatcgccaacctcaactcttccacttctcctcctaactcatccgaaatcaaccagttttcgcagcacctactcctttgctcactccttccaattggaaagaaaccatgggagacgagtcatacgaggaaagccatgaagctctcaagaaactgctcaatgaga

SEQ ID NO: 248791 - DNA, 404 bp, Gossypium hirsutum
cataggccgctgtctttcccttttttatcaaaattcccggctagaatcgacgcgtcggaagctcatagcccaagcttccatggggttagcttcggccgttcaccagggcggtggcattcgaatctctcttaatttccatctcagagttgcctcagtgtcgcctacggttcaattgcccagatggaccggattccgcttctcaaaccatcgtgtctcccttgtccattcagtaagtcataaacgccgcacgatatgtttcccagttgctcgctccaagggaatggacaggaggataatttgtctagagaagaggagaggagagcttcaaattcttatgctgattcccaggagaaacttcagaaaagtgaagcttatgcatcatctggttaaaactgttgcttttt

SEQ ID NO: 248792 - DNA, 428 bp, Gossypium hirsutum
agagaaatctaaaattctctcagagctcttttctgtggccatcctggctcgtcccggggcaccaccgccttcggccacacgagcttcacgcgcctcacgcgccaccgtctgagccattgtgcccgacagctaatggctttcaaaaccctattctttttgcaacgaatcaaaaggtatcgaactctttcgacagaacaagcgttaatttggcttcaactacagcctgatctgaggcctggaatcacggcgttgatggtggacatgatcgatggtggcctcgatttgggagctggacgacgtccctgaaccttccagaattagcggcggtttgaggagaaagaaggcagaaaccctagggtttcctaccttggtgtaatagtttgggccagttgggccactttagtcctgggctaggtagggtgtaatgg

SEQ ID NO: 248793 - DNA, 435 bp, Gossypium hirsutum
  unsure (1)..(435): unsure at all n locations
acccttccgattccttccctcctttctaattttcctctgattcaaacaggaaacaacgaactcgccttgaaggttttttttaaaaccagaaaaaatagagaatagaaaattctaagataaaattatgagtaaatcttggtttgacaaaagctacaatggggttgggcccaacgatgatttctttgatgacgtaataaagtatttggatttgccattggaagacgttgaaggacctgatggcaatggtagtacagaggacgtaaataattttcttctgcccgtggaagagaacaatgatggtggtgaaactgggattgtgattttgaaaacttagagccgncacctaccaatgttttggccagcttatcttccgggttctatggtgatttcttcagtgatagtttggcccaaaactttaccgattcttgtgatgga

SEQ ID NO: 248794 - DNA, 418 bp, Gossypium hirsutum
gagtatgtaagtagagaatcatgcctgatgttatttctattactgctctgaattggtcccggctgccagaagcaatttgatttaaagcatcttcttaaccaataattgtgtttcttcaaataagcttttggtattttgctgctctctccttgaaatattggatcaactgacatgttcgttttgaaattggatgcttaggatttgtttggcctagatgttttataaaaaactgttgttcaagtagatctcttctagtgctgtaaaagattaaattaaaaatatttaaaaaaacctaaacttattaaactgagggttttgttggtacaatgtaagaatgtggcaagaaggttggaggcagttcactcgatgggctgagagttgtaagtggtagtagatagattggtcccctcttgttatg

SEQ ID NO: 248795 - DNA, 432 bp, Gossypium hirsutum
ccggccactatctttctctttgaaaaatcttagcataataaaatcccgacatggaaaccgctggtggttcaatccttcacactctcgccttctccagtaacaccgcaactgcaactattaacaataaccaccatctttttctgcctcctaaaaccaatccttcattttcctctactttcccgaggaacttcaacttccatggaaaacccctgcaattcaatggcttcactgctttcagctcgccttctagtgcccagagccaaaacccacctcaggaactagctgttcttctcgaagttgatggggcattatggatgcatatcgtttgggtaatcgccaagccttcaatttagcatttcaaaagctcgggcttgactgcgcaaactggactgaacccgtgtattcagatcttgtaaggagaagtgctggtaa

SEQ ID NO: 248796 - DNA, 412 bp, Gossypium hirsutum
cttttctaccagttttggttctcgaagcttctttctttactgaacgctcccagacctctgccatcggattctatcgccctcgacactgctctggacaaccaattatccaggtaagtcattccttgtctcttcaatccttcctttgctttcctgatttagggacttttttgaaacgacattcttcgaaactctggcttaattcttttatgtctaaaatgtatgccctaaacactgatttgtcctcctcgttattttgaaattttttgatgatactgagagcgtcaccttcgatctccacttgtcggaatcctctttctattccccactggatggcctgtaataggccagcgcttcttccgtgaaaggcgtggccactcaattattcatcagcaattgagatcccagaaaaatt

SEQ ID NO: 248797 - DNA, 410 bp, Gossypium hirsutum
gatcgttgatcgagttaattgattgaatcaattcatttgaaccgaatagaattaatgtcgagcgagtagattcagcaatgaaaggcgtctccttggcgccgggagattacatccacttcaagtcccaagtccctcttcacaagatacctgtaaggttctttcaagtccctcttcacaagatacctattggcacaaagcaatggcgatattatgattttggtcccaaagtagtttctcctctcatatgtcttcctggaattgcagggacagcagatatctactataaacagatcatgtccttgtccatgaaggtttggaatcatcaagagtggattcaaagttttgagaagttcttggatgtcatcaatgttcatcatatacatttatatggtacatctctaggaggattc

SEQ ID NO: 248798 - DNA, 319 bp, Gossypium hirsutum
cccatacttccttatcaaacacaacatatatatctatcaacatcctcattactaccgcgcggctcaatcaccaatcaacaccgccccaacacttaaactcccttctctatccactcatccccacttatatattctacacccaatagcaactttcacatttacactgataactctagaaataccataaaaatttgaatgctaacattaattctcatttctacaccctcatgcatcgaactacatctatcctctctactcctacatctctcatcctcattctttaactactcattcattaaaatttcctagattttaccaa

SEQ ID NO: 248799 - DNA, 413 bp, Gossypium hirsutum
gcaaaagagcataacgttgaagacacggcggttaatatatgctgctgaaaacaaccaatcgagtgattatggatcgtctacacagaaaatcaaagacgaaagtgatacccaaggtctttcgcaatggaagtgtatgagttcaaatgttagcgatacaggcagagagcagcagggaaattctgtcaaaccgggtcaggagtcgcttcaaaatgagggtcaagctgaagggatatctgacaagctatttgtatctgaaaattcagagagatttgtggaggttgctcattgcagtggcacttgtgaatcaattgcattaaaactcgaagagaactctgcgtttgttgacgagatggcacataatgttgttggactacaaagtgataaaagaattgcatatgttatgattggagttg

SEQ ID NO: 248800 - DNA, 433 bp, Gossypium hirsutum
  unsure (1)..(433): unsure at all n locations
aacccgacccacccgaccaaaaanatactataaantntaacttcttcatattttattatatanacaaaaaacaaaccccccgcccttattaaaaaaattaccccccccaaaaaaaaaaacattattactcaaactcttcactcaatcaccaaccttacataaaccctaactcatccaatccataccccacttttaacactctatataaaaaccatatactctctcataaacttccttccaacacaatcttaaatattcatttatataccgcctcttccttcccccatcatcaccaaacaaatccttctaaaccagactacgtcttagaactccctatattccctctgcccttggttctcttccccggcgctatcctccctctccaaaattttcaattcccttaccgcattattatgcacacgctccttcacac

SEQ ID NO: 248801 - DNA, 409 bp, Gossypium hirsutum
cccacgcgtacgcccacccgttcgcatttttttagtgctcactacatttctctcggcgggggtctcaacattcctaatctccaaagcctatcatatccctaatccattcccctattatcttcttactagcgtctaccatcaaaaaacactctcgatctatcttcactcaccatactccagctttacttcacactctcaagccacgttcagttcttgctgcactccttgactgaagccaactctcactctgtttttcgagaactctgccagatagaggcatctctaattccccatttagatcataagtttactctcataacgagtactacttgacacacactttatcaattcagcaaatacattggtcatgatcgtggtaataaaaaaagctatgagcaatttgacatga

SEQ ID NO: 248802 - DNA, 264 bp, Gossypium hirsutum
cccacgcgtccgctcaaaagagtctgttatttttcttacttcctcaaaccaaaaggcacgccagcattataattgcttcctcaaaacctgtaattttcaatggttgtttaataatcctttttttccaacccaaacttaaaccaattccaccacttttccttccaaaacttcccaacccaaaagtcttgaaaacccaacaaattcccttacttttcttcaacaattttaaatttattttcctttttacaagcaccactttattct

SEQ ID NO: 248803 - DNA, 408 bp, Gossypium hirsutum
  unsure (1)..(408): unsure at all n locations
atcatgcgtagaancattatctgctgctttacttatttgtggggaagaggaaactgcacggtcgctgttatgcaagttcaaatggggtcatcccttcctgtcccttaacagggaacttttgaaggcatattctgaatgtgaaaatagtgctgacatcatatcagtccaaaattcttggctttcccaacaaaggcaggtccctaaggttccaccagatgcagcagaaggtgcatccaatgattcagaagatgaggagggttcttccaatgattctgaagatgggctacctcctctagaaaggaacatgaaccattttagtttgcaggaaagtgatgatgaaagtgagttagtagtattcagcaatagtttcattcacaagtaaacaccattagtaagttgaaagaggga

SEQ ID NO: 248804 - DNA, 466 bp, Gossypium hirsutum
  unsure (1)..(466): unsure at all n locations
cggaattggaagganccgaccccagcgcgtactcgcgtttcgctcaattcaaatttccanntttctcatacaccattattttnctttcaccnnncatcaagcccttttcatccagaggcgcttctcctttcaacctaagctttcaatcnntctcttcannacccaagcccttctttcaaatcttctcaaccactncccagatcccctnntccctctctcaacccctctctttttcacgccacctttctccttctcctcaaacctctgcaccacttcgcctctcttcatggccggtgccaaaatgtctagcctccgcccgcttccagctacgccactcgctttagccgatgtatccaagtccaacaacacccttgatgccaccagctcccacattgaaaaggtcgagaaaatcttctccgacccacaagtcctccagttcttcaccaaccccaccattgatgtcctc

SEQ ID NO: 248805 - DNA, 415 bp, Gossypium hirsutum
ggagggccggcccacgcgtacgctttctccatctctctcctttcccccacaatcattgcttaccttcattctctatctcccggtctggaccctacttaccggttctcctctgacaatggattgctgctcgtcgacttcgtcggtttgtactgtaaatccaaacctactaccaggcggaggcttcccctctccctcaatactcggactatgcgccgcttttcaacctccgccgccaataattctgttagggccgttcttgatcatcttccaactactactactactactactactactactactactactactactactactacttccgtttcttctgcgtctgatcatcaatcatccgcttctcaacctaaggttgcaaatttagaggatataatatcagaaagaggtgcttgtg

SEQ ID NO: 248806 - DNA, 436 bp, Gossypium hirsutum
caaaacccccaacatctgcaacaaatccccctcatctttgttccacaaacagcaccaatgggctgcacttcaactgtttcaatggcactgccactatcacccaccacccaaaccaaagtctccatccccaaccctgtcctcaacccacttccactcaagcattcatcaatggctgccaccccaactacaagacccaatgcaacaaaacttgaagtcaaggcttcttcttcttcttcttcttcttcaaacaaggagaaggcagtgactatgttgacagcagctgcaatgacaacatcaatgatggtccctgaaatagctcaagcagctgatggggttaccccttctctcaagaacttcttgcttagcattgctgctggcggtgttgtgcttgtcgccattattggagctgtcattggtgtctctaactttgaccctg

SEQ ID NO: 248807 - DNA, 388 bp, Gossypium hirsutum
ccacgcgtccggcttccgcaatctatggtttcgcctctactctccttccctcccttccgatctactccttcccgtcgttgttttcttccatggcggcggattcaccttcctcagccctgcatcccaggcgtacgacgccgtttgtcgaggttcgcccgaagtttcctgctttcgtgtctcgcaattaccgtctagctccgaacatatctacccatctaatacgacgacggattcgacgttcttaagtttttaaactacaacttcgcacagtctaccggaaacgctgactatcacgggtttctagccggagatagcgcggcggaccatcgctcaccacgtagcagccgggcttgggagctgggttgaacattgaggtgatggactcgtt

SEQ ID NO: 248808 - DNA, 409 bp, Gossypium hirsutum
aaccattatccagccactgggaaaatgaactcatttaacggtcaccggagagttgaaaaccaatgacccattttcgttttctccatcttcttgtagagattgagatatgttgaagccattgacgacaacgcttagctcctcgtgcttagggtcaggtgtacggatacaccatgtatatttcacaaagcatggtgaccttatcaggtcttatgaagggtctcgttttacaaaaacttccgaaggttcattgcatttcaattctgatgagcaaaatttttcccgaattggaagattaaaaaccaggtgccagcaccagcaacatgtatttcccaacagtatagcacacatttcagctgatggcactcatcaagaccaaaatgatgtttttaaagcaacattgatatggagg

SEQ ID NO: 248809 - DNA, 403 bp, Gossypium hirsutum
cccacgcgtccgcccacgcgtccgatcgtctcttatctccatttgtatccccacctttctggtcactctgctatacctcatcaacatcccaacttctcacgccttcctcccactaacttatccttaccagtcatatttaaggcctcgtttccgaaaaaatgtatcattttagtccccagggcatcatcatcgtcttcaggtcaatccagtgttggaaaaaaggtttatgaatttgatcctcatccaactctcaccaatgatgacctcaagccgacaagaccaagtcaaaggaactaccactggaagcaaatggccagacattgggttggtcttgttgttggtgttccagcatattacatggcaggtagtcttgttgagctggggatggcttggtggcaaggga

SEQ ID NO: 248810 - DNA, 258 bp, Gossypium hirsutum
gaattcttctcttaattactaatggaatcgatcttatattaatcctttcttcgaacgaatccacccaaaaggggaggtattccaatgcaataaagtgacatagcgaatatcgctggttgcttaaggactattggcatgggtatgcctggtgatggtgaatatactggcacattgaatgagcctggtcgatggattaatgttcatattgtgcatactgatatgcgtgctgtgcgtgcgctcttattgacatctatatga

SEQ ID NO: 248811 - DNA, 374 bp, Gossypium hirsutum
  unsure (1)..(374): unsure at all n locations
cccacgcgtncgnccacgcgtncgnccacgcgttctaaacttctctagttaactttctgtttgtcccactgctgtcattggaatccgaagtatatatatttcattttcataaaggaattgaaaaaggaaacttcatgcgaatctttcatcttctatgttttacttaatttggatccaaattcctcagaaaggcctttttcttctttgaatcttccattttcatccttaatcctccatgggcaagggtggtggttgtgtccccagcaagaaaaagcatccttcctncgccgaagaccctgctcgccgccgtgggtcttncacaacagccgncaacaacgcacccattcccgccaccgatgaagaaacccgcgaaa

SEQ ID NO: 248812 - DNA, 281 bp, Gossypium hirsutum
  unsure (1)..(281): unsure at all n locations
gaaaaacgggccgaccaacgctttcnaacngcaaaaatataaaaaaacatttataaattttataaacaaaacaaaaaaagcgcaaactcgtgcatttttcaaaacttcttcccacccccacaacaccacacaaacttaaaaactttccctctgacaccctcacaccctattgcctaacctacctctcactttctccaacctcttccccatgaaagctgagctatcaacaaaagctccagcacctcatccattcaaactcaacaactctcctactacaccac

SEQ ID NO: 248813 - DNA, 403 bp, Gossypium hirsutum
  unsure (1)..(403): unsure at all n locations
agaaattcaattatggcggaaaagtttctgttctatattgcttaaagggttgncgacanagtgtgccgtgtcactgtagaggaagttcgcttggcgtttaatgtcaaaaccgatctgaaaaagctggaggacaccatgatcagcattaaagctgtgctcttggatgccgagcggcaacagcaccaaaatgaaaagctgcgcctctgtatggngaagctcagagacatctnttacgatgctgaggacgttattgacgatttcaagtgtgaagctctccggaaacaggacggcatcaatcatcccgacatcaaaaactaaaggtgcgagttttaggttcctgttgtttgtctttttcattctctttaaaaatgagtcataaaatcaaagacatcaatgggagact

SEQ ID NO: 248814 - DNA, 429 bp, Gossypium hirsutum
gttttggcatcatctttccgttgttttaaatcgtttgatgcgtcggtgatagatcggaaagatggcgattcatcgtacagcaagaaacagcggcagcggcgtcggagtagcaggggcgacgattggaggttttggatttacagttagattattggcttctgcaattacggttgcaatctgtttcttctttgctctttctttcttcttcacttaccactctctgtctcctcatcttcaaacaaaccttggtttctcaactgattcctatggaatcggatccacgaggaggtccgttttggcacttaaatcggatccgctcaagcctcgactggatcagatccggaaacaagccggcgatcaccgttctcttgtcctcgcttacgcgtcttacgctcggaaattgaagcttgaaaactcgaagctcgttag

SEQ ID NO: 248815 - DNA, 432 bp, Gossypium hirsutum
  unsure (1)..(432): unsure at all n locations
cccacgcgtccgaaacaatttggatgacatagttatccaaaatgatcccaaattaatcttcgtatgttgatgtatgataaaaccagcaaagcaaagccaatagaattcccatccacaaacactccaccaatccgtaataatggctacttagctctctctttccaagttcctctcctcctttttgccttccattcctncaccaccaccgncgccgccgnccaaagcgcctcttctcaacaacctttcactctcatcccaaaagcccaaaagcactctcctttcgttgtcagctcaagaggatcaatctccttcatcatcaactgaattgtcatcagttatatgcccttcccttgcatattcgaatactcttttcttcaaatcagcttacaacgttcaagttattgtggatgataatgaacctgaagaaaagct

SEQ ID NO: 248816 - DNA, 434 bp, Gossypium hirsutum
cccacgcgtccggcgaaacccagcatctaaacatccaccccctatttttccatggccaccaaaactgcatcatcgtcaagctcaaagtcacaagcccgtacatgcctatgctcccctactacgcacccagggtccttcaggtgcagcctacacaggaatttcaacaagccaccgactggccggagcagggcggttcgtatcgcaccgaattcctgggagttagccctgcaagccaaagcaaattccatcaaggcgttgctgctccaaatcattaaaccatcgagccatgacttgcaaaggagaaggaatttccagcctaagccttccaggttttgcatgttgaatggcaacagaaacgggttcggggtggctgtttcctgataatatattggcctcccttagtgtttactttaatgtatatatacaaggattta

SEQ ID NO: 248817 - DNA, 363 bp, Gossypium hirsutum
cccacgcgtccgacaaaaggtcacactcaaatttgtagacatatcttgctccattaagaggggagtttgcccttgacttgaccgtccttatacctgtaaacacatctccaaaaactgtacctgtcgtaaaacgctcataagttgactcaacatgtaattgtggccgtctttgaaaccgtttttggtcggttcttacaagttttaagacaggttgattatctgggaagtaggttctagacttgggtatcttttgctttaacttttgatgtaaaataacctggcactgaatgtggactgttgggggaaatttggagggatatcaaatccatcatcgagcaggcagctgtcagtgaggtttttttt

SEQ ID NO: 248818 - DNA, 428 bp, Gossypium hirsutum
cggacgcgtgggcggacgcgtgggttcttttttcttttcttttcttttttccaccctgtttatttataatttctctctaatattccaattcctcgccgattaattcgtacgcaagtcggggtcgaacatgccggcgccgccggtttagtttcctgggcttttttttttcctttctactctccagatccgtttaatcgccatcaggagttgagggtagtttggttcagtttgttgtgactgaaaagaaaaaaagagaagaaaatggagttgtctgggttctccagatgagaactgatgttattgacagtagaaggaggagggttcttctcttcttcagcgtccgggtatagcaagggcttggcccttcttctgttgggtcagaagcacgaggacaagtccatgagagtttcgccgtggaatcattacca

SEQ ID NO: 248819 - DNA, 439 bp, Gossypium hirsutum
  unsure (1)..(439): unsure at all n locations
cccgtccggtggtttctttgtctctctagctagctatagctcttcttctctttgccgtgttccactttttttatttcatttaaaaaattgggttttcttttgaaataataaatcgactcatatgtagtatctgattntntaattttttgcgggtgtggcttgttaaatttcttgagcacattggaatgttaggtgttactagcacttgcagaacaaaaaaaagaaagagttggtctttacatccccttttgtgtttatgtttttttattgtttttcttagttaaagatttactgtatagatcttgatttttgggtttttccttcttttttcaacgtgtacttcccaaatatagaaatatgtaaatcattcaaactgcatgggatttattttatctgttttattttcattgaagtagtagttaaggacttttatatagca

SEQ ID NO: 248820 - DNA, 297 bp, Gossypium hirsutum
gcttttcattccttgtatggcaggaactgtggtggcgtgttatgggaacggcgcaatactgaaacccacaatccttctcgcaaggtggcctacccaaatgctcgggcgggtgattatggatgtgcacccctgccaactgatgtgaaagctgacctcccgcatggtctgacggtccgcgcatcggcccaaggctgccggtgggccacactataaagaattaagcagcgaccattccgcaggccaagctgatgccattgtgggccaatctgagcatgcatgcttgtgcagagcgagtct

SEQ ID NO: 248821 - DNA, 273 bp, Gossypium hirsutum
ctcttctgctctcttccttcccaacacaacataggttattcgggttttgggtggaggcggcggcggcggcggcggccctgtctgaaattaacaggtctcgtaatcgacatgcgaccaaaggggtcgtttgtatctgctgccggtttcgatagcagtctctctgttgtcatcaaaagcacacgacacatgaccaagctaatcttagatcccatatattatcacactgaaaaagtggctgatggattgactggagctgaatggcacggatgggtt

SEQ ID NO: 248822 - DNA, 435 bp, Gossypium hirsutum
cgctcttcatttcccataccttgtttccctctaaatctcgcctctttcgtgggttaaccctttctccacaccgccatggtttcgcttccttcaccaactgctctaaaaacaacgataacctcacaacaccaccttcacaagatcaagataaaaaacttccttcttctaaagagcaactgtcttttgctgctgcaacaggggagcttttcttggggattgcatcaaaattaattaaaaacagattgaataatgaagattcaacaagcctggtttttctcagacccagaaagagaatcaatgagagtgaggttgaatataatggaaacaatgataaggagagaattgggttagtgatgaaggatgagatagaaccagatgtgatatgggaacaaagggttaaagacattgaagctgagaatgaaagaagagtggtta

SEQ ID NO: 248823 - DNA, 430 bp, Gossypium hirsutum
ccactttttatttctccaaagcctagcctggtgtgttttcctttttgcttcgagttaaaagggagttccttttcacagttatcatggctttgaatctggtttctcctactgaaatccattctatctccttcttgggttcaactcattccagctccttctccaagctatttccagggtgttttgctttgaaaaaagactgtcccaccacctttgggaggaaatgtcaatgttcaactcaggctcctcaaccaccacctgcatggcctggacgtgcttctccagatcccggacgcaaaacttgggatggccccgagcctatctccatcgttggttcaactggctccattggaactcagacgtctgacatacctgcagagaatccacctaaattcagagttgtggcgcttgctgctggttcaaatgtgaccct

SEQ ID NO: 248824 - DNA, 170 bp, Gossypium hirsutum
gatgaactctcagacttgtaagcgtaatcattgatcgtagttttgcttctacgagtcgtataatcagaatctgactataatcagaatatgacttgttttgcgaatttaacttgttttgcttgtcaagagaacatttatatattatatacaaatgtacagagcttttaatc

SEQ ID NO: 248825 - DNA, 187 bp, Gossypium hirsutum
aaaaaaaaaagagaggtgtgaggccagaccgtattccggtggaactccggccaagggtccggccaccgaagcctcgttggccccggccccggccactgtccacggtgcccgtaaaggtgaccagtccgtgacagaaggtagtaggagagttgtgggcatgcatggtgtgcgcgctgagtgacttgcg

SEQ ID NO: 248826 - DNA, 374 bp, Gossypium hirsutum
  unsure (1)..(374): unsure at all n locations
gtcgttcacacacacaatcttcaatggtattgtcntatccttcccgtctttctggcaacagaaacggcacaagattcattaccccagcgagtaaaaggaaggagaacggtggtccaacttcaagaaaccagcagcttgccaagttccaactcaaggtttccaacacggttatcgcaaggtctgtggtggttttattcggacttggattcattgatgctgggtatagtggggattggtcaaggattggagtgatctcaaaggacgtggaggacttgctaaagattgctgacttcatggtttgtacgttatgcatctttattgtatcttcctttacgaaacagactactgacacttaaccttctttagctaatata

SEQ ID NO: 248827 - DNA, 198 bp, Gossypium hirsutum
  unsure (1)..(198): unsure at all n locations
cccacgcgtncgctcaaattcagataacaattttacttttgtttactncactctctctcgcagccatggctgcagccatctccaccgccgccgccgctgccgccgccaaccgagctctgggagtgtcagtcccaacctcagctttcatggggaagaagtgagctcgagattcaacaacaccaggcatgttccttcggg

SEQ ID NO: 248828 - DNA, 187 bp, Gossypium hirsutum
taacaacagctgctttcagtgtcgcactctgtcagatctgttatttcaggactaactccatgtacagaggctacgccagtcggacaacgtgtgctgcaaccaattacgaccttagaacattcagtgcagatctatactcaaggccgtgatccacgtctacctcttaaaccagcgatctataaaaccc

SEQ ID NO: 248829 - DNA, 330 bp, Gossypium hirsutum
  unsure (1)..(330): unsure at all n locations
cccacgcgtncgnccacgcgtccgaattatgttcccttcgataattctctcctcgcgatggactntacattattattattattatagaattattattttcctgttaatttatataaatactctccgctcttcttcttcttcatcacttgcaacttcaacaaacatccatggcctcctttggtctatattctattctctccgccggtttcctctatttcggtttcattacctcgaggaagcgccgacgtctgcctttgcctcctggtgctaaaccatggcccatcattggcaactcgccacatatgagccctgtgcctcaccaaagtttag

SEQ ID NO: 248830 - DNA, 420 bp, Gossypium hirsutum
catttggctagggtaatatacccatcattccttaccaccgctcctccaccgtatacggtggtcggggagacgtaaaatggtccccttagcctcgtttgaaacgcctttgaaggctaggctaccaaaactgaaagaatcgaaggaggccctcaacccccccttttgggtccgatgtcggcgatgaaaaagtgttctccgacgcgcgaccacgagatccaggtcgtgtcagaggctgatggttggtgccccgagccgtggtggcacacgtggcagaggaggcagcggttgaaagtctgcaactaggttttttgctgctgaaaatttttagttggttgggctgtcttgggctttaaggtttgtatttaattggctttggtttagtagtgggctgatggggtttgggtagtttgtaatttgggc

SEQ ID NO: 248831 - DNA, 312 bp, Gossypium hirsutum
cgcgtccgcccacgcgtccgcccacgcgtccgttttgatttctttggtcttaataaccttcgggatgcctgtttctttgcttaatactcacgcttctgtaaaatcacagggtggtggttgtttgaccttttgaaattgaaatggtttcttgtacaattccttcatggaccttaattggtcttgtaagatcttttcttgatcttacactagcttatttccttttatgtggatcaaccttgggtttttttgcttggaaattttttcatgtttttggttttcatctgccatgtcccttgctctgggtttttgggg

SEQ ID NO: 248832 - DNA, 423 bp, Gossypium hirsutum
  unsure (1)..(423): unsure at all n locations
cccacgcgttcgnccacgcgttcgaaaatattttgttttgggtgttnatgattcccgaccacacaacgaaatccatttaactttcccacccagcaatcatttagcttctgctntcttccatcttctctaccttcaatccattgttttaagaggaaactggaagggggatttcagataaaactctctctcgccttctatacgacacagttaaatatgtggaggatcaggtgcagactgtatgtgctagtgtcaaaaggttctactcagatgtaatgcaggatgtgatgcaagatttgcttctcccatcttcattggagcctgtgaaagcagtggctgcctctgacacggcaatagagaaaaatgttgggacattcaaaaagcctcaagtaggtataaaggtggctgctgtgaacgatgaaggtg

SEQ ID NO: 248833 - DNA, 400 bp, Gossypium hirsutum
cccacgcgtccgtaaaaactttcttttcttttcataattccccttcccccatctgtagcgttggtgctggttcatggatattgaacccttgtgggatcttggggggtggttttttattttcattgattgcatggcagctacacctaaaacaccatcgtcatcatcatccatagtggctgagacctttgccaaatcccactctcttcttttccttctcacccttttcttcattttccttctactccttaaccctaaacccacaaactaccccatggactcacccaatggcaccccttctatccctttcaaaaggcttcttttagatgcttcctcaaacatgaatttgcattccaagcaaacacgaaccttgggtacgtcgtcttcgtcacgtaaagagttt

SEQ ID NO: 248834 - DNA, 307 bp, Gossypium hirsutum
aaattatcagttgcagcaacttaatccatctcctaccttcatttaggtaacgccagtttttgcaatttctagggttttcctttttgtttagctactcttttcaattatttcatattatcagtttttttttttaaaaggggaagggaaaaaaattaagggagggttttaggttcggggggattttgggatgaaagaccaattgaattcggatctgtttgacccgagaaatgaaatggactcggattactcccgtggttccgccggttctggtggtgatttcggtttcgctctcaacgatagtaatttc

SEQ ID NO: 248835 - DNA, 355 bp, Gossypium hirsutum
ctcactcagtcggtccctaaggtcactgtctttttttacgttgccccaaacgttgtctgggccgattaagaaacatttaacgaccctaacacaccacgtggaatgccagctttctacttcgctacctcatacaagatcaccgtcatgctctcttcttatgctcaccaacacttcaaaatttactctgttatgcactctctaaccttactttcagctgatacatcaatctataggtttgccatacatgcctcttataaagttttgtcattatacgcaaatgaaccaaaatgcattattgcacaacactcgattattattgaaggcttctctgtcgatacttactatatgctgaaag

SEQ ID NO: 248836 - DNA, 272 bp, Gossypium hirsutum
attcttcaatccggatttccttgccaatctctatccatagtggaaatatgacgtcccaggggtcgtcttatcattagatttcccatcatatcccaacctactaaaccagtcgttgatttagaggtattactatcacagcgcgtgtcaaaaatgagatagaatttgtgaccctatataccatatcgcatatcacaaaagagtgcactcgggatagacgctgtgcttgaagacccccgacactctcgggaaacacgaagactctcttcaatttc

SEQ ID NO: 248837 - DNA, 325 bp, Gossypium hirsutum
ctcgatatgaagatatccatatcattctttcttttagttgtataatgtccaatcgagacggggcaaattaaagaatatacagcatggcatgttgcggttgggtgtaaacataagacaaatgcgaaccaataataacagccctcccttaacaaggttggttttaatacatttaaatgaaggcatggttaaggttatggttttttttttttaataaatcaatggacctaaacctgttaattattattttaaactttgaccaggtttaaaaaaaaacataatccttccattgaacaaaaaaaaacaaaagggggccgcccattttaaa

SEQ ID NO: 248838 - DNA, 419 bp, Gossypium hirsutum
gcttaagccctttcctcttcgattttcacgtttttccctttttctctctctcctttgccggggccggcaacaccaccaccaatttcactctttggtcccgaaaaccccgccgaaatccaaccgctcccgctgctgccatgttattccctcaaaatcctgtcttttccgacacttgcgccgccatcattagcggttccatcgccctctctgtcctccgtttatggcaggagaccgccaaacgcggcctgtttgaccaggttctggactatggaaagatgaagccactgtgaaatcaatgagcagatgtggtgactacagggaacttcttaaaggaccactctattatgctacgacgattactttggcttgtgcattctattggaggacttcacctatagcaattgctgcaatatgtaacc

SEQ ID NO: 248839 - DNA, 414 bp, Gossypium hirsutum
cccacgcgtccgaacaaattgattttcatagtttcccatttttatatatttaatgctatggatgtttcctttgggacgtgtctctgacactctttttatttacttgaaaccatctctttcttctctgacctccatccatgctttatttcgggagctctaaattctaattgcttctgaaactccaccccatatcttgccaagtaccatgacgtttaaaagagtagtttctcatgaaatttttgggcaccggctagttagccggtccaaatcgcctgttatttctattgtcttgttttcgcttcttatattttttatgtttgcatacagtatcatttctaacatgtcgctgcaatcggctgccttcaatgttcttcctatttcattcactatttctacgcaaaggaatatgatcgt

SEQ ID NO: 248840 - DNA, 276 bp, Gossypium hirsutum
cccacgcgtccgaacttggaattatctgttttttctatcaattgtgcttatctagtgggagttggcaaaagtatcttcatactgtaagtaaatgtaattaggaaatgattttgtcccgtcccaacacttattttcatgatctatttttcttaaaatgatatattttgcacccatttctggaatccaatgtgcctccgacctttttcttttttggtggaagtttttaggtaagggaaggaggaaattaaaattttttgcttatccaaatcttatatc

SEQ ID NO: 248841 - DNA, 329 bp, Gossypium hirsutum
cccacacgtccggcggcggcggtgctgttggtcggaagtgttgggtagtgagttgggcggtggatggcgggaacggtgctggaggtcaaaaaccaaatttggaccccaatcccactcacaatcagagtgctttcatatctcggaaccaaacttatacgatgctgcaacaaccaatggaggttgctactcaatctgatgattacaaagaagcacctagaatacgtgattctttcaaaatattcaaggaaaaagaacctgttatgagatttacgaggctgatcaaaaagactgatcctgatgaaagagcagcggatgctcctagatatacc

SEQ ID NO: 248842 - DNA, 262 bp, Gossypium hirsutum
ctgaattggctaaaaacttcatccatctatatatttattatggatacaacccagagggacggggccaattgctaccttatctgtccattctttaggctatagacgccaaaaggatcctcctttgtcaattaaatcttatcttgtatcaaaacccacaaaaaccgcacatcactttagcctggaaaactaaccgagagaggcctctttcgcatatagcctaaatgagcatggaagcatgcattggactaatggcacaaagctt

SEQ ID NO: 248843 - DNA, 329 bp, Gossypium hirsutum
gaacaacacacttaaaaacacttgtgatgatttttttatcgagtacttcaacagcctatggccaggggagagaaccatggtgtaaacactcattatacacctccagaacgactcacgctcgactgccttatcatacccgacgaccgcatcatgaaggatgactgttcacccaccaagctaaataggatcaaggaatgcacacttatttatagcaaccgcaatgatcccgttgatgacctagataagctaggtgacaccttcccgggccaatacattgactctcatggtgctctgaaagccatagttcacaatgactataataacaaatg

SEQ ID NO: 248844 - DNA, 376 bp, Gossypium hirsutum
aaaaaccctgattctattccctttgttttcaccgatcaaaatccccttctcatagatttgctctcttgatggaagagacgcgatgtgcaatttgactgttccaatttccttttcaacgttcaattaaaaccctagcctcttccttttgcttctatcggggggggggggaaggaatcatgtctttcgatctcatatgctgaagccgtcctgcagctgctttggatcctcccaagatctgtacggctgaggaccaaaagaagaaagatgatgaggatttggaatcatttcaacttttaccgtattccccgaagcttttgaatgatgctattcacgtctttgctcgcctttgcgattgctcttctcagcctcttctcac

SEQ ID NO: 248845 - DNA, 345 bp, Gossypium hirsutum
aaaaaaagaagtggggctttgaaattctctcctttctcagtctccgacctggctccggtgcggcggaccaccgtcatcgccgtcgtgccggcaaccgtaaacggtggccggaaatcgcccctaggagcgcaacttggacgacggtggggcgatgctgcaggcgtcggtggatgggacaggggtcagaggctgaacggctagggttttaggttttctttcatttttctttttctattttgtgtttgggccatgtgggttgtttagtgggtatttaggggttagtgggctatatttgagccccaaaattgggctgggcatagggtatatacgaatatcattctatat

SEQ ID NO: 248846 - DNA, 423 bp, Gossypium hirsutum
gactggtaataaaagactccacgctgacgctccctcccttcctttcctctatctaacgggtggcttctcttagctgcctttcgattcttggattgagttgttaaggcactagaaaccatcgtttctgaatctaattcaaacccatatttgttgaggattcgatcgttctgagtttgggatttttcccaggtaaaggaaacaatctgtggttcgaaaagccagaatagaatatgagtacaagtacggccacgtccggtacatgtttgatcatatgctccaatggaaaatcatctctcgaagccaaaacctccacgatgattacgttgaaatcgtcgtcgtttccttcccgtttaaccgccgtttctataaaggcgaggacgagagttgtttcctgccgagctgtctccaccgcttccgtcgaca

SEQ ID NO: 248847 - DNA, 272 bp, Gossypium hirsutum
ataacacaaagctctgaaaatgcacattcatgttctctgcttatttgctcaagagggcacgcggtttatacaagactgaaagggtctaaggttacaccttctgtcaacatgacattacctagtagaggcaccaccctgtggcacaatgccgactaactgtgccagcatgctcatatttccatacgctcacaaagtatattaaacctattggtcgtcctagccattgaatatgccccatagctgattacaaccctaccagctgtaaactcttc

SEQ ID NO: 248848 - DNA, 409 bp, Gossypium hirsutum
gttcttgccactttgtagtttgagattctccttttgttctttgaaaccccaaacttagcgccaaaacttttagtttagaagtggaatcaaaataagaattcatccggttcttctctttgatgtgttattggtgccaagcagcagttgttggaaatggttgggtgatttaacttattcataataacagtgctattggttaaatacggaggtactttatcagaaaggttttgcagtgctctgttgttgtctgttgactcgtaggattaaataaaagaaacttctgcaatgcaaacgtctcagaaacataaaattacaggcaagtgcattgactggcccgtgcaagagctggagtcctattgttgtcctccaaaccagagcttagagccatgccagtcaggttctgatgatg

SEQ ID NO: 248849 - DNA, 157 bp, Gossypium hirsutum
acacactcgtaccaaacaaacttgcaatttttttatgggctatacatataacttaggggggttcacaatcaacaccactttcatacaccctactaaataccaaaactctgtaatctccaaatctctgcatccacacaatgtggcactcaaactactc

SEQ ID NO: 248850 - DNA, 434 bp, Gossypium hirsutum
ccccctcattctgagaaccctcatatggatactactcctcctcttgataacccggatggcatgggtagttcacacatagatattcaacaagatctcaactctcatatggatactccccctcatactgaaaaccctaatgatatgggcagtccacatatagatattcatcaagatctgtttccagattactatggtggaacagcttctgctccggctccggcttctgccctggattctgctccgtctgagccaaaacttgaatttgagggaaatgataaccataatggaaataatgatagtgctcctgtaattaaagataataattcccctccaccagttccacctggtagtagtggggaaggattaccttatgccccacccccagctgaaactgaagatacgaatagcggtcttgatttgtctttcttagacaa

SEQ ID NO: 248851 - DNA, 267 bp, Gossypium hirsutum
gtaccggccgcacaggccgcccaacctacccgttttttttttcctaacctttaaagaggattaattattaattaaattaagcgggaggtctgggtcaagtcttctttcttcaaccaccacaggtttctctctatttcaattaataccttttctttctttcttgctaaacacacatttttaccgtttccaatttattattattaataattttcggttttgagtttccaattggtggattggttgagtaattggttagaacttagtacc

SEQ ID NO: 248852 - DNA, 312 bp, Gossypium hirsutum
cccactcgtaccaactaaaattccaatttttttatggcctccacaactaaagaggagggggtcctatatagcaccttttacctacataggaacacagacagaaaaacagtaatctccgtaacttctcacaccgattaaattagagcaaatcacaccccaacgaaatggctcgctcaccatgtcagcatacacaccgacactcataacaccgatactaccacaaaaatccttctgctcactcgactcttacattatttacaaactttaggaagcacacatatactctcagatcttatacatagatacgtcttg

SEQ ID NO: 248853 - DNA, 415 bp, Gossypium hirsutum
ttgaacagcctcaatcaagtacttcaatttttggacatgatgaggaagctgaatgggcggaatacaaaataaaagaaacaaatatgttcactgttgacaaatatcaacagattggctttttccccaatgagagggctttttcattgaggtaccaaaccgccggaatgttagagaccgtgttacggcaaggggtattgggggaagatgacaccggagaggaatcaccaaaaaatgttaagcttccttcttgccagccttctatcgtttgtgaaaattgcctatattcacaagcaaaggatcgacgagcaagggccttccatatcatggaccccaaaggctttgtggatatgcttcttatcttccttgaggatagaggtgatggcccactcgttcatccatcacttggcaatataat

SEQ ID NO: 248854 - DNA, 429 bp, Gossypium hirsutum
gttgcagtcagcctgagttaatgatcataccatatgttctcttagagcattattgttgccccacactgtacagatcaaccaaaaggggattgttgtgggcgtcgtgaatgaatgctatcttgcttgtgggagttcagtgcggggagaggaagaacttcggtagtatatggtgtcagcatttggtctttgtcaatccatccgaaagcattcaacctccaggtgttatagcagttatgtagtcatcatgcttgaaagttgtagattcagattagtttagtttagtttagttttcataatattgtccaaggtttatttgggtggcacgctactcgctgccctttttccatccaattgaacttggtttgttctacgctcgtattcagtgccattacttatcgtactttgggtcaaagtgtattttttatcttc

SEQ ID NO: 248855 - DNA, 235 bp, Gossypium hirsutum
caagggtgccagttccaccatcaccacctatttaagataaatttgattattatggggaggttaaaatttgaaattgttgaatccctttttactagttaatgcttaatttctttaatttttctattgtaatggcttaaattgagacaactcgttgtgtatgctgtaatttgctgttgttaacattactcttttaatttgagttattcttttctgctgttgagtttttttggggttc

SEQ ID NO: 248856 - DNA, 422 bp, Gossypium hirsutum
gcaatctcttcactctcccaccacaggacattcacagtcccaaatatataacccctaaaaataaaaaataaaaataaaaaagagagaaaataatgacttttttggggggttagttagggtttgattcaagttttctggttgttgcaggaaaattttagttcagttgcattaatggcgtcatcatctctaccattacaagaggttcactttctctccccgagaactacttcgaagcaccggttttatctctctagatgttcttctctctctagagtttctcttgctgggaacggccatttaaggaacggtgtcgttttgcgttctcgagttcgagcgcttaaagaggaaggagtttcctatgaggaaagggagcgagaatttatcaaggaagtcaacggtgggtttggatcgaaagggaatgg

SEQ ID NO: 248857 - DNA, 303 bp, Gossypium hirsutum
gcccacctcgtgggaccattgattttcttatcttaacctaatggcaaggggatgaagtactgattcgggaagaacttaaagaggcttaggtgtttgacaggaccaaatggtcatattgtgtgagcttccatgtcatgacaaattggggactacagatagaagttgtagaatcggactatgttgaggatgcaataacttaggttgtaagtatgatggcataggtaaaaaggtaaaggggaacagcaatagttgtagacttatattaatggcatttgtttatgtctacttgtgatgtgctgtttt

SEQ ID NO: 248858 - DNA, 248 bp, Gossypium hirsutum
ccaacccttccgttaaggcagccatggaatattctctactttggttacccccatttttgccagcatccttcaaaacaaacattgcaagccgcacaacaatcgcaacccatcggttcattggcctaagcccctacgcaagggtcccttcttcaaggttacccccatgtcttgtggtaaaaaaggttgtggtgtgaaagccgaacttaaccccccaatggtgataagcctaagcacaaggctcttccttt

SEQ ID NO: 248859 - DNA, 195 bp, Gossypium hirsutum
cttccgcatttttttggattttgaatagagccaagaggttttagggtaagctcattcctttggaggaagaggttttggggatttattccccattaattaaaaattattgggcgtgggagcccaattgatccgaagggtcatggttgggtccggaagggatcattggatttttggaattaaaaaaaatggatggga

SEQ ID NO: 248860 - DNA, 230 bp, Gossypium hirsutum
  unsure (1)..(230): unsure at all n locations
cccacgcgtccgcccacgcgtccgccgacttagntaaatgacttgagaggtgtannagaatttttttctctcgggcgaaatccaaataccactacnttaaacgttattttacttattcctcgaatcgaatgcacatctatctctatactgttacgtacaattgtttttcttctattttttttaaaataaatttttttcattttaactgtttattcttatattattttatt

SEQ ID NO: 248861 - DNA, 411 bp, Gossypium hirsutum
gtgctctgcaaacaatccatcaacatcggcgttttatcttctgtcgattgctcggggcgcactttacacactaatatagaatgaaaaagaaactcatattataccaccactggaaatgtgtatgacctttattgctgctatgatgatggaacgtaatttaccgaattgaagagacagggcaactgtgctggtaaacaagttcagcacttgttactaaactgtgctatgcaatcttcatgtgcttatttgcagtggtaggagcaacattaggagccctgactggagcttttgttgggacgaaaacaaagatgggttgtcttcatggagccatggttggagccataaagggcagttttttttccatcaatctcttcaaaatttcactcagaatttgcagtttcgaaatccgtg

SEQ ID NO: 248862 - DNA, 194 bp, Gossypium hirsutum
gtgctggtagggttagtttaggttgtgggctgatgggagttttaatttgggccatgtattattaattggactgttttattattattttttgaattttttttgatttgggctcgggctaaggttgaaattaggtttggttttattaggccccgggcaaaatttatgccttacactcttaatatactaatcttttc

SEQ ID NO: 248863 - DNA, 298 bp, Gossypium hirsutum
aagaaaaacactctaaacactgtgagcgagaaaacttgtggtacggcgtcagaaatgggcatgctcttagtagatggatggctgttctcacctggaccattggttacatcccggattataaacaggtacaagatgatggacaacattaagttgtctatgctttacggggtgggatgtagagcaagcatggatgcaattgatatggtgcatgacggtgcttaagacatgcagaaaccagttcgatattgtagtgagcaccggatcaatgggtaggcattggtcctgaaggaaagagaac

SEQ ID NO: 248864 - DNA, 371 bp, Gossypium hirsutum
gaatagtatgttagtgctacagaacccaatatctttcacaccataggatctcttcctggggactgaattcataaggatgagcccaccaaacctataaatgccatcaagcctattcaggagaatctaccggcttccgaacagactggggctaaagaaaccaaacatgtaaagggaactctacctgaaagattctttgacaataacgaaactgatttacgcacttaccacattaaacctctgaagatacatgtcaaatatgcggtcaaggaattagatacgttgatataagaagatttgccagcggtggacactcttatctaagacgacgatattgcttcgaggtaaaatgtttggggaggctgaatcttttg

SEQ ID NO: 248865 - DNA, 415 bp, Gossypium hirsutum
caaaaaaatgaaagcaatatcaccaccatcaacggcggctataatcatccactcccatcatcactacctaaatcaccgtcgttggtttttatctccgccgcctccatcaaaccggcagttccaccccgccgcgtcaatctcccgaccccatagtcttaaacttactttcataacaaaagcggccgattcaacttctcagcctaattcagcaaaaaccattgtcgctgatgatggattctcattgtccaagctttcatttggtgttgttggactcggtgttggaatttcgctcctctcgtatggttttggggcatacttcaacattcttccgggatccgaatggtccgcgataatgctgacttacggcttccctcttgcaataatcggaatggccctcaagtacgcagaactgaaa

SEQ ID NO: 248866 - DNA, 283 bp, Gossypium hirsutum
gaaaaaaaaaggtcttggtgatttacagtcttttctgggatctgattaatgggtttttttttaataatcggactgatggttaacactctactggattgattactcattatgatgtagagggagactagataacattgaactgtgggggccacatgatgtgcatcttgtcttaagtacttaagcaacctgtcgttcgcaccctaattgcggcttgagctgtacaacttactgtgagaccaggttgataaggttggactcatggtccgggtgtttaagctttgta

SEQ ID NO: 248867 - DNA, 392 bp, Gossypium hirsutum
cccacgcgtccgcccacgcgtccgggactggtcactcgccgtctaccaaggtatcttccgtgtctactgctgaaaataaagcatatagtattaccggatctcatgaggttcccggatctcttgatgccttagccaaagctaaaaaggctttacaaatgcagaaagatttagcagagaaactgaagaagatacctttgttgaataaaggcacaggctccagttcagtggggactagtgtaacagttcagggaccagtctcatcagtgactacagcaattgcaagtggaccatcaagctcgtcagtgcttccttctacctctgcagcagcagcttctatgaagccaccagctggtggggtggctgctgttcctggtcttgcttcaatatcaaac

SEQ ID NO: 248868 - DNA, 413 bp, Gossypium hirsutum
aacaaagtgaatgaagaaataatattaagctgaaaacttcttcaaattcaagagaaggaaagctcattctttcaattttgtcatggattatttgaaaacagtggttccttctcaactcctcgctgaacgtggctctaatctcgtcgtcatcaacccaggttctgcaaatattagagtagggttagctaagcaagactctccttttagcattcctcattgcattgctcgtcgcagcaaccagttacccaagttaaatgttcaagatcagttgcttaattctcaagttaccacagcgcagcatatggagcgcgaaaaggcatatgatgtgattgcgtcgttgttgaagatacctttccttgatgaagaggttgccaataattctattccccgaaagatgggacgtgttgatgggt

SEQ ID NO: 248869 - DNA, 151 bp, Gossypium hirsutum
  unsure (1)..(151): unsure at all n locations
gngcaggaggganncgngcaccgnaaanactcgagcctacccacgnactacganggacgctgcgggaccangnggaagcggccnangnncgggngcaccgacncggcncaggganggaaggagcnngaggaangcaagaaggaanacccca

SEQ ID NO: 248870 - DNA, 282 bp, Gossypium hirsutum
  unsure (1)..(282): unsure at all n locations
aacaaaangaacaaaaacataatattaagctttttacttctacaaactcaaaagaacgaacgctcatttttacaatcttgcgaaaaactatcccaaaacaaaagctccttctcaactccacaatttacgtggttctaatcttcccatcatcaacccactttctacaaatattacacataccctttagctaaacaaaactcttcttttaccataccactctcatttctcctctcatcatccaattaccctaactaaattttcaacatcatcttcttaactctc

SEQ ID NO: 248871 - DNA, 408 bp, Gossypium hirsutum
gcgcccgtactcaccatcgttacaaaaaaaatatatacaaatgtaaacccagtgagacaacaatggacggattggcaacattcaccaatggctcataaattattttaaaacaaaagctcattctcaaaatctaggtaagcgaaggaattatatcatcgccatcaacaccatggaggtaatgaatatagaagaccggggttatacagaccatgactatagcctttattattaaactcatggttgcagctaccagaaactccaatgaaaagctggaaaagggcaacggctcggacagaatgatcatcttatctgaaggcatcataaacagatctcaaatcccacagcacttgaactgagaaattccctgtaactatagatacaatcctgttgggctgagccagaaatctg

SEQ ID NO: 248872 - DNA, 133 bp, Gossypium hirsutum
ggatccctttttttcttttttagtcttactgcaagaggcagatgagagctgtggaaaggccgctctacaacaaaacagtggtaagattagggggaattgattacctgcatatttggcgaaatgaagcgactcg

SEQ ID NO: 248873 - DNA, 202 bp, Gossypium hirsutum
  unsure (1)..(202): unsure at all n locations
agaaaaaaacgaccgacgcgggcgaacaaantacatttctctcacctctccatactccaaattccatggctctcgtaaccactgcagtgtcctttccttctaccaactgcacctataaaactactcaaacctctatcatatctacttaaagaatctcattcaagatggtttatttttactacccaaactaatcaagtatacc

SEQ ID NO: 248874 - DNA, 166 bp, Gossypium hirsutum
  unsure (1)..(166): unsure at all n locations
aaccanggcaggccagggcaaacccgaaacccnnannnncccccaaagnanagnngccccgaaaccccaaaagggccgcaaagcaaacccangggcaggcncccncncncnnggcgaacgacagcaagcagaaagaagaaggganggcaaggggaaaacaaacccg

SEQ ID NO: 248875 - DNA, 270 bp, Gossypium hirsutum
cccacgcgtccgctgaaaatgaactctaatgcttaagaaaaccccaaacttcggccaaacggaaaggcaaaaaagagaaatctttttttttgaatatttttaatccaaaaaggcttaatttctctttgcgtgtgtgtgtgtttgttttttgtttctctctctcgatttttcaaaatgcaaaaaaaaacggcgttttcgttcccccacgagattttggaacacgttttcttgtatatacaatcggaaagggaccaacacacagtgtttttg

SEQ ID NO: 248876 - DNA, 234 bp, Gossypium hirsutum
cccacgcgtccggctcttctttgggtggcctacaacattctgcaaccggctttgaaccagcgtaataggatgagatctcagtgagattgtggatcttgtatggggtgtaatggcatgtaaattacctgtaattgcaccttatgttaatgaagctttctcgttatttactttaaacaaaaaataaaaaaaaaaaaaaaaaaaaaaaaaaaaaaaaaaaaaaaaaaaaaagggaaa

SEQ ID NO: 248877 - DNA, 231 bp, Gossypium hirsutum
gaccgacgcgtgcgcactcaccattgttccaagtatgttgtaaaccaagctttaaccagcacccaacatggcctcactggcaggctacaacgatggcgccttccttggcatatctgaaatgcaaaaaaaccctatgaattttagcgggggagctaggtcatcttctgcaacactatccaacttattcaaaatgaagaccgaaactgtttttttcaatcccaacgccgattt

SEQ ID NO: 248878 - DNA, 401 bp, Gossypium hirsutum
gtggcgtacagtttccgttatttttccttcactttccatttgttgaagcagagggaaggtgtcagcaatggcggccatgaatctggtttcagctggggttcactctttcaatttaaaggccggtaaaaggttttcaatttccaaacccaagggttgcaaattgggtccgcgagctgctttggtagaagccggaccaagaggcgatggttccccggcggctctgcaagtatcgagaggggaccttgcggcggacctgcaagcggaggccagggccatggtgcgagccgtaaatgcctccgtttacagccccgaacttcttgccaacaaatatgggtcacgaccttgtcaggcggcgaaaaggacattggaaatattggtagccttaggctcatttgctttgc

SEQ ID NO: 248879 - DNA, 286 bp, Gossypium hirsutum
cggacgcgtgggcggtgacccatctaagttctttcaaagggacgatggattccaaagagatgtgtaccaaattgcattgtttctggcagtcctctactttgttgtacagttcctaaggacaaccctttaatacccaaaataatttcttcattatatatattttcatacttataattattgtaaatttgtaattatatacaccaatactcagaattttttttttctttttttttaaatgtatattcggaaaaacccttataaaaaaaattttaagcatattcttagt

SEQ ID NO: 248880 - DNA, 290 bp, Gossypium hirsutum
ggaaaaccggccgcgcccacgcaaccaaaagttccctcccactaaatggttttttttccctcataccaactttcgggtgggttattatcaccttccatctcctccctttctccaaccagctttttctgaaaaccatgttaattgactcaaaccctagaggctcacgtttactctctgatcttcctggttgatgaaggatggaaataaaattcaattgagactcaagatttttataattggaccgtgccatctatgactcaacaaaacctccatggacttaacattaaatt

SEQ ID NO: 248881 - DNA, 213 bp, Gossypium hirsutum
atttatacgtgttttacaggaatctttctatttttgtggccgaatattcagaaggccaggctcgttttctactataaattaattcctccatatatgttctctaactgctctgtttctaaacttctataattctgaaactatagcaaattgctttcaactcacaattccctattgtctaatctactgacttttttcacatgaaactcactaata

SEQ ID NO: 248882 - DNA, 411 bp, Gossypium hirsutum
gcagaggcagcaatgggtgcatacaaagcaccaattccttatttcctttcttcacccaatggtaacgctaaaaccctgagaaccccatttttgaaccttggaaccaccagcaggcgcttccttttgttcttcctttcctctcctatccttcccagcagtaacagtcttgccctagacaatgctaaattgcttcagtccaatatcatggatgttttagcttccagttttgacccagtgagtcaagctgagaaagacgccagttccctcatcagtcgcagagtatctgaagctgtggagttgttggagagagggaaggaattgcaggctcagggtgattttcccaaagctcttcacttctttactttggtggttgaaaattataaagattttgcattctcagactatgcaaga

SEQ ID NO: 248883 - DNA, 191 bp, Gossypium hirsutum
cccacgcgtccggaacgtataagcaaagcccactgtgggtgctgctactgctgctgctcgggagcctttaacatcagcatcagcaccatcatcttattctttattatcataatttataacttaatctaatcattaataatacctatgctgtttttcttttagtcatttacattatttctattgaatcctct

SEQ ID NO: 248884 - DNA, 278 bp, Gossypium hirsutum
acccacgcaaccgccccttcctttcaatcttcttctctattttcttcatggaaaagctctcctgggtgggttatttcaaacccccgtttccaaaaccctactctaaaacccaccgccccattcctccgaccttccaaacccaacctcccttttttaaaccatccccattgccttccatcagatcctccattttcgaaccagtatgaagaaaccgttatactctcataaccttttggttaactgtacctttttcagtcttccaattcaatgctttaccc

SEQ ID NO: 248885 - DNA, 370 bp, Gossypium hirsutum
ctgaaactgcctgagcaattgtagtaaccattttatttaccctagattctaatctatgtggtcacgctctgcataggcttcagcctacactctattcttcaaacgcttatctgcatttgaactgaacggagatctggactgcagttgtcgatccatgttgagtcaggagatgatacatgaatgaattgcgtgactgaatgatctactgaatgatcatagggagaataagagtggcagtaagaataacagtttattctacgattctccttacggatacagtatcgaatacagtataccaaacggtggaacaaacaagggcataactgctgttaactccaactgctactgcaagtgatcttgatagacttac

SEQ ID NO: 248886 - DNA, 190 bp, Gossypium hirsutum
  unsure (1)..(190): unsure at all n locations
gggnggacccacgcgtccggggaaacaaatgttcactgcctactccaaaatttcttttattttgtcgaccataagggcggggggttttgttttttatttgagcaacaaccttcacacaaatgaatccgacaaggaatatattttggggatctaaaagaccttaactgcatcggctttatacggatttata

SEQ ID NO: 248887 - DNA, 278 bp, Gossypium hirsutum
ccgggcggacccacgcttccgttcacactttcgcaaaatcagttgctatttttattttctctacaaccatggctctagggggggcatcattctccggtatggcagaatatttttcccctttcaccccagtaagtcggggaacatggccgtgttttcatgatgaaaaccaccaagcctgattcttcaggttgcctatggatctgacctatctgagtattgtacttgtgtccaaatttcgttaagccaccatcatacttgatctgtttagtttctattgt

SEQ ID NO: 248888 - DNA, 216 bp, Gossypium hirsutum
tcataactttcacctaatcaaaacttttaatatattataaacctcaccacaccgggtccggtgaaacccaatccagcaccaatcatcacacctaccctgctgttttacagagacatttttctccattattggacaccacaaccatttatgtctgaccttattcttctcgaatacccacggtactacactcctctatacacaataccgcccaatacc

SEQ ID NO: 248889 - DNA, 127 bp, Gossypium hirsutum
gcaaggtctttgcttatgatatctccgacgacttacatgacattaccatatgggaagggtggggtcgattcattgttccaagctcccattgaacgaaggtacctcactatgcttgtaatgagctcct

SEQ ID NO: 248890 - DNA, 383 bp, Gossypium hirsutum
cgcgcacttttaagtacaatccttcttacctgctctttttatttattctacgtccaccacaacagctggggctaatactaaacctaacaacaatttactataccccaccaatcaatataatcaccacctggaatctatcactacgatgcaacatcacccttgttcccaaacggaccccgatgctaaccctaattttcactacctacttttgaacccccaccattcggttcctccaacgccggctgctgtcgctcttatccacctattcttcaaccaggatcatggcatggtttgacgccggcactgaccatggattccgaatctacaattgcgatccattgcgcgagatctttctccgagacttccatcgcctgagcggaatc

SEQ ID NO: 248891 - DNA, 301 bp, Gossypium hirsutum
  unsure (1)..(301): unsure at all n locations
ggcgggggggacccacgcgttctgaaggcatatcgatttatcaaaacatttttttttttacatagcatngttcgatagcggagggtatcattggagattttccaagttcctgactatggtctccaagaaacttgataaacaatgtgctgaacttcttgagggtttgcttcatcatggaaggcttaccctcaacaaatgttgtaaccaccaaatccatgtccaattggaagaattgaatttgtaccataaacccttgttatagttcttaaagctctttttatttaaccattcccttcctttt

SEQ ID NO: 248892 - DNA, 362 bp, Gossypium hirsutum
cccactcgttcgcccactcgttcgcgtactctttttttttggccgaaaatcacaaccttagaattagatttctagggtttttttgttagcaacctaaccaccattgttttggtgatcaattaacatgcaaacagtacccattcttcctgttgaaggcgctcgaccatgcttagagaaaattagtaagtattttcttcctcccgtttttatgttttttaaaaaaaaaaactttaaatcttacattattttctttaaaaacgaaaattggttcataaagcaaagaatcattacttcttgttttctcgcctttacctcaaaatttttgaagttttcgggcttttattgtgttcatatcacatact

SEQ ID NO: 248893 - DNA, 432 bp, Gossypium hirsutum
  unsure (1)..(432): unsure at all n locations
cgggnccgacccacgccgtccgatgaatatacctgaaaaataagttcttcgaaaatcgttatttcttgttnctgaatatnctctgatagtggcgtccgatcactagacttgtctgtagaagtcgcctgacattgtcttattattgtttttgagtcccccataagtctaattgaatgggttcttagtgaaatccctaactttgtaccttctaaacatgcatatgcctctgctgcgaaaggtgaagggacatttctatgaataaccgtctttaacaccattaaatttcccctcagatcccatcctacaagaccagacgttgatctgaatgttttgccatcgatcgctgcatcaaagtggatcatgattctcgttgatttctggagaacgatatcaaccataaagcataacagaagagtagacattggccattgt

SEQ ID NO: 248894 - DNA, 396 bp, Gossypium hirsutum
cccacgcgtccgctaaaaccctaaaaaaaacaagaaacctttcaatggaaggagcacaaatggaggattttcggatcgaagagtgtgaaaatgacaacaatacacacgaagattctcaaatggaagaatctgagcaaaacaataaacacatggaggtcgcacccgccgttatttccgtccacccgacccggaactcagttgcagtcgctgtcgggtcggaccttcgtgtcttcaatctcctagaagattgtgctgtgattttggtggatgaggcaggcggggcttcacataatgattcaattagaggtattaaatatggagcaaatgggaaactctttgtatctgctggagatgacaagcttgtcaaggtttggtctaccgagtcttggcgctgta

SEQ ID NO: 248895 - DNA, 400 bp, Gossypium hirsutum
cacgaatcaaatccccatctctccaatcccacaaacccttctccaaatcccacttttccacagaacccaacaacgtaccattcctttttccatctaaaacccatccacagctccaccgttttaaaccaaattccatatccgaaagctcagtgtcagtgcctgaagaagcttttgatgacgctgaagaagacgacccaacttcagaattgagctaccttgactcggagaccgatccctcgagtgttacggagtgggagctggatttttgctcaaggccgattctagatattagaggcaagaagatatgggaactggtagtgtgtgacagttcgctttcacttcaatataccaagtactttcccaacaatgttatcaatagtgttactttaaaagatgctat

SEQ ID NO: 248896 - DNA, 408 bp, Gossypium hirsutum
cttaatttatagtttcccaattgaaaagtacagaagaacaacaagatttgattgattgagagaggaaaataaggttgaagacctttcgaggatggtttctttgagtcgagtcttggcggtttcctatacgataaagccatccattccctgcaacacttgttctttaagctctagatttcctcaaaagaaacccaaactgaattcgaaatggcgatccatggcgactgaacctgactcttcttccttcgcgccttctattgattctgattcttccgctgataaagttacagccggattttgcatcatagaagggcctgaaacagtccaggattttgctaatatggaattgcaagaaattcgggataatatccgaagccggcggaacaaagtgtttctgcaaatggaaga

SEQ ID NO: 248897 - DNA, 401 bp, Gossypium hirsutum
ggttaacattggcctatctatgctttgcttcgtttcttcaggcagccaatgctctccaaaccaaggctgctaaacaaaaggtgtggagaaatacaaagaaaccaacattttcacctttcatttcggaataaaagctgatttgcttttgaatttaaaaaaaaaaaaaattcgagatttacaagaaagggaaaaggaagttgaaattatatagtaataagaaaatggtagctttctcaatggttccatttttgggcacagttcgatctacaccttctttaacgagtttggcaccttacaagcgccaaatatcaatacgaatctctccagtttcttttccaaggaatgggttctttccgttcaggaggtttcttcaagcttgccttcaatctagttctgctact

SEQ ID NO: 248898 - DNA, 297 bp, Gossypium hirsutum
caaatccggcatttctttactcaatagctacccacactagatttaatgatgtgattttgacataccctctatattccttctttaaaactatcactcttatattcaaacaaagatggcaatatcatctagctgctagctaggaaatgtaccgactactcacagaacaaaaattaaagttagtaacaaattttatagtaggaatattaacttaaccccatgcatttcatctttgacttaggaatctaataacccacttttaaaagcctatttaaaacatttacaccatgaagggaaaag

SEQ ID NO: 248899 - DNA, 342 bp, Gossypium hirsutum
cccacgcgtccgaaaaaaaggaaaaaaaagagggaaaattttcgtttgagatggttttgtttttggctaaagatgaagttgatggaagaggagacggtgttcgaagaggaaaatgaaatcaaggctatgaaagaggaagaagaggttgacggtgaagatgaaagtgaagtagaaggtggcgaaccggaagaggaagacgacgatgacgacgacgaggatgaggatgatgaaagcgaagatgacgacgacgactacgacgaaagagagggggatgacgatgtgcaggttcttcactcatccgggccttctgtcccgatagctgatgaccactagggcgaggat

SEQ ID NO: 248900 - DNA, 338 bp, Gossypium hirsutum
ttcaattttcctattttgatttttaagcttctaattccattaattcgagatatatatactccaaagttgggattttcttttctctttttcctctttcaagtaaagaaggaaatagaaattttccgggaaaaagaatccagctaccatgtcaaccatttcgatttacagaacagaattcttgactttctctaccaatggacccagaccccgccacaaatttcaaaggctttccctttctccatttatgaaaatggattctaaatcaaccgaaaaggttccaaaggaagaatcttctataaagctgcaaacgtcttcaattcctcagcttgaaaacccga

SEQ ID NO: 248901 - DNA, 344 bp, Gossypium hirsutum
  unsure (1)..(344): unsure at all n locations
cgctcctccaccgtcaccgncggtggcggcggcactactttcgtcatcaatggtactgaaggcgacagcctttcgtactccgaatttattgctcagttccactccctcgctcactgtctgaggaaaaactatttcctttccagaaacgacgtcgctttgatcctctccccgccctctcttcatgtccctttgctttatttcgctcttatgtcattaggaatcgttatttctcccgctaatccactcagttccgactcggagatagctcaccaggttcaactcagtaaaccggttattgcctttgccaccttaacgacctctttcaagctttcgtccctcaaaca

SEQ ID NO: 248902 - DNA, 342 bp, Gossypium hirsutum
  unsure (1)..(342): unsure at all n locations
cgatcctttagaacnctnntcggaatttgggaagctangggaggtgtnncagaaaagggttaccaaacagggatnnaactggctttnggtggcagcncannagcgttcaaatagcngnnacgttgctttttttggatccctttcngnnatgtcggcttcttttcctttatcattngggtgaagnncagaattcaacncannagtgtnntggattgggttcaccncnaaccaataaggnngaacgtgaagggctgggtttaagacnncgtcgtgaagacaaaggttagttttaacccttactggatgnngccgccgtcgcaatagtaaattcaaccctagtac

SEQ ID NO: 248903 - DNA, 373 bp, Gossypium hirsutum
ctcattcctgctttagtctagctttctcttgctgtcaaatctactgtacgaggtggcatgcatgggaacgctttcaatcatgttgcctttctacatgcaatcgcttgggcagcgaacgcggaaagtactctgtggtggatctcagtgcatgaaaggagacggagcccttcgctatttgcgacaactacctgcaaagccaattgacgattacgctcattatatgctccattgaagtttattttcactatctgatcagatgggtgagtccattgtttaatctgcttagaaactctggaagtactgagctcaaaaccattcacttcttttaaataactaagaacaaatcttgacatctgctgaccagatctgcttg

SEQ ID NO: 248904 - DNA, 348 bp, Gossypium hirsutum
aactgctctctgctaaaatactatttattttcagtgtttccttcctgtcttctgatatggttttttgttgttttcaaaatttgaatcacaacaacactgtgtatagattttcgatttttttttatttcgtctctctccttttgtttttttttctcgctaaaactcactcctttgtttcctcctctttttttcactcaaaagtgtacggagaatggacggaggaacactgcataacctcagaacagtagaggaagtctttaaagatttcaaaggccgccgtgcaggaatcatcaaagccttaaccgccgatgtttgagaatttttgaacagtgcgatcctgagaaggag

SEQ ID NO: 248905 - DNA, 356 bp, Gossypium hirsutum
ttctgatgactatgccagtggcatgaagctaaaaaaatcagtgaagaatggatgcaggcgcatctgatcggtcgaagcttggtgctgctagtttggatgttgatgatcgacaggcacaacatcgacgtagacatgactctagcgaggatgactctgaaactgatggtgggagggaaaagaatagaggtgaagttcaaaagcaaaagtttgagggtagtgaatctgattctgatgctgacagagcgagaggtcatacaaaggaattgattaaggaaggtcgtcaaaggcatgactccagtgagggtgactctgattctgatggtgggaggcaaaagaagggaggtgaagttcaaaaa

SEQ ID NO: 248906 - DNA, 290 bp, Gossypium hirsutum
tactgtcctagtgtagcatgtgatgaaactgattatgtgaaacaattacttgaaagagttttgactgtgtataaaggtaattctacacggaagaaataagcccttgtaagcaaaaaaaaaaaaataaaaaaaataaaaaaaaaaaaaaaaaaaaataaaaaaaaataaatataatataatttaatatttattacttttaattttatatcttttttttattattaaattttattttatatttattttaattttttttatatttttttaaaattttttaattttatatttaa

SEQ ID NO: 248907 - DNA, 393 bp, Gossypium hirsutum
cgtcggcccacgcgtccgatcttatttttgtttttttaagttgggaaaggaaagagaaggaaggcagtgaaggtgagcattggggcactaatgggaaaaacaaagaaagagctgctaagcaaagcgccctggaggggagacgaccatgacaactccaacaaattcgcagacgccaagctcaaggttaccaaccagcctggttccacccccaaaatgcacgtccctcaccgtaagtccgccgcttcccgactcgacgacgacgactcccttgagattgaccctgaactccgttacagctttcagcgcaacttccagtttcttcaacgagtttttagcatagacactgttgtgaagcctcttccacctgcaatggcatacaatgtttcccgcaac

SEQ ID NO: 248908 - DNA, 346 bp, Gossypium hirsutum
agagagcagagtccagtccaaaagctgtggtgtccgtttcctttaagtctcaaccaaagttgcagaaagccagacgctaaaatactaaaactagctagcccaaaacggtaccctttttttgctccaatctcgtttacccttaaggtgtttatcttggtaattgatattttgctcaaatctttcaacaagtaaagattgcagcttttcaaatcgtgggttttttttttttttgcttgcttaatccatggcttcttccatgctcaatggagcagaaaacttcactctcattaggggggtaaccccaaataggattgattttttagggtcaggttttcatgggaaacac

SEQ ID NO: 248909 - DNA, 396 bp, Gossypium hirsutum
cgtccgactgtgaatgatagctagactctatacggtgacctttggcggtggtcgaagatggtcactggagtcaaagtctggaaagctttatcttcccggcagagaaagcaaagagaattgggaagctcatttggactccatcagcatcggctgcttactcactctaattttgccccaagtctccaaatttgatgtgctgactggttgaatcggctaagccaaccggaagccgagatgtcctcaactctactagaggtgactcgggctgctcacgaagatgtggaacggcttgagcggctcatagtgaaggacttgcaaaatgatccacctaccacgaaagacggattgtatcaaagccaccgcgtccgcaataatatcgacaccatcatcttcacc

SEQ ID NO: 248910 - DNA, 108 bp, Gossypium hirsutum
tccgaactttgaatgcattttgtgccatttagggtttaactgagctttttgttctggctggattttaattttgaaggaaagttgtttaggttatttgtcttcctttcc

SEQ ID NO: 248911 - DNA, 400 bp, Gossypium hirsutum
cgcgtccgcccacgcgtccggcaaaagcttattaatgatatgctcgcttctcagccaagcggcggtctctcccgcttattattatagaagctctccttccatttacaaacccaaaccatcgaatcgcttctcttggggttttctggctccaattcccagccctgctatccgagtgttttgttcgaagcccggtgaggtgggaggattaatggcttcttccgttcaaaatcagggttctatttcctacctaacccaacgagaggctgctgaggttgatgaaactctcatgggccctcttggttttagtgttgattcagctcatggaattggctggtttaagcgttgccacatcgattgctgaggattattaacccagtgaggataactgtattcttgcttt

SEQ ID NO: 248912 - DNA, 362 bp, Gossypium hirsutum
acgcgtccgctcgtctcattttcctaccacccaaacaacaccattctcgaaaacaacaggggagccacttccagtattttgcttgtaacaaaatttctctaatatcaccaatgcagcacgaaatttgtgtcctcccagctttcttctccactagcattctctcaccttagccctacggtcttaaccttccttttcactccattactcttcaattactgattcaaaagctcactgtttagtcaagaaaacttcaaattagaaacttttgtagggaaattttgagaagataaaaaattttgagccctaaatgtcgggaccgccaagggtaaggtcggcttacactgcaacgtgaatggaagcga

SEQ ID NO: 248913 - DNA, 361 bp, Gossypium hirsutum
gccgacacgatatccctctcggtgaaaaccctaaccaccaaaacgtcatcgtttcactcgtctattaccaccgtccctatcaaaccaaccattatctccgccgtggcgtcattttcgctggcgtcctcctcctcctctccgccaccatactcttcttctacccatccgatccgattctcaaactcgctcgaattcgactcaaccacgtcggagtcatctcgtcgcccaaactcaccatcgacctttcgttttcgttgactatctcggtccgtaacagggatttcttttcattggattatgaaaagcttgtcgtttcggttgggtatagggggaaggagcttggggtggtgaattcggaagg

SEQ ID NO: 248914 - DNA, 439 bp, Gossypium hirsutum
  unsure (1)..(439): unsure at all n locations
gttcaactttgaaaacctccaattcactttcttatctcttttctttttcctttcattgtgtttgtggcgttctttttaccaacacncnnaaaagcgattggtnnttcggagaccatannctggatnnaacactgcnnaaaacaaaanngtcttactgtnnatttctttattgggtcacttnntgtttttagaaagggaacaagtatatggcgnnngcaaacggaacccggattgggccaatgnngcaaggaagccgttggcgaagaattgttaccggatgataagcaggngaaaccgggatgtgtcancgatgatagtgcaaaaggcgttaaggctcagactattgatgagcttcactttttgcaaaagaagagatctgcgccaactacgcctctcgaagggaaccagggtgccttcgctagcttgcccgacgacgagc

SEQ ID NO: 248915 - DNA, 390 bp, Gossypium hirsutum
cgcgtccgcccacgcgtccgcccacgcgtccgtccacgcgtccgctaaaaagaagtttttacgtttgtttcaagtttcatttcttcctcgaaagtctctctttttgccctcggattcataagttcccatggcttctgaaactgaagcacctgaaatttcttctttgtttgagaggttgttgaggcacagagacctctatttctttctcccttttatcttgggtgtctctaacaacagtgtttccagagaaaacagtgaaaacccagatcaagaaacctcacaggaaacgacttcccaacgtgaaaggataatccttgtcaacccatttactcaaggtatggtggtggttgaaggagatccgaatttggaggctttgctacgtggttgggc

SEQ ID NO: 248916 - DNA, 242 bp, Gossypium hirsutum
  unsure (1)..(242): unsure at all n locations
gttatctttaatttccctttatccttcatttatctccctagaacaatccattggggcaggttctgactttggcctctctccacctnacctctctaaatctctgcctcatcaccgatcatgcctattttaatctccctactcatgtctttagccatgactgaccattcacgttctacttatcgcttacgtcaagatgggttagggcgatcacactcttcaaaagaccctagattatgctttcg

SEQ ID NO: 248917 - DNA, 111 bp, Gossypium hirsutum
cccactcgtgctttccgaattatatccaatcgtcttagatatatcaccgggatgtggggcttatactgtgtgtagcaaaacttgcctcaacaaatagggccaccaaataaa

SEQ ID NO: 248918 - DNA, 323 bp, Gossypium hirsutum
cccactcatccgcaaaaccaatctctattttttcttgactgtataaaccccaagaagattgggttatgtaggtaacttccaacacaacactcttataatacatattacctagcttgtttccatagagaaaccacccaaaaaaggaactcttttttgaagaacgacagccctgaccgtgtgatatcttcttccgcacacccaagtttgacatcaattcactcgaaccgtatgattcatgtacactgtgggacaaacacatctagttcctctaaatagctcctacgagcgaagttgaaaccgggtgctattcactttttaagcaa

SEQ ID NO: 248919 - DNA, 339 bp, Gossypium hirsutum
ctctactaagtaatcttttttatatattctacactaaacacattaaacggggggtttttattcttaggtgtaatagcaacaaaaaacccatacaattttgattccatttctattacctgatctaaataatgcaaaagttaaccttgaaccgtaactaccatacaaattctttcctactgatggaacttacaataacacatatcattccaagtttgatcttttagattacatcaatgacaaccaaaacataaaaaattactctattaggaacatattctagatcgagaacaaggatgtaccagtgttgtcgaaaaaatttcttaccatttatatcaattc

SEQ ID NO: 248920 - DNA, 163 bp, Gossypium hirsutum
  unsure (1)..(163): unsure at all n locations
aaacgattagaatggaaaactcatttttggtgatgacacaaatactgcgggtgagaagaacaggaaagaggcgattattgtcctgncngaggcagggagtgtcaacggagagtctgccaaaggacttggcggcggcgatccatgctgggaggatccccgggtc

SEQ ID NO: 248921 - DNA, 187 bp, Gossypium hirsutum
  unsure (1)..(187): unsure at all n locations
atactatataactcaaacataaattttctttctgcaaaacaaacaaacnactggacgttatcttatcaacatggatcgccaccataaaccattcctactcgtcacatgccttcatctaacaaccacttaccaccctcaaatctgactatcaacaacaattcactaataaacccaacaacaaacatca

SEQ ID NO: 248922 - DNA, 247 bp, Gossypium hirsutum
  unsure (1)..(247): unsure at all n locations
gaaaggaacggccggggcgacgccacgcgtccacgctttccatcaaataacacacttttgtttctaactaaagacgncattataggacggcgaaaagaaaagacatggctgctaaaactgctgcagactaagatccttctaccaagcccacctttgtacctggtagaacctttctcgtctttcgtgaccggagcagctctaagaatgtccccgtttacatcagcgatctttacagtccagagcagag

SEQ ID NO: 248923 - DNA, 357 bp, Gossypium hirsutum
ccgggatccattgttcataggtactttgagttggagaagtcgcctgtattcagctggttgcttaatttcggagggtttaaggaacggttgcttgctgatgatttgtttttgactaaggttggcatcgagtgcggcgttgggattttcaccaagagcgcagcagagttggaaaagcgcagagaaaagttcaggaaagaactggattttgtttttgctgatgtggtgatggcactagttgcagatttcatgctagtgtggcttccggctccaacggtttcgctccgaccacctatagcactcagtgccggacctatttctaagttcttttacaactgtcccgacaatgctttccaggtg

SEQ ID NO: 248924 - DNA, 329 bp, Gossypium hirsutum
cccacgcgtccgctcactagttgtttgatatgcgctgacgcaaccaacgaaggtgagctgcaacatctatgaccaatgtgccactcatgtcctgacagagcgtgtgtaaagccttccgtttgtatccacgccaaggctaggtttacccggtctatgcaaactgaccacaatgactggggtctagagtgggtggatgctaccaagctcgctaagataactcttgctacataagatgatcgtagctagaacagaagcgctggaggagcatcaaagcggataaccgacgcgttaatccaaagcatgacatacctggcagtgaaaggaacagg

SEQ ID NO: 248925 - DNA, 347 bp, Gossypium hirsutum
cccacacatactatccacattttctgttagagacaaaaaaaaactaccgaggaggttttttaacaaaatggctttcctacacaaaccatggctagctgagaacctatttaagacatctatcaagcttattcgccatgtcatgactttcacacaacatgccgtcatagctattttcaaaaaaatataaccttacgcaacgaaccaatgttcggtatgcattgcttaggcaattcactatccaacaaataacagttccataataatttaccaaccctcttctttttctttcgggcgagtgtaatctccattttcccttattattatttatttgttttcaactttttttt

SEQ ID NO: 248926 - DNA, 204 bp, Gossypium hirsutum
cataaacattaattccaaatttattttactaaaccgaacaaaatcaaatagaaagagttcttgtaatgagtgcactaaaccacccaaaattccatatttcgagcctgacaagttaactttacactctatttataacgatcagacacctatttttatgaccacataccttcacattgaatatcaataacttgactgaacaaaact

SEQ ID NO: 248927 - DNA, 319 bp, Gossypium hirsutum
cccactcgtccgttcacacttaattttattcagcggatatcaatcacctgaagagattactcatactcacatcagcacaccatgcaacagtcctcatcctcatccaacccatatactgtaaaaacctatatattatagacgtacacctataatctagcacatctatagatgaacttatttgtatctcatgagatatatatagcactagcattgcattcatggcatataagaactagctgttttaatccattgacaacaagtttccttttctattgatataaaacgtgatacgacgatacatgttatatactccaagctt

SEQ ID NO: 248928 - DNA, 331 bp, Gossypium hirsutum
tccacacatacgttatttatagctttatttatgaacaaagtggagatcttatgggacggaatttgaggatgcaaattcacttaaaacacaaaaggaaaacatcattcaattaatacacaaaggggggattcactttgatagggcccaatatagatttttttgtatcattacaggataatatttcatttggtacgctataaagttatgatcatcgaaatatggacatacacggggccctatacttaaatatttgttagtcaaattatgcctttacaaatttttatcgaccaggagcagtttcttttgataatcgattagatgatcaatgttt

SEQ ID NO: 248929 - DNA, 312 bp, Gossypium hirsutum
cggacgcgtgggaaaaaaatatatttaaaaaaaaaaaaaaaaaaaaaaaggaaagggtaaatttataaaaaaaaaaataaaaataatataaatatttaataattgggcgtcccttttattggatctcatctttctttccttttctttcgattttctttctttttttttcttgtcccttatttcaattctctggccgttgttttccaccttcttgtcttggataacccttgttttccccaatttattttcctttgcagtcattccccttttgtcgtcttgctttattatgagtttggccctttctgttcttct

SEQ ID NO: 248930 - DNA, 211 bp, Gossypium hirsutum
cgctccctggtaggcacatttaccaaacataaaaatggcagcagtgacacatggcatctatgaatgctacatagctactaatggcgcacaagcaaccaagctttcttttcagcaactccaaggctacattaaaccgcacctaacctacctttactcgtggcggcattgtgggtttttaactagtatgtgaccgctagtgacacaatgtgaa

SEQ ID NO: 248931 - DNA, 206 bp, Gossypium hirsutum
gttgtacctggcatattaatagagcagaatagcaatggcctcgcatgctatggaccatgcaccggaccgtctccgcacaggccaacggggccctaccggcctaaatctgcttgtttcagcaccaggaaggccaacacctacttttgagcaacgggagaggcaagcatgcaggggcgcttggaagaagaagtcggactttatcctgc

SEQ ID NO: 248932 - DNA, 264 bp, Gossypium hirsutum
  unsure (1)..(264): unsure at all n locations
ggaccggnaacggaccgggtcgggtccgacccacgcgtcgcgatgcaaattcagataacaatttacacagtctgtgcttcttcactcctatgtcttagccagggcatagacatcatctgcactcggttaaagggtcacactccctctataacatgtcagttatggggagaggagccatcctcttgcacggcgaagaactgactgagcgtgccaaatcatatgcatgcgagcttttcaagactggttaaggtaatggctgtcctg

SEQ ID NO: 248933 - DNA, 223 bp, Gossypium hirsutum
  unsure (1)..(223): unsure at all n locations
caccaaacacanaaatcgttcgtttatatataaaagatccccaataccacaaacatctttttccaccttacatttaaatcactatattctacattatagctaacttctttttcattctacattttcatttattggcttttctacttacatctttctcacttttttaaatctatttacaattttactgactctctctctccattatatattcacaaattttctc

SEQ ID NO: 248934 - DNA, 426 bp, Gossypium hirsutum
  unsure (1)..(426): unsure at all n locations
gggaaggaatcgggtgggaccgaccgcagtccggaaaggtttcaaatggcaancccttcaaaggttctcagttcaagcgttccttctnnccttctgagggagtgctgangtcaacttgcggaaagggctttnnngaaggctgtgggtaccgaaccganngcaatnntgattattcganccatattggcttcacagnnngaatgcagcnnacagcgcaattcaaattcggaaaggtttaatgcgtgaagctnntatggggaaagatcttctcaagggtgtttggaggaaaggacactttacaaagtgatttcgaggccgggctgtgcattgctttttacccgttgggaccctgcaagagccgaggattgctcaatcttggcttaaatgaaagcttacaaaagaaagttcaacaatcaaggcaattgg

SEQ ID NO: 248935 - DNA, 268 bp, Gossypium hirsutum
ccacctcggaggatcaatagagttaagggcaggccgaggggagagacggttaattattatgggcaaagaagagattagggacttctgactatcataacctacagcttcaacacacaccatcacacatagattgagcatcgagggtgtttcctaactccttggcttccacgtacctcagtcaatcgacttacgaaccgtcagccagtcacactttttgcccctatatatatacgggtattaccaaactctctgcgtgctacgttgatac

SEQ ID NO: 248936 - DNA, 392 bp, Gossypium hirsutum
cccacgcgtccgatttgttctcttttctctctctctcttcaatggcgtcccatgaaaacatcaccgtcatcacctcccccaaaggcaacaactcggaagcagcagcatcggcggcagccaactcgccgaaaggaggccaatgtttgtgctcaccgacgactcaccaaggctctttccggtgcagatttcacagatcaagctcatcatcttggatgatgaaacgatcaaaatccatgcctaccaacaatacttccatggtttctctttctcccaagtcagttgaaactacataaaatccccaatatatatatacacacatatacataagtatatgtgtatctatatccaccatgtatgttttcataacaattccgatctgtataactctacct

SEQ ID NO: 248937 - DNA, 411 bp, Gossypium hirsutum
ggaaaaaccggggcggaccaacccgtccgaccgtaatcatctgtggatgaggttacaaagaagtatggccttgaagttgggctatggaagatattcagctcaaaggaagaagggggacaaaagaaatcgaaaggggatcaagcaaaagagcttctagcaaaatatggaggggcatacttggcaacctctattactctctccttgatatccttctccctttgttatgcactaatcagtgcaggcgttgatgttcaagcactgctgcaaaaggtgggaatctcaactgatgctactggagagaaagtcgggacctttgctttggcatatgctgcacacaaagctgcatctcctataaggtttcctccaactgtggctctcactcccattgttgcgggttggataggaaagaag

SEQ ID NO: 248938 - DNA, 164 bp, Gossypium hirsutum
gaccggccggaacccggcgacccacgcgtcaagatctgtgatctgatcagatcgataaaaataaacatgtttgggagagcaccaaaagcatattcatactatagattgggagttcgaaccttcagatgatctaaagaaagctataaagcgtttaaatatccgat

SEQ ID NO: 248939 - DNA, 297 bp, Gossypium hirsutum
cccacgcgtccgcccacgcgtccgctcgtctcatgaactcaagaatctgatgctgtaaatcataacttttttctctataaaaaaatgctcataaatcaaatatttcatatttgacggttccgccattgtaaagttggatgcttattttaactctttgcaatgtataaatcaaatatgaattgctcatttaaaaaaaaaaaaaaaaaaaaaaaaaaaaaaaaaaaaaaaaaaaaaaaaaaaaaaaaaaaaaaaaaaaaaaaaaaaaaaaaaaataaaaaaaaaaaaaaaaaataaaaa

SEQ ID NO: 248940 - DNA, 392 bp, Gossypium hirsutum
aaaaaacctttaaagctttaaaacttttccatttctccttagataccagaacattgggccatttttaaaacaaaaccataaatcgccttttaaaatcctcccaggtggacctcgacggtgccaaaatatgcttccatctccgccatggcttcaaacggtccctagggatccgtctgcctttgggtcggaggagcatacaccgatcagatcgacgccaaatgatagatattgcggtggtgcgggtgtgttgacgtggaggcacgatggagcagcgcacgatgcggagaggcgcgagacgtgcggtgcttagaggctcggtgaaagggcctgctagggtttcaaaacctgctgaaactatttgaagtttatgggccaattgggccgtaagtttt

SEQ ID NO: 248941 - DNA, 435 bp, Gossypium hirsutum
gcgtcgcgcccacgcgtctcgtgagaatctaagatgatgtggttgtagagagggaacatcacgagtacgaggtgtgttcagtagctggggtgtggaaggcctaactcattgtgtatatttaatccactcaaagtactagctattgttagctgagtgaattggaaaggaagaaacaagtgacctggtttgttagtgaccaaagttgcaaggtgatttaatgggtgcaggtctggagattttcagcttttaccttacacaaggcttgctatggtattggaaaaggtggatgatctgaataagacttgtatttagcaaaacaagaagtgacgggacagtggacagaaatggaatgcaactcttatagattgtgtatggagtgaccttgctggtggaaccaactacatgtggatcaattgtcaacttcagctatggatt

SEQ ID NO: 248942 - DNA, 177 bp, Gossypium hirsutum
ctcaaaaaataatttctccacgctttttttcttcaacttctactccctctatagtggggtctacctgtatactcgcgactcccattaattttactcccactgttttcatcttaaacatcacctttcccaccattgctgatgatatcttcctgctcttatacattttctaagtggtat

SEQ ID NO: 248943 - DNA, 247 bp, Gossypium hirsutum
gtttgaactcacttaaagggacagtattgtggcgctggctaggttaatggatgcgttgatttccatttgggcaggaatttcttcaaaaggcaaacggaaaggctcttttcaccaccattaagttgaagggagctcttcatgcaccatgtatggtcatgagcgacgtttgtacaatgccatgcacacgtgaatacgcgcattgcattcattcctggcttcgtactggtaagatgaggcctactacagt

SEQ ID NO: 248944 - DNA, 339 bp, Gossypium hirsutum
cttaaacctcttccaacagtcccctactatacatatggagacgttatgggacccgtcgacgtcacccagatgggtaccgaaaaagaatgtattactcggagccgccattgacaaaccagttatggaccacaaacccatggcacaaccgttccccagatgccccacttgtaaccgcgcatggcgaggcttacgtatctgttgcctttggtcggatggcaaaaccggttgtcggacttgctcggaagatgttcacgactacggccgcaactgctgctattaacgtaccgacacgcacattcccatgcaacagattgcgcactaatccaccaatcccaggtt

SEQ ID NO: 248945 - DNA, 376 bp, Gossypium hirsutum
ggaattccaaagctgaacatatgtgttaaaggcttcaattcaaagcaattgaggcggaattttcaggtttagattgaggaaaactaaaagaaccaaaaggaaattaacggatcagtagtaaatcgattgatctggctgcaaatttcaattctaaaactgaaaaattaggggttcttttttctcttcggatttctatgatttcgtttttgattccatgttataaaagaaaatgaacgatcaggctcagatgatgaatcagccaccggatatgttgatgcacacggttcaggcccatgtgccaggtcaacaacacatgattaatcaatttgatcagttgatgtcatctgatgcatactcttaggtgaataattaattg

SEQ ID NO: 248946 - DNA, 346 bp, Gossypium hirsutum
gtgaaacaaatcttagtagttcgaaacaccctatatagctctaactatcaaacggggactgctatcaaagatggaccctgtcttatgttccatgcactatctctcactttcaaccaatctgctgatatccacactatctacactccttttgtcccgcatcaatcctactgactgcatatgctttaattcatagcagttaatgcaccgaaaggaatccaagtcgatgctcgccaatatggtcataacttgactgatttgctccaaacttattgacactattgtttctcctgctgtggctgactttgtgacagcttcgattctatgtgactagacgagaatctactca

SEQ ID NO: 248947 - DNA, 246 bp, Gossypium hirsutum
ggaaaacccggtggaccacccgtccgctttaaataggtaggacggcaccatttttcctatatctccctttataaccaaccggggatttactaaatatggtgcctaccattactgctcaaggtaatacactcccatgcaaacaacctgcttctatccattcttaagcactcctttcgccttctatccatcctacttattgccctcaccacaattcttatcatatttgcaatcctacggcatcccaaa

SEQ ID NO: 248948 - DNA, 228 bp, Gossypium hirsutum
gttaaccaaacactccacaaaatttttgaaaaaaaaaaaaaatgaggaagtgtgaactatgtggaaggctctcagcactgaataatcaagcaaatttattgggactgtgatttcaaggtatggccaatttctgactagcataatcgaaccctctttgcatgtttgcaaacctactcttgctcgattggcgaatctggtcgggtttgttggattatgcgtgaaacgaca

SEQ ID NO: 248949 - DNA, 250 bp, Gossypium hirsutum
aaaaaaaaactaaaatgggtgggtttttttgttaataatgcttacccccaatcatcaaaacagaattttacatcaactgtaactaaggaatttcattttagtttcagccaccttttttctcaaatccccaaatatgaacaacattgatgtaattattgatatattacttacgctaccatttaaatatcttttatgattcaaatttttctgcataatgtgtaatactctcattttcaaccccattttcaag

SEQ ID NO: 248950 - DNA, 327 bp, Gossypium hirsutum
ggggcccacacccttccgcccacccttcgcgaggatgtggaatttttatggtttccttttttcttatcaccagggaaagaaataagggatgtggaagctggaaagaccgttggactcgctgcatacgaagctttcatctatgctagcacgacacggttctatgcgtaacgttttctacaatcaacgatcttgcaagtcatctcaaagccgctggtgtcttttttcctgccagcacctatggaatggcaggcaaccgcttggtgccaccacaggggattatttctggtgctgttgagataaagggagcgggtatcgtatcaatagtta

SEQ ID NO: 248951 - DNA, 264 bp, Gossypium hirsutum
ggaactgggacagacgcatgcaactatagtctgcggaagatagacacatcagtggcggggatccttggagttgcatattccaacagatcagtggccagtgactttattggatctaacatttacagattcttgtccacttatgctgggtcccgttatacaatattggatcatgcgtatgatgcacttgtggttgatgctggtcgcgcgtggatggaagcacccgatggtcactgagagcgtgtattatatactgatcgcataact

SEQ ID NO: 248952 - DNA, 136 bp, Gossypium hirsutum
cttccggaaaggggtggcttaccatttttctggccacccaccaggccattcttcaggggaaggggttgggggtttccttgttccaggttccaatgaatgatggaactaactatgctgtaatgagttcctatgaata

SEQ ID NO: 248953 - DNA, 323 bp, Gossypium hirsutum
cccacgcgtccgatatgctacactactaccagtactgccatgtgctttcttttcttttgtttctcctccttttaagccttgattgaacattcaactactctacactttgaaacatgggggaagctccagaaatacaactgcaggtcccgtctgaggatgagaaattaaatgaagattcagttgagcagcaaacaaatggaaaccagtcaacaacaatcacgcaacaaagaacctacaaatggtggctactaatgacaatctatacattttttcttctttctggtcagtcagtggctacacttctgggaagattgtactatgac

SEQ ID NO: 248954 - DNA, 386 bp, Gossypium hirsutum
ttttccttccccatttctggctgctaaaaaaccctcaagaaaagtttagatatgggaggaaatggaaagcacagatggatattttcattttaccaacgttctaattcatcatcttctccaaagcaatccaaaaacctacctccacatgaattcctttgtccaatttctgggtctttgatgttcgaccctgttgtaatcccttcaggtcaatccttcgatcgaatctccatccaagtctgccgtgaccttggctttacccctactcttcaggacggctctacccctgacttttccaccatcatccctaacctcgccatcaaaaccaccatcctcgcttggtgtcgtgaccaccatgctcaggaccctgccccacctgattattcctt

SEQ ID NO: 248955 - DNA, 383 bp, Gossypium hirsutum
ataaaaactaacgcccaaatccttcatctccaagggttttaatctaaatctagggctaaatcccccaacttttgaaacctaagattctaatttcaaaccctactttccccaaatacccgcttcagtttatcaaccgtcaaaaaaaaaaaaagataaatgaacatgaaatgatacgaggaagaattattgaacatgaacaatgggtgtttggagaatagaaaaaaagaacatgacaattcacaaaaacggccaaagtcttacaaattcggtagcaaaagtgacgattttgccctagcaatcgcgaaggttgcagtggcgcaactatgtgaaagcgtagggtttcagggttttcatctctctgctttagaaaccttgtctgatat

SEQ ID NO: 248956 - DNA, 253 bp, Gossypium hirsutum
gaaaaatgaatgattgtgtagctgttctctttgtaaatgatatctttatgactggtcataccggagatgcatcatacgacggtgattcaaaacaattcaatccatcatctgcaggttgacctatacggaacgaactagactgcttcgttggacctgctataagatctaacagggacttctgctgccattgatggtggtttaaaagtgtctttcaagatggtcgtcattgtagcacgtgatgataactgtgtcg

SEQ ID NO: 248957 - DNA, 291 bp, Gossypium hirsutum
ataaaacgcacgctaaattctattttgtttcaactaaggccagatcttactccaggctattttcagagcgatttgcagtgaagaatgactggaacaccgcctgtggcacgacagttcaatggtaagctcaaggttctgaaccagcacctgaatcgccagcacgagcttctgcacaagcttgacgcgaaacttggcacggaaccaagcctatctccatggctagttcaactggttgcatagcaacttacactgtggacataactgcagacattgcagatgaaaatacagatg

SEQ ID NO: 248958 - DNA, 389 bp, Gossypium hirsutum
gcacatgcttgatcatggttacctacagtaaaggcatcaacacctgatcgaagagagctcgaggcaatctataatgtcgaagcaatgatgcccaatccacaagatccagagcggttcattgtctgtctggcgactgtagttaatcggccgccttgagagagattagaactccttcgaatcagagacacagcagagaggataaggaggggtataatataccggcgagcagaatcaccacggtgtggagtacaatatgtaagttgtaattatctatcaatacatttggcacaatattctaccttattaatttaaattccattcaatattctttggggccgcataataaaagatggtgtgtggagcccttcttttttgttgtaaaatcacta

SEQ ID NO: 248959 - DNA, 161 bp, Gossypium hirsutum
accacacctccatttctatgtgaactaaacttgcacatggcttactccattctaatagacaggagaagcctaaaccgaaacacataacaaaacgagcttaagaagggaatcaatggaaaatttctgtacaaaaacgctaaggatgacgtcaactaaaatga

SEQ ID NO: 248960 - DNA, 224 bp, Gossypium hirsutum
gctcatccattcaaaggcctatgtttttgctcaactcggaaagcacactgtcgggggatagtcagatgatgccaagcaaggaatgtaggctaagggatatgtctattatcatgcacgtatcttcaacacgtcaatgaattatctccactgaaaatttaattgaaagagcagaacactgatctttcattaagaaggattcaagcaccgaaaatacgtggcgccta

SEQ ID NO: 248961 - DNA, 272 bp, Gossypium hirsutum
accacgcatccgtacggagctatgtgttcatattcagatactccttcttttcattcttcttcttgatgacactgtgtctatgcagcgacaaggaggatactgactcgaaattatgcaccaccaaagggggattatagagggtgtgcacttgatcgtgccaaaggaaacaaaccaaactggattgttgtatggaacgatggcgcctgagagtttcatgaatgggagcgtgctggaagacggtatgtaacgggaagggttggggctactatttg

SEQ ID NO: 248962 - DNA, 350 bp, Gossypium hirsutum
  unsure (1)..(350): unsure at all n locations
cacgcgtaccgctcgttttgtataacgtgtagcatnatagtacctagtaacgcagacaataggcagtgtgcctgcctccatggatcgtcatcggcaacccaatttgcgcaccgtgaacctgcgtccgtcctccggcaccaggcgccacccatggtggcgccgccttcacacggcactcaagatctggcctctgtctttcccacgtcacttatggaaggcccaacaaccgacccatcacttctctttgcaaggcgaatgtgtgggagggagtgcnnaatgcattgcacggtgtggccctcnnctcttgggaaagaaaagaagttcgagacanctctcatacctcgcccgat

SEQ ID NO: 248963 - DNA, 318 bp, Gossypium hirsutum
accaaacctccatttccatgtgaacgaaagttgctcatggcttactccattctaataaacagcaggaatggctataccgacagcacagaacagaacgagcttatgtagggaatcaatggaaattctcagtgcagaatccctaaggatgacgtcaactataatgagcacgcgaacatagccaagccgcacagcccatgatgcatctttccatgcaaaagctctgcaaaggcttgacaatgttaaaaccagggtacagctcagacctaccttgagcactcgatcgcagcgccattgctggagctatcttctcaaccttaa

SEQ ID NO: 248964 - DNA, 275 bp, Gossypium hirsutum
cctcatccactcaaattccatctctcgtcacttatctcagaaagcacactatccaagtatagtcggaggctgccaagcaggggatggtgactatctcatacctccactatcatacacccatccacaacacttcaataaattatcaccacttaaaatctaattgaatgaccagctcacaattcttttattaagaaggatttctgcaccgtaaattacttctgcctaccctagtactccaatctaccctactcgaccatgcgaaagcttactatttt

SEQ ID NO: 248965 - DNA, 133 bp, Gossypium hirsutum
tctttcccttttcccactgcttttcctctcctaacaaacagggctcttcgcatgaattcaccccctctctttctcaacccatgcctatcccctaacttactggcactcctttaccctacatctcagctcaact

SEQ ID NO: 248966 - DNA, 237 bp, Gossypium hirsutum
accacgcatccgtacggagcttgtgtccatattcagatactccttcgtcacattcttcttcttgaggacactgtgtctatgcagagacacgaaggatactagactcaaattatccaccaccaaagggggattatgagagggtgcgcacaaggtcgttccaaaggcaacaaaccaaactgtattcttccatggtacgatggctcctgagaggttcatacaaaagatcgtgcatgatta

SEQ ID NO: 248967 - DNA, 183 bp, Gossypium hirsutum
gccactcgtccaattcgattacacacaatcttctttccatcctatcattcaacgatacagacttggacagctcggatgccgcgtgctgaatcctgcctactggcactacacacattatcataaccagcctgcctggccattctaagatcgcatatctatctgcagaccttgtgctaaaatata

SEQ ID NO: 248968 - DNA, 303 bp, Gossypium hirsutum
accaaacctccatttctatgtcaacgaaacttgcacatgtcttactccattctaataaacagcggagggcctaaacccaaacacataacagagcgagcttaagtagggaatcaatgtcaaatctcagtgcagaatccctaagcatgaccgcaactattatgagcacgcaaacatagccaaccgcactagcatgatgcattctctccatgcaaaacctctgcacacgcttgacaatgttaaaaccaaggtacagctcaaacctacctagatcactcgatgtcaggtgcattgctggagctatct

SEQ ID NO: 248969 - DNA, 169 bp, Gossypium hirsutum
accacgcgtccgtacggtgcttgtgtccatattcacattcttcttcttttcattcttcttcttgatgacagtgtgtttatgcagtgtcacggaggatactggctccaaattatgcaccaccaaagtgggattatggagggagtgcacttgatcgttccaaaggaaacaa

SEQ ID NO: 248970 - DNA, 379 bp, Gossypium hirsutum
gccactcgtccgagttgtttacacacaaggtgccgtccatcgcatcagtcaacgatgcagacttgtacagctcggatgccgcctcctgatgccggcctactggcactactcacgttatgataaccggcctgcctggccattcgaagagcgcagagcactctgcagaccgagtgctgaactagatcgcactgtacgaggaacggccatgtcacccgcacagcgagtcacatgtggacaatgaagcggactctggctggaccgaaacttcatcgagaggaccgtaaaaatgcacgcctagcttgataatcactggctgcatacaacaaaattgagagctcgcgcgttcgctttgcataagctgaactcattgaacacagta

SEQ ID NO: 248971 - DNA, 279 bp, Gossypium hirsutum
  unsure (1)..(279): unsure at all n locations
ccggtnaagaannnncgcggcgacccattaatccgatcgaccgcttataataaactttattcacccacacagcccctttaccaaaccggcgacttttactcaaccggacggtcacttataataaatcntctcgtcaggtaatccagaggtaactctttttctttatccctcacttttataccaacaaataccttttctatcaaccattttatatcccatccacaatgcctccagaacaagattgctggtttcttaacccatttcattaaacttatccaa

SEQ ID NO: 248972 - DNA, 369 bp, Gossypium hirsutum
  unsure (1)..(369): unsure at all n locations
accaaacgtccgtttctatgtgaacgaaagttgcacatggcttactccatcctaataaacagcacaaagcctaaaccgacagcacataacagagcgagcttaggaagggaatcagtggaaaagctcagtgcaaaaacgctaaggatgacgtcaactaatngtgagctacgcgaacaaagggcaagccgcaaagccgaagagctatcttttcatgcaaacggtctgcaaaggcttgaaactgttaaaaccaaggaacagctcaaacgtaccttatacaatcgctcgtagcgtcatggctggagctatcttctcaaccttaaaaaaatgtgacgaccgcttacctgcacaacacattgctgctattaatca

SEQ ID NO: 248973 - DNA, 390 bp, Gossypium hirsutum
ccttttgggccgaggggtgggaatatagaagggaaatgtgccctaaaaacatcacaatacttccggctccgaaacagtgggggaatctttttctttggatgacattgccgacttcttctttcttcccctggacgacgccgcttccactctgggcgtttgcacctctgttctcaagaaaatctgccgtgaaaatggtctcgacagatggccttaccgcaagtttttagctggaaagagcgtcgaagaaatcaagaggcatgcatctagagaaagaagaagggaaatcgctgagctttcaaaggctcatcggcagagctctcaacctcaaccccaaaacaatgaacaacccaaattacaaggtggctcagcattaccgaacttacagcagca

SEQ ID NO: 248974 - DNA, 349 bp, Gossypium hirsutum
acacacctccatttctatgtcaactttacttgcacatgccttactccatcctaagagacagcacaagcctagtaccgagagagataacaaaacgagcttaagaagggaatcaatgtaaaatctcagtaccaaatccctaagcatgacctcaactttaatgagcacgccaacatagccaaccgcactgccctagtgccttcttttcatgctaaacctctgcaaacgcctgaaactgttaaaaccaaggtacagctcaaacctaccttattcactcgctcgtagcgccatttccggagctatcttctcaaccctaagttaatctgacgaccgcttagctgcccaacacatt

SEQ ID NO: 248975 - DNA, 258 bp, Gossypium hirsutum
accacgcgtccgtacggagcttgtgttcatattcacattctcctttttttcattcttcttcttgatgacactgggtggatgcagtgtctcggaggatactagactcgaaattatccaccaccaaagcgggattatggagggtgtgcacttggtcgttccaaaggaaacaaaccaaactggattcttgcatgggacgatggctcctgagagtctcattaataggagcgtgctggaagtcggtttgtacagggaaggttt

SEQ ID NO: 248976 - DNA, 583 bp, Gossypium hirsutum
  unsure (1)..(583): unsure at all n locations
ggaatnncccgggtgcgaccccacgccgnntccgtttanngctatagcataccccactacttagtatctccactannctagcaatgnnngcttcctgcaatganntctcattggcgtagccatgtgcgcaccctcgcctctnnccggcacccaggctaaccccatggtcnnngctccttttcaacgcggccctncnnaagtcnntgcctnctngnnctttcctnncagtcacccangnngaaggcnncaacccaacgacccattatccttctcnnntcgcaagggcaatgnnngcggcanngagtgcannnatgctatgccagngnntgtggccccctcctaccctcggaaacgannagaagnnttcgaggacctnnctctcnnatacctccnnnccgatcttaccacnnccgtgcccagttggcttaagcggaagggtggattactcnnttcttcgctttcaaannatgggttcccttcggcttggganaattcgannattagaagggagggggattccgtggccaccccgtaanatacccctcgagcnctacnctcacgtaccctacganntggacgctac

SEQ ID NO: 248977 - DNA, 248 bp, Gossypium hirsutum
accgcacgtacatttctatgtgaactatagttgcacatggcttactccattctaataaacggcggaagtctagtccgaagcacataacaaaacgagcttctgaagggcatcaatgtgaaatttctgtgcaagaacgctgaggatgagctcaacttaaatgagtacgcgaacaaagtcagccccactaccgaagtggcatctattcatgctaaagctctgcataggcttgaaaatgttaaaaccaaggt

SEQ ID NO: 248978 - DNA, 277 bp, Gossypium hirsutum
gccacgcgaccgaggcgattacacacaaggtgccgaccatcgtatcagttaacggtgcagactttaacagcgcggatgctacattctgaagtcggcctaatggaactacacacgtgatgataaacagcctgcctgttcattttaagagtgcagggctatctgcagactgtgggttgaaatatattgcattgtatgaggaatgagcttgtcaatcacatagcgcgttacatggggactatgaagctgactctggtttgactgtaattgcaagagagga

SEQ ID NO: 248979 - DNA, 380 bp, Gossypium hirsutum
cccacgcttccggatttctcacctttcttctgaaactggggattataatccttgcgagctgtccacttggctcgagagcatgctctattaacttaaccctccctccacttttgatccttttggcgctgctaggacggctgcagcggcagttggatgattcgttccttgtccccgctgagtcctcaactttgacgacgttggatttcgacaacatcaatcggaaacatcagaaatctggtccacaaatctttgaggaagctttctgctccgattacgatcctaaagccactcctggtaaggctatttattctcaaaaaacccaacccccaacccacgattccttattttcttccacacccaccaacgtttaatcttaaaaa

SEQ ID NO: 248980 - DNA, 250 bp, Gossypium hirsutum
gcgaccacgcgtccgagcacaccccagatgttgccttcaattttccattgctttggttcctttattaacgaagattggtttattgtgccaaaagatgaatatatatatctagtaatctactactctgagaattgctggaacgagcagcttgcttcggactttccttcaaactttttatcgttcttcatgcttgaaccttttttttctaagaaggcaggaatttcatgcaaatgggaggattaattttggc

SEQ ID NO: 248981 - DNA, 403 bp, Gossypium hirsutum
gggcgaccacgcgtccgcccacgcgtccgcaaaaacatgtcttgaacgacaaaacctgtttctcttacactggtcctactgcttctgagttgctatcctctccatttcttcggtggagtctggccgaccgcctttcgcctgcgacccgagaaacgggttgacgaggagtttacggttttgccggacgaatttacctatccacgtgagggttagggacttgttagggaggttgacgctgccggagaagataaggttattggttaacaatgcgatagatgtgcccaggcttgggattcgagggtacgagtggtggtccgaggcgcttcatggggtgtccaatgtgggtcccgggactaagttcggtggttcgttccccggtgccaccaagcttcctcaagttatc

SEQ ID NO: 248982 - DNA, 136 bp, Gossypium hirsutum
  unsure (1)..(136): unsure at all n locations
tactcacttaacattcccatntcttttctccanctcccgagggaaatatgccggtcagaatcataacatttatccccccccaanaagctactcacccctattctcttaaagctgctttggctgagttcatttcaac

SEQ ID NO: 248983 - DNA, 237 bp, Gossypium hirsutum
tattggttcaaccatcccttcttaattcccaacacccagttccaacttaaggaccgggttcaacttccccttaatcggctttggtttcttttgcgctgtgaccgctctggtttttgggtttacttacaagaactggaagggggtggctatttgttggggagagaggggggttggattctcaattatttaggattggatttggggggggggattttattatggaggttttggtttttt

SEQ ID NO: 248984 - DNA, 378 bp, Gossypium hirsutum
cccacgcttccggccaccggttttttcacccgttccggcggcacttccaactcgaactcacttccgaacccaagactgcaacccacatcgagggggccgaaaatgaacgccaacactaactcttccactcctactccaactcaaacccgaaatcaaccagctaccgcagcacccactcctttcaacacgaaagacaacagggaagaccacacatacgaccaggccaacgaggcagccaagaaaccgctcaaggaacaaggcaatgagaaaggagcatcgacgagtgcagcagcgccagaggcagagcaagtgacaactgatgcgaaaaccgatgcgtctgccgaccagtcggaacaccgcttgatacacggcaagact

SEQ ID NO: 248985 - DNA, 291 bp, Gossypium hirsutum
cctacatttgaagacagagaggttttatgacaaccgcgagcggaagggtccggtccggataacacactcacagcttttgtcaacacaaccggtatcttacatgggtggagaaccgacgacattcacgaccctggacgtggggcatccgagagccggaagtgttatccccaaccttatctttaacaggaaacaaagggaattgttgattcaccaccacgggatgtacaccttccagaagttttatggtgttaggaacccaaccctagtggtcggaaaggccacgcccctaaa

SEQ ID NO: 248986 - DNA, 383 bp, Gossypium hirsutum
gagaaaattctctaacacgcaaattttccaaagtacaggggtgttatttgcgggggtaatatccacaaaggaagtcatattccaaaatggcataagaatgatacctacatttctgctgcaacttctggtgccagcttttgtggttcaaaaacggaaattggtatatatgggatagcacatcacaatgcaacggcaaatctatctgaaaagcgtatcgcaaggaaccccgtgaatgcaggaccaaacaggaacaatgccaagctcactcatgctgcaaccacctctgctcctgaagtgtcggaaaaagttgaagccgacagatttagaccaattgcacaaagaacttaacaaagcatcgccactctaaatcatggatcaagatc

SEQ ID NO: 248987 - DNA, 371 bp, Gossypium hirsutum
  unsure (1)..(371): unsure at all n locations
anataccagaaaancaaaaagaagaagaaaagaganccggaggangncncnnacggncccaacnaancncncaaaancaannnngaagccaaagcnggagacccaagnganccccaaggcnncanccagancannganngnangccccnccagcaanccccccnccnccgacaaancggcnncaacaccccaggccnncncagcggcncncgcncnnncnnccaacccccnnncggcnccacccccngcngnngcggacanngcggggcncaccccnngcaaagagnccaagcaanncgccaagcgcgagaagcagcagancaagaagcnggaanccccgnngaagcccaacgccccccgaagcgcaccgg

SEQ ID NO: 248988 - DNA, 241 bp, Gossypium hirsutum
  unsure (1)..(241): unsure at all n locations
atatgtnntgcagannagttttcaaagtagccctgggcctgggtattccggcccacccaatacatgnnattggatcnncggaaaccaacannaagacttgcgaaggagtggtnntctttgatccgannattgttagaaaagagaaaccggtgnnncaatcccaaggctcagnnggatgtcaacttacaaacatcgcccacgttttgggaccttgtcctctatgcttaccctagcttgtgag

SEQ ID NO: 248989 - DNA, 490 bp, Gossypium hirsutum
  unsure (1)..(490): unsure at all n locations
taccggtaacggaacgggccggagccacgcgatgcgacaatagaatcaccatgaagggttttatgtttttttatgcatnagagatganggaggtggagctagcgttctccttcgaggtacccgatcctcgttcgccacgccctgagaagcancccnntattcctagcaccgtttaccagtggcaaaaggaagagaagtgcattatcggtaagggagaaccaactttaagcnagcctggggaaccgatancccggtccttttcaagctgacccaggcaagaaccggtttatnntaatcgctggattggatnngcattgtctgatcccaagggtcancacacgaagatccgcagcatttnggatctcatacntggtctcaaggctgacanaatctttgggtcaaaaagattgcttctcgcctcaatgttagaccaagcatttgatcgatgatattgatggaatcccaactttttcagatggagaaaagtgct

SEQ ID NO: 248990 - DNA, 422 bp, Gossypium hirsutum
  unsure (1)..(422): unsure at all n locations
gccgacccacgcgtgccgcccacgccgtccgcccacgccgtccgttttatttgcttcctatntttcatggggctgcctgcagctcggggtgtcaatcctnnacttcaatcccttctctttctacccannatctccacctacannagagcttcnnactccggtacccgctgcggcgccaacgcgacccaaccgcggaccnnntctcgttaaagggccgtatncttaagggcaccgannagccatctcaggccatctcaatctctcaaaccgccgcccagcggaacctcttcatncgacggggcgacggtcaaccccaaactcccttcccttctcccggcctcaatcaaatccgacnnctcctcgccgccctgcgcgaacctcctacnggcaaggatcaattggcgccctcgccgtccacgtac

SEQ ID NO: 248991 - DNA, 492 bp, Gossypium hirsutum
  unsure (1)..(492): unsure at all n locations
ccgtccgnngaggaatgcgatccaccttattatcttttggctannaggataaattanngagaagtcaantggggtggcggnnataatgaatcgnnggtgatagcccattgagaggtgannagttcgaaccccagctttctggcatggtttnncttcagaaaggctcagcgatnngaagtagttggctgatatttcgaagctannggattgggctgcatggaccctnntccttccagnntagagaatgggggagggtccatgccaaatacctanncattacgaggannatggtcaaaagggtatgagcccccacatttcgattatttttcaatgacannaggctaatcaaagagccctgggcggtcanccgtataagccattggtaccctgatgtatttgtctggattgttgagaagtgggtggggaaaacttgtgtttcccaaatgcaagagggaaaacctttctcagccaaaaggatgatagctggtcaga

SEQ ID NO: 248992 - DNA, 254 bp, Gossypium hirsutum
gttttaaagacacaaaatcccagatgggtttcggctgcaaagcactgtagtcggttgttttcacagatgtgggagcccaaccacaagaagcaagtgcaacgcagcagcaatattataacaaagagagtgggttaacaaacccaacgcaaaccagacaaacagaaccttaaggactcttggaaacctgacggccgaacgccaaacaaagatggagatagtcttccaacatattggatgagacagaaaataatgat

SEQ ID NO: 248993 - DNA, 403 bp, Gossypium hirsutum
cccacgcgtccgaatttgcttttattcttgcgacggcaacaccttcgaatgtcggtggattcgcgacggggcatataaatattccagatatggtgaagacggggataccgcttaagactgctggcattgtgattttatccttgttaatgcctacgcttggtgtttatgtttttggactaaacggaggagttcaatagctgcaaggggaagtatgatatatatatacatgtatgtatatagtgtcgtttgatagcaaaaaatggtaaaatttatcgagacaagatgtacagccatacaggtctatcacaagttgtgcaaaagcatgagaagaatgaagcttcatttattggttgcaacaaagtgatcagaagagttgtggggagaattcttgaatctactttat

SEQ ID NO: 248994 - DNA, 404 bp, Gossypium hirsutum
  unsure (1)..(404): unsure at all n locations
cgtcccgagcccccttaaagncctatctttttttttcttctanctactactaaacttagagggtggaaatggtcctccataccatcaaaccccatcactggaggtctcctcttctgccgctaatacaagaaagataacaccacccactccttcaacttctcgtttctctttgccctttacttttaagtctcagttcaacgccttggtagtcggtgggaggccattgcttggtgggtttaaccactcttctgttcctcgtgccgttgccactcccaattcagttctcagcgaacaagccttcgagggtctttcgcttcaccaagaagacgacgacgtttatgactccgaaggtgaggttgggagtgggttcgagtctgagtctaccctcgacgatgaactcgacc

SEQ ID NO: 248995 - DNA, 142 bp, Gossypium hirsutum
cgagacgctatgtcacatccaactttttttttcatgcagataagagcgcgagggcgatggttctatgcctgtgcgaagcactagcagatgcacccgtagctactgccgttgacactgaagctgctacggaagcaactggtgc

SEQ ID NO: 248996 - DNA, 330 bp, Gossypium hirsutum
cccacacttactctgaaacttattctctccttagaccaaatgaaacattagacagttttttacaacatactttactccatctaaacttacttccataatttaccaaacactctccttaaaccgtcttttaaccgtgtctatgcccaagaccatctcttgtcaatgtctcaaactcactgccttgctaaatatgtttcaactgcaccaccatcactaccactcctccacggatgcacccccaactgctatcaaccgttcttaccaaatgctaaaattgaactgcgccgactcgccactaccatttatacctgtctactataagcacccaac

SEQ ID NO: 248997 - DNA, 366 bp, Gossypium hirsutum
  unsure (1)..(366): unsure at all n locations
gacaagtatgagaatggtattatggcaccaaggccacctcctatccattatggtagaaaccaaggtggtaggttccgtcaacaaaatagaaactctgaccaaccaagatatgatagacaaggaaataccactccgaaccagcaagggaatgtgccttacaatcagcagggttttgcgcaaggggatggaaggaactataggcctccacaaaattatccaccccaacaaaattacaggcagcagccgccaatgaataacagagattatgctcctagaggctctgatcctttgcatcagaacagttacaaccaaggaaagcatggaagttataattctaaagacgaanggacttcgttcaaggagagc

SEQ ID NO: 248998 - DNA, 411 bp, Gossypium hirsutum
  unsure (1)..(411): unsure at all n locations
ggaannncccgcggtcgacgccacgccgnntccgcaggcttnnntctgaattaccttgtgtcatttattgnnttgtcaagcggctcgatgacttgcgatgtgggtcggcagatatgtagcaaannagttacgttgctttgcacttttctctgaagggggtggtgtgtctctcttttcttgaagaatggttacgacttttaccaaggacagagtgaaaagaaatgtaacctcgaatttgcannaagaagcttggcttctcttagcatgagtactctttgtcacatgactgccattttgggacgtgcgacatcnngagcacatgtctgtcaacagagggttgtcacaagaattctctgtaagccatcagtttgctgcgtttccttttacaagaagggaaccctagactacctt

SEQ ID NO: 248999 - DNA, 377 bp, Gossypium hirsutum
atccgcttatctgaactcaattcatttcggcagccgctcaatccgccgcattaacctgcgtattcttccttttaagatttaatcctacgattcgcgctgtgggggacctctgatcgcaattcgcggctttcgagttcccaccgtcatcataatctccaggtcttctactacagctggcgtgtgattataagaaaggaaaaaataaaattaagaaaaaacaaaaatacaaacaaagatttccttttttctgttgtatgtctccatctgttttttattctccgtggttgtgaaatttggtggttacaattacggagcagaagcgcgtgaacggatatgcagaaaagtgggagtctgtcgagaagtagtaatagtccttc

SEQ ID NO: 249000 - DNA, 284 bp, Gossypium hirsutum
ggaagattggtaagacaggccggttcccacatgtggtcatgaggacaatcagcgggtacgttcaaatctcatgcctgagaaactctaatgcaagacagattcctgtccttgctgaaaggacctcagtttctgtctctaccggtgcaggttggtgaaaatacagtactgatttcatttattttacccctttggcttgatgtatatctacacattctttacttttgagcactaatttcagtttgggatggatgaggatatgaaatattatatctttgatcttttat

SEQ ID NO: 249001 - DNA, 382 bp, Gossypium hirsutum
gctgccagtattgtatcactgttgtagtgacatgttacgaatatggctaaagatcgtgtgtacagatggatacactgaggatcatgtgtggccttatctcctccatgagacaggagatgtgattacacgatctgatgttggacgcatctaccaagatcgcatacgactttgctaattactagacgaccaactcgttctaacacttaacttatttcgcactgtttacattccaagatcgatgttttcgcctacaaacacatactgggagatgaagatgaaacacactgtcatacctgagtcgttttacgcactgacaaatagatgagggaatgcatttcatgcttgggtagaaagcaatgacgacttgttggacatacttgtg

SEQ ID NO: 249002 - DNA, 216 bp, Gossypium hirsutum
  unsure (1)..(216): unsure at all n locations
tcgcccacgcgttcgcggacgcgtggggcgaaattgcaaaccaaagctggtcttncttgcctacattcattcatccaaaaaaaacacctttttaattcctaaactgaagccatgaaatctcttaaattctaacttgtagaaatctttctatttctgaggttgtattattcatgtattgcaacagaaaaaaagattcagaaagcttaaaagacttat

SEQ ID NO: 249003 - DNA, 316 bp, Gossypium hirsutum
cccacgcgtccggttcggtacaacccaagttacagatttcttcctttttcattattggatttatttattttcaatcgaaacaaggaaactaatatcgaatttcggcgcttacccataccagtttctctttaattattttttctataataccccgtccccatagaaacctcaattatctctcttcttgtaaaaaaatctggcttctttttatttatttattaaagttagcctaaaaaatgctgtgcacaatggtgttgatgccccggaagaagaaagttggatcggttccggtttatttgaatgtatatgacttgac

SEQ ID NO: 249004 - DNA, 414 bp, Gossypium hirsutum
ccgacacaaacaaaccgaacaaaaaaccggattaagaagaagagcgggcataggagcgggcgtcgaaatgctgtttgtctagttgggttaataccctgggtacagggcgaagagcagggagaagactgagaaattcacttaatattattattaataaaattatgaaaacactcaaaactgcactaatacgtgcttgactaggagcttgactcggtggatgaatatcagggtatataacaagggatataaggggttaatgtatggcaagatgtgttgcaagtcgtgcgtgaattcatttgagaattcataatagaagagttgattgtgcaatctattgaccaacctattactggttgaggtgctgttcatggcgatattcatgatctaatgaatgatctaatgactgtatgtcat

SEQ ID NO: 249005 - DNA, 254 bp, Gossypium hirsutum
ggcagtgcagatggctatccgagtttcaccttctgcaaggctttctcttccaccaccatgaccatcaccaccttctccttcagtaccatcatccacaatctcaaccaaaccttttttaaaaccccaacaacctaaacccatctttttatcacttccaacatccacaactatttttttattaactttattttcaccttcccattaaacccaagctattaatcttaacaaaaaacaaattatttcattttttaatg

SEQ ID NO: 249006 - DNA, 258 bp, Gossypium hirsutum
cccacgcgtccgcccacgcgtccgtctagatcgcgagcgccgccctttttttttttttttgaaaagcaaaattatacaaactcattttaactcaggccaaagcagaaatccggataagtcccaggagaagttacaaatccataaacataaagaaactctaacctcccttttgctcactgctgttattgctgcagccaaagaactttgctaagcttggttcaaagtctctgcggaaacttaaggttttcgattgaagat

SEQ ID NO: 249007 - DNA, 415 bp, Gossypium hirsutum
gaatctcctcttttcttggaaaaatattgcaatttttctcaaaacccaaaacaaaagagcaaagcccaatgtcacttgtctttcagaattagagagccaagtttataagcatggaagtcatctcatacaattcccctcgatgctgtaatttaaatcggagattagtggtaaagaaaagttcaagtagacagcaagtaaagatccctttgtgtagaaaacacagaattttatgtactagagttcaatttagaagtgggtcactggttttacctaataaacatcacctgtttttgaagaatgtttatcatgggaaaggttcaaggccattcaaggctcttgaagggtttaacaatgttgatccaaaggtcttgagtgggaattataatggttatgtgggtggtagtgaagatgagat

SEQ ID NO: 249008 - DNA, 426 bp, Gossypium hirsutum
gaaaaaagcaaagctaagccctgatcaggttgtgagttgaggaagaaagatggtgggggctttatcggtggtggactctcacactggtccatgtttgtgctccaccagcatgaacttgaaaactggaggggaattggtttcgcaaatgaagaggaaacaaggggtgggaagggcagggtggttggaattaggcagctcatttgtagattcatgccatgattggaggttgtcttccaagatgattcctggagttgtgaataagaagagttcaaggaaggcccgcacacttgtggttgtgaatgaattaggagggcagtatgaagaaactttcggggatgttaaaacgcaattagtaaattacttcacatacaaagcagtgaggactgttcttactcagctctatgaaatgaacccaccaaaatatac

SEQ ID NO: 249009 - DNA, 244 bp, Gossypium hirsutum
cccacgcgtccggtttgtttgaatcctgaagaatttcttcagctccttttggttttgaaggtattatttatagttccaagaaatctcaacagcgacgatgaccatgaatctggtggaatccgatggcgtttggggttcttcctaggggcccggctttgttttccttccttaaagggaccgtgaaaccgcgggggaggtttcggtttggttttttgcaaacgagttttttggcaaaaaaacccaa

SEQ ID NO: 249010 - DNA, 406 bp, Gossypium hirsutum
tttcctttctccttttctcttctaagcaaattttcttccacatcttcatctccgtggtgacctcccctcaccatctccgtccgtcatctccgtcgaccgttggccttacttctattttgaagaaaccgtcatctctgtcatcaacgggtttttttttctgttaattttcactgatttgatttctagatcgggtctggttcttgcttttttcttgctagatggtagatcgggtctggttctattttttcttgatttttagatcagttcatctgtttctaaaagagaacttgaagacatgagatgggaaatactgcttgaaaattgcccaaacaaacatttacgtggcaaatatggagcctagcctgcaatattgtatattgtaccgactgttattggattcttggct

SEQ ID NO: 249011 - DNA, 323 bp, Gossypium hirsutum
cccacgcgtccgacgacggtggtcattgatttcctaatcccctaaggagtgcggaccaacttaattgccgaatcaactacccccaaaaatggacggcgcttaagcgcgccacctatacaccgccgtcggtgcaagggccaagcccccattagtaagagggcacggcagtcgccgcaaaacccgggcgcgagcccggtcatgaccggacgaatgagcatatcttgatgttggtcacacatattcaaatgacaactttgaccgccttaaaggggaaaggttgcatgtgaactgcacttgcacatagtttagacgatcctaaaaga

SEQ ID NO: 249012 - DNA, 201 bp, Gossypium hirsutum
tccaacacaacaaatatctatcatggggttattgcactgcgtcatcacacccctgatactgatctcaggaagagttggatgactacctggatctccataatctattaccaggacgagcttgtctcgcaggtttcaatcttatataccctcaattctttcaatacctttaaaggtgtttgcacatggcgggggggggggggg

SEQ ID NO: 249013 - DNA, 416 bp, Gossypium hirsutum
cccacgcgtccggtttggtcaatggaatccatagtcatggcgttgagaaaaggagcagtgtaagtagaaaggcgattgttcacagatacattacaatttacaaccatagccatttcctctcgccatttctcttaatctcagtctcttttgaggttcaaagttcaaacaacacataagaatgtcgcctttggcttttgttttgactttgagctgttatagacgttggccatcccgcttcagcaccccctattctcacaaccttctcgttttattctcttcaaccgccaccaccattaccccacctaacggaaacgagtcgccgtcgagtggacccgctccgcctcctatccgagtcgcactaaccgagtcaacaggtcgagccgtgttcgccactcggagaattggtgctggagaca

SEQ ID NO: 249014 - DNA, 146 bp, Gossypium hirsutum
ctcaaacttcctgaaccgctacgcgtttttttacttcaacgatcggaactccggagggcgcagttgaggccatcggccgagacatcatctcaggttaacggactgccaacgctgaaaacggctcacccggacagtcggaccagcgg

SEQ ID NO: 249015 - DNA, 260 bp, Gossypium hirsutum
atcgatatcattcccccgtttagttgtataatgtccaatttagaagtggcaaattaaggaatatagagcatggcatgttgcggttgggtgtaaacataggacaaatgcgagcaatcaatagcagcctccgctaaacagggttgtttttattacatctaattgatgtcatgtttatgtttatgttttttttttttatgatatcattgtactgaaactgttaaatatttatataaaactttgacaggttaatagtgcttggc

SEQ ID NO: 249016 - DNA, 184 bp, Gossypium hirsutum
aaaaaaaaaaaccatacctttccactatatattattttcccattcacccaatttctccaaaattttgttgtgattgctcaggattcgttagtttgaaaaaaaggcttccattggtaatagatggtcttcaccacttattatttgaagaaatggggaaaggtaagcttttgttttttttactttt

SEQ ID NO: 249017 - DNA, 209 bp, Gossypium hirsutum
  unsure (1)..(209): unsure at all n locations
gcgtggcctatcaatcctttataccttcttatttttaagctcgaggagtcaaaaaggttggcgcatgtataactggcttgtcacanccaatcgttcatagcaactttgctttttgaaccttcgatgttggctcttgctatcattgtgaagcccaatacaccaagtgtttgattgcccacccaccaatgttgatcatgagctgggtttac

SEQ ID NO: 249018 - DNA, 197 bp, Gossypium hirsutum
ctgaaagataaacaggtgagccttaaagaagttgaaccatggcaggttggttaacatacaccacccaatcccttaattcaacttggtcaatctccacaccagcgaaaacccatttaaggtttcaccaaaaggaagtagttttctataggagaagcaacaagagaagtggcagcggcagcggcagcaacaacgggcca

SEQ ID NO: 249019 - DNA, 172 bp, Gossypium hirsutum
aaccaaagcagcagtttcaatttcagtggccggttctattacgggtggcttatcttcattttcgaaggttgggatccatacacctcatcgggtcttggggctcaaaagggtggcttctttcaacttcttttctggttctggcttggccctcaaatgcccgagttttaacaat

SEQ ID NO: 249020 - DNA, 105 bp, Gossypium hirsutum
gattttctttggcaactgggaccaacaatcaaaaattagaaatggtaaaggcttttgtgagggaaagaacttcaacttcaacttttgggaatgccaattcaaccc

SEQ ID NO: 249021 - DNA, 440 bp, Gossypium hirsutum
cccacgcgtccggcaaaagatggcccttttcaaaccggccttcctcaatcacctcaaaatgctcgcccatccccgccaccgttctccgccctctttcattgctctccgctgcctctcatttagcaccccagaagaagccgccgccgaacgccgccgccgcaagcgtcgactgcgagtcgaaccgacactctcgtttgcccagcgctctcaacaacaggctcagcaggtggctccaccgaaaccgatccaaaacccgaacgcccctaaaggtcccgaacccgtcactgcgctaaccggcaaccgtctcaacctccacaacaagatcttgaagctcattcgtgaaaacgacctcgatgaggccgctctatacacgcgccactccgtttattgcaattgccgccccacgatttacactgtcaacgccgtattaaacgcccagc

SEQ ID NO: 249022 - DNA, 316 bp, Gossypium hirsutum
gaaaaatgctcaccctcacctccgccagctccgctctaacattattcccggaatgcaaaacccaacggcgccgatttacaatttcggcggcggcggatgataagttcccttcctttctaccaaagcaaatggaagaaatcaaagacccatttgcccggaaactcgccacccgaatcgaaagactgcccgttaatgctagcttctcagaaaaaagcattatgagtagttgcgtgaagccattgattcagagcagccaaaatccagtggttctccttcatggctttgacagttcttgtttagaatggagatacacatt

SEQ ID NO: 249023 - DNA, 134 bp, Gossypium hirsutum
ttcctctcttccaatttatgattgccatgatttctgtggtttggatgttaacatttggcagggcaattaacaccagatgaccaggctgccgaaattaacccctggaaggaggaaaatgaccagttcttcctcca

SEQ ID NO: 249024 - DNA, 167 bp, Gossypium hirsutum
tttatcatggcttcctcaactctctcccctgcagctccttggcagctattctcccgcaagagggggatgttcttgccatcacaagcgttttttgggaaaacaaccaggacccattttgtcaaaaaccaaaaggggattagggtcacattccaagccccttacattcc

SEQ ID NO: 249025 - DNA, 450 bp, Gossypium hirsutum
attggtgccaatatactccatcaattttcattttattttcagatctcttcctcaaaagcggtgtgttgcaccaaaacaacccccatttcatttatttcttcaccatttctccacccccccccataaaaaaaacaaaaaattttaaacatatattaattatgtaatgtaatttaatttctcttttgatctaatttattcacagagaattcttaatttttaaatctccattcactcttaaacaaatattttcattgtaggttttgcttcctaagaacttaccacaatttgcttcatatccactgtttcttttctttattcttttatttccacccattgtctttcattcttcatcaattgttctgtgcccaaaaataggaccctttttcttaccctttttattcttcttcatttagagacaatttttcttttaaaatccactttttttttttt

SEQ ID NO: 249026 - DNA, 433 bp, Gossypium hirsutum
attggtgcgaatagactccatcaattttcatttcattgtcagatctcttcctcaaaagcttcagctgacaccaaaacaacccccatttcatttatttcttcaccatttctccacccccccccaaaaaaaaaacaaaaaatgtaaaacatatatcaatgatgtaatgtagtttaagtgctctttggatctaatctagtcacagagaatcctgaattcttaaatctccattcactctgaaacaaaagtgttcatggagggttttggcgccgaagatctgtccacaataggcggcatagccactgtttctcttcttcattctttcattcccacccattggcttccattctccatcgtcggccgtgcccaaaattggaccctttctcgtaccctttttgtcaccgcatttggagcagttttgcacgtaatatccact

SEQ ID NO: 249027 - DNA, 286 bp, Gossypium hirsutum
cccactcgtccgcgatggaaaaatcaaccactttcctcattacaagatctatctacgacggtgcttcattactatcactactacactgcaactgcttcaatccttgctttgccatactccctttcagatctcgtttcgcagtactttgtcctctcttctcctctgttaccatcaatatcacaatcatctgaatgccattttcattgcggccgcttttactccctcctcgtactttatgtggacagtcagttttaatatttcccattccatttcttcatcaatcttt

SEQ ID NO: 249028 - DNA, 222 bp, Gossypium hirsutum
gttaccataacgggcaagtcccacaggcggaatcttaatactgagcatcaggcatagcaggagggctggccaccgatagtaccgccttgcacatcgaccgagcatctgacatgtcatatcgaaactgaactgtcatggggtagggagactactacacactttagactaactcacgggttgcgtcatggagcttgaaggtgataccagattgtatcgctattc

SEQ ID NO: 249029 - DNA, 325 bp, Gossypium hirsutum
gaaagcactgaaaacgcaaaaccatggcctctgcttctctcctcaagacttcaccagttttaaacaatctgatgggtaaaggtacaccttcgcaccttcaatctgcgggagggcacctgtgcaccttgactactggctcagctaatccatgagctgcagatgtagctatgtttctgccgggaattgcctgatgatcaacctccgggaacttgcctaacgctaaaacaaagctaccgcagctcagagtgctgttactctgcctggcagacatttgtgccatctcttgagaaccttataacacatgatgcagagatgtgatgtctgt

SEQ ID NO: 249030 - DNA, 411 bp, Gossypium hirsutum
gttttatggaaagagaatcctcttactttctttctagggagcataataacaggagcatgcttgtcaaggcaaatgttgaaaatttacctgtagctggggctgagacagtgtctgaagttgcttgtatggggaatgaagttggcaggttgtcatcattttctggaaatgctaatgcaatcattgaagagtcatgtcagcagatacccagaacatcaacccgtgttacagttggagaagatgattgtgactcaatagaagaaagttgtaatgaaattgaatctgcaagtgagtctgtgcctgaaattttagacaatgatttacagttttttgaatcgattgggataaaaatggatgggagatgttcatcctcggtaattggatcggcagaaccaaatggacaatcaaataact

SEQ ID NO: 249031 - DNA, 413 bp, Gossypium hirsutum
  unsure (1)..(413): unsure at all n locations
ctcaaattccatcatcaaaattagggtttctgtaaagctaaaaaaataaaaattgaaatcaaaatcgtttcgaaatcttagggaatcgggccgattggtggtcatgtttcgttgcctttggttctgaagtctttgaatttccttcaagctttccttgaagtggcaattttactctactcgttatggatgtgggatcaatggaatcatcccgtccccatttttcctccgccgtcagctccgtcgccggattcttctctcccggttctcttcaattcgagaccgggggttggaggagctcgagcagctaagtattcgatgattagctgcccgcttggtctcggntngataatggagtcggcttgaattgagtcgtcagctacctgctcatggtcattactctntatggagtggca

SEQ ID NO: 249032 - DNA, 359 bp, Gossypium hirsutum
tgaaacttcatttctctgacacaaaaagctctcacgacccgactcccctggcatcaacaggacagttctaaacccaaaaacataaaaaaatggccgcacgtgtactaacactggcgaagctcaatgcaaaacgcctaatcatcaactcaactaagatgagcagcccaacaaagcacaaccccaaagacctattactttctttacatgcacaacctcctcaaaggcctaaccatgtcaaaaccagccgacaactcaaacactaccttcttcactcgcttacatcgcaatagatggagctatcttctcaacctcaaggtcatgtgaccccggcttaactacacaacagatcgctgatatag

SEQ ID NO: 249033 - DNA, 333 bp, Gossypium hirsutum
cccggccgaattccggtcgccacgcgtcgccaccgtcggagacggcacaatatattcagcaaagctcattctttctcaattcaactttttatattagcactagtttacccttaaagaaagcttcaatatattaattgttggcaactacaaagcaccatacaaaagaggagaaacccactgataacataagaagtgtgagcgacacctcttaccacaatagcgagcaggattttggctttatgatcttatctgaactgtctgaagaatatcagcagtaaggtttgcaaattattttatggatgtggctgttattcttacatggagggggtatat

SEQ ID NO: 249034 - DNA, 230 bp, Gossypium hirsutum
aaaaactgaacctatcctctccctttcaaggtttcttttttccaaacattgcccacgccggcgagcggctttttcaaattccaaaactccttcaccaaccgtgatctgaacaagaaaaagaagtctttttaacccccttctctacctccaccttaaagtcctggcctccataccaaacaagcctaaacaatgagagacctttcctctccttttctttccgattccaacac

SEQ ID NO: 249035 - DNA, 440 bp, Gossypium hirsutum
  unsure (1)..(440): unsure at all n locations
ctcttcttccctctaaaaccatagcagtccagagttgcaacgttgcgagcctcatcggctttcagtcaaccccctggtggttactaatcttctatctgggaaaacaaaaagaattactgtggagaatgccttctcttctggatgtacatccaaataagcccattccttttctgggaatttcggcttttcctttattgctaccttcaactaaatcaactactgcttctttcatacggggtactgcagaccctcagatcttgcatagaaaaagaagcttctctctttctgcaaaatgagttgaacaacacanggtcaaagaaactggtctcctttgctcccaggtgtagcgggtccacaaactccagtgacagtaaagatcaaactaagacaccttttggatacacaaggaagggatgtctattgattggccttgagtcact

SEQ ID NO: 249036 - DNA, 186 bp, Gossypium hirsutum
aacagcagcaattgcaacacaactccaacgcctttgttgttggcggatatgccgataaggcacggggttttgttccaactttgccgactaaacacagggggcaacaaggttaatacgaagaccgactgaacaaacttatccaagaatccaagttcccatcattttatttgggtgataaccggttat

SEQ ID NO: 249037 - DNA, 381 bp, Gossypium hirsutum
  unsure (1)..(381): unsure at all n locations
gaagactggttattccaagagggacccggcctcataaaaaagggggtcttaatgccccccctttaggaaatggcccaagcaaggaggcttcttctaatttaatcatatgctaatgcccagttcaacccggaaggggggccccccttttccatattacaccatctgatgtattattcctttgccatcatgggactctgtgtgtgtttttgttgttgaactcgtgattctgcagtgcttttaatgggggctagcaagttatatatgtatgatgatgatgatgtgagcagccatggttggcatggaacttgatgtatgttattgtttggttttggggtgtaatgtaaatggtaatgttttgtcntctnnnnnaaaaaaannnna

SEQ ID NO: 249038 - DNA, 335 bp, Gossypium hirsutum
cccacgcgtccggattttcttgtttaaggttttttttaagacgcgcaatttgcggagtctactttaacggcttttcttccacgtttacaccttccctttctttcttgtccccaagtatgattcaattattacaatgctgcttaaaaactgggattcaattttgaatattcctatccaattcctgattcagggttttgagggtctcactgttaattaactcataaaagtttccatcttgagaaatgcagaaacgattatgaaggcttcgaagatgaggaattaagagaaagttgattcatcccctgcgcgatttcactgaaactagagttaaacaa

SEQ ID NO: 249039 - DNA, 395 bp, Gossypium hirsutum
ggagaaccgaaggggaggaagaggaggaagaagaacaccaacaaaagttaaaaataagaggtgcttcaacttttgtttctcttttccttctttgttttacaatatcaatgcttaaaaaactctagcttttctctttctctctctatgcatcgatcggaatcaaaatcctcttggttttttggaacttcttggtggaaatctcgagcttggtggaatcgaagtgctttttcttggaattttaggttttggagattgtagattggaatttggatcttaaagtggttcaattcgagtttatttaaggcaatttgtgagattatttggtggattttcagctgtggatattggaaaaagattggaaattgaataaatttttattttattttttgaaattt

SEQ ID NO: 249040 - DNA, 250 bp, Gossypium hirsutum
gtatatgatgctagaagagtcagaaaagctaccacagggatgactggctacgtggcagtcaaccgtacatacaaacgacggttactcatacttggacgtcgggtatccctattattgggtaccaccaataactacgtgtactacatgttcacgccacagtggggaacgagaagctctgattacaccgtgatgagacgggtttataggaccatactgatcgccttatagaaaatgtaattcaacctattac

SEQ ID NO: 249041 - DNA, 388 bp, Gossypium hirsutum
ctcaatcgactatccgagtctataaaatttgtccatgaaatgggagcagcagctgaaaaactcaatgaaggaacagtaacttctactaggttgaacagcctggtgcaacaggcatgggcgtcgattgttaagacataggtgatgatccaactccaaagaactgcatcgtttttccaaaagctagattagggttttgaagaaatataagcatggcaagtgtagaaccagcagttttgctatagttgcatattttgaaatctcatgtaaaacaagaactataaaaaggtaacagagaaattaaaattatcccgagtcagaatctgtataacagattatatggtatatgaacaatagtttacatatgaaatgaaccctttcttctagaacc

SEQ ID NO: 249042 - DNA, 344 bp, Gossypium hirsutum
ggtcaggtaactgagtagataggatcacaaaacactgctgcaaagggatgaacacagtggaaggtttagtgaatcaaatccagggactatcaaccactgcctccgatgttttatcgctgcaaaatttgcttaaacaagctgatgactcgctccatgccgagtccactcggttgtttccttttctcgaccaactcgacccttccaagcactctctgggttacctctatttcctggaggcatgcactgctggtccagttacaaaagagcaagctggttcatatgtgttaatgattgccagatttattacttcatgcattgctgagcaaattcgattggcgcctgat

SEQ ID NO: 249043 - DNA, 297 bp, Gossypium hirsutum
gtttccttcaaaggcctctctgttttcatctctgtttcaattacccatcttcgccaaacaaacaaaaaaaagcaaaaatggcaggtgcaaggagggaaatgatcaacggcgggaatatctcacggaggatcgcgggccggccgataccgaggaggggacaagtgaaagttgctatagtggcggggattgcccattcttttgcttctattttcactgcaagcagtcgcagagcatcttcttctcgtttgtcttaatttataataatgtaaatcgattttttgatgattttgtaagggg

SEQ ID NO: 249044 - DNA, 392 bp, Gossypium hirsutum
  unsure (1)..(392): unsure at all n locations
cccacgcgtccgcccacgcgtccgctcgttacaaacaaaccattactcctcactctgacttagtcgctttgacaatatccttaaaaaaaaaaatagactatagctntatcactcttatatatatgtatatgtaatattaaaacaataacaaaaacctccattaaacccatctctctcttctctttatataatatttctcttggtttttcgttccattttcacttctattatggacccattttcttttttgtcctttcttttccatgctctgtgaaaggtagcagctttgacattagaatcaacttgaagaaccattttttttaactcgggggttttttttggtgtgttttttgggtaaaaaaaatgggtagtaaatggagggagagtaagtt

SEQ ID NO: 249045 - DNA, 399 bp, Gossypium hirsutum
cccacgcgtccgcccacgcgtccgcttcttcaaattacttaccactgacgacgccatttgatcatgaatgggtataaggatgacagttacagctgctatttccatcctaaacaacaggttatcggggtttgccctttgtgcttaaatgataggcttcttctcctagcttcaaagcaaccccgacactcttcttcttcatcctcatcttctaccagaggcggccatggatttattcaaggtttttcactaaagaaaccacccatcaacaagctccctaagatctttgctttaggctcattgctcaatcgtcttgagttcaagcattggaaacctggaaattctgatgatgatgttcttgatgtttcaaccagtcaagaagactcctttatctcgatcaag

SEQ ID NO: 249046 - DNA, 383 bp, Gossypium hirsutum
aacccagaaccttcttccgtgtttttctcctctcccataaatgaagttcttctctgaattaggttcctgttatcgcccatccacatcccatcgagatgaggataaggcttctctccgcaccacccgccatgcagaacgtactattaccaagtcaggcggtggctctgcctcctcaccaagtcgacattggagaccggttcttcaagctatcagggaagacggcaaggttacggaaaagagaattcccaataaaaacaaatccaaagggaaatatacgtctaagccttacagagttagccatgatgagaattcctactactccaggaataataacagtgagccgatggttatacctgcgttctctccgacacccttcatgtttt

SEQ ID NO: 249047 - DNA, 386 bp, Gossypium hirsutum
cccacgcgtccgcccacgcgtccgcccacgcgtccgcccacgcgtccgcccacgcgtccgcaacaacgcttgggctctcttccacatcttcgtctttcatcaatggcggagctggagacccacgctccctctcatccattttctctttcagaccccttactaaactcacgaccgcaaagtcttcttcttttactagtagcagagcttcatggcaagagctggtgggagtgctgctgttttcagcagttcctttcacggcggtcaaagccatcgctaatagccctctaggcgaggccctgcagaggcaattgttaaagaggaagaaggaagctcttgcaaattcttccaagttccaggctttagctcagaaggcaagaaatgagagc

SEQ ID NO: 249048 - DNA, 416 bp, Gossypium hirsutum
  unsure (1)..(416): unsure at all n locations
cccacgcgtccgcccacgcgtccgcccacgcgtacgaattatcagttgttattgtagttgatgttggcaagcaggaaatagtttcttgcacacatatgcctaactgcatttatttattcacttctttaacataaagatgagcaggcagcaggatttagttcttcttcttggcaaggaaaaggccccatctctgctcccctgatgagctgtttatcagctttgccttccatcctccaactatttcatcatagtcttccttagagaagtcagagatgaatgcatccttctctttctccactgggctcaattcacgctgcatagacttgctagaactgatcggttcgatcctctgcaagaatcacatcaaaaccagcatcctcaagcatctgtncatatgatttacatcatgaagatca

SEQ ID NO: 249049 - DNA, 236 bp, Gossypium hirsutum
agtcacatgagtacttccgagaaatactagtcttgcaatcatgttcttagtcctgccctgttgttcttccttttgtctttgcatgattgagctttttgcacgcgagttaatggttcattagataaaagatctgtagtcatctcttgttgctcggaatctgtatttttactgatcaacccatttgtatgttggtaatgtataagaccattttaggcatttaaagcttgtttacaacc

SEQ ID NO: 249050 - DNA, 329 bp, Gossypium hirsutum
  unsure (1)..(329): unsure at all n locations
cccacgcgtccgttcaaaactaactgtctcggatatctttcgtctcgtttatgaaacagtgtaacagacccactaaggtttcagtatcttgaagtaaagtgaagcttttggatttgtttgattagaaggagctcaattttaattaggtgcctttaattngattagcatcgtgtcaatgggaacttcggaggctgttctgcacgttttatcgggggctgtcccctcagttttaagtagtgatatgtgttctagcaattcggattagtttctattctaaatgcacattaagctgtaagaaaaaaggtcaagggtttgcgccttgagtgtct

SEQ ID NO: 249051 - DNA, 349 bp, Gossypium hirsutum
cccacgcatccgctcacccgttcgcttcggtgccagacatacctatcttcggctcgggccgatggaatgcaaaagcgactctgattgcctgtcgagcacgataaaaatgatctcacttactccctatctttatttccccaccacaagcgcctttacttttatagccaagaagctctcaatctgtcccaaaccggcgacgatgccaggttgttgctcttattccagatatggatagcagctgagtgggatgaacggttactgtgatattactacaaagtactacaggagggtcgatggaatacgactgatcgacgacgccgtacgcccggagagttgggtcgcggtgact

SEQ ID NO: 249052 - DNA, 263 bp, Gossypium hirsutum
gcttacggcggatacctactctcaaactaacaactaaagacggtttctgaaacgaatgagctgcccttgagaccaaaatgcactcaaagacttggacatgctattagggaagaacttgcaactgttgctgcttccgtggacacacgttaaacgaccggacaaactgtaacatattatttgccagagtgaaagaacgcaggatctattcctaatgtatcagctagcgatacctgagctaactacaccaaggtcgaacatgatga

SEQ ID NO: 249053 - DNA, 428 bp, Gossypium hirsutum
cccacgcgtccgctcttctcttattcactcctcttccaatggccaccgctttccaccaccactacaatttcacgcccactcccatcctccgccgtcgccggtctcccccgtcgccatcccccattaccctccacctcaacgcccctctttctactaccttcaacttccccactaaacaatgcagcagcagcagcagcagtaggatcacttgcaaagcgacggaaatgtcttctgtgagcgaagaatcagcggcgtcgggcggcggcgctggtgataattgggtgccggtggtgccgcttgcggcgcttccgaaaggagaacggcgtgtgatcatacaagacggggagaccatactgttgctttggtataaggatgaggttttcgcaatcgagaatcgttcgcccgctgaaggcgcttacaccgagggc

SEQ ID NO: 249054 - DNA, 261 bp, Gossypium hirsutum
  unsure (1)..(261): unsure at all n locations
cccacgcgtncgctttttttttaaatatttttcattggcaaacaatcccttattaataaggagaggattttcacaactgggttaattcccttcattccctgggcttcataatcttgggacccaaaggcaaaaaaattttttaacattttaccccaaagatggggattacaaatgggagcgagtattaagaaattgggaaacaaaaagtggccaaaatgggggattacttccacccatttggggcttaggacccatgggcat

SEQ ID NO: 249055 - DNA, 264 bp, Gossypium hirsutum
aaaacccttaaatctctcttcctcttcctcttgttcttatctaacaaatactaccctttctttgtttctttggttcggtttgcttttgttccttttcaccacttggccagtctttctgtcatggaacaaccaagggctcattatggtgaaataattgcaccatgtgctatatacaacggggcctctgtcttgctatgcatgtggaagggtctcatcttttctcctctcattcttctttctatctgacataaattgctgattact

SEQ ID NO: 249056 - DNA, 356 bp, Gossypium hirsutum
ctacccaaagctctttctccatttctttcaagggcagtgttcacttccttctgctcacttaacagctaagccaccatgtttaaggccactagaccactctccatgcaccaaaactaagccaagtgttcgaacccatgctaagaaaaagaacccatggctggatcctttcgaagatgatgtggaagaccccttctcggaatatggttcattgttcactgatggcaagcaagaagaagatcctaggccccctgaagaccctgataatccttacggtttcttgaaattcccaaaggggttcaccgtggagttggcttcactgcctttgaaaatcagaagtgatgtcaggagatgttgct

SEQ ID NO: 249057 - DNA, 338 bp, Gossypium hirsutum
  unsure (1)..(338): unsure at all n locations
ttcaataccaacaattacaaagcaaaattcagcatcccttgggcatacggcatctctgcaaactttaatcgcagatcccaattaaatactctttttacattaacgaaaagcttcatggattacacatctaaaaagccaagtcaaaggggcctttttgaaagtctctatagagtcaatatgcgaagaaactcgtctacgttaccttatcatcgccgggcttcctcgggaacggctggatatggagtatagcttggaaacaacatgtcgaacgttacaaacattcatgctagacaagcatcaagaagaacaagatctgggattntgagtgtatgagatgg

SEQ ID NO: 249058 - DNA, 175 bp, Gossypium hirsutum
ggccggcccacgccttcgttcaatttggggattaaggtttgtggagtgcttccttttttgttttgttcgccctttaacaagggaaaaaaaacatcaatcaattcccttccattgaaagagacttaccttattgggaggtgctccacaacttggattctgactcttattctattct

SEQ ID NO: 249059 - DNA, 434 bp, Gossypium hirsutum
ccctaatgccccatgttttcccctcatttaaccgacaaaagaaccaaaaccttagatccttttgattctcattaggtttaaccggaaaaaaactcattaatcgccatgacaccactgtatttgatgattggcgacgagtatatgcccctcttttaccccgtttaaaaccacaacttgtggactactgattttaattctgaaatcccatctcaagctccgattgcgacgaaggagatagggaccccgacggtgtacttacgaagaggagaagacctggtggccatgcgtgggaaccactcgtgggagtcctgatctgctattgttctagcgttttccagaaacctttagggtttctggtatcctctgttattgggcctttttcgggttatttttgggtctcgagtttaggcctgaaattttgtaaatgggtttgg

SEQ ID NO: 249060 - DNA, 435 bp, Gossypium hirsutum
aaaaaaataataagtaaaggttaaaattaaaatgaattagtaattagtaaaacaaggcattttgattgacgatctccacgaagctctctctctctctctcttttttcttctctttaaaaatttaatactcgcattctcttcttcacccttttcaaacttatttctttcgcctcttctttcttttttcggatcttctctctctctccaaagatcttcgattctttccgtctccttttcgttcgctctctgagtttggagaaatcgaagtttggagtgtgatggcttcgatagcgtgttcttcagctgcatttactggaacttcagcttcggatcttcttcgaagctccagtaacggcgtgagcggcatcccttctaaaaaccctagggaaagcaccattttccgtgaaaaaaaaggatgcaactgtagctgcaaag

SEQ ID NO: 249061 - DNA, 147 bp, Gossypium hirsutum
cccgtccgaattccggtcgacccagcgtccggatctggtcagataacctgccgctgcttaacacatcaatcggcggcaagggtgtttccagtggcgacgggtgataacgcgtagaacctgccttgggaggggaacacagctggaacg

SEQ ID NO: 249062 - DNA, 198 bp, Gossypium hirsutum
ttccttttccttttccaaaaacctccggtacttcctctctccctttcctccgattctatatctctctctttctgctaggggttgggagttagtgaaaaaagggttgttatttcaggggcaacaatgtgactacgcctgggacgggacgggctagcgcttcggtacgactcgtattagtcactcttaccgatcagagct

SEQ ID NO: 249063 - DNA, 425 bp, Gossypium hirsutum
cttttgtttaacgggttgtgggaattcatttaatttaagatgcatttctcaatgggatcaaataatgttgggatatcaaatatttttctttataatcactgctcttctcaagttcgataaagtcactgactttgcaggaagcacgaattttgttataattgctgtgttgactctgataattaaaggatcatggcattttcgtcaggtagtattgacttcgcttgtagtaatatgggggctacgcttggcaatttttctattgatgagaattttgcaatggggcgaggatcgacgttttgatgagatgcgcagtaatttggggaaattagcagttttctggatatttcaggctgtctgggtctggaccgtgtctttaccttgtaaccgggttaatgctagtgatagagatcccatcggttcggctg

SEQ ID NO: 249064 - DNA, 278 bp, Gossypium hirsutum
gaaagctcatttttcatgcgtttaaccttctcccaatttcttctgccctgttttaccctcccaactgctcctttggatttcttctgattccataactttttccttcctttcagccgccacaactgcttcttcttcatcactcatcaacggactgcttcttcttcttcatccgctcgccggctgccaatcatctgtgttcaattttggacaacagtgtttttgacagttcgtattccgtaggacaccagttcgaggaggggaagatccgtgtcgatgct

SEQ ID NO: 249065 - DNA, 125 bp, Gossypium hirsutum
  unsure (1)..(125): unsure at all n locations
gccacgcgtncgcaacaacggcctctacttcatctggcaccgtatctgaagccctcctttgtgaagctatgtctgtccatgcctacgcccaatcctacgaccaccggccctgcctgtgcaatata

SEQ ID NO: 249066 - DNA, 420 bp, Gossypium hirsutum
gccggcgccgctggttccttcttctctttctttattttttttccatcttttccggtggttttctctttattggccaccacgacttcttcttcagaagccaatagcagtgtcgggaggattagacgcatatccacgggtgtggccgccgttcagaatatagccttgtagctgacactccttgcgcttgtgttttgcccttgcaatttatcatctcctctaccccttgaggatgaagataaaagaagctaatgccggcgcacttaccaatttcgaagtactcggttttctacgatctcgaggggcatcgaaagatccgacaagagttattgttccaatagcaccatctgagttcaaggtttatgattatttggtagagagtgccgcttgcaatcaaacgaaagaacatgtcaaggagttctt

SEQ ID NO: 249067 - DNA, 307 bp, Gossypium hirsutum
gaagagcatccctccagaccatcagtgtctgattttcgccggaaaacagctagaggacagagagacctttaccgattccaccaacccataggagcccacactacacttcttacttagtatggacaatctgtatgctttagcatcttcatgtttatatcaatttacatcacactcaaacacaacttcatcattctgcataccatattactcttctgttattagacttaattaattcttttttttcttttttttatataaaaatataatttatttatccctttctgtataatcttcttttccttatttc

SEQ ID NO: 249068 - DNA, 415 bp, Gossypium hirsutum
gggctctattgatcgacccatgaggcttgctgaaatttttgttgctgctgaacatgctctgaagcaaacaatttcaaatcctgatctgctgaaaactttgtcatccatacaggatattgagcaaaaatatatggatctcactaaaggtgctgctgacaattaccatcgttcttggtggaaaaggcatggtgttgtccttgatggtgaaattgcagccgtttgctttaagcgtgggaactttgacctagctgcaaagtcatatgagaaggtttgcgctctttatgctggtgaagggtggcaagatttattggctgaagtactgccgaatttagctgaatgtcaaaagatactcaatgaccaagctggctacctaacatctattgtacgattgctttcactagataaaggtttattc

SEQ ID NO: 249069 - DNA, 294 bp, Gossypium hirsutum
gcggttggttcacggtatgtaacatttccattgaaattccttaccaactaacaccatgaaagagatctctatgtaacatttcctccaaatccctaattctagtaaaaccgggagatggcttggttaacacgattcttgacggcggtggctttctttgccgtcggagtaatattctcgccggagacctttggatcaaaatccgacgacacaatttcacccattctctctacttctattaaactagctcatctcctctgcttcgcaaccggctggggcaccgcccctttgggtcac

SEQ ID NO: 249070 - DNA, 240 bp, Gossypium hirsutum
tttttgtctaaattccttgcccttggttcctagaaccagacccaaaccccaactcaaagaccccgcggctataccaactggataatgtcgtggtattggccgacttatatccactcacctggccggactcggcgctaaacgtcgcagtgactacacttccagagcagaccaagccgatctcagagctacccagatcaatactctgagtcctgacgactacgcgtgagctgcgactgtcaa

SEQ ID NO: 249071 - DNA, 403 bp, Gossypium hirsutum
ttcctcccgcctcctcctccacaaccgtcaccagcaccactcctctcctcccccaaaaccacccatggtggcgtcgtcatttccacatgaataattccctctcctccgaactatcaggagcagtgggagacttgggcactttcatcccaattgtcctaactctcaccttggtttcccacttagacctctccacaactctaatcttcactgccctttacaacataaccactggcctacccttccacatccccatgcctgtccaacccatgaaatccatagctgccgttgccgtctccgaaacccctcaccttaccacctcccaaatcgccaccgctggtgcctctactgccgccgtcctcttctttctcggagctaccggtctgatgtcgaaccctttaccgtc

SEQ ID NO: 249072 - DNA, 249 bp, Gossypium hirsutum
cccacgcgtccggtgagactctcacgtatacctgcaacatatagtagtagccagcgataatagcactggcctcctccaagatctaatagcattgcattgccaccgcgaaccgatgattccatggacaggacaacatggtggaccacttcacgggtcttaaatatgtctctgtttttccagcatccttgtatgacaacaaccaccctgacttatcttgcatgcgacggcgtgagagagccatgcatgcca

SEQ ID NO: 249073 - DNA, 366 bp, Gossypium hirsutum
cgcgtaatttctacataattaacaacattataatgccaaattcaaaccaaccaacttggtactagataagagttcaacctatgtatataccaaacctataggagacaacacttaaagaatttgtacttactcttcaaactttgataaggtgatgaaatctcctgaagtgggcatgggttctattggaacatcgatatgcctcctggcacagcgaaaaaataatttcggtgatcacaacccatggtataagcaagtgacatattaagaatatgagcaccaccattatgtaatactaaacccacaatcaagccttcatcccaacaagaaccatcaacactcaatagctcactgaactccatatctttc

SEQ ID NO: 249074 - DNA, 290 bp, Gossypium hirsutum
  unsure (1)..(290): unsure at all n locations
gccgttggggctttcccctctttcctttccgccacccgtaacttctttgtacgaaatcatcggcgattgccgncgttgccgtgtatccttctttttcttttcctttctctggttttctttctttgatcttcacgcggcatttttgaagtggttccgagatgaactgaaggagcttgagattggaagtattgacacctgtttttcttattcattcagactccctcactcgaccactcaaaacaatctctcgaccctatgcttatggtctaagaaccaattatttacgacct

SEQ ID NO: 249075 - DNA, 176 bp, Gossypium hirsutum
cccacgcgtccgcccacgcgtccgctcttctcccctcctctacaaggaaatggcaatttcatcaacagcagcagccactgccgcttcttctaagcttaatacccaccgcctccgtttcaactactctaccacacttgctttttctaattcttactacctacacttctttttctctc

SEQ ID NO: 249076 - DNA, 356 bp, Gossypium hirsutum
attccaaaatagaattaatggttccccaacccgttgagggtggttttaaatttggtccaggacaacttgtggaagggattttttggaaccattggattccgaattttgtgaaggaggcccttgattgggaaccaattctttggttgggggtggaatgggtttatttgggaaattcttatttattattttggaaaattattaatttttccgtttacctgatgggattttcattgatttaaattaccagaattaccgaagcctggggtttaattccaaaatgggaacctttaagttttcgattttttaaccccattcttttttcggtagtcgaccgcaaaattaatttgttctgtatt

SEQ ID NO: 249077 - DNA, 441 bp, Gossypium hirsutum
ccgaacccggagagaaaacccatctttctctttcactctccttgattctatctaccgttcgattgatgaaccaggcggcagtaaaggagaggaaaagctgattttctgcaaagaggctaccatggcaaagaagcacaccagtaaccgttcgtccaaggaagaagaaatggcgagccttcaacgtgcctgcatgatcgaaaaatggatggagaagaaggccgttgatgataaggttgtctttaataggcgaaatcccatggcgggttctcaaagaaactctcgaaacgactttgatcccatgctgttgaactccagctccacctcttctgattctagtggtgggttctcatcctcggagtcggattccttttacggtgcaaaatcaaggtcgtcgtcttcatcatcaagccgttacaccactcataggcctaaacctattcg

SEQ ID NO: 249078 - DNA, 179 bp, Gossypium hirsutum
  unsure (1)..(179): unsure at all n locations
ccccggggaaggccttggtttcaattgcgggcttgttgcttgttgaagcttaaagttcggtttgggtattttggggctaaagtcggggttaggtatttgaatgggtattaaataaaaaacgatttngccatgttggcccatgtatttggactttgnnnactttaatgtttatttggttt

SEQ ID NO: 249079 - DNA, 279 bp, Gossypium hirsutum
cgccaatacatacaatgggaaaggtcgaaggcggatcaatgggcgggaaaaactcggactcagggaggccccattttcgagcaaccgagatgaccatgaaactgtgaatatggatacatgctgtgtgacagaaatggaaggtcaatgctgcaaattgaggactgcctgaaagctatgacatgcttaagagactttaagggaataacttaaggagaaaaattatatggcacaaacaaagaatcccctttggctaatgatgtgtttctttgtgtttagtga

SEQ ID NO: 249080 - DNA, 542 bp, Gossypium hirsutum
  unsure (1)..(542): unsure at all n locations
cacgcccgatccggttttctttttttatttcatgacttttcctcggtatttggtttggtaattcattaacaacccttagatgtcgaggatgacacggnttttttccccactttanttagaacgttgaaaggcttttcttcacgaatcttanttgaaggaaacattcgccacctgggattttcttcnnctttatttnntctttgcttcnntgttaaacctggtgagcgtaagggttattatttnncttttgggtttttgggaagaaatgatcccttgggaaaagaatcgcattgtttgctcccttcattgttcacctcgcgaaaaatatctgctggtttttctttcgagaagaaatacccgagttcnncttttcacctttctctttcnnacttgggttcttcgagagaacgatttcgaaaccattttgaaaagaaaaaaaagcttccctctttttttttttgtgaatcgtcctccaccccacttatgggtgcttaagttaaaatactttagatctggncttcattcttctaagtttttcttat

SEQ ID NO: 249081 - DNA, 276 bp, Gossypium hirsutum
gttctttttttctttttttttttccaatattagccctcccagagcctccctctctttttgttgattttggggtaaaaatttgatccttttcttctatgatatgaagtggatgatgccttgaattgcaacgatatctcaccgtcctccactctcagatcgtcgcagttttctagctcgatccgtttgattttccggagacccgaaatccgacccggaggttgaaacgatgtttctcttggattggatctacggcgttcttgcttccctcggtctatg

SEQ ID NO: 249082 - DNA, 162 bp, Gossypium hirsutum
gtccgataagaaggcctggcccatgggcaacattaactttggcggtggcggttatccattttttaacggccttaaaggcggggccaccggaggttaaggtaggggcaccagccaaggtggaagcttttcaatcccaaaggttaacattaaaggcttccttaa

SEQ ID NO: 249083 - DNA, 390 bp, Gossypium hirsutum
  unsure (1)..(390): unsure at all n locations
aaaaagaagttctttttttcttaacctccattatttaatcttccaaaaaactctgctgatgccatccactaaaatcattcttggaagggcttcttccttcgcccatcttcattcaaagcttctttcacaccaaaaggggacatattctggaaattaagtggcttcttcttcttgaaacccttcttaaccattaaaataaccactttggttgcttcttttggtaccaaatggaaaacaccaggcttcaaatcggaaactcaattgtttgaatcttggataaaaaacttcatttccgatctgtcatcgacttgctcatgcattttcgaatcactgnntcggagtcgccttcacttctacctttcgcagccctagaagtagccaaaacgatcg

SEQ ID NO: 249084 - DNA, 182 bp, Gossypium hirsutum
gcttgggaaaactgttttaattggacctcagtttgcacaattagagctggggtgagccaaagctcccgcctcaatttttatctggtgggaaaattcatttggccgcctttcgagggttcaaccaaaccaatctggcattctcttcatcttttggtcattcattcaaagggcggtggccaaaa

SEQ ID NO: 249085 - DNA, 242 bp, Gossypium hirsutum
cccacgcgtccgccgaatcatacgaggctctcttctttttatatctcaacctctctttccgttgcccgatttctccgagtctacttcccgtccaaattcggcacctcgctccgcgtacttaccttcgaacacagaaggatcgcgaacggtacctagcgcaagatgggacggccgcgtgacgaagttaggttccgcgggcttgacgagaataaacgggaccgcgatggtaagttgcatcaacg

SEQ ID NO: 249086 - DNA, 243 bp, Gossypium hirsutum
gttatctataacatacactactactacttacttctagcattgactaccccaatgatgtggattttttccattgccactgctctacccgcacaagctaacatggtccttcctttcatcatcctcaaaccacccatttcttttccaaacatcaagaatgccaccaacaacatctctcttctcacaagcaattacttcacatttcaattatatacaatgtctaccctcccactttaaataacaaaa

SEQ ID NO: 249087 - DNA, 361 bp, Gossypium hirsutum
  unsure (1)..(361): unsure at all n locations
gaaaacaagaataaagccacatttcatacaaagaacaaatcaaagcaaagaaaaagaaatgggtgggtaaatagaagattcaagaggcctgtaacgatcaacataaagacgactgcgccgacttgattttttggcattataattacaactacaaaaaagagctttcggattttcactcttttgtgtcttcagataaaattgaatgaaaagattaagaagtttcaaactttctattccatatccgtttcagctaatacttgggtgtttttgtttgagctgtacgagatgaaattctcatatacggttctcggngggggggtcctcttggtttacctatctcaataaagtctatgattggttc

SEQ ID NO: 249088 - DNA, 398 bp, Gossypium hirsutum
gcttattaagccagggtctaagaatttctttaatggtgggttttgaagaaaattagtattaggtgaactgggtttttgtttttgtatttgccttcttcttttttctattatcttttttggatctgggatatgataaaagtttggattttagtggtattttccgggaaaattctggggttgagttctaggatggaattgtagtgaattttatgaagatctggaaggtaaaatattaggcaaaacatggagcctcccaagggatttttagctactttgtggaactttatatgctttcttccttacttcattggcttgcttcttttaagcacaattaaaggaatcattttctgctctccgatatgccttatcatgacaattggaaactcgtccgtcatatt

SEQ ID NO: 249089 - DNA, 421 bp, Gossypium hirsutum
aattttcatttttttcttctttaaattctctctcgacgcgccaccgtgtactccggcactatcgccgccgctcacgcctaggcgtctcttctataaggattagctctttattagcatttaagagccatgccgacgttcactgcaatagctttggacaggttgatagaacctggaccttccagatctgtcaacaactctggtcctaattcgaaaccacctatcccgaacccaaagcctatccccagcacaaaaatgaagaggagcagcagtacatcagtaacaagtaaggtaaatcgcccccaaatatcaccagccctatatgctactcctgaggcaaccccactgcctgattcaccatcttctttccctccttctccttacatcatcaatcacaagcgtcgtggtcctcgccttttgaaga

SEQ ID NO: 249090 - DNA, 376 bp, Gossypium hirsutum
  unsure (1)..(376): unsure at all n locations
ccagcntttcgtatagtaagacttattatttccccactcaatgctttttcaatagactggaagtgactgaattctctggacttttatccaactcattcgttacctttgccaaaaattttttatatgcttccttttttcacttgactactacccaacttattcccaaggattgttttataccatcaatattttttatttaagaaacatttgccaaactgaaagattcaatctatataattagactcattatcattaaacttctccaatacttatattttttttaatatactcacctctttcaagtttatttgttttaaaattaccaatgggttttgttaaataatgctttaaaactttcataaaaaaaaaactttca

SEQ ID NO: 249091 - DNA, 408 bp, Gossypium hirsutum
gaaaactttgcatatcagtcagtatggctgtagcagctattgcagtctacgactggccagaaagttggccagacttgttgccgttcctcctaaagttgattggtgatcaaactagaatgaatggagttaagaaatatggcatttgtgctctaattaatactattgctttttgtttcctgatcttgaacattttctcttcataagagcaagttagcaatggggtgaagtttagaatgctgttggcaaataatctcctcttgtaggaattctatatacagtcccctgttagagcatggtaattgttgtataacgattttaattaatttgatcactagttgtgcaacactacgggattcttagaaacgtgggctcactttgtgtgtcatttgagttaagccttacccacac

SEQ ID NO: 249092 - DNA, 407 bp, Gossypium hirsutum
tgaatctggttggaaggagggcggttgcagtgttagtatagattttttacttcctacttttaaggtctcgccgtcattgggtgccacatagttcttcttttctttatttatgattgcatcagatagaaccatggtggctgcattaaagtaagaatctttttctacgcctaaagtcttgactgactaagaggaggcaagcagacccagagctggatttttagaggcaaatatttttgccaattcttgaaactctctatccccatttatacaagtctgagctacacatattctgcctgaaagattctttggctgtacctttttcattcaaaacatagatatttgggggtcattcccacatacttgcttgattttccaaaaattttttacacgaaacagacaacttaaaa

SEQ ID NO: 249093 - DNA, 392 bp, Gossypium hirsutum
cccacgcgtccgtctctcctcctctctacaccctccaacctctcctttaaaacccagactgaactctcttagcactccacttcagaacgctgtcgttaccaagagacaacttatcattaatacaactacttccttctccatcatttttggggtccaacaaaacccagttccacaatgtttagctcaaccttctaatccttccaaaccgtcggttttgaacatcgcaaacaccaaagcttggttccagttctatggtgatggttttgccatcagggttcctcctgagtttgaagacatcatggagcctgaggatttcaatgctggagcttccctgtatggggacaaggcatagccgaggccttttgcggcacgatttgcttcaaccgatggat

SEQ ID NO: 249094 - DNA, 414 bp, Gossypium hirsutum
cagttggaggcctgtgctagaattgatcgcccaagtagaagggaacacagagccagagcaatctgattcagaaaaatggaatcttgcttcacgaaatgttggcatagcaaggctcttttcacatcactttattcccttcgccgttcttccatctccattcactctgttagaaattcggttaaaagagcttacgatggactgctgttggacgcggcaggcactctcttgcaattatccaagcctgtagaagagacttacgcttctattggagctaaacacggtctgaaattgaattcagctgaaataaagaaaggatttaaaagggcttttgctgctccctggcctgataagctccgttacgagggggatggaaagccattttggaaacttgttgtctctgaagccactggttgt

SEQ ID NO: 249095 - DNA, 418 bp, Gossypium hirsutum
cccacgcgtccgctttttgccggaatacaaaaccctatcttcttcttcctcttcacttcaccacataccctctcttcccttatccctttccctatccctttcatcaccattacgctgttaatccccatcccaatatctgggtttctgaaggaacccctgaaggagaacggaataataataagaaaccccactctttttcttgccccctttctgactgattcaattttagcctttcgtttcttttgattcaatttatctcttttttttatttttctttttttttaaaaaaaatttgaacctattattctttattaaccctcaaaagatggcgattgcttggtctgaaaccgctgcttcaatggaagctttatctttgtctcctcctatgtccccacccgtcatcctaacccaagacgaa

SEQ ID NO: 249096 - DNA, 400 bp, Gossypium hirsutum
ctccctctcaaaaaccaaagctcaaaccctcatgctttttcaaggttgattgattaccaggttacaagctgtcatcatcatcatcatcatcatcatggacatattcttcaataaacctaataccatcatggttattgacagcatatgcttcaaaagagcaatctccaccatggatgttgttgaacaatacttaccaagcttctttacaacaatggcttgttgacctctgtcttggtgctatcccacctgagcttatttttaacaatccccccctccccccccccaaaaaaaaagaactacccttttttttattatctcaccatggtttcctcttcttgaccttgtaaggccttttcttgaccttgtaagacccttaccatcacctactacactcaatacc

SEQ ID NO: 249097 - DNA, 380 bp, Gossypium hirsutum
tcgcatgcgtacaactgagcttcaaaaactccgatctttttttttctaaatttatttttttagtctttgaatggaaggttggatttttcataattaatcgatttattttttggttgggaattaaagaaaattacttttagaaatttaaaaaataataattaatggcttcgtctagtcttcgcactgttgaagagatcttcaaagactataacgctcgacgctctgctctcgttcgtgctctcacttacggtatttgatttccccctgcttccgtaaagcctaattttgagttattgaatttcttctcttttatttcgatttttttttatgttatcgcgttgttttggatcagatgtagatgatttctactcgcaatgcga

SEQ ID NO: 249098 - DNA, 157 bp, Gossypium hirsutum
gaggccgcccacgcgtcgattgatgatttatattgaagttcctttttgttttaattagcaaacagatgcagtgcttgttagactctaaccggaagacacactcttatgcgggagctccgttacgatcgacaacgggaggtcaaaaccaagaaaggaa

SEQ ID NO: 249099 - DNA, 245 bp, Gossypium hirsutum
acgaccactcgtccagttggcaccattttgtttcttttaaacaatgtcttacgaccagtggcgaggaggtcacagtaaagacaacggctcgttctgcttaccgacgagcagatctgtctattcaaagaggcattcaccctctagctcatggataggtgaagggagcattactgcgacgaagctgggcaccgggatgcgatcgtttaagaccaccctaacttgtagcaatacgcaaaatgttctta

SEQ ID NO: 249100 - DNA, 411 bp, Gossypium hirsutum
tgcaaccctagcctttttctcttcaatcgtcaagccttaaactcactccttcaagcgccgatcctccctaaggggcgatcaacgcctttaaattttaggggatatttcatagcctcacgattcctttccaacctcgattttgacgaagcgaaacaaaattcgtggctctttctttaggagcagccgtacagaggaacgaagggaggcgcgcatgaaggaggccgtgcatgggactattcgtagggagcccgatcctggctagctgctggtgttttccagaaacctctagggtttctggtgtttgggcctttttcgggtcattttgggtctcgggtttagtttatttgggcttgtattttaatgtttgggttggattttatgtaattgggtcattgacttttatcgttttgg

SEQ ID NO: 249101 - DNA, 297 bp, Gossypium hirsutum
ctcaaatcaaaacccataaaaccctcaaatcctctaccatggcaattgccagaacgggcgtgtacaccgacgattatttggagtactcaagcaccttcccagctgagcttcaaagacttctcaatacacttcgagaactcgatgaacggctccaatctatgattaatcagacgaggcaacaaactaagtatcgttctggaattgcggcgaacagagggaatggcaataggtatatgaataatggtcatgatgatgaggaaaccgatgagaaaatgaggaaggatatagaggccggtc

SEQ ID NO: 249102 - DNA, 410 bp, Gossypium hirsutum
gttcggtgttaggttttttgtacgggatggggatgatgcgtgagagaaacaaagctaaagcatttttgaatcattatttcgctgccgaaggtggtaatgcccagtccaagatggctttggcttacacttactcgcgtcaagatatgcatgaaaaagctgttaaattatatgctgaactggcagaaacagcggtaaacagtttcttgatatccaaagattcgccggtaatagaaccgattaggatacacaatggagctgaggagaacaaggaagctttgaagaaatcaagaggtgaagacgatgaagattttcagatattggaatatcaagcacagaaagggaatgccggtgctatgtacaaaatgggtcttttttactatttcggattgagagggttgcgccgtgatcat

SEQ ID NO: 249103 - DNA, 416 bp, Gossypium hirsutum
cccacgcgtccgccaagttctattacatgctgcctttcaaatgatggagaagaagcccacccttgattctgattggcgttcgtttagagctaaattagtggcaaccgagaaagtttcaagcccttcatcatggattgatcctgatacactagtggaccaacctcctcaacctgttacaattggtgacaaatgggctcacaccatccgtgagcccgaaaaaggttgtctacttatcgctaccaaaaaactcgacggggtccacatttttgagcggacggtgatcctcctcttaaaagcagggtccataggcccattagggatcatactaaatcaatcatcgctcaaatctatcaaagaaataagatcaacaactatccgagatgtctcggaggtgttctctcatgtgccattgttct

SEQ ID NO: 249104 - DNA, 271 bp, Gossypium hirsutum
cccacccgtccgggcagccacttttgcaagcctatcaaccggcgttggccttcgaggcaccgccaccgttatgtcattctcgactatgaaaaccccgctatattgagggcttacaaaatcttgggagacagataggaacccataccggctggatgtagcttgcggaggcaagtttacttgcttcgagagagactgtctacgacaggactttaacgatatcagatctgcactgattggttggatagcaccttatatatataccgaacactca

SEQ ID NO: 249105 - DNA, 338 bp, Gossypium hirsutum
cccacgcgtccggcgtcggatacgaggtacctttaggacgaagtacaaactccactgctgataacgctattctacttattgcgtggatcttaagcgccgcacctatcctctttgtggacccaagggccacttccgcctgactatccgggcgcaagacattgtcaagaacccagttcgcctgccccggcacatctgtcaaaagatcacacatgtgtgctaagatcagctcttcgagaacaaacttttaatgtcgaacagaaggatggaagcatgttagctgctcttgcacatggctaatacgaacctagaagacgggggctatccatcctacagacctt

SEQ ID NO: 249106 - DNA, 333 bp, Gossypium hirsutum
ctatttgctgattgaatccgtgaaactatatctatatatgcttttctttgtatggaagttagattggtatctgaaaagtgtacaaacctgatgtatccaatttggcaattttaatggctagtttcatttgttcaaaagaaaaaaagaaagaaaccacttttttatttcaagatgttccaataatataaacccaagccgataatgctcgaggcagtgcaagagaagacgtttcgtgatccgatggcaaatggagtgggccggggagagttagaatgaatctattccatcccaggttttaagttggaaaccactatcttactattcccccaactt

SEQ ID NO: 249107 - DNA, 368 bp, Gossypium hirsutum
cctaattttccacatccacgaaaaaaacccaatagcttatacaactctgtgttactacccgcctgaggccaatccaggacttgattgttttccatctgaaaactctccaacggataaaatgagttcaaaatcaaataacccagaaccaggataccactgtaatgatgagaaaaagagcaaagacggattcgcgactatcttctctagttagcccatgtgagattgtgttgaaaattctaaccaaggatgttaccaatgatcagattacataccctctctcgtactttctcttgcttcctactagtgcaacatattttgaagtttatatctcacaaaagtaacattgcatacactattttacatttgaa

SEQ ID NO: 249108 - DNA, 271 bp, Gossypium hirsutum
atgacgcgtgggcgcattcagcgcgagcttttaatgggaaatcggtttaaatttcggaaccgaaacgctggggatgacggcaaccttacttaaagctgaaactaccctgatggcctcaataaaagttattttttctttaaaaccgactgcccaccttaggaactgctcaagcggaggtaaggtccaccggtcggaagatgaccgtacttcgcttagctgctcgttccccaccggccgcccttgataagctcaaagatctattgatgctccc

SEQ ID NO: 249109 - DNA, 397 bp, Gossypium hirsutum
cccacgcgtccggatttgtattttcctttttcttttttctttttttttggcgaaatgatgcataaaccactttttcttgtgcttactgcaatattctccagcctggtggttcagccagtaattggagctaagggtttcagtgtggagcttattcatcgtgattcgccaatatctcctttctatgatccttctctcacctcatcacaaatcctaagaaaaaatgccctccattccatggaccgtctgaaacacttccaatccttgattgatcaaagcaccatccaatctgcagtgactccaaatggaggtatttatctgattaatctctcctttggaaccccaccagttgaatacatggccgttgcatacactggtagcgaccttatatggatacaat

SEQ ID NO: 249110 - DNA, 250 bp, Gossypium hirsutum
gatccggcgcccagctcgtaattggttgacatggggtccgttataccgcctaccggctttctggacatggaccaaccccgattttcaacaaccatcatccacatggcatattacgttgttgtgcggtttgcttaggctaaactcgacgtcggcgtacgggaccggaggtgttcagactcgcagactgaccctggcgtccggtgaaaaaaccgtgcgaatcataccggtcggttgaaggattaaggtcgat

SEQ ID NO: 249111 - DNA, 419 bp, Gossypium hirsutum
tccgatcgtctgaggacactactgtcaaagcctaattgattagatcgctgagtgggatatgtggtggaaaaacattatatgttgtgagatctgcgcagatactgttgttgaaactggataaaactagcatacgtatcgcagggaaattcagctgtggaaactcttggtgaactataaatcataatagtttaggctttaagataggaaaatgcaaattctcaactttggatactcttctaagataaatcataatagtttaggtattgatataggaaaatgctacgaggcaatgaaggtaatcctatgctgcccatatgcatggatgataatggtctttcatattcagactaatgcattaaatcaactgcagtttttttgtaagactacctgttggatgtactgtagatgtggtgaattat

SEQ ID NO: 249112 - DNA, 387 bp, Gossypium hirsutum
ctttgctcacttgcacgaggacgaaagaaccagcgatgtacgtactggttttcgtgctttcatcgggaaaaacgcgaacctggatggggtggatttgactgtggagcatgtggctaatgctgtgctgttcttagcaagtgatgatgcagggtacataagtggagacaatcttatggttgatggtgggtttacatcttccaatcactcattgcgtgtctttagatgaggattgatgaaaatgtgaaccaaaatgaggctcattagcttagctgcctaagccactagctttggttcaactattaccagattgtatctcccttctattttctcctgtcagtggtatgtaatttgtgacaaaaaaacttctaatataattttaattatatt

SEQ ID NO: 249113 - DNA, 158 bp, Gossypium hirsutum
gccaacccgagattttctattttccgattctttttaggtcttttttcccaattttttttgtatttctaaaacagaaacaaataggtgtctcaatggcagaagagagcggtgcccctgtaagttgtgctgatttgcccgttaaaaggcccagggaagac

SEQ ID NO: 249114 - DNA, 380 bp, Gossypium hirsutum
caaaaacaaatacttgagttcacgctctgttcctccctttaatttgggttttcggatcgtgagctgtcgggtttttttctctctccaaaacaatggcggtttcttcgactttttccggtgctaaattggagcgtttgttgatcaattcttgctcatcgccctcggcttcttctttgcgggcttgttctctttctcaccagcaaatgaaggccttttccaagcctaatcgtggcagaaaagctctggctcagaggactggtggagttagatgtgaagttgctcaatccgacgccattaacgaaggcgaaaaactggatccttccaaggcttctgcactctccgctcttgacagctcaagacttccgctgctgacaggtata

SEQ ID NO: 249115 - DNA, 274 bp, Gossypium hirsutum
  unsure (1)..(274): unsure at all n locations
ggcccggggggtggaagatttaatcatggacccgcttgggaaacaaatgacaggtccactgctttcatggttgtcacnatgttggtttttttttttctataaattcctttttcccattaacttttttccatgatgtgtttctcaagattattagacctcattttgtttctctttagagcacgtgcaagtttgttggtgactgctatccttgaatgcttcttgatttggtattatatattactactgctgatataatgaactatatgtttactat

SEQ ID NO: 249116 - DNA, 416 bp, Gossypium hirsutum
cccacgcgtccgcgaaaacacaaactttcattctctcacacaaatatctcatcaagcaagagccttagggaataaaacatggcggtggcgggaatccttaacatccccaaactcccacttttctcgtcgcttcctttgcgtaaacaatcaaggccactttccatttccattaaagcctcaaattcccaaaccagtaccaaagaagaagaaaacccaagcttttcttcttcttcttcttcttcttcttctactactagtacagctacaacttttgctcctcctcccaacttcaagccgccagagccaaagccatttgcaattaggcccgacaagacttgggatgttgttggggcatctcttgctttgtctttcggttgggaactggggtttttgtttctggctattcagcatcttta

SEQ ID NO: 249117 - DNA, 148 bp, Gossypium hirsutum
atcccactccttttaccgtattttacctaattccgggattcggaggcgggccccggcccttttttttgaacccaaggccgctttcggccggccgatccggccggaaaacattgtagggggggaagttggcttggggcggacatttgtt

SEQ ID NO: 249118 - DNA, 267 bp, Gossypium hirsutum
ttattttttttttaagacaagaacatagtggagatattataacacaaaaatagaggatgcaaatccacttaaaacacaaaaggaaaacaacattcaattaaaacacaaaggggggatatcctttgtttgtgcccaatatagattatatttctacccttagagcttaaattcccatttagaaagctcctcttttgatagcatagataatagcattatcaagggcagttttactcaaaattttggaagccaattgaaccactcttacat

SEQ ID NO: 249119 - DNA, 324 bp, Gossypium hirsutum
ctttcttaaacagcacctttttctttccttcttccttctcccttttccctttcccaaatccattccttttcccttcaatttcccccttaaacgcctggtttccttccccaaacgcccggaactcaaacgcttacatgaggcagcagtggccactggctcagctcaaccagcaagtgaccctccaaaacgttcccgtacaggatacccataagcaagaacaatctggcaaacttgttctttcaactaacgactcatccgatgagctccttagaattagacacacctgtgcacatgtaatggcaatggcagttaaaaaactatacc

SEQ ID NO: 249120 - DNA, 203 bp, Gossypium hirsutum
ttgcgaagcggcggcgcctttttctcacaattgtcagatagcagtaataaaaatgggtggttggtaattgggggtgtgggctgggggagagagccatccttgggcgctcgtgcgcagcaatatataacacaactggagcgaaaagggtccgataactctatgcctgggaactttcgcttcactctctgatactgcctttatga

SEQ ID NO: 249121 - DNA, 194 bp, Gossypium hirsutum
gcgagggccgccctttttttttttttttaagacaagaacaaagtggagattttataacacaaaaatagaggatgcaaatccacttaaaacacaaaaggaaaacaacattcaattaagacacaaggggggatttcctttggttgggcccaatataaaattttttcttcccttaaagcttaatttcccatttaaaa

SEQ ID NO: 249122 - DNA, 266 bp, Gossypium hirsutum
  unsure (1)..(266): unsure at all n locations
acgtgaaatatctagggattttcatcatncttcttcttctcatttcctacttctgaagatttcatcttaattgcatgtaaaagaaaaatgccttaggtatgatgaaccgccgcggcatatggtatctcgctctttattgttggttcacttatccgtcaagtgacaacgaacacgttaatctctagggcattgtttatcagatacgggagaatacatgatgtggatatgaagcgcgactatgcatttgttgaattcaacgaccctag

SEQ ID NO: 249123 - DNA, 197 bp, Gossypium hirsutum
accactcattctgacttctaatactgtttctttttccaaacccaacctatacattgaggcatatttaatgggtgtaggttcctccaaatatctcatgcctacacaacttctctactatccttccctttgtcatgaaaaccttttatgacttacattcactctttgcttttcatacatctactatatgaatcaataat

SEQ ID NO: 249124 - DNA, 300 bp, Gossypium hirsutum
  unsure (1)..(300): unsure at all n locations
atccgctcacttgtaaatttaaatgtgtaaatttgacattatgttgnnggaagnntaatgtgcaggggtgtacatacttcaattgaatccaataaaatgatttctagactcacaaaattatgctgctctttgttaaaccaattatacgttctagttataattaatcctttgccctcatcttcctactgaacacattgccaagagcatttatcaatgacactgcatcaaaatttgtgcccacatctgggacacgtatggatgtaacaatgaccaccaaaaacattcattgagaatataaaa

SEQ ID NO: 249125 - DNA, 245 bp, Gossypium hirsutum
  unsure (1)..(245): unsure at all n locations
gaggaacttatcatgaatccactgatttctgccgctttcgntattgctgctgggttggctgtcgggcttgcttctattggccctggagttggtcaaggtactgctgcgggccaagctgtaaaaggttgggagacaaccgggcgggggaaaatacagacttatgtaantgcttatgacttacatatgctggtgacatgccttattgaatcttgttatcttaactaaattgatttttttattatgtg

SEQ ID NO: 249126 - DNA, 216 bp, Gossypium hirsutum
tcggccaagccttcgggtgggtttaagaacaaaccaaatttttaaagaaccattctttcaagctgcgtgttttggtcttcaacgaccacacaatttaacttaacggcctggccattgaagcttttaggttttaacccctcggccttattttcaattttttttctaaaccaaaagaatttccggcttgaattattccgtttcccaaccatttcaaaa

SEQ ID NO: 249127 - DNA, 219 bp, Gossypium hirsutum
ctcacgcgtccggtcgcatacactattatgatctaatactagcgacggtccccagagggagctcagacactaccattggcgctttttcctgaacgggaggtggcaatggcattactctcaacgggctttagtccgcctttgataaagcagccatgaggaacgccaacaacgacattccttctatcggagcaatggcagatgaatgagatgaatgccggt

SEQ ID NO: 249128 - DNA, 112 bp, Gossypium hirsutum
ctcacgcgtccgatcgcatatacgattttgttctactactactgactgtccacgggtgcgtctctcaatatacctttagcgcctgctccataacaggagataccactggcat

SEQ ID NO: 249129 - DNA, 215 bp, Gossypium hirsutum
gcaagggccgcccttttttttttttttaccataaagttaaccatccaggcccttcggccagggggtatttattaaacctttcgaaattaaacaaggacgggcccatccaaacacccggttttttaacctttttttttccattccatgacattttccctcatatccttcccttttctttcttgccatcaacttcctaaccagctttttccactttt

SEQ ID NO: 249130 - DNA, 216 bp, Gossypium hirsutum
aacacacctacggtaacatattctacttgtagtttatactagcattgaggaacctggtgaggttatccacaaacattgtcagttcttcttaatcaaaagcatccatcgttactgcttgtcaccggacttaaatctgacaatatgagcttagccatgaggaacgccaacaaccacattgcttgtatcgcagcaatggcagtttacattaattattac

SEQ ID NO: 249131 - DNA, 308 bp, Gossypium hirsutum
gcctgcttcctcttcttcacatcgactttcacccctaaaaaaccatggcagcggcgagggcgataaatcaagctaaatcgactgggtttcaacctcactttacaaagaaggctatttttgcgacaaactccactgacttagccccaccttctgtttttactgccaaaaactcactcacttacaccaaagaaaccgtttccaatgaacaaaacattcgcgtgagaacacttacgctatagagtgatggagctattacagcttatttactccctgcaaaaccccttctagcggaaaagataccacaaaac

SEQ ID NO: 249132 - DNA, 127 bp, Gossypium hirsutum
ataagtaatctcaatcaagcaggatttttttcaaccagtacatcccaatccggaccgaaaagtaggatccagagcttataatacattcaccacagcgggaaagaaaccatatcatgaaatctccatc

SEQ ID NO: 249133 - DNA, 308 bp, Gossypium hirsutum
atgtccttaagtagcagtctttaatgtttaaacgcgctagtaattggtgataacgtatttgctttgtcgattatatcttttcgattaaggaaataaaaaaattttaaacgctacctttgaaaaattccattctccctaataaagtcaaaaatcaaagcttcggtatataaaaacgaaaaagaatgttgtattgttaagaagcaaaaaatcgaacatcggatgaacagatctgtctatcgttggtccagcttaattttaagaaaaatggccgaagaaatcaataaatccgagattcgatcatccccgtc

SEQ ID NO: 249134 - DNA, 321 bp, Gossypium hirsutum
tttagctatagcatacactactagtacccactactagcaatggcttcctcaatgatctcatcggctgccattgccactgcctctccggcacaggctaacatggtcgctactttcaccgccctgatgtctgcctctgctttgcgagtgaccacgaaggccaacaacgacaatacttgtctcataggctgcgggcggagcttgcagtgcatggccgagggaactggtactattaagaaccggtgaaagactcttgttgggaagaactttgttagagtatgaccctttggtaatgtgattattgaattagaaggataatgttta

SEQ ID NO: 249135 - DNA, 246 bp, Gossypium hirsutum
cccacgcgtccggaaaccttcactactacactcaaataatggccttgacagcttcaatgatcacagccgctaccaccaccactgtccttccggccacgctaacatgaaaacctctttttacctgccttaaaaccaactttgctttgggctaaaacacgaacgaaaaggacgacataccatggctgcctacaaagggacactgataacaccgcatggaccccaagacttctagtgcacagacgacgt

SEQ ID NO: 249136 - DNA, 206 bp, Gossypium hirsutum
ctttatcggggtttctgccgatttgcatcatcatcatcagcatcaacctccgatcgtctatctctatgtaagcgtcatattttcgttacaacaaatgtcttggaatggatgttgctctccgcctggggggcctggctgaagaagaggctcacctgaattgtacaaacagcagaagggggagggcggtttgtttctattacaaggaa

SEQ ID NO: 249137 - DNA, 119 bp, Gossypium hirsutum
gccacccgtccgatccaccaaacttatagtacgtattataaacttcggcatcctcaacggtctgggctgctaacaatggcagtggctctccagcataatctactatacaacattctttt

SEQ ID NO: 249138 - DNA, 100 bp, Gossypium hirsutum
taagtgggagctctcgacccaaattgagacaccactacttgtaacgtcattttacttattgcgtgaatcggaagcagtgcacggtccttctttatggacc

SEQ ID NO: 249139 - DNA, 215 bp, Gossypium hirsutum
gcgatcgcttttgtcaagcgaatgcgctactagctggtcctgtcaccatcaggtgtgacatcaggaccatggctgtcaggtctccagagcgtttttaaggccttcggtttggagcctgttggtgctaggctcacctgctctttcaaactgacctcaaggacttggctcagacgtgtgttgatgctaccaagctcgctggtttcgctcttgctaca

SEQ ID NO: 249140 - DNA, 418 bp, Gossypium hirsutum
gtagagaacgtcgttctgaaagagtaaattggcgcagggagagagagaggcattgcgggtcgctgtctctctcaaaggtcaaaactttctctctccaaccccaaaaacacgctacttgttttctctctctatcccatcgattcaatttctttgaaaaaaaaagaagcttacagatcgaaaccttaactttcgatctctctcacacatttccttcgatcgaggtagctcgtttacaatttgatttctctatgttaaaacaaaaccctagttttctctctgaatttccgaagtttagcacaaaaccctagaaattctcatttcgatttaattagcgcttttatttgattaaatactcgggatgatatatatgcttaggagatgctgattttttaccgaaatatccttttggttcaaatcg

SEQ ID NO: 249141 - DNA, 408 bp, Gossypium hirsutum
gtcccttttaatttttttctctctttcattttgagggctaaaaacattgcctcaaatccaacccccccttttttttccactcccaaaaaacaaaataagaaaaaaaaaatccaatctttatctatcttctataagatttataatttaattattttttccttgtttctatagagttttaattattttttccttgtttttatagtgttattatagtgttaatcgcctggtatagattcttctccaagtgactctcattttctagctcaatttgttttttaggctcatctgccacaaaaccaacatcttttggccatatagtgtttcttgcctttgaaaaaaaaaaaacaatcaaagatgttttttttcatttttttcctctatggtattagataaagttggtaactttag

SEQ ID NO: 249142 - DNA, 275 bp, Gossypium hirsutum
gccacacggtcgactactggtacggactattttcactggcggccttacagggctcagagggatccattggcacagtctatggttctacatgctgacatggattcacttttgaccgagattagagctgcctgtgcttgaccaacggcatgaacgacaacatctgacacccttgggtggtgggcgatggcatgccactgcaaagcacgcaggagagacctgctacagtaaagaagaaattagaaactttctgatacctacccgatcgtacaccggct

SEQ ID NO: 249143 - DNA, 145 bp, Gossypium hirsutum
gtcacccttattttaatacatgaaataaaatcgtatgaatggatctaactatgacacacgtgactatgcatttagttgagataaaagacagtttaccttaaaatgtatctttgtgctcctaggcggaatactaaacatgactatg

SEQ ID NO: 249144 - DNA, 157 bp, Gossypium hirsutum
ccctgccgatggcttaaaatactcatattatgcttgttgggatggccaatgcttttaccgtgcgtgattatgtatctgttacaacctgtatacgctgtaataaatgaataaccgaattgttcaaaaaactttattacctatacttaaatggcgaatt

SEQ ID NO: 249145 - DNA, 418 bp, Gossypium hirsutum
atggcatgttttcgcctcttaattttcctctatcgcagcccctggagaaaaagatagaagggtgatttgtcttgcaagaatgattggtttttaacttgttatatataaatattctttatagcccgtaaatcttataagcttgagtgaagttttctggccttactgttggttatttatggatgcattatttttaagataggtagaagcttaggggtagtatattgacaatcataatcactagggattgattctcgatattgcgtaaagtctcttcttaatggaaagggattaactatttgggttaaacttgggggatcattatgtatgatttaaagtgttcctaggcagatcagactcgatttaaacattaggttttgtggttctttatttaaatcttgtaaagtggccgaataaattt

SEQ ID NO: 249146 - DNA, 413 bp, Gossypium hirsutum
gctttggctgctgcaggaggcttcttggctcttttctttgcctgtgtaacagttttttacattggggccatatcggttgctgcttttgttatttcaactgcaataatttcagcaattatagctgctcttgtagctacaggttgggttggattcttttgggttttatggttgggtactaagagaagtatggaccttgcaaagcactccctcagcattactggatctgctttctcagcttattcttctgctcagcatgctcatcgccaccaggaactgcacaaagtttcagactgaaacacttacttgctcatcatgtatatattgtcagatgcagttgattaatcatagataaaaagcatgtcaatgtgtttgacaatttagtcggctaggccgacttgcagtatataggatgc

SEQ ID NO: 249147 - DNA, 129 bp, Gossypium hirsutum
gatagatatgtctaaacgacttcaatactttttttaaatcaactacactctactggggggattccaaatagcatcaatggaaccccctataactcactataacactaaggggtatcttgctttcattct

SEQ ID NO: 249148 - DNA, 411 bp, Gossypium hirsutum
  unsure (1)..(411): unsure at all n locations
gaaaatgtcgatgaccccttcgctctctcgtcttcactctccgttcctttgctgtccactcaaacactcaactccgtcattatccatcaaatgtggaaggaatcaccggtcgccgccatcttatccttgcatcagagccgttgatcttgatcagagcacaatagtagcagtgtcggttgggcttgtcagcgttgcggttgggattggcattcccatcttctacgaaactcaaatcgataacgctgcaagccgagaaaatacccaaccatgcttcccttgcaatggctccggtgcccagaggtgtagattttgcatgggaagtggaacaattaccgtagagctcggtggcaacgaaaaagaagtctcgaaatgtgtcaattgcgaaggaanttgttccttaacatgcactac

SEQ ID NO: 249149 - DNA, 418 bp, Gossypium hirsutum
actaaatgtgctggaaatgtcaactgttatatttaacatgatagtattattataaatggtttactaattaatcttaaaagagtgatcccgaataagttctagtcttactgtgaccttgttccagcaacagacgggcttgggttaagctgaattgtctttgttgactttattattaacgatcaagaaagggtagtggatcacccttttcctctttccttctcttttcgtttttcttcagaaacgtagggctctctcgttataatttggtgggttcagtggttttaagggtggctttagtggtggtaatgttggacgattctctgccttcctcttgcagagaggcttgatgaagctcgttttgtggcttttctatcttatcctgcgacagggtggtggttgccgtggaaggttcggtcat

SEQ ID NO: 249150 - DNA, 300 bp, Gossypium hirsutum
ttctactgttctcctcaccagggtgcaggtatcgttgtaaaattcacagctaactgtgttgtacatatatcatgggaacgcctctgtgctttgtatgtatcatctcacacatcgtttctactttatgagcactagagttaagagtattggggatggatgaggtgattatgaacaatcaacaatggggcgttgatcaccctctatcttgtactttaaattttgctcatatttgcgagacacctggctttatctttacacttcaacatctcatctgtagtaacgcaacatataatggagttt

SEQ ID NO: 249151 - DNA, 415 bp, Gossypium hirsutum
cccacgcgtccgcccacgcgtccgatccccaattcttatccagaaaaccctaattttgtgaattttctaataaatcttattttcgtttcctttaattttgattttaataactcaagctcataacccatctgaaaaagaagaaaaaggaaatgagcaatctgaggactgtttgtagaccacacatggtcttcacttcattgatgtgtagtagcaggcaccactacctccatcaagctcgatccagaactagagttgcctttcgaaaccctgattttaggtcatcttccttctctccgtggcttcatttgtccagagatttgaggaggaaggagccttggtttcgggtcaatcaaagaagaactgtcgttagggcatcgaattggtccgatcaaaagtctccctatgaaactcttga

SEQ ID NO: 249152 - DNA, 326 bp, Gossypium hirsutum
ggcacttaaactcgcgatctatacccggacgtatgggcgagggtcagtcccacgatgagggggacggcactgtggtcgccgcaaaaccctgggcgcaagcccgagcggagcgtccgtcggtgcatatcttgttggtattagcaaatatttaaatgagaactttcacggcaacttagggggaaggatccgtgtgaacgggtcttgcacctgcgttattccatcctaagagacgtggtaagaccctgcgacagcacgtccaacacgtgcttcaaaaggatatcggactgaaattcctgaaccgtacacacggacgttgacatctatgc

SEQ ID NO: 249153 - DNA, 435 bp, Gossypium hirsutum
cccacgcgtccgtgttaataccgagtcgaactgctgtgcgacatgtgagagcctcagcagcaaaagccgatgcaactcactcgtgatctccgagcacgaaaccagaaccctgcccttactgttcctggctactaatccccttgacaattgccgagatctttcatcaaaagctgcatcgaagttgatcttcacgacctttacagttttgttggtcttcttgtgaatcctgttatttctgtcaccccaaattgcccataatacacagcagacaaccttactctgagatggagaactctgcaaaaacacccaaatgagccactgtgcgaactccaggtggtccatactttctgatcctctatcatatgctttgctcatatcaagtttaaccgccatgtatcccttcagtcttgttcgcttttgccgaaaagatgtaat

SEQ ID NO: 249154 - DNA, 417 bp, Gossypium hirsutum
agccttccgccaacccttccgccaacccgtccgcccacgcgtccgaaaaaaatgaggggctgcacctgcttctcctttccttcatcccctccaattttctccttttacagtaatagcaataatcgtttctcttcttcttcttcactgttattttcatcagcctctcacaactgctctgtgaaactgtcccctctcctcttcgccaagtccacgcgcttcagaacaaattgcaaagccaaagatcccgaagttgtggactgcgtagggacgggcctggacgtggagtgcctcgtctctcaaaacgagaaacaagatttggaaatagaagatgttgaaaaggcggaaagcaacattttgttggagtgggcagtgctcgtttctccattcttcttctggggcaccgcaatggtggcaatg

SEQ ID NO: 249155 - DNA, 218 bp, Gossypium hirsutum
tcggttaacctttcctttcatctttctgtaccagtgaatgcccaagggtaatcacccgctagtgggacaccggctcacctaccgtcagaccaaatctttggacaagaatagtcaacgtttctcatgcttcggctaactcaatcggtcacgtcggcgaatgccagaacctaatatcgcgcaggcaactaaggccctcctggctaatctaatgctcgtca

SEQ ID NO: 249156 - DNA, 418 bp, Gossypium hirsutum
ctcaacccaagttgtggtgcatatcccattttccacactccatttccccagattttcacggtgcacaaacagccataattctcaacaactcgttatatatataatttctgggttcaatcgtttcttgttgtttgtagttttggttttaatctttgaaggaagcaaaaaagaagggaaaaaaaaaagtttgaattaatgctagctgtgtcacctttgaggaacaacacaagcaaagatgatgacgaaggagagatggagagtactttcacaatcagctccgacgagttcccggatttcgctgacgggaacttacttgaaagtatcgatttcgacgatctttttctcagcatcgatgttgatggcgacgtcttacctgatttggagttggaccccgtaaatttggctgtattgccccccg

SEQ ID NO: 249157 - DNA, 433 bp, Gossypium hirsutum
gcgggcgagaccactactcaagggttcgactccttggaaacctggaggaccattggccttaaggtatattcctcctaccaacgaggacagatatttactcttaattgatgagttacgtggccgtttggttactcttcttggtggacgcgctgcagaggaagttatctatcatgtcgaggaaatactggtgcacttgatgatattaggcgggcgacagacatggcatacaaggcagtagctgaatatggtcttaatcagactatagggcctctctccttagctacggtttctggtggaggcatggatgaatccgggggtggagttccttggggacgagatcagggacatctagttgatcttgtccaaggagaggtgaaggcattattacagtctgcccatgaagtagccctttctgttgtacgtgctaatccaa

SEQ ID NO: 249158 - DNA, 383 bp, Gossypium hirsutum
  unsure (1)..(383): unsure at all n locations
ggatagccttgtgtcactccccacctcacactgtcactcacctcttttcacctcaaagccgcggtcttcctccgccaccaccaccacctncacctccgtttccttctcccttccaccaccacctcaacctcccgaacctaatatccgccgccccaagtccatcaatccctcccccaaacccaaaatctcttccaatcccctcaaaaacttctccactactactcctactcctactactaccaataacaatttttctcatgtcccttctcctggtgaaactacaagaaccactcaatctcttgtctccaaacttcgcctctctagcaaactcttnccgcctnctccacctncgnctnttctacatgatacccgaaaggcaactc

SEQ ID NO: 249159 - DNA, 397 bp, Gossypium hirsutum
  unsure (1)..(397): unsure at all n locations
gactggccttgtgttactccccacctcacactgtaactcacagctttacacctgacagtggcactcttcctacgtcgccaccaccacactaacctgcggttgcttttccgtgccaacatgacctcaaacttacgaacctaatatgcggcggcccaagtacaacaatccgtccgccaaacccaaaatctctttcaatctccctgagagactactacactactactcctactactactactaccaataacaaggtgcttaatgtccctacctatgccgaaactacaagaaccagtcaatctcttgtctacaaacatggcctgtctagcaaactataaccgcctgctccagctccgnctgttctacatgatacccgaaaggcaactgaaatttctgaacc

SEQ ID NO: 249160 - DNA, 431 bp, Gossypium hirsutum
cagaaacgttaggtgccgaagcgacgaggaatctcaaagatacaaagataacgagtgactcgagtgagcgagagatgccttctgcagatgtggcattggctcctgaggtttctgatgattctaaaaatgagcagttaatggctgcatatcctcttcatagcaaccatgaggttccagatgttgaaaattcctccatggtctgtgatgatcaaaccgattcggttaaattgcctaacggggacgatgttgcttcaaagattactgatccgacttcaagtcaaatggaggcttcaaaaatcatgcctggtttaaaccaagtagtagaaaaactccatgcaaatgcaggccaagcacaggtcctggaaaaaatagacattggttcggtccccgggattcagtttcgcaattagggacaacaaggaatggaagga

SEQ ID NO: 249161 - DNA, 337 bp, Gossypium hirsutum
gaagccatggccagcctgagaatggcttactcaactcctgtaatctacattggtgagagatgatccttttttggcaaacccagactcaaacaaagaccacaactgtgccttccaaaacttcccacaacaaacttcttgataatctcacagatgccctgactgtatccaccactctcaaatctatatgaatattgacactcaccactttatccttggccaacccttttcttgctgcaaaaatagaaaaggccgatcttttgaagctcaacttaaccctgcccatcatgatgaaccaactcttaggcctcatgattgctcttgacatggtctactttac

SEQ ID NO: 249162 - DNA, 445 bp, Gossypium hirsutum
agccttccggagtcaaggtaataattaataaccaatggttcctgtaaaattggaatctccggttggccggcttttggcacaaatattgagaactcatcctcatttattgcctgcggctgttgatcaacagctcgataaccttcaaagtgataaaaatgaccagacagaagaaactccacaatctcaagatctcctctacaagagaatagctgaagttaaagaaaaggagagacagaaaacactggaggaaatcatatattgtttgattgtacagaaatttgtcgacaacgatatttcaatgattcctaaggtaacggaaacttcagaccctactggacgagtggacttttggccaaaccaggaacaaaaactggaatttgttcattctcctgaagcatttgaaatgattcaaagccacttatcccttgtgctcggagaccgaatg

SEQ ID NO: 249163 - DNA, 225 bp, Gossypium hirsutum
gccaaaactagtgtttgttgaactttttacactgttctgatctccccctttcgtgtgggtgttctgtttcagttccatctatatttccatggatcttacacctcaacaacttatccatatcaacggcttctacccatccaatcccatctactatgtaatcaatggtctcatctactatgtcaccgcctgcaaatccttctacagtcctggtgtgtgcctacgcca

SEQ ID NO: 249164 - DNA, 207 bp, Gossypium hirsutum
aaaattaaaatgatctccatcaagttaatgcatttttattacctcagtttaatgttttcaacccaagaaaaccggaacttttattccctttgtttccttattctgtttgcttgaaagctaatgttcctgtttccaataaattgattgaaagttcatctattattttttcatcaattatgctcctttaattgaaaaataagatatttt

SEQ ID NO: 249165 - DNA, 368 bp, Gossypium hirsutum
tcgcccacgcgtccgcccacgcgtccgtctacgcttctggagatagtgaagcaaatgattcagattctggaactgctattcctacacaaagcaatatagtttccgtttgataatgaagcaaattactccgattccgaaattgctattcctacacgaagcaatatagtttttttctgatggctctgtgctaattgccaagcattattgtccgtgcaaatatggccactgtttcagctagatctcgataattaagttccttcaaagttgtgctatatgtacagatatcattcttgccttagtctgtatacttggttatgttcttcttattcctttggtttgagtacttttgcatgatattaccttttcat

SEQ ID NO: 249166 - DNA, 192 bp, Gossypium hirsutum
tccctcgcgtcactccacacgtacgcttactcttttctgcttctatcgttattgcgggggttgtcatctcatacaccatctcccataatattgtatcaatataggtgacaacaaaggcttctttcctgacacgtaataaactttatactgttataaagttcacaaaaccagctgtcggaccaacaattacat

SEQ ID NO: 249167 - DNA, 194 bp, Gossypium hirsutum
tccggggcgacccagcgtcgaggcctgagaagtgggcttctctactgccatgccctcaaaattttgtgctccaccaatgcccctgttttccctctcagagcttttcactgttttggatggttgaaatatgctgatacatgaatggtgaatcactaagccagttctccatgcatactgaccatgctcagaccatt

SEQ ID NO: 249168 - DNA, 306 bp, Gossypium hirsutum
gttttctttccttttaattgaagattggagtgccaagggttaagttccaatttagttttctgctggcatggatcctagcaggacaaggagctagccatacccagagccagaccccaacattacagtacgggtcaatcgtgacgggcaatgggaaagatcatccgaccgtgtcttcacacccttcaactgcgaacggcctcggacggagctgcaacatttgtgacctatgtaggcaaataaattctgagcctgactgacaccagcgggactcgagttgagactgttgttaatgttacgaagggcaaa

SEQ ID NO: 249169 - DNA, 245 bp, Gossypium hirsutum
ccgtatttgactatggtaatcttgaaattggttttgcagaagctgcttagttgcccattattctgattctgtgtcttaccatttatatacatggtgataatcgtcgcttctgttctgtggcaacaaacaatatatatagaatgtatgttttgctcttaacctatgcaagcttgtagtactactctatatgttttgcctcgttggttttatgtcatgcttgtgggctgtggctccaatttcaatat

SEQ ID NO: 249170 - DNA, 314 bp, Gossypium hirsutum
tccactcgtactcccacacgttcgcactttttaagtaaaaaaacccgtccctgaggggtgagatgtgactgaagtggctcctgctgtcacttatgaaatctaatatgcctttgtgaaaaacattacgagaagaatgactcctcaacctttgtatattctagctgatatataaattaaatgtttccagtttgaaggcgtatactcacattattgaggctattctctaatctgatgctgctgggaattatgattgatctgttaaaatcaatcttgatgcttctccattttatgttctgaccacttaaacttttgac

SEQ ID NO: 249171 - DNA, 192 bp, Gossypium hirsutum
ctcgttagattctgatattcagtgcgttttctaaccgcgaaagcgtggcctatggggcgtgtttacctttggaatttgaagctagaggtgttttaaaagttaccacaggggaaactggtttgtggcagccaatcgttcatagcgacctagctttttgatccttcaatgatatgttttttctatcattgtgaa

SEQ ID NO: 249172 - DNA, 363 bp, Gossypium hirsutum
cccacgcatcctccttatcctcatatccactcaattatctcttttttatattctctttctacatctggccaggaaactttactctaaattctttcctcctccttccatcctttatcttccttctacttcttcaatcacttcccttccttaatctcaatcaagaatcccaaatattgtatctgattcatacttgaactctttgtttgataatctttatgaaaagctcttatgacgacgacaaatgggagactgttattgataagaaaaccaactctttatcctacatggcataatgttgcacacctattaattaaccactaaaatacctgtactcaactgtattttatggatgctcttcggatc

SEQ ID NO: 249173 - DNA, 125 bp, Gossypium hirsutum
acagcaattaactacgattcaagtgtaaagctccaatcgggattcatggtcttggtgcaatgtcatcaaggacaaccgtatcaacggtaacatgacactctacgttgacttttaacctatggtgc

SEQ ID NO: 249174 - DNA, 353 bp, Gossypium hirsutum
acggttgtatctttgagtattttctcttcattcatattaatcaccaaaagtcttcgacaccacgtacgaggtaaagatgaagatgagcagttctgctaccatgggggcctcaaagagaaggctatcaagcagaggccttggaggggttctccgagagaaaagggctaagctttatattatacgaagatgcgttattatgctcctttgctggcatgattgaaactcctactcctagccatgctaatgatcatggaggatcttaggggctcctcttcttttcttcttcatttggtggagtgtaaatactgtcagtggtcggcggatgttatcggagagttaagaaatttttttgt

SEQ ID NO: 249175 - DNA, 214 bp, Gossypium hirsutum
cacacttgcatcaacaaattacgtttcaagttaaagctccaattgggattcatggtcttgagcaatcacatcaaggacaaccggatcaacggtaacatgacactccacgtggactttaaacctatgttcccaccatagcatcttagcggtgccgctaatctccaccttagcatccagcgccatctctcttttggccacgtccgcgaaaaactta

SEQ ID NO: 249176 - DNA, 351 bp, Gossypium hirsutum
gttcatacatcaaactttcactctttctttctttactttagtttcctcgtctcgctttcttctttgctctgctccttccaccaggagcttggttttgtgcatagaagagggaaaactggattgatttaaagaaaaaagggggaaaaatactttggctgaaaagctttagttttgtttgaaatggaaggagggtcctccttttgtctgtgtacctcctaatggccctttcctgtctgggttttcaccatttttcccttttagtggacaacaagtatcccaacctacacctgaccttaaccaaaattacttaaattcaactgctgttccgcttcggtcagttagagccgaacc

SEQ ID NO: 249177 - DNA, 354 bp, Gossypium hirsutum
caaaaactaagaaaattccttttttttttcttaacaaatttcttgaaaactatggtttaattaatgtttcgttaagaaatctcgaatttctatcagttttccagtttcaagatccgatttttctccattttcgaataaattaaggaaaaaattcagggtttgaattttgaaagaaaaaaaagtttttttttttttcaatcttaaggctctgtttggtggctcatagccgaattttgtaacaaatggtagtaaatgtagcagcaaatttgcatttacatttatcagagccaaaccttacccactcgtcggcggtaatcccttcaccttcatttgcaaaacggtgccgtaccgacg

SEQ ID NO: 249178 - DNA, 358 bp, Gossypium hirsutum
gccactcgttcggaaatgaataatttactctcttaacttgacaatcaattatggattgggttgtcgcctggacgacccatcaccatattaggcgcatgggctataagggtccctcactgaacatcttttacattctaatccacctgatccatggaagggagaatctgctgcacttatagtgccgtgatcgctcatcttgtgcacaaagagggtaagaactttgtgagtggtatgctatgccccaatacatcggtgcagaccctgtagagatgttcaatgatgaataactcagctaggacaaatatactgactcagatgacgaggtaatagctggtatagctcacccataagctgatat

SEQ ID NO: 249179 - DNA, 360 bp, Gossypium hirsutum
cccacgcgtccgaaatccaactagtttcactaacatgggtatggtttttggtaggatcacagtggaaacaccaaagtatgaagtggttcaatcctcggctgactatgaaatccgaaaatacccacctgcagttgcagctgaagtcacatacgatccatctcagttcaaggggaataaagatggtggcttttcgttgttggcaaattacatcggtgctttaggcaatacccaaaatgcaaaacctgaaaagattgcaatgacagctccagtgataactaaatcacctggaaatgaaagtgaaaagattcccatgactgctcctgtggtgacaaagggtgacaacaataacatggttaccat

SEQ ID NO: 249180 - DNA, 353 bp, Gossypium hirsutum
cccacgcgtccggacgattgaaattgcaccggagatgcgtcttcatgagggtggcggaaatagcaccgttgagcaacgtgactgaaccttgagtagatctgacactgaagccgaggccgaaagctccgaccacggccacgcaccaccgaacgtcccccacgtgatgaaacatccacaaccggtgacgagtcttccacttaatattcgcggcataaacaacttctttagccgcttgcacctgacgattttcacactcgatcagcgcatcgacaagacgctggaaaggaagagaggtcgaagacagtgtagcagacgacaccacggcgtcaaactccgagggaagaccgggaagt

SEQ ID NO: 249181 - DNA, 359 bp, Gossypium hirsutum
cacactccatctcaaaaaagcgatttaaattttgactgagtactaacccgaggtgtaggtgaccattaaaatgaacacaaaagccaatcaaatgctattgattgaccaaaggtcgaaccaccccttccactgccactgccataaacatatccctaaccctttgtctctgccattgatctgactgacgactatgacctctcttctgctatttctgcaactaccaaaaccttttttcgcaatgcttataatatattcaacactacaagcctgccttctctttctataccaaccacacgcatcggccttacaaagaacgcaccgaccatacccactgctcttaacacggattctccctctac

SEQ ID NO: 249182 - DNA, 352 bp, Gossypium hirsutum
cccacgcgtccgaaaaaaatagtttggcgcaaagctcagagctttagcggcgagcacaagctacaattcatcaccgccaaatccaattaaacaacataagtatttgcctgctagaatcatcgaacctgtaagaaatttcccttcttttttttttcttcttgtttgaatccgtcacgatggacccactttccgccctccgcgacttcacaatccgaggtgagctcgacaaaatcgtccgagtcaacgacgagttccgatttggcaccgagtattccttcccatgttccgccgaaaccgcctaccgttccaagcaaggcaacctctacaaccttgaaaccttggttttctacat

SEQ ID NO: 249183 - DNA, 354 bp, Gossypium hirsutum
cttagccctgctgtcgctttatgttcggggcccgaggcaattccagagtcttgagctcaacgactttccccccgacatttccccggccgaatccgctcaattagaacgcgaaacggaagaaaatgcccgggaatgtgatcgcttacacaatgagatatttcaaaaaactaaagaaatagctcgggcggcgggagtggacgataatcaaaaactggagaaaatcgtcgacgcggtcaagtttctttccgacgtggaggacttggccgaagaggcgcgaatcccctatctccatgagttcaaagccaagatcgagaacaaagaaacttggttcgagatcgataaggaaatgaagcg

SEQ ID NO: 249184 - DNA, 344 bp, Gossypium hirsutum
cccacgcgtccgccaacgctcgcgttccatttgtagaggccgcaagctttcctcgctaagaggactttgggggacagaacctagtactcccaatatgagagcctcctgataatcaacaccaacccagaccaaaaacagctgctgatcgtaccttattagacatggctaaaatccaaactcttaaatctgcttttgaactgactgatcaggcggccatagaccggaactgatgcaatccataccctatgactcaaagcgcttaccaggctgctgagatcattgcatctggcaagggtgacaggctcagctatataggagcagaggacagtttcttggatgctcat

SEQ ID NO: 249185 - DNA, 355 bp, Gossypium hirsutum
attcaacagctcgttggcattcaattccatttcattcatcaaaaaaaaaagaaggaaaaatgaagaaccagatgcttaaacaagttattggagtaccaatcaaagcagcaacttatagagttgagagaagaacatcaaggcaatacttacctgatgctgctggccaataccacgtttcatcacaagggtgtacaaaaagcaaaggaaactttgtactcaaaaggatgaacttgctagggaagaaagccgatatgttcgcccatggagtccgagagcatgtgagactggggccaaagatcagtgaaacagtgaagggaaagctgagtttaggggcaaggattcttcaagtaggagg

SEQ ID NO: 249186 - DNA, 358 bp, Gossypium hirsutum
tcgcccacgcgtccgcccacgcgtccgttcttcttccttatcacaacaatatgttctgccttgctctctgcccatcaacctccgcctcttatccttatctccgttcgttggtcttacctccgaatctctatctcgtcatctctgttggatgactgtcgttcttaccaaatctgtaagaaaccctaaaatttggctttccattcctatcaagaatgggtaagggaaacaaagaagggatatccaagcaattcaggtggacaaaactgatagaatatctttttctcgaaattctaaaagaggaggcccagaaaggaaataaaccttcaaacactttcaaagcagtttctattaattaggt

SEQ ID NO: 249187 - DNA, 318 bp, Gossypium hirsutum
cccacgcgtccggccactcttagtttgacacgaacgaagagcatgcttgttccgtctgatatacaaagcctgacaataaactaggactggacgaaatagcaatgcccagaaattcatcgtaactcaaaacaatcaaacaggtggtgaaaataccataatggctctcacgaaaataggaccttaccactctattaatcaactcactaacaacccttgcatacaccgttacgcatggaacacatacccgatgtaggcggccatttgggagccatgtaaatggtcataagcaagcagggatcacaagacaatatctctggc

SEQ ID NO: 249188 - DNA, 209 bp, Gossypium hirsutum
ggtcaaaggaacaatgtaggcattttaagtcggcaaaacggattcggggggtggttaaaaggaagggctttgaggtcttgacacgggggtaccagtccctaacccgctggttgccggcgcactgctcgagctgttcccgagacgagagcggttctatcacatgccggccgttggacggactggtaacggcttctttgggggcctttcct

SEQ ID NO: 249189 - DNA, 176 bp, Gossypium hirsutum
tttcgactcctgagatccaaaacaccaagttcattttcccgtttaacctacaccattgttgaaatttatgtccctttcgaggtatttaccaaaggctctcttaaatatgaggagaaagatggtatagattattctgtcttcacattttatctttcttgtggtgagcgtgtgctttt

SEQ ID NO: 249190 - DNA, 209 bp, Gossypium hirsutum
cggaaaaaccggggcgacccacgcgaacgaccaagcgaacggggaaaggaaccaagcgaacggaacaggaacaaggagaagacgagccgaagagacgggggaagcccgaacgacagcgcgaacagcgcgagcggcgaaagggaaccggggaaaaaagacggaaccgggacgcggcggccgacggcaacggaagggagaccggagacgaa

SEQ ID NO: 249191 - DNA, 146 bp, Gossypium hirsutum
tccactgcgtacgagaaagttacatgtttacaaccccactaacattaaacttgtgatctatatattctatggcaaaacccttcagcttctgacattagaacctaagaaaaaagagtttaattcattttgaatttggtctgagattg

SEQ ID NO: 249192 - DNA, 295 bp, Gossypium hirsutum
tcgctcacacgttcgctgacatttgtttttctctcttatcaactccactaccattattactaccattatggcttcggctactgaacctgaagccaaacccaacctttagatacaggcaaaaggaaagggtgttggattagcatatttctaaggctttcacatcttctctactatctggacatttgccaggaaaacctttgtagatctttcattcactctctgcttctctaacataggctctatggaatgcaacaatggcgggttcacgaaaggtatggcataggcatatctaaag

SEQ ID NO: 249193 - DNA, 418 bp, Gossypium hirsutum
  unsure (1)..(418): unsure at all n locations
ccggnnggaaaaanggggcgacccacgcgtcgctccctatgcagcgggcccactaggtaacggccctttggttcgctgtaatcccaatcgggccgaatcggttactcccctgtaccttgattgcgcataataggtaatacgccccctcagcaccgattacccattccgcgtttttccttgtctgctattccgttttttgccctcgtcctcaacgttctgattctcggacgcctacttgcacagctaagcaacaatggcggggatagcaatattgctagatctatacaggaaaaacccaagcttttgctcttaaccaagcttccactcttctgggttcttctctgcctcagctgccggcacatcaaccgccgctactgtctttgctggaaccccttttgcctccaggttcctttttggg

SEQ ID NO: 249194 - DNA, 159 bp, Gossypium hirsutum
  unsure (1)..(159): unsure at all n locations
taaaccaatcatccttaacttttttttttagaacatttactgcgcacccgggggggattatagaatcggcgtgcgcacacanattcacacaaccaacaattttacccttgattacattgaaaagcttgatgacaccttccactaccaatccattgactt

SEQ ID NO: 249195 - DNA, 275 bp, Gossypium hirsutum
tatcaaccattttttattccatgttttttttcctcctattgcgtgagaaatcaggtctgttttgtttgagcactgaatgtaaccaagtagattctgaaacaaatattatacatgtttttcactgttggcttggctgtaatcatttattttatgaatgctagggaagagactgagtgccttttcttattcccttaatttgaggatctttgtttattaaatgaacttctagctatgatatatactggtgtctggtttattgagaatgattttatgta

SEQ ID NO: 249196 - DNA, 393 bp, Gossypium hirsutum
  unsure (1)..(393): unsure at all n locations
accggccggaaaccggggcgacccacgcgccgcagagagccaaancacaaaaaagcgaggcaacacagagaagcccagaaggaagccgcagaagggggggaaaagggccacaagagagcaccacgcgaccagcaccggcacaaagggcaccacgcggcgacaaacgcagggacccaaccgccccccaaccaagacgaagcgcggaaccgggaacgcaaacccaggcgcaccaagagcaaanggggaaaaggacgcgcgagacacgagggggcgaccccagagaacacaaaacccgaaaacagcgaacgaggacggccagaagaaagagagcaaaccgaggaagacaacggaagggcgcacagaagacgaggggagagcacgcgaaaagaggcg

SEQ ID NO: 249197 - DNA, 334 bp, Gossypium hirsutum
  unsure (1)..(334): unsure at all n locations
ccggaaaggaaaaggggggggacccacgacgacgaccacgcgaccggcggaagcaagacgcagaaccggccaccagaccaancgggggggaagcgaaagaggggggggggcgagcacgnacacggacggaagccggncgggacgagcaggacgagcaggacgaagagcaccaggggcacgcgccagccgaacagggagacaggcgaaaggggcgcacgcccgacggggaggagcaagacgggacccagggagaagccggcaggacgaagagaaggggggaaaaaggccgcacagcaggagagaaagacagaaggcggggggggggggcggaccg

SEQ ID NO: 249198 - DNA, 389 bp, Gossypium hirsutum
gaaaaaccggggcggcccacgcgatacgtccactcgttcgattaaccctaatttttttttccaaatttggttgagaagaaatggggagattaactgatgaagcccgcctgagatcctttaatttggaaacctacgaattagctttacacagtttatgccatggccttatcttccacgcttttttccaccaatattaaccattaacgcattgttcttggcagttttctctaagattacacttacagagttgacataatctcatctgattcagatatcctctttcttaagacctacccaaagtttgtctttgaccatccttatgcacttatcaatctcattttccaacccatttcgtaaatccgttttatcctttttttctagtttcgatc

SEQ ID NO: 249199 - DNA, 156 bp, Gossypium hirsutum
aaaaaaaaaccgggcggcccacacataacgattgatggatacttatgaaaaattgtttttttctcatgctaaagtacaatggggggggacccaaatgtgtggcggggcttaaaaatgctttctcaattgcaagattagttggatgcaacaagaatg

SEQ ID NO: 249200 - DNA, 242 bp, Gossypium hirsutum
  unsure (1)..(242): unsure at all n locations
ggcaggaacgggagggggggggcccaaaggcgcaaaaaaaagagacgaagaggaacacggcgcggcgaacgagccgcagaacacaaccgaggacangacacacacgcgcaaggacgacagaggccacgggcaaaggaagcagcaggaacccaaaggcaaggaaacggagacccacagccagggggagaagacagacacgaggacacgccagcaggaacccaaaaagagaaccccaccggggc

SEQ ID NO: 249201 - DNA, 173 bp, Gossypium hirsutum
cccacgcgttcggaagtcgttatttttgatccgtaacctcggaaaaaggattggctcttaaggctgggcacgggggctccattaccgaacccatctgctgccggcgcactgctctagctgctccttcggttagagcggatcgtctcctgcctgccggcggacggactgggaac

SEQ ID NO: 249202 - DNA, 246 bp, Gossypium hirsutum
cttctcccatttgtttcatggctcgagaactggcagagggggggcttaatttattttcaactcagtcttcaagttatcctaaccggagctgtgctcctcctcataagtgcccaattctcaagcgactctgctattatttttatgattcaagaattttatgtctaataaatctgtcaacttttgtgctttgttggtaaagtttgtgtttgatttgatgagactgtgatgtaattttcttctctttga

SEQ ID NO: 249203 - DNA, 290 bp, Gossypium hirsutum
  unsure (1)..(290): unsure at all n locations
gcccacgcgnncgnccactcgtccgcccacgcgtccgtttatgggcctggaactttagccaagcaaagcgcattatgatacttacccggagctcaagagatatatatagcatccgcattgcatttatggcataaaattactctgttttttttctgtgggaacatgtttctgtttcattgagttaaaaggttatgtaatgataatgttggctactgctgccttttcactgtatattcttttcttaaaaacgatttgctgatatgagtcttcataaatgaacattaatcaat

SEQ ID NO: 249204 - DNA, 381 bp, Gossypium hirsutum
ctcatttcaaggttttagaaattgggtaaaccaaaaaagaaattaagctcttaaccatggctgccatcaatccagcagtagcagcaccatattctatgggtgttcatagaaatacagcgacccaaagccacaaagttatggcggctgccaatccagcagtgaaatacggacgtgcagcttcgattctttctacacccacacagacacagtccccattactacgtagaaattcggttcccagcagaagctcagacacgagaatcatggctgccaaccctgaagttttgtcgtcaccgtcgtcgtcaaattttaatgggggttctgatttttacgcagtgccagtttcggaaccgttacggtcaggatttaaagctggaagac

SEQ ID NO: 249205 - DNA, 312 bp, Gossypium hirsutum
  unsure (1)..(312): unsure at all n locations
cggaaaccccgggcgcccacgcgccgcccaccgccgaggcnaccaagcacaccaaggcgacacaccgagagggcnaaggncgccggacaagaggacggagccccaggggcanacgggaccccgccaaaggaccccggaaagaccaggaccccagcacaccgaaaagcagacaacccgacagcaacacccaagaaacaacccacaacggcgacccacaaggaagcccgagaaccaaacacccaagccccaaaagcacggaccnggcaacccccagccaaggacggagcgaaccacgacagggggaacgaaggg

SEQ ID NO: 249206 - DNA, 192 bp, Gossypium hirsutum
atcgaccactcagtttaacttatttttttgctcatggaagctctcagctcggagcgccttttaccttctcttgcatcatttcttctaaaccataatatttcccggctagaatcatacgctctcccactccattccaaaaaggacctgtactcttccgttttccaattacgttcctaacaacacaagtattct

SEQ ID NO: 249207 - DNA, 302 bp, Gossypium hirsutum
ggggcgacccacgcgttcggtctctatcttagtcatggctttatttcatctccaccgtcgctgccgttgtcggcgtcataccgagctctgggagtgttagtcccaaccttagctctcatggggaagaaagtgagctcaagattcaacagcaccagtcatgttcctacgtgaagttttaaggtgatggctgcgtgtaaagagatagtcgttgcagacacctgactgaaatggacctatggataagggttggcttactatattttcggaccatcaacatgccattacttttaggtaaagggttg

SEQ ID NO: 249208 - DNA, 377 bp, Gossypium hirsutum
cggacgcgtgggctagggtttcggcgccgcagctctgtggcttttccagtcccgtgtgcccttttggttgacttgcaggctaccacggcaccacgcgcgccttcatcatccgtcgtagctctgaccggatccccaaggatccgtttggccttggacggagaggcaactgtcgattaagtcggcgtcgatcgacaggtacaggggtacggggccagctgtggggatatgtggcactcgacgtggggtgtacggaggcgttgaaggcggtcgtacggcgcgaaggctggggctcgcctgcggttgcggcgcaaatgtgaggaggaaaccctagggtttcttttctaaaaacattgggcctatcgggcttgtaatctggg

SEQ ID NO: 249209 - DNA, 156 bp, Gossypium hirsutum
caaagggtgttgcaggcggtttttaatattttcagcctctatcccttccatggcatctacttcaagcaaggtcccaaatgggtcagatgcgacttaagactatcgtcaacactaactcatcggcgaatatctattctataacctcagggtttgatc

SEQ ID NO: 249210 - DNA, 157 bp, Gossypium hirsutum
gaattatgctgtataaccattttttgccccagataaaaactaccactgcggggggtatattacccacgatgcacctcattttccatattctgatcagctccccgcggccgcagatgagccaaaaccccatcaatagccgctacttgacaacataccc

SEQ ID NO: 249211 - DNA, 223 bp, Gossypium hirsutum
tttctatgactgaaaaaaaaattccttattcttttctttccttctaatctctccttatctccacatcctccgtcatctccgccgtcctccgccgctacgagtttcgattcgttatgtgttgtaagtttatcgatacgtgcttggattagagtataatagtgtttgggttttgatttatctgatttatttataagatgttaaaaaaatatggagttgtacgtgc

SEQ ID NO: 249212 - DNA, 258 bp, Gossypium hirsutum
ataggaatctaggttcttcattcttctcgtcgctttctccttttccatttttctctttgccttcttcatcctcttctctcctcccaattatcttacccactctctccctccttgccctttctctttccctttcattggcaactacttttttctccgtatatctttcttcgatttcgtgccaatactccgcaaccttcgcttttagtatggttccatggtcactctccacattgttcctcgcccctccttctatgtctc

SEQ ID NO: 249213 - DNA, 246 bp, Gossypium hirsutum
  unsure (1)..(246): unsure at all n locations
cttttnagagcacgcccacatggcagaagtcgaagttcctttgtagctagaatccgaaatcccctccgaccctccgccgccacccaccgatgccgccgaggataaatccgagactccacctcctcctactgaagataagcccgccgactctacggataagcctcccgaacccatcgaaatggcggcagagtcgtcggtgaagtatagcacggtggagtctgttgatcgtgatgctgagcttgcttg

SEQ ID NO: 249214 - DNA, 313 bp, Gossypium hirsutum
  unsure (1)..(313): unsure at all n locations
tattagtattcatatttatattttttcacacattnttatttcacgaatgtatatattcttacttgtttattatcttacaattttttatacctatatatatatacatatatatattacttttgcaattttattcatttatttatttatatttncattattattttgaatgaaagttttaattttattcccttatatgcattgatatttaatcctacaaataaagggcttaaatcacaactatctgtacatgtatatactatactacatttctatcttttcctatcataatngcatatacattactactttttat

SEQ ID NO: 249215 - DNA, 214 bp, Gossypium hirsutum
  unsure (1)..(214): unsure at all n locations
ccctcgcgtccgcccacgcgtccgtttttttntttggcggaatcttttcgtatgatgcggtttttatagttgattctccggatatggtgnttgcttactggccctgntgtcatcctctgcggcgttgtgggagcctccgtcgttgctcactttctctttgttgtcgttccatatcttaaacctaagaagaatactgattctcctccactaacct

SEQ ID NO: 249216 - DNA, 217 bp, Gossypium hirsutum
tatatttcccctagaagtctctttctatccctactaatctctcaatatctattttgatgccaaagctggtgacccaagtgatccccaaggcttcatcctgatcattgattgtaagctcctcctgctatcctttcttctccgacttatcggcttcatctctccaggccttctctgcggctcttgctctttcttccatccttctttctgctcctctccc

SEQ ID NO: 249217 - DNA, 133 bp, Gossypium hirsutum
tccttcttttcttcaccggcactgggcccattgactacctctttgccctcctcgccgatcctggtcttgccaccatttttgctgctttctccccctagagagcttttggtgggggaacccttactgccttgtt

SEQ ID NO: 249218 - DNA, 313 bp, Gossypium hirsutum
  unsure (1)..(313): unsure at all n locations
catatgttagcatctaaacccgaatcttctagagctatggatatagataactctgcggcaggattctgagggcttgcatcaaacaataactagagtaagcaaagagcatctgtacacgttgtaaacatctaatctttgaatgtactatcataacatgagtgctccattagaaaaaaaactagaatgatctgattcacattgttcatggagatttgngaatcatacattatgttcttgaaaagggttactgaacatcgaaaacgatcagtggaactttgactgatcattnnccattttttttttttttatattt

SEQ ID NO: 249219 - DNA, 201 bp, Gossypium hirsutum
gagtgactctttagtatacctgttgtttatagtaatagttagcagttattgctttggcctcctccatgatctcttcggcaaccattgccaccgagtaccgctcctccccggcacaggcctatatggtggcccccttctccggcctcttatctgcctctgctttcccagtcaccaggtatgccttcttcgacttctcttctt

SEQ ID NO: 249220 - DNA, 255 bp, Gossypium hirsutum
tggcattcccttggtgctctgtcgtgtctccgtcatcgggttcccatgcgctctcgcgcctccgctgacttcgccgagtacggcggtctgtattcgtagcgtttcgccttttctacaggaaaaaaagagtaatctcttttatttttttttatagtatttggcatgcatgatacgtagatttctttgtattgatattggatcacctttgttttcagacaaagtgaagaattctgtaatattctcttgtgctctttt

SEQ ID NO: 249221 - DNA, 206 bp, Gossypium hirsutum
acccacgcgtccgagcctaggatagtagcacaacagatattatttgttgtcggaaaagttttgaaaccagtcatagatgctggggtacctattgcccagaaagctggagaagaagcattgtaagaggcttttccagctatatccgaagcttctaataaagccctagaagcatttcaaggcactgggcttgacactgaacctgttct

SEQ ID NO: 249222 - DNA, 145 bp, Gossypium hirsutum
ggcggtgactcagatgccgacaacaaaaatcatagtaatagcggtgattttgtggcgttaggaggcttgttcgaacccattgtagaaatttcggagctaacctcgtgacctgaatcgctttgcgaactacggtgccgtttgatgt

SEQ ID NO: 249223 - DNA, 151 bp, Gossypium hirsutum
gagtgaggattttatcgaacacaagcatgtagattctgcaactttttcgggattctgcgggatctataggcaaaattgacaccacatcaccaactgcatcgcttatatgatgcctcggatcatttttaccaaacaagggcccatgcgatgt

SEQ ID NO: 249224 - DNA, 324 bp, Gossypium hirsutum
  unsure (1)..(324): unsure at all n locations
accgcccgaattccgggcgccacgcgncgttttcccttccttcaacttcttctctatttccgcatggaaatagctctgctttccttcccttctcaaacccccgctttcaaaacccttctctaaaacccaccgcccattcctcgaccttcaaacccaacctccttctttagaccatccccattgccttcatcagagccgcatttcccgaccaagaagaagaaaccgtcgaactgtcaaaccgagtggagaactgtacctcttggcagccgcgaatacaaggcttaccggaagcaattcaggacttggccgatcgcttccgaaacg

SEQ ID NO: 249225 - DNA, 264 bp, Gossypium hirsutum
  unsure (1)..(264): unsure at all n locations
cccacgcgtncgnccacgcgtncgnccacgcgttcgcccacgcgtncgctctctctcaaaatcatactagaaaagagcaaaaaaggtatagagcaagtgaacgttgtttggacagtgctggggggttggtgtgtgcgctttctattatggatagctatgaagcaaccagaattgtgttctcaagaatccaaaaccttgaaccagaaaacgcttccaaaatcatgggtctactgctgattcaggaccatggggagaaggagatga

SEQ ID NO: 249226 - DNA, 302 bp, Gossypium hirsutum
  unsure (1)..(302): unsure at all n locations
accgcccgaatcccgggcgaccacgcgtccgctcaactctcctatcataatcctttggtttttgtttttaatttcgatgcccccgtgattgatttgaaagatggcaaatcaccaccgtacatcaagaatcgacgtcggcggcggaagcccaatgtttggaggttttggctttactgttagattattggcttctgccattactgttgcactctgnttcttctttcttctttcttttttctttacttctcactctcattctcctcatctccaaaccaactttggtttctccactggaattggat

SEQ ID NO: 249227 - DNA, 233 bp, Gossypium hirsutum
gtggggtggggggggggtgggggggagcatatatgcagttctcacattaaaacgagatctgtctttggcttgttattgcaccccacatagtttggagtttagcgattaagattctgatggaagcagggcaacataaattttggtcacatggatgatgcatggatatttgtctttcatccttgtgggaatgtagcattgtcaaatcatctgcccagggaataactctttgtccc

SEQ ID NO: 249228 - DNA, 388 bp, Gossypium hirsutum
aaggaaatacatttttttttcattttctggtttcagggttgtggttagattcgtggaatttgttgaagtgaacagtacatggaggactgggaggatgacattccgcctcttgtttcaaaggagcaacctaaaagcaaatgggatgatgaagatgttgatgatgctgatatcaaggaatcgtgggaggatgaagatgaagaacgtcttctgcaacccgtagcaaaagctactgaagagaaggcccccaagaaacccttatcgaaagctaccgaaaaaaaagggaaaactatcgaaatagctaaagaagagccccttgatcccattgccgagaaacttcgccaacaaaggcttgtggaagaagctgattttaggtcgactaccgaacttt

SEQ ID NO: 249229 - DNA, 348 bp, Gossypium hirsutum
cccacgcgtccgaacgtgtttgcggctcttgaaactctacggaagaagaagaagtctgataaggaccgaggttcttctaaaaagtcttcttctaagtctcagcaatcacaaccgcaaaaagaatctgaaccgcaggtcttttgggctccggcaccgcttaatgtcaaatcatgggccgatgttgatgacgatgacgatgacgattattatgctacaaccgctcctcctcagtcggtttggggatcctccgagccgtctcatgaagataagaccgtcaacgaagaggatagtgagagtgaagaagatattttagatgaaagtgatgatgatatagaagaagatcatgat

SEQ ID NO: 249230 - DNA, 213 bp, Gossypium hirsutum
accgcccgaattcccggctgaccggccttcgagatttgcaggcaatcgcaaatgggccagcctttgcgcgggagtgcgtggggagttatggaggtgaaaagccatctatatgcaacatgcctcgttacaaagaagatccgccagcggtttgcgtgtatacagtgtcggacgcatcctaatttttgattgtcacgatcgttgccacattgggat

SEQ ID NO: 249231 - DNA, 386 bp, Gossypium hirsutum
  unsure (1)..(386): unsure at all n locations
cccacgcgtccgatccctagctttttcccccttctaactgtcggttcatctccgcacaatggtgctctcaatcttggaggaacctttcatccttggaatctcttttgattcgatttcaacgaagcaaagagaagaaatctatggcctattcgcacagtaaggtttttattttcttttgtttttttttctattttaaatgcgaaaaaaactaaaagaccaaaagaataaatcgaaaagaaaatcaaaagcctcaagaactttgaattagaaaatcatcttttaacctttattttagtatgcgtgtgtatttctgggaaaaaaattcccatttacatcctttttattctggtttatagccgnaaaattaattaattaaattaaaagaa

SEQ ID NO: 249232 - DNA, 302 bp, Gossypium hirsutum
  unsure (1)..(302): unsure at all n locations
gtttcttagcattgcgcaacactgcaactcccgcgccccttctttcactctcacactacatatggggttggcttcagccaccaccatctcctcctcctcctcctccttgctctcctcctccctatgccctgccagaagaggctttcttctgccctgccatcatcacttctgcttcctctcaacttttagtaaatgcaatttgaattggaaaagatcatcaggaaagaagagaggtgaaagagtaaagtgtagtgcantgggagtgggagtggaagatgaagcatgtgaattagtgaatggag

SEQ ID NO: 249233 - DNA, 269 bp, Gossypium hirsutum
tcctctacagagcacactgtctatgcaccctcaaactaagaaaacagcataaatggtgaaagtagcctgttacttcgctatggcatacgccgcctctatcttctggcagaccatggataaagtccacgtctggatcggcctccaccaagacgagaagaaagagagacttgagagagaagctggggtcaggagactgatggaagagttgcttcagcatgccaagcagaacgatcgtctcccctaaattctgcgtacaactccctcttcta

SEQ ID NO: 249234 - DNA, 340 bp, Gossypium hirsutum
gtgggaaaaacaccagttcaatttctaagctaagtaacaatggcttctctccctagattttcctttgttccttcaaaaacaaggatttacgcaacagcagctgcaaaaggtgcaggtggaggcaaagaagagaaagggcttttcgattggattcttgggaacttgcagaaggaagagcagttttatgaaactgaccctatcctcaagaaagttgaagaaaagaatggcggtggcagtggcagtggcactaccagtggtcgcaagaactctgtttcaatcccttagaagaagaaggacaatgctggcttttggcttggagggcttttcaagaaatgaaaga

SEQ ID NO: 249235 - DNA, 418 bp, Gossypium hirsutum
gcacatcttgagcatgacaattgtcggaggagatcacatgttgaaggtatgaattttctacttggttgaattagttacgcactactcaatagttgtaaatgcatcccatttgtattccaataaatttttagttttccaacatataatcttgaccgaaatataagtattcatctaaacctaacctttatttctctcttattatatgatgtgagaattttttgttgaattatgtaataatgcttaaattaaatgtaacaaggttttggatatggtcacttgcaacttgcaaggtggaccatcgaatgcgcgaactttttgtaaccagtcatcggataaagactctgtcacttcggcatgaattgtcaaatcattgtttgaatggtcaaattcgttaagcattttagaagaattttgtcat

SEQ ID NO: 249236 - DNA, 411 bp, Gossypium hirsutum
aagatggaaagatccatctgtgcaaatcctggctatcgtggagttcacctgagttgatctcagtttctcctttggctgttgtgagcgggcaagaaacctctcttttagtgaggggtagaaatctgactaatcctggcaccgagattcattgtgcatacatgggtggatactcatcaatgcaaattaatgggtcaacatataaaggagcctcatatgatgaggtaaacatgggcagttttaagattcaggttccatcaccaaaagcactaagtcgttgcttcattgaggtggagaatggattcaagggaaacagttttcctataataatagctgatgctgccatttgtaaagaattgagacttctggaatctgaacttgacacagaagctaaagcttctgatattatttctg

SEQ ID NO: 249237 - DNA, 412 bp, Gossypium hirsutum
ggacttctgtctggggcttcaatgcctgcaaggccatcgcaactagatccacaaccaccacagcaacagccacaacaaccgcaacagcagcagcaaagtcaacagcactccttgcttcaacaacagcatcagcagttccagagatcaccaatgatggttggatcaaatcctctctcacacttgaatgccattgggcagaattcaaatatgcagttcaacaatcaaatagtcaacaaatcttcagttctccaacttcagatgatgcaacggcagcagcagcggcaattgcaccagcagcagcagcaaccacagcagcagcagcaaatgcagaggaaaatgatggggctaagtgcagctgtaggtatgggaaacatggtcaggattgggggcctaggcaatgccactggaatcg

SEQ ID NO: 249238 - DNA, 407 bp, Gossypium hirsutum
caaaaatggacctttcttccttccgcttgctttttctcctctctcttttcgtaacccatctctctttctctcatgtcctcgctgattcccactttgaaggatttgacgccgaagaggatgaccctgttgaagatgacatcttaaatcaccattccatcccatcacctcctgtaactcagtccgactcacggcccctttcagatcttgaaaccaaatcccatcctgatccgaatcctgtccccacttcggatcctccgtcccaatcggatcttcaaaagccctccactacttctttcgactactgggatgaggacgagttcgagggtttacctatcgaacaaccaccacccgaacctccaaaagttactgaaaccgctacttccgatgacccagaatcgaaaacaacc

SEQ ID NO: 249239 - DNA, 264 bp, Gossypium hirsutum
cccacgcgtccgcccacgcgtccgcggacgcttgggctgaatccggctttgcatacgggagcttgaaccctgatgcggataaatttgataattacattttgagatgggagaaacttcttataccaccaacaactctccttattataagacttgatgggggatgtggcaaggatattcatagccattaatagtggctaccaaatatggtgtccccactttggtaagctatttttagccttctgggtgatcattctacattaccta

SEQ ID NO: 249240 - DNA, 215 bp, Gossypium hirsutum
ccgacgcgctcgtgatggtgctggtaattatggtgggtttgatggggggtgtggtggaggtgatagtggttaccgctgtgatccccgaggagatccttctttccgatatgcttgccattctggtggccttactgggactcttataggtactgatatacgtacatatggacgctatagaagttactgtggaacatgccctagttctgacaataatt

SEQ ID NO: 249241 - DNA, 214 bp, Gossypium hirsutum
ccaccttcatttttaacatctcatgcataatcacgactttttaaacccaccaaaaggtggttttttaaatctaatttaaaacccatatcggatattatccttagtcccttattcaccaaaaattcctttatttctaatttcatggattacccaaattggccggtggacctttaaaaccggtggaattttgccgtccggattggtacccctccct

SEQ ID NO: 249242 - DNA, 419 bp, Gossypium hirsutum
cccacgcgtccggacgtcgaaaaaggtaacatcggaaaagaaaattgccgtcctcgaggccgtcgtcggaggcgttccttgatcgttgatccccgtgaagcgtcttcgtttatcaaaattgagaggatggataattcaacggcggagaaagggagcccggggcaagagcagcaggctgccggagtggggattcttcttcagattatgatgcttgttctttctttcgtcgttggccatgttcttcgccgccacaaattctactaccttcccgaggccagcgcttctttgcttattggtttgattgttggtggacttgctaacatctccgacactgaaagaagcatcagggcgtggttcaatttccacgaggagttcttcttcctgtttctgctacctccaatcatctttcagtcagggtt

SEQ ID NO: 249243 - DNA, 422 bp, Gossypium hirsutum
cccacgcgtccgatccgaaagaatcgtgttgcatcagtttcttcggatattttctgtccagttacctgtagtccatttccttctgttgccatccctttgtgcacctgcaacgatggtccttgcccctcgtttgaaagtggagagacagaaatgcaagatggatctccaagacgttcacaatctacatcgatcgagcaggataaaattgaaggaccgagactggagagaacaacctgttcaaacatgttctggggcaggaggagctgcagtagagagcatcaatgcaattcagaaataaatgcttgattaatttcatccgtggttgatcgatctattctacagagaagcttcattcttaggttccattctgagatgaacaattcccagtctgcgaacagagctggatttacgacagggacaat

SEQ ID NO: 249244 - DNA, 333 bp, Gossypium hirsutum
gaaatgggaccctgctgcgtgcgagagtaagagtgagagcgatagggggatcaatcattggggttaaggtgcatctctgtgtcgtgctgcaccagagaagaacgactaacaaccggatatcaaagtgtttctccagatcgtagcttgctgttcaacggacatagattgccttgtcactcgacatggacaaatactaaataatatcctatataaaatcaattactctcagagctcactatagatcttctatgggaaccatggcggctatcagatttgttggagacgtacgcaaagttcaaaagaattactggactagacactctagtgatccta

SEQ ID NO: 249245 - DNA, 422 bp, Gossypium hirsutum
cagactgcaagaatcaattcagaaggccaaaaagtacaaaaatttcatcatccccatcacctctggattagggtaattactgaagtgaagcgcaaaagatggcagaactgagccttggtatacttatagatattgttgatgaggaatggatgagagatactctgcctgatgacgatcttccactgccacctgtaatggttgctcgaactgatgataccgaagactcaaatcatgagactcaacaagtggatgacaatacctggcatgatcttgaattaagtactcaatgagggtattggatgctggcaatgcttggtacctttgtatgaaaatggtactcccatgacttaatttatgtctcattcttgatatgttgtagacctaagttatcattggatcatttaagaaggtttgttcactca

SEQ ID NO: 249246 - DNA, 219 bp, Gossypium hirsutum
cccacgcgctcgtgatggtgctggtaattatggaggttatttatggtgggtttggaggtggttatcttgatgacttaattgattacaaggaaagatactactacacagtatgattgacatacatttttaaatactaggaacaaatataggaaccgatatacatggatgtagacgttaaagaagttactattaaacaggccactgatgccaacattattt

SEQ ID NO: 249247 - DNA, 267 bp, Gossypium hirsutum
ctccaagtcgaagtctaagtcaaggtcaccaacatggtcacgggattcaggcagcgaacagtctaaaagtgttgttgttgttgttgaaaagaaaaaaaaaatgaggaaacaccgttggaaattggaattattattaaattgaagaaagtgaattttgttcttaaacttaagcttagtgtgaaactgattttgctacttaagcttgaaccggaaattattggaaagagtcttgtcagatagaaattgagaatttttaaagtgggatta

SEQ ID NO: 249248 - DNA, 232 bp, Gossypium hirsutum
cccacgcgtccgaaaagatttaaatactaaagtccatgtcttagtgaaggaatgggaaatttattcatttattcattcatttggagctttgggatttgattatttattcctgagaaacaaaaatttcaagggcaattttgtttttgaaggcccaacttctattattgaggtgaagctttttatttatggtgtgaaaaaatggatgacaatgctttccttaactgacttttaa

SEQ ID NO: 249249 - DNA, 379 bp, Gossypium hirsutum
gaaatgggacactgctgcgtgcgagacaaagagtgagagcgatagtggtatcatgtaattgggcttaaggtgcatccctgtgtctgatgcaccagagaagaacgactaacaaccggatatcaaggtctttctccaaatctaacgcttgctgtcgaaggatcatacattgccttgcacactccacattaacaaataataaaaaatatcttaaataaaatcaattactctcaaagctcactatagatcttctctgggaaccatggcggctaacagattagtaggagacgaacgcaaagttcagaagaattactggactgaacactactgtgatcctacggtggaagctatgaagactcactccaaagccgctgatattgac

SEQ ID NO: 249250 - DNA, 318 bp, Gossypium hirsutum
cggactcgtggggaaacattttgatttcagaaactaactaagtcaaacgacttgcaaaaggggcatgctgtctgagaatctctagctctaccgtttactgaaagaaaacgtgatatgatccatacgtattcttttcttacagcaccaagtttgctgctatgcaaagcttgttcatgtgatggctgataactttttggagatttcctgtgcctccaccgaaacgacactcaatgataaatcatatgcaatggaaataaccacaatgatgtcctttaggggcatgcagagagaattaacaaatatctttaaaagttaata

SEQ ID NO: 249251 - DNA, 204 bp, Gossypium hirsutum
cccacgcgtccgaaaaggcagtacgtttaagagctcgaacctattacgggtttgacgaaattcctacgacggttaattacaattcagtgctatcgccgaaaatgatataagccttcttttaacgggattttaattatatccccgaatacgatgcagagaaccgacattgcttttggacccaaagccggattcataaaggcgatc

SEQ ID NO: 249252 - DNA, 419 bp, Gossypium hirsutum
ggaagtaccatactaaaagaaatctttgatgatatattttaattaagatatgttatcatgtatatgaagccctctctttcccatgtttttctcttgtgttcgagaataagagtttccactcacttgggtcataagaaaaggcttttatatatatatatatatatatatatatatatatatccatcaagtctcatgggacaaatgagaggtgtgtaagggccacgtgtagatcgtgtatagtctatgtgttcatgcgcaatggagacatacaacaacaaccccctgctcgcccacaaatgtgagtttagcggttgacagtggtcttcctggaattcaagagttgtataggtagatagagtttggagaagtccccatagtatgggagttgtagatggtatctaggaaaggaggagaggagc

SEQ ID NO: 249253 - DNA, 414 bp, Gossypium hirsutum
gatgcagacaaaccagctgaggaagtgaattttaccctaacatatgtgggagaaagtctagagaaattaacattggaaatgcaaaaaagcgaccaaaggatggtaaggattgaattttgagttttacagagcaaattatgacctgaaaatgaaagcatgtactgtctactaacttattgtctatcattttaatgaatgatgcaaagatgaagtctaatattcacttataacaatactcgtcttctcacttattcctgctgccatgtatgtagaacttgtcattcctttaatgagctgtctattttatcttttgcaaactatacattgccattcatttttgtttaatttcttcattcattctcttggttacatgtagttgttgagaaaatgctatcctgctactgtgcattcaag

SEQ ID NO: 249254 - DNA, 370 bp, Gossypium hirsutum
cccacgcgtccgcccacgcgtccgcagttttgtatcatttggaagtgcagagcaaagtgaggttgagttcaagaagtaacacactcttggtggcatgcgagttctcaagtagccttctcttttacttcaaattttggctgcccctgtttatttatttccatttttcccctctcaaaggcatgaacagttaatgaaaatggttgaaattttcatgcaaatatagttaactaagatttatttaatatacaattaaggttagtcaaaaggtagtcggtatagagtgggatggaactaggataggactaaatggaggaatgattgataattgtaataatgttaatttactccagaaagaaatcgtattgaatct

SEQ ID NO: 249255 - DNA, 280 bp, Gossypium hirsutum
cacgactcgtggggcccacaaatcaggggactggccggaaccgatagggccaacgacgatgaaactatggcggttgatcgggaatccgacggagctaacaatgaggtcggcggcatcgaggtttgttccctcgataatcgtgggatgggccggagttccgttcccaacaaaaaatcagactattcgacgagaattatggcaaaagatgcaattgccttattggatcatctgggctggagaaagcccatgttttgggcatttcaatgggggctatgattgc

SEQ ID NO: 249256 - DNA, 413 bp, Gossypium hirsutum
gggtaatcgaagctgtagagtaatgcgaattaggggttttgtttttttttctttcctttgaattttttctcacagatcggttttcgtggaaatttctgtgagcgaaagaattttgtcggattttgattcacttaagggaatagttgtgtactgcacattctctcaaatggtgttccgagattcacttaagcagccaaagatgaaagtagaaggtgtagaacatgaatcacctgtaatggctggtttgcaaagtcatgtctcattgcagcttccactgccttccaatcagaatttgagaatttcaccagatgattggcatttattggcatatcttctcttagttcataaaactaatacaaaaggtgttgggcaagatttgctggacaaggaagtgcatgctttaacttttggct

SEQ ID NO: 249257 - DNA, 309 bp, Gossypium hirsutum
cccacgcgtccggtcgaagatgtttgtttttgttggaccgattgtcaatgcatccttctcattctctgtctagtatttcttgtagtttttctctcttagaaattgaaacagagagtttaggattttgagaggtttggattctggtggaagagttgatgtcaggttgttctgctgcttggttctgtgtttttgcttcaataaagcagagaagaaattggtgctaattgctattgagtgagactatcatatgtaatctggaataagagtgtacttttaatcctaacatgatctgtggttttatattctgta

SEQ ID NO: 249258 - DNA, 406 bp, Gossypium hirsutum
ctttttcttccttttttcgattttggtttttttttccctctaggatgaaaattgatagcattaacaaaatccatgtaatctagaatctcaaatactgctaaaagaaaaagcttaaaaagactacccaaattttgtaatcttcaaaaaccaccacttctttatttttccaatccatcttgttttactttttctctctataaaattagaactcacaatattcttttattcttatagctctaaatccaatcacctttccattttcaataccattctctctaaacatatcttcttcgttttggtgtttcatgttaaattgttctcgacttatctacattgtctggttcttcatcacctgcttattctctatacagtatatacataatctcttaccaagccaagcctaccc

SEQ ID NO: 249259 - DNA, 403 bp, Gossypium hirsutum
cggacgcgtgggcggacgcgtgggcggacgcgtgggcggacgcgtgggtttttttctcaaaggattcatcctgatcctgattcaccaaataccagaaacatgagttttagtctaaagcaatccgctttagctgcatgcaatgatgtttcaaattcagttcttcagcgaagatcactttcttgcagatcttcaattttacctcctttggttttccaaaacaattcgaaaagaacaaatctttcactgtcaaagcctttgcatgtttccgctgttgagattattgggaaggataaagaacccgtgatcaagtgcagggcttatgaagctgataagtcccagcctattgaggctgcagctgaggaagtgaaatcagaagctgcaaaaagggtgaaaatggggattt

SEQ ID NO: 249260 - DNA, 245 bp, Gossypium hirsutum
gctcaacacataaaacagatacctggtcttcaagagcatggtcaagaaaaagagaggccgcttattgacttgcaaggaccggataaggctgctcaagaagcccttctttattaaggtgaaccagtgaaaaaagcccaaacttggatttcttggggcccggaaatggatgctttgcagtcaagtacaaaccactccttacaggctgagttgagagaacgtacagagcaatataaccagctctggcc

SEQ ID NO: 249261 - DNA, 411 bp, Gossypium hirsutum
ctcaaggaaatgggccaagagatatccaataaaagttgagagcaagactaaagtaatttacaatgcaagtaaaatcatttacctatatctagatactgcctgggaaaaggagtcatggtgcaaaggtcttcgtcttgcttcatgtgaggacaatgaaaagctgaactggttcaccaagttgaatgtggacttccaagcttatatggcattgctaaacgctggatattcctcatttatgaagccctccttaggtttcagtgctgagccaatagagaagggaagcaagtctgatggaatatcaaaagttaaattgttttggaaaagactgtcaagaaagagttcaaaatctggttcagaaaaaaagggaaattcgggtaatcaatccatccgtgaagagagaaagtcctttga

SEQ ID NO: 249262 - DNA, 411 bp, Gossypium hirsutum
cccacgcgtccggggtattcagcactcagcccttgtaatggttattcagtagatataaggaatcacttaaaaaaaatttgttcccagtgtacccttcaaaaaataacaaatttaaaagcttataattgacaaaaacctgggaggttattctttcaccattttcttcccaatgttcacttttcatcttcctatcaaattgagagaaagaaagctcagaacatcgaatttgtctccaagctgttgcagatacagagtttgaatggagatgcgtggaagaacaagtatctacttcaacaagcagttgcccgctcgataattgttaatttcttaattttgatcggcgatttagcatccaacaacgatcccgaactcaaatgtggtgatgtttatcttttgtgtcggtatgtacct

SEQ ID NO: 249263 - DNA, 374 bp, Gossypium hirsutum
acttaacacccctagccctaaatccctaatattctcaatctccgtcgaatcgggaaatcggaaaacccactatttttcacacctttttggcttttgctgtctatttctcttctgccggagtcagaccaccacaccaatacccagacccagggacagtgttacacctcctacttcgatagattctgaaaattcgggagttggagcttcaatccaaacaaaggggactaccgggaaaagaaaagccactccctcaaaggcaaaaagttggtcctcattcaactaagataataaatagggagggtgcaggtaaggctaatggaattattggccaaaaggtttttggtgggatattgaaaaaaaatgggaccggggta

SEQ ID NO: 249264 - DNA, 287 bp, Gossypium hirsutum
tctacgcatctatactattactagcattatcacgaaatgtgctgcctacgttactaaactggtctaggacatttaagcctatgggacggctgcatagattaatcaagtgtgatgctctactacgcttcgaatactaccgaatcgatgatggacaaaccggatactacagaatatatctctgtgctctatatacgtgacgtctacgtggctcaaatgaacttgtcaccgaaggtaatgcatatgcaaatctgtaggaggctgtgaatgggcaacgacggaccggcaag

SEQ ID NO: 249265 - DNA, 398 bp, Gossypium hirsutum
ggagttgcttcttgctgcatttttgtcaataatgattcttcaagagattacgatattatcagttgttgtgcatgtatcaatttcagaaattctgaacaagccagccgggatggatctatttttcgagggtagaaatcgtaaaatgattggtggtaccagctggcagggggggcccataataaaagatcacctttttcttcattattggtcgcggtgatcaactatatccaatttccatggagtataaatatggtcattgtgaaaccaataatttacgggcaacagattgcttagatcataaatgcgatgagcttgagctgtctttctcagacctagatgttgaagacaatgctaaagtgaagaagtgtggtgttagaatagtgtatgagaaagatttg

SEQ ID NO: 249266 - DNA, 396 bp, Gossypium hirsutum
cccacgcgtacggaaggtttttgctgataaggcttctgaggatactctccaatatgcatgctaacaactctgaccaagcttaggatcaagatctagttgctcatctgttgaggagcctggccaatgtaccttgtacaactaatggaacaaacttatctggatttcttcaaggattacatggtgcagcaaatgctgggtggtctcttgggaatcttgaaaagccaactgatttaacctctggcagtactgaacatgttaagacctatggttctgcctctcaaatataccactgtgctaatctcgcggagcgacatggtgctatttgttattgagggactgtacctacttctgatttggcacatagatgagcttacagcgatgctcaagatggaattc

SEQ ID NO: 249267 - DNA, 397 bp, Gossypium hirsutum
attttaaagggttgtctatttttaaaaagaaaaacctcttttaatccgttctggatttaggacctgttcttcaagttttggtaagaaacaggttaatttttatttttaatttggtcctcatcttatttctagttttagtgtaatggcagctgcaatggatttcattagtagtggagtttatcaatcagatctatatgggggagaattgatggaagttcttgaaccttttatgaaaagagtttccttctttttccacttaccgttctgatttatctctcttcccctgtcgcgtgtcctgatacttcttacctttcttacttttcttcctagacacatgcttatttttacccagatcgctgctcttacccttaccctacacatatcgacttcatatgat

SEQ ID NO: 249268 - DNA, 317 bp, Gossypium hirsutum
tcgtcctccccgtctagtctataaaatcgatctaggttttgttactccggttatttttgtccagggagccgttatccattttcttttggtgccatccctgtgtgcacccgctaccgatgttcttgccccttcggatggagcggagagaccaaagttcattgagggcctgcagaacattcaccaggatggatcacaccctcggttgatatatgaagaccgagactggaacaaaaaaccttgtccaacatgttttgggggacgaaggggtcttacaaagaatcttcatgccatttataaattaatgcccgattaaattt

SEQ ID NO: 249269 - DNA, 404 bp, Gossypium hirsutum
cgcactcagtccactaccatctgccacctcatcaccggattctgacgtcatgtccccgaactatcagcttctcctgacctcctccgtttctcaaacatccgtttccaccacgactaccaccaccatttcaactatcatcaccatttccagtcactgaaatagaaaattaatctctctatccactattgggttcacgcattttcatcttcaaagtccaaagtatatagactgtttctgaaaccaaattcaagttttatctaaactatcggttagaaccgggtctaatctttggttgttggtttggttgaaagatggctattttgaaagctactgggtgcgttgagagagtctacccccagttccgcgtccaatctctgcgataactacagaggagaatgtaaatg

SEQ ID NO: 249270 - DNA, 389 bp, Gossypium hirsutum
gtcctttcttgatacaatatttaaaccttttttaaagcctagccatcttactcagaaagaagctatcctcatgggagcagagacttaaccaattgtgtctaacatcttactttgtgcctatgccgcgtttattgttcaccataattacttgcttctatatatactttcatatataccaacttttttactcatatatgatcattacatcactgatgtccttaacatgcatttataattcatacctttttatacctcttcatctaacactcataaatttttccttctctaaatcttacttctgaagtaccacttctcctaatgcttcaatcactaattcataaattgtttattattcactatttcatactttgaaactttatttattaatt

SEQ ID NO: 249271 - DNA, 326 bp, Gossypium hirsutum
tttccaggttggaccaacccttccgccaacccttccgttggattaaaatgcaatggacctccattttggccttaattaacctttggaggattccaaacaagccttccgggtggtcaagccatttttaccactttcccaaatttccaaattgttggagggccaaggggcacattccattttccgtcccctggtccttaaccttgttgccagttgaccacctgcaattggtgggttccagttgattaatagggggccttctgtggatgattttggacccttttccgtatccaataaaatcctggattctgggggggcaaaaggtgttt

SEQ ID NO: 249272 - DNA, 282 bp, Gossypium hirsutum
gttgaaagatgacacctataaaggttgttacttgggatccttggcattgtggatcgtttgtgagttttcaaatggcttttaatttttttttttgttgtgcttagtatgcaattttgattgtgagggcaacctctttgtattttcataatagaaagaaataagaagggaactgtgttttgttgaaaaaaaaaaaaataataatataaataattactccggggttgctattataaaagtttgaagtttttctcggtgcaattctttttgatacatttttttttt

SEQ ID NO: 249273 - DNA, 148 bp, Gossypium hirsutum
gacccacgcgttcgcttactcattttcatcattaatcatgctttctaaagaggagtcactcatatcaagagcagggtcctctaaggagccaaaactcaccaaattgttctccgaaacacctttaagcatctgacacaagcagaaattc

SEQ ID NO: 249274 - DNA, 305 bp, Gossypium hirsutum
attattaaagggaaagaaagatcagatttatgtcaaaaaagcaaaggatatcaagagagagaacaagaagaagagctaagctcctccagatgaatattcacaacagcgttcgaaagataacaagaccgacaaattcgcacactagaccataaaagaagagagaaacatatctacggtttaatatactgaagaacccatagaggtctgaaatcttcttgaagaacataattgccaatgcgatcacatacgccaagaacaccaggataaagtcggagactctcatgaatttgaattatgcacgaaag

SEQ ID NO: 249275 - DNA, 361 bp, Gossypium hirsutum
cccactcttccgcgttctctttggatccttatttatgcacaaaggtttattcagcttgtagttttctacaagagtgcgagaactccatctaggctcatctctttatggtcgggttctggttgatgtatatgtggggttgttgctgttattcaaatatatagctttctttgtttgtcgttgttttttaacatttttatcatttcaactcatgatttttcttccatgcctacttatattattattttaattttataataactgtattcaattctacatttttttttatttatatttttatgggtgttgttttaattaatttttttattattatttctataattatttattctttattttttta

SEQ ID NO: 249276 - DNA, 209 bp, Gossypium hirsutum
cccacccttccaaaaggttgtccaccattccgttccacaactttggattgccttccaagcgggttttattggattgagattcaatggaccccttgattttttattcgcccaatttttaaaaaacgggtccattgttcgcaaagttgagtccgggggttcactgccaaaccgatgtaaatccttaatgcaaataattgaatccgtagccg

SEQ ID NO: 249277 - DNA, 330 bp, Gossypium hirsutum
attttatttttcaaaggtactctctcttccctccattggttcttccggtgggggtttttttatattttcctcctcctccttcctctccttccttttttcctggggaaaggaggggggatagcctccaaaattgcctttttattttttatgaatcccggttttattggcctatcccttattttcctggtaaaaatcccctttaaatccatccaaggccttcatttcccccctccaaggactccgaaaaatttggtttggaaggcctacaaacccctatgcaaggccaaaaggtgctttgggtccctctctgaaccctcttgatcaagctct

SEQ ID NO: 249278 - DNA, 235 bp, Gossypium hirsutum
ggcgaaattcctactctaccaaccaaagcggggtcggttcatttaagtctaagacccaaggctggttttaactctaattttggaagcacttcctgaaaaaacccatgcttacctttctctatgtgctgtgtgctgcatggttcactcaatgagatctctgttcgcatagatggccaatgatggatacattagcattgggaaaatggtccagttgcagcagggtgtgtaccttttg

SEQ ID NO: 249279 - DNA, 286 bp, Gossypium hirsutum
cccacacgtccttccacgcatacgaaattttattgtgatggaatagataaaaaaaagtaagagagaggcttttaaacactcaaccaaccccaaaactttcagtcatggatccttttttggagtggctgaatttcaagcctcttttcttggcttacaaaatttggagttttgatcgtaatgtgggttttgtttgagcgcttacctatatccatggattcatcttttgaacgattttcgctcaatccatcataatgtaccctatcgtacatggatgaaaagcgagaac

SEQ ID NO: 249280 - DNA, 350 bp, Gossypium hirsutum
cccactcctccctccacacatccaccctttttttctttctatgtaatgctgtagaagaagtgtctacctgttaatggagcctccatatattctacatgaattctaactttattatctaccaaatctaacataactttcactccaattcatacaattagtcattcttcataattattttaaatttccatgagtctgttatccccaacattacacaaattttttattattaacaatatttgaactataatttcacttctttagcatctcattaacattcccatcattacttatcactatctataacttaacctattcattttattgaaaattacacttattaaaactcattt

SEQ ID NO: 249281 - DNA, 170 bp, Gossypium hirsutum
agccttccagaatattttaaaattggaccaccggtatattttgttgtttaggatttcaactaccgcttggaatcattagatacaaacaaggttttctccatcaacccgggtgattcttactctctttttaatgagatattaagaggatcattggtttcaaaatcaaactt

SEQ ID NO: 249282 - DNA, 221 bp, Gossypium hirsutum
acggctgagcgtacaatgacatattgttcgttgtttcattgatagccaacacctttctgtgaggaacttggtaatagtgacgaacgttcaaaatcctttgtgttggtttacgaactctgattaacctaagatctcaggggcaattatggctctgccaattagagaggtatttacccgttcaaaggaggatgatgtcctgttgtttgttgacactctcacga

SEQ ID NO: 249283 - DNA, 433 bp, Gossypium hirsutum
  unsure (1)..(433): unsure at all n locations
cccacgcgtccggatcctccatcttaattctttgggaaaatattcgagggtcctgggaatgcggttcagcaggggtggttctttttgcggttcaggacagataagtcgactccaaacaatttcaatactttcaagaaggtgatgncgaagtataaggggataatatcacagacgaaatcgtattaaatgagattaatgagattattcggttgcccatgtatgccgatagaataaggatggacagcaaggcttcagcacgacgtaagtgacattgggttgtgcagttgcttgagatattggtattggacggcttgggtgtcctgtggtttcttatggcggtaagttaggcgcattattagaggcggtgtgttgaacagattacgttgatgaatcgggtgggtcactgggatatgatgtattgtaattaaaatct

SEQ ID NO: 249284 - DNA, 165 bp, Gossypium hirsutum
gaggttttcgaggcggtggcggaaatgaagaatgcttacgtaaggctacaagaggcgcagtgtccgtacgacccggagaggatgagggcggctgacgttgcggtggtaggtgagctgaggaggcttgatgcgttgagggaaaggtccaggagaggtgcgcgcgct

SEQ ID NO: 249285 - DNA, 216 bp, Gossypium hirsutum
aagatggtaaatgcggttctttcggtcccaacctcctttcccgtcctggcttattgtaatgtggttcaggccgatccctttcctaaaccaagaaccggcccaattcctacctctgtgggtccaacctggtagccacccgcattttcaattttttaaggggctgcagaacctgcaatccgaccttagcggcggtctttttttgcagctcgtgcaaaa

SEQ ID NO: 249286 - DNA, 405 bp, Gossypium hirsutum
cccacgcgtccgggaacattcaaagagggcaattacgctgatgctcattcaaaataagagaggcgcccatttctaacacagctcttctctcccatattcctgaaggcgttctccatcacattctttggctaatggcacgaccagagccagcttgctaccatagagtcggctgcagatgagaatccattccgtgtggttcttgaaggaattttgagacaagcaacttgcaccactgctgctgatctatgaagaaagaatctggcatctcatatatcctacaaaatataagcactctctggtgaagttctttccattgaattatgaatacaatccctcctcttaacagagtcttgacaactcactaatagtcagttctgatttttacatcaataaaattgttcactt

SEQ ID NO: 249287 - DNA, 322 bp, Gossypium hirsutum
  unsure (1)..(322): unsure at all n locations
aattcccgaagagacccacgcgtccgttcttcttcctctttcccatcaattttttattatccttccacacnctctacaaagatttttataaagaaaataaaaaaccccccaccttatcctatattataatcaatcccatcaccttaattctatcttcacacttacaattgttttcattcaacatactatcctaacaatctatatcatctaatacacattcntccaacacataatccatacttaactccataacaatcctctctaattattttcaactgtcaccacttatctcctcatcttacctaccataactttcattctc

SEQ ID NO: 249288 - DNA, 186 bp, Gossypium hirsutum
  unsure (1)..(186): unsure at all n locations
ctaagctatatcttttttttaagaagggcttcctgggaggacagcccttcttntccctaccttaccccttactgaaccttgaacatacccacccaatttccctttttaaagattttcctttctacagataccaagatttaaagataattcaagtcagaccggccttccatacagattctgaattct

SEQ ID NO: 249289 - DNA, 251 bp, Gossypium hirsutum
gctaatagctgtattatatcttaactattctctcgattcgcttttctcattcaatagtgagtttctttaccaacctaacactttttttctctatcaaatttccatctgtttctaatcaaccatccctttcttcttatttatatctctctatctcaatcctccattcctcgtttgctgcagtatacaagattcttaacctacatgcctctctctatatagaaatttgtctctcaacttttcattccctgagt

SEQ ID NO: 249290 - DNA, 232 bp, Gossypium hirsutum
gacccttccgcccacaccgtccgtaagttgggcttattggtattgggcttgtttaggttagggtaggttagtggggttttgggggggcccaaatttggcctttccccctctgcccgaaaaatgggggggtttattttttcttttcctattggttcgccatttctttttaccatttcgtaagcattaactctttcaaagttttcattgggtacaaagggacattcattgtcca

SEQ ID NO: 249291 - DNA, 405 bp, Gossypium hirsutum
tattaatttcctcttccccaagagaattcggaaaagcctttcaattttctcttcttcgggtggtttttttaagtcaataaaaatgtcctgacattaggttatatgagaatcaattccatcgttttgattctattttcacacttttaattgtttttttttgagagaagatgcaagcaatagagatggcggaaacacagcggcgaacacataatccatggatgagttcagagcaatcctcgagagttgaaatcaacggtcacgaattgtcgatcatggaaccgacgataacggacatacttgagactgaactcggtgagcctcaagatcagcatgataacagtactaccaattcgaatctagggattggagaacgagctttctctgctgctggtgctgccgttttgt

SEQ ID NO: 249292 - DNA, 322 bp, Gossypium hirsutum
cccacgcgtccgcttacattagaatgcatgcttccacgcttatgtctcatattcagggagtggaggctacaacacactcattcctgatattcaccccatgctaacactctccccaaattacataatgctcgtaggtaccagtggcaagataccatctccggtcacttgtgcgcaagcttgttgtctgctggacaactgcatataggtcactgcagcttgataacacgtgttgcactggggacaatatctgacctatctgctatagctattaaacacttgtatcatggtgctcaaaatgctcatgatgcttaagacactcatt

SEQ ID NO: 249293 - DNA, 361 bp, Gossypium hirsutum
gatccattccctttagttagcttcttttaaaagatcatcacctgaaagctgcagctctcaggagtttgtagaagctagtcatttttcatatgttcgttgacaaattcataacgccaggagccctggactggagatgaaatctgtagaaatctcgtggaggaaaacgaatcacgaagtgtgcatttgtgccgcagaagaggcctcttacatgttatattattctgacatggtattatcagagtttgagtctagcctgtttcgaaaaccaaattctatctaaattatatacactaaatttgggctcaaccaggccgtctcatagtaaacgaattgttttaaatgctcgtgctgaatcaaggaa

SEQ ID NO: 249294 - DNA, 197 bp, Gossypium hirsutum
gccaaacaagtgacttccccttctccatgtcttattctatgcccgctgaaagggtggagccatctccatcttatgaagggggcattggtacccagctagctgctcactctgacgaggaagtacttacactagccaccaacatgcctaatacacaagcaatatggtgagtattaaaggagacgcggcatccttctttt

SEQ ID NO: 249295 - DNA, 320 bp, Gossypium hirsutum
  unsure (1)..(320): unsure at all n locations
cccacgcnttctaaggatttccccttccccgttctatactattagccccgatgttgatcgagancgtctgactgtgaaaggctgcgtcnaaatgaaccgttttgcttccgtcaaatgctgcgtcgaaatgaaccgttgcccttccccttttgaatacctattgaatattgtcagaataatggagagtaggttttccttttttttttgcttcaatttctataatatagtttctgattttttcttgcgatttcagtttctgacatatgtttcctttcatacacgagttggtttccgcttaaccagattaaccagaaaccaca

SEQ ID NO: 249296 - DNA, 331 bp, Gossypium hirsutum
  unsure (1)..(331): unsure at all n locations
tgtttaatttcaatatctaaatcaaagcttgttcttgttgtttgatttacatcactacttatcaaggcgaaaactaaccctcttctctttactttattaacccacattcttaaattcttttttaaggaaatactttaaccccaccaccaccacctatcatactaccaaccattatcagcatactcagaagtcaattcagtttctgcgacaatcataattccaatagtttaaccgagaatccgagttctattcctgcttgaaatcatcaccaacagcaacatattcatccgcatgggcaaagtttatgctngaatttttccgattattgctt

SEQ ID NO: 249297 - DNA, 414 bp, Gossypium hirsutum
tctgaaggttttgagatggctgtatacatgaaatgagaaggtaattatctgaggagagtccatcacttaaacgctcctctgcttctgatccacctttgaagcttcatcggaaatgtagaagtgtgactaacggattttatgacgagaatggtgaaattgcagcagacatcatatctgctgcagaagtcaaggatgaccctgataaatcaaatgacaaactgataagaagacggcagaaatccgaggccgactttaatccccgtgctcctgaaaagatattgaaagaggataacaccagtaatggaggattttcaacaataacggcaaaaggcttggctcatagatccaaggcagcaactcgcactaatccaagagccgatgccgaagtatttgggttcaacaccacagcaacag

SEQ ID NO: 249298 - DNA, 429 bp, Gossypium hirsutum
ccagaactgaactgaaaaacctttataaaaaaatacacacacacacactaaacgaagccggaatggcactgcatattgtgaagcttccctttatctcgcgctgctgcgatagcagtaactctactctatttttcttatcgaaatcctactctcctattcatgggagattgctcaaatctcatttacatagaagctttgctgtttccaagtcagaaaaacttcaaataccaaaaaggaaaaaaaggttggatgagttatgtcttgaaaggtttcagcagtatagtcgaacattcatacagtcatggattttgcaaggcaaagtttatgtgaatgggaaagtgtttaacaaagctggaacacctgtctctgacaaagctgttgtagaaatcatagctgaaattccgaaatacgtatgttgagcaggatata

SEQ ID NO: 249299 - DNA, 421 bp, Gossypium hirsutum
cccacgcgtccgcccacgcgtccgttttttttttttaacttataaacaatctcttatttggtttaacatgaatttagctgttacatgtataaacccaccaagaaaaagaatataaagtcggtttcctacacttgaatatacactcttgattctcctacacttttggaggggatttatgagtatacacaggaagatggcacctccacccttcctatcaatggaatctcatcatctcactgtatctgtgggaaaatcaccgatcctggctgctaatattcgccaaacgccttgatttatcccatcaaacaaataaacacaaaagttaactttatttgcttttaaaaagaaatctaaatttggcttaaaagttccaaagaaacgatgacggtgaaaaagcgttgccaccgttttcatcatcatt

SEQ ID NO: 249300 - DNA, 303 bp, Gossypium hirsutum
tcatgccatttgtcttttttaacaatgtcttaagggttggggtttctattcatagttgacttggataaatttcactttcttgtttagccgagtgggtgccaatatataatgcatattatcttgagttgtatagttggtgattgaacgatcttcagttatagttttagagatatatacgtctcacctttgcagagagctactaaatggttcacgggggggtcctactgtcgatttttggagaaatggctcatctccatggagagtgacttaatggttaaatgaggggcttgaatgtcgattttt

SEQ ID NO: 249301 - DNA, 331 bp, Gossypium hirsutum
tcaaatcgtaaaaccgcgaaattccctgaatataaatggaggtggatcaattcgtgttgctatactattcggcggcaacatcctatcacatcaaccaccatagaccctcaagacatcttcgggcctcctattctttctcttttgaaaaccctaacgacccttcctacttcaccggattcgataccctcttcacctagatctgtcaattgagcgttgtaccaccgaaacccaatccctccgatgtcttcagctctctccgttagcgcattaaggacattcttagcgtgatcgtcgctcttctcttctgcgttagttgctgcgctctcacagc

SEQ ID NO: 249302 - DNA, 419 bp, Gossypium hirsutum
ggaatacttagccgtggacaagcaaattgagaagaagagggctcgttgttcttcaggtaagatcgataggaagatcatagagaataacaggagaaatcatatgaagaatttgtatgccagcctcaattctttacttccccatcgtaattccaaggagctattgtcacttcctgatcaaatagatgaagctgtgaactacataacgagtttgaagacaaggatgaacgaatccagagagaaaaaggaaagcttaatgagaagaaagagatcttatacatgtgccgataccatcacaagtgaaaccacagcaaggtcgaaatcttctgaaattaagatgaacgaaaatgggtccgtcatggaaagggttttaacgactgggaaagacagtctagtcatgttttatgagatgatttacattc

SEQ ID NO: 249303 - DNA, 233 bp, Gossypium hirsutum
ctttcctaatgcttgtatcaactcactaattttatgccattctaccatatactaggtgtgtcatttttaagagacatctactgacttttctcttgtaaaaagatacctaatttcatttcttctctacttatgaaaaaagaataagacactgatagttctgaaatgatttttaactctattctaatataatctcgtgtttctattggtctccttcttgagtataaagttacact

SEQ ID NO: 249304 - DNA, 432 bp, Gossypium hirsutum
gtccgggccgacaaagggtgtaagtagcagtgatgacaagcagagctctgatgccaaaagcgtgggggaactaaccaatggctcatcaggtgtgtttattgaagctttaaaatcaaacattcacatttttattgtttcgctaaatttgtgccaaatgtgaaataaacttacatatattagcttgggatacagaggatggtaaagagatgaccaataatgaggctcctgagagtaatcctcaatatactacggtttatgtcggcaatcttgctccagaggcaagtaactataaagatcttcagaactctttctaataaagttttcaaccaatgatgatatgagcttgaaccagctgtccatatttggacctcaagaagtcccatgttctaataccgtttccagtgcttgcaagagttggtcttgtgttctgca

SEQ ID NO: 249305 - DNA, 285 bp, Gossypium hirsutum
aaatcccggggcgcaccacacccttccaatttggtaccgcggtggtgtgtttgcaaaggcttaacaaagctgggaaaggtggaggaagtaggatcattatcatctaacgacaactcccctctaacgaaagatactgaagataattttagaccttcgattatcattttaccagtattggattgcgtaccacctccgtattgcttataacattcccaggattgattgatactcgctcctcttcgatactacataaccgatcaattctgcaaggataacatcctctga

SEQ ID NO: 249306 - DNA, 309 bp, Gossypium hirsutum
gccaactcaaaacccacaaaagccaaagtctctatttacacagaaactacaaaaagaaaggcagaaagaaggtatggaagtaggggtgaatattgggattaaaggaggaggagatgaaatggttggttaggtgaaggatatatttgggtttgaagtgacacttctgttgctagggtttcccggtgatgtgtttggtattaggttctgatatctttccctcactttttttttataattttacttttattttcacttctttatactctattacaaagactataattatatgtctcttttttcatttttttt

SEQ ID NO: 249307 - DNA, 243 bp, Gossypium hirsutum
  unsure (1)..(243): unsure at all n locations
cccacccttcccccnggtttaaaatcttttatttattccaaaaagaaagttattgaggggttgttcaaaggtgatgatgttgatcgtcctcttaaccttgaagaagaatccttaaagactgttcttaataaagaatatcctgttgatatatcaattccttatatcaacaacttttatatatggaaaccgatcacctttatgatgtataccttttaagtgaaacctttcttcatggcttactct

SEQ ID NO: 249308 - DNA, 416 bp, Gossypium hirsutum
gtgaggttgaatcggaacaagaagaacattccctttctctctcgcagcattcatggggctcacaatctgatcaagaacaagccccaccacaaaagcctacaaattccacagcgtctcatgaacttaacctgtttaagccgttgcatcatataccaagccattgtcagcttaacagtgttccaaataaccataaggaaaccagatatatggtccacaacactaggcaagagctgcagtttataagggaacaccaaaaccttcagaaaccagaacaaaatatgctgtgagtattggaacaaaggttttcattattggaggggttggagataaacactactacaatgatgtttgggtcctagacgtgagtgcttcgtgttgggcgcaactagatatatgcggtcagcagcctcaaggca

SEQ ID NO: 249309 - DNA, 347 bp, Gossypium hirsutum
ccacgcgtccggccacaaaaaaaaagaaaaacgacttcctccctggaaatcttaaactcctcgtttcaaaagctcttaactataaatattctatttatatcgacgaggtgtttaagtaatttgttcaattggtgtatgtcttttagtttcttgttagatttgtttttctgatttggattttaggttaagaagagcaggaattgctttataaatcaattggaaaagaaacgctaagatggaatctatggatggaataatgtataagataaggaatttagatgcgtacccttagataaactaggatttgtacaggcgcacgcttttcggtggcgttatcactgtcaaac

SEQ ID NO: 249310 - DNA, 386 bp, Gossypium hirsutum
ggaggattgctttagtgaaaaagttgagaaccttgaacagaataatgtgtctagcgggtgtgctcatgtcatttttgaggcttcaattaaatttgggcatccatctggtgttgaggaaatcaagcctttctcagtgggatgttcatcgccacaaccagatatgccgctgtggaaaacaatggaagatgttccagcagctgtaatgccagttaatgatggccctctagataaaggccaggacctatgaaggtgaaattgtgcatcctgaagatgtggatggtgggtgattaagctgaaaccagatgctttatttaaacttttgttggttgatgcttatttgataaaatcttcgctatgacgagtgtgtaattcacttctggctaaat

SEQ ID NO: 249311 - DNA, 242 bp, Gossypium hirsutum
accacacatacgcccactcttccgcccattctttcattgttagagactattttcttagccagaattcttaatcataaaagactttttttcctcagttgtttaaagaatgttcttataataaagagtatcctattgatttatcgtttcctgatatcaacaattttatctattgaacttatgatttcacgatgtattacctttaatgttaatcctttcttataggcatactcccattattttac

SEQ ID NO: 249312 - DNA, 427 bp, Gossypium hirsutum
  unsure (1)..(427): unsure at all n locations
cggccctttatttttcttatgggattcgggtcctttcattcatccaaaaaaaacgggctttggggcaccttaaaacaggcctcaatgatttctncccatccatggggtcaagtaccgggatgcccattcagaaatccacgatcatagggataggatgtcaactttttttgagaacctatactagaattttcacacatatatacatatatttgcttttaaaagaatagtcaaatcttttatataaaaaaaaactcaaatccttatagcttatcatacttttaaaagattttattataatcaatatgttagatacatttttcctaggagatcaatgttcttgcttgttttcagattgcaaatcaaagttaatctctcaaactttttaattcttttggtgtttagtacttacagaattcaatttttttta

SEQ ID NO: 249313 - DNA, 418 bp, Gossypium hirsutum
cccacgcgttcgcccacgcgtccgataaaatccccactcccctcttcttcgttcagccgcgatcctctcagtgtttgcctatctctctttctttctcactatagcacccttctatctcagcccttttttattttctgttattctgtgaggaggaacatcattaaaaaggcgggatctttgacgttgtcgtgtaaccaaagattgttacttgtacttaacatatttttttccctatattttattcttttctgaaagcaaaccggtggttgagtttttctttttacctgagtcttcaatggcgggtttcattatatctggtttaaagcctcttccttgtatctacgatagacccgtcgctggcgttatctcgaggagttcttcaaaatccagatttttaaccaaaaacaagaatttccca

SEQ ID NO: 249314 - DNA, 408 bp, Gossypium hirsutum
cccacgcgtccgagaagcagaaaagaggccttagcattgatgaatcgcagcctgtaggaggccggttgcgtattcctatgaaagggcccatacaattggttcttagcaatccagagaaaacacctcttcacacttttctctgcaactatgatctgagtgacatgccagctggtaccaagacatttgtgcgccagaagattactctagcgtcttctgctccaaattctgcagagctgaaaccaagttttgacaccaaagtccaagataaggtgagactaacctctcaggaaaattcttctttatgccacaacagacacgagaaggaaagttgtggaattaaaggcagtgaaggcttggaattactggaatcaacacaaccgactggttgcaacaatgaccagtgcaagg

SEQ ID NO: 249315 - DNA, 385 bp, Gossypium hirsutum
cccacgcgtccgcccacgcgtccgcctttgttttcgcccacgcgtacgattcggggatggcattgatgaatttcaagcatcagcagctgcttggtcccaaatcatgccagtttccccccctagatcttgtattactagcttaagtagtaacatgttagatttgtctttctacaaagcggcttatcatgaaacaactgttaatcaacctggtttagatcattcttctgagtgtaatagcatagtctcaggtgggcggttcaagaaggctagggttcatccatcttcaacttcaagccaaccacctttaaaggtgagaaaagagaatctaggagatataataacagcacttcaccagttagtttccccaatttggaatggtagaact

SEQ ID NO: 249316 - DNA, 427 bp, Gossypium hirsutum
gtccgcccacgcttccgcccttttataaaatgaattctcattgattacccaacaaaatttattgggcgtgttatggttgctgcttccagtctttaacctgagcctagtcatgaagtgttttcatggctgaaatctctgcctttagcaccagagtacaggcctactctgtatgagtttcaagatccaattgcttacattttcaagatcgaaaaagaggcttcccagtgtggaatttgcaaaatcataccgccggtaccgcctaatttttttctgaagttgagaaatcagatttaagagcctaatttttttctgaagtttgcaaaccctagaaaatccaattttgtacctcttttttctggctattttttttttcaccgcccctttcaattaagtcacaatccaatctctggcgaagccttaaaaccca

SEQ ID NO: 249317 - DNA, 350 bp, Gossypium hirsutum
gcccggccgaaccgggcgacccacgcgtcgcaaccatattttaagttgcttttttttttctagactggaactgtataacgcgcagtaaataaccgtgggagacaccaacatgaaccaagctgctgttctttgaccgttaagaacccatagagacacgatacgtcaacagcgttacacgaatgcgaggtatttaccaacagtgttggttccacggtgcacttgatgaccaccattagatgcgcttacttaccggcgctgaatcctatgatcctttgcgtacagaggactgccccgtgtcactagcaacatgtgattcaccttgtttgttgaaggctgggataacaaccgtt

SEQ ID NO: 249318 - DNA, 392 bp, Gossypium hirsutum
  unsure (1)..(392): unsure at all n locations
gtggttcctcactggttcaatggagactgttttccgggcgtactcatcanattcggggagatgcaaagtacatgggaattcctttattgggtgatgaggtgtattgctgcacaaagaacatggccttgttactgcttttttcttatacacctacacactattatgatgaacttttacggatggtttctaaataagaaaagccatacttacattctttagtcctttgttatgaacattcttacttaagcggcagacctctggtacttttcatttggattccttttttacatatacgtcggaatacctttgctgcttttttagttttttgccctccaatttgcttatgcttcattcacaattgacttatatactgcagcagcatacatgcactt

SEQ ID NO: 249319 - DNA, 288 bp, Gossypium hirsutum
cgatcgacagcaagcagaaagaataagggatttcattttgaaatcaaacccgattgaaggctacctttggcgagtccatcaaatcaagaattctgggtttacgtctactgcatcgccttcggtagtcttctgcatcatcgtcggcagccctctgctacttctccattggcatccctcttttacatctccgtcggcatccctctgctgcttctctagttttctgccatccaatttgcttagcttcaatccacattgacttagatactgcagcagcatacatgcactttc

SEQ ID NO: 249320 - DNA, 393 bp, Gossypium hirsutum
  unsure (1)..(393): unsure at all n locations
ggaancccgggggacccacgcgttcgcactctttctcagaagactgagattttttttcaaggcatgaaaaccatatcgacgttgttaactccaaagccttctctaaatttcattaccggaccatctcgactcaacaacttctgaatgtggtggcagcacttctcttgaaccagagaccaagacactttgataccgctttgtcattggaacaattctgcaatgacactgtgatgacatttttgcatcatcatggattatgccaagctgggaaggtgtgtataaagattacaggttcattggcgtttatggccttatggttatagatgctttctaccattagttttttacctggaactaattctcatgcttctgtctttattctttggatgaacc

SEQ ID NO: 249321 - DNA, 316 bp, Gossypium hirsutum
aaacttgaatccttcatgggaaaaattcttggttgcatcagaagatgacccaacacagtgtcgacacacctcgagccctctaggtaatggtgcaattgtggagacatctgaccaaaaaatagtgctgctgcaaagaagtaataatgttggcgaatttcctgggcaatttgttttcccaggaggccaccctgagccacaagaagttggcatagaaacccacgagtactgcaagtgctcgaaagattctgagcttgttaataaaaaggtttctcaggagatgttcgaaagcattatccgtgaagttgttgaggaaatt

SEQ ID NO: 249322 - DNA, 301 bp, Gossypium hirsutum
gcaatcttcatggcagtaggaatcaagaaaccttacatgttacatctgatgactcaactcaaggcatgtattcaaggatgggaattggctaacccccagaggtcatttaccctgtgtggtcttaagaggatgggtgttcatttgctacagttgtgatttctgccaactttgatgtcaatgtttttataacgcgttggcacataagtagcgttttatttttgatgttgcactctcacccttatttggcccttttggatgcaccagagaattgggcaacatatggttatatcaattttatttg

SEQ ID NO: 249323 - DNA, 422 bp, Gossypium hirsutum
atgatgatgaggaagaagatgaagtttactacagaagttcacctagtctccgcatcggcaatcggagatggggtgacaatggatatgtaagatcagggcgccgagaagccaggcctgttcagcaatcatccagcagttcccagaactctgatgcttcatcttcaagtgaacccaagaagaaagaagtttcgaaaagtataatggggcgacgggcaaagagggcactgaagcgtgaggctgcttgataaggcagctgctgcaaaacatcaagagcatttgatgaggttggggcggaagtgattactttgatgcaatgtctttttatggaacatttgtatcagaggaattagggtggtttgattacccagattctctggattaatatcctggctttgtacagaaattccctttctttcttttct

SEQ ID NO: 249324 - DNA, 390 bp, Gossypium hirsutum
ccgggcgcccacgcgtcgacactccacttaagttaaagataagggctaagcgtttggaggcagaaatttcgggaagaagagggaggaaaatgtgaagagcaacacgttcagcaggaagaccaaggtcggcagaattaagaaggaagtttgagaaatatatctgagagacgacatttactgtggagctgcggcttgcaaaacgtgtgacagttccacgtcacgtgctcctttggatgtttgctactccccttctcattcttgataccaatgtcctttttcatcagatcgacttgcttgagaactctgtcatcgacaatgcggtgctgctatctgtggtgctggattgaagttagaattagaacatgggcgttacaatagacttagagctct

SEQ ID NO: 249325 - DNA, 417 bp, Gossypium hirsutum
cgaacacatgcaatctatcgtattaaatggtcatcacccacaaaagggcgatctatatggggacggtcactacatgaattaatggtccttacccggagaggcccattagataaacatgctacaacatcataggataacctgcctcagcactgaatatatatatatacacacgtggatgtatccacaacatattacccatcgcatctgtaatactcccattatttgaattattacaatgttaattccttaacattgatccattgattacaacattatgtaccaactttttataaataccactattcatttcctatatttctatttctttatgataaacatcgtggatttggactcactgttgtgtctcctagtattactttacttggtttatcatgtacaatggtacttacttgctaa

SEQ ID NO: 249326 - DNA, 439 bp, Gossypium hirsutum
gtttggttttcttgcagggaagaatcgatgattttctctttttcttattggctttggtaagacgccattgtaaaagggagaagtcgaagagttggagtttccttcgtgtctttgctttggtttggtctgctttctatttttttggttgtctttgtaaatacgcgtgggcgttggaattggactcgtataatgctggggtgggactcttaagaacctttcgtaaaaacatccccttaagtcttaaaaatggctctacatgatttctgatacagatcgcttgctttcactctttctgaagatctaaaacaatctccccctcccctccgtagaaaattttctttcttgtttttgttttagtaacagaaacgaaacatatcgtagataaaagaaaatgatgagagtgaagacaaaagcaacagggttggccccggtggcaagt

SEQ ID NO: 249327 - DNA, 360 bp, Gossypium hirsutum
cccacgcgtccgcagccattttatatgtaagacttccataggttttgggggcattttggctcatccacttaagattcagctatcttctacaacataatttagcatctttgaaaaaagcacccttatagtttcctgcctgcctattccttatgatgatcgtcaaggatgccgatccttgttgtcaggtccaggatgcctgcctgtgatactcatgtgcaaaggcactgtgtcgctaagtgtttgtacaccattacatttcacacataatataatgttaattctttcatttggtatttttctttgttgatttcatccctttaagaatcagattgtcttctacatacataatactatcatttt

SEQ ID NO: 249328 - DNA, 370 bp, Gossypium hirsutum
cccacgcgtacgcataagacttcatcagtccataggtcacgcctttaaaccttccaacgggcccaaagggggcaaagtaagcttaatctataccttcctaaaatgcatcaaataaaactcaattttaaccttcttgaaagcactgaaaataatacccttcaaaacatgaactaatcctttataatagcacttaaagaaatacccttttttgtcactaccccttctgtaatatctggttcaaagccaacttcgatgcaaaggatttaatacctgctgtaacaccataagtattaagtctttttttaaaaactttgttctgcagaatttgaaactgttatggttaaaactttatgtcgttttttgctttcta

SEQ ID NO: 249329 - DNA, 229 bp, Gossypium hirsutum
ttcactcaccattgttccaagtttgttgtaaaccaagctagaacctgtgtgcatcatggtcgtattatctgcctccaccgctgccttctttcttggtgactcttaattgctttgtaaccctctgaattttagtggatgagctatggtattggctctatcacctactaattctttcattttcaagaccgttgctcttttttatcaagaaaatcgccgtcttctccaaagc

SEQ ID NO: 249330 - DNA, 264 bp, Gossypium hirsutum
tcgttctcgattctatttataaattggaaccttatttcttgaaaaaactcgtgctttttttggaatttcactcattatttcttctataacttactaatattgcatttttttttgacatattttttatgatttatatttaatacctttttaccattaacatgtatattaccatatttaaatgtttatgatttatttatttaaaaccttcataatcattatttattaatatatttttattcatttttcaaattatttatcttattt

SEQ ID NO: 249331 - DNA, 256 bp, Gossypium hirsutum
tcgctttggcatcctattttttttttctgaaactttgtgatcgttttcccagagcacacttagcattatcctgcaatgtccagtttatttgtattataatgttgtttatgaccctttactgccgttaaaatttaccataaacctatatctttattaccttcaaacaccatttatgcttttaagttcaaacttttactcatgttttgtttataatgtcctaactttattttctaatggtttaaactttggtggattt

SEQ ID NO: 249332 - DNA, 431 bp, Gossypium hirsutum
atttgctctctctatatgtgattcagtggatatgtatggtttcactgtggatccgggtgataaagaatgggctagatatttctcagaatctcggaaaggccacacacctttgcatggcagggcttattaccagatgatggagtgtttgggtctaatcaaaatccattctcctatgcggtcggatccaaaccgagctgtgaagtgggtgccaagtcaaactgctattagagctgctagaattgcatcagagaaattgttgaggagggttggagctggatctgaagacctgcttagttcttgctcgatattgaagaagcaagttaaaaggaaacatatgtcgatctctagtctcagaaaggctgctgttgaccaccaaaaatttgtgaaaggcacaacaatgtatccattggagcataatcctggacatggtc

SEQ ID NO: 249333 - DNA, 436 bp, Gossypium hirsutum
ttattcttaatgtttagcatgatcttcatgttttggcatctgttggggtatgcttgattgatttcccttgatatatgatattgattgactttacattgggttttattatgaattagggatacactagtttacatgtagagaatgctgtctttgctttgtgtgactgttttatctgtcacgtttttactgttagtgcatctagtttccaagcatataataacttaaagcattatttagtatttagttatttgtaagctgtctttaattatctgttagtgaagtaagtactcactttttgcttcattgaccaagctttaactgacctatatcaagttgcgttatgtttcttgaggattacttcttagctttctttcccggtagaacttgctaaatgattggcaatagggatttcctttaaccgtccaaccattttttg

SEQ ID NO: 249334 - DNA, 227 bp, Gossypium hirsutum
cccagcttccgaaaaactttaacaaacacttcgacggcagagcggagcattaaagagttcttacaccttttttaaaaccttaccacctaataaaccatgactcttctaatcaattattcaaaaaacccaataaggccccgttcaggacagtatatttaaagctgcttaattgatgccaactttttggatacttcaatagccttcgtacaatctactctgaaactaaa

SEQ ID NO: 249335 - DNA, 160 bp, Gossypium hirsutum
cctaaccctaatatgattttatccttcaattatatacccctacactgtacttataaagccattcttccatctttattaatacctaatatcacttaacaaaactgatactttgttacttattattgaataataaatgattgttttcttactttcaattacc

SEQ ID NO: 249336 - DNA, 421 bp, Gossypium hirsutum
gtctacgagtctaacaacgatccaagaatctttcagtgcgaaacgatgtatgaagaagattacaaaaccctactaacggctgccattgcatatcttgtttcatgctctctgattgataaggcattgctcgtcagattcatcttagctcccttggttgtgtttgttttccttctccacaaatgcttaactacgcgaaagaaggttggtaatgcagaacatgttggtgacttacaaatgcttcctaagcctattccatgttctccacaaggtcatacaaggaacctttcatcggattctccaaaacaagtgctaatagctgcgtcaatagagagaagcgcgtaagaattcttcactagtttaaggggtttgatagccctcatgcaagacattagaatgcatttattttggtacaatgtcatta

SEQ ID NO: 249337 - DNA, 251 bp, Gossypium hirsutum
ataaataaagtgcttaccttatcaaactaaccacaccgactcctcattactgtacacagggttatcactccactgtttatgaaaatctcttatctatatctttctcaccattaatattgtctttctctaatatcaatcacgaatctttccatattttctaatagctgatctaacttcatccttagtatattcatctttatttaaacacttatacatagttcttcttaatttatttactattttatttcaat

SEQ ID NO: 249338 - DNA, 189 bp, Gossypium hirsutum
gtcacggcaacctacaacccatgagttggttgctaaggatttgcatggaaatgattggcgattcctgcgtgtttttatgtgtcaaccactaatgcactttctttaaagtggatggagtgctatttgtaagctccaagaaggcttgctgcaatagatgcttttataattttacaaggcaacattggtaaa

SEQ ID NO: 249339 - DNA, 334 bp, Gossypium hirsutum
cccacacgtactcccacgcttacggccatgttcaccaccaccctacggggtaaacatgcgagggggcaacaacacaggcaccccatagttccatggcccgatggccgtactcaaggtcctctccttcaagctcaccctcatgtcttgtggtaaaaaggttggtggtgtgaaggctgttctaatcgccccagtggtgagaagcctaagcacagggctcttgctaatgttgggtgggcttgggttagtcaactctcaaagagagaacgaggcgaatcaagtgccttatcaaaacgagttgacccattttaaagcgtataactctctgaccaaggac

SEQ ID NO: 249340 - DNA, 357 bp, Gossypium hirsutum
gtatcattctttttcaaaacatgtctttatttgattgatgatgctttttaacaaaaacccatctaactaatccctttacttttattgtttatttttcagattttatcgagtcttgcaacatgggaaaaagcaatattatcacagattggactcagatctatgccatttactgtatgtattagtggcaaacactgtttttccttatatattacgctgttttgttctcattactttctattatcttctatttttactttgatattatcattcatttctatcaaactatattttctagcctcatctcctttcttttttaggtcgactttatctacttcttcaattcttatatttcttttt

SEQ ID NO: 249341 - DNA, 257 bp, Gossypium hirsutum
ccttccatccccaccggccgcctttttttttttttttccttggcccttgaaaaacttgaacttcttcttttttatcggggaaactttttcaagaatccaaagctttttctttttcaacaattcccctggttaaaagcctttttcttcaacttttttggcctttggtccaaaccctcttaaattaattactttcttttggaatgtttggtccctgcgactccagttctttttttgacttcacttttggatgttatttg

SEQ ID NO: 249342 - DNA, 343 bp, Gossypium hirsutum
  unsure (1)..(343): unsure at all n locations
tttaaaacgaaccagagcttacacccctctcaaaacctntgcaaatgataagctaagccatttatccgaatcgcaagcgctgaaattggtcatcagtcgctgtgtggaaccccataagtttgtttgagctgaagtgatttatattgacaatggaaaacaaagatgatgaggtgaagaaatcacaagttgtggaggccagggcaagaaatatcagccacaatgtgcgatgtaccgaggggtggagtcagtccattgaagattcacaagccgatattgcaattcttcctaaaaaagtaatccgcgatgagattcgatcctggaagagtgacaaagagatttacag

SEQ ID NO: 249343 - DNA, 311 bp, Gossypium hirsutum
ccggacactaattatacttcgcgtcgtctcttagtaaaaatctgatcattcgcatttctgtttattcttatgatatgccgtgcagtggacattatcagttaaaatggccgcaaatatattatctgaaaggcctttgttcatatgagcaatctcaactacttttcctgttatgattcaagatgacagtgacatcacgcaagctcccgatcatcacgacagtgttcgaggaccctgcacgtggaagagagcttcattgtatgagttacatgcagtacattgcatgatcttttgagatagatgagtgcgctatg

SEQ ID NO: 249344 - DNA, 321 bp, Gossypium hirsutum
atgtactcatgtctacatgagtatctttttcaatatttaaaacgggtaatgattttatcaactacatgctagctaataagaaggggttaacagtccttacttagagaacagagttatcttctttctttccctttttttcttttgggggggggggttgagtggagggttgatatatactattttatactatagtttttaggttctttcttttttctcactgtatttgatctttcaatgttacccccctacttgtacatgttcaagcatgtggttgatttgaagtgagttggtttaccattaattgaactattaataatcttg

SEQ ID NO: 249345 - DNA, 228 bp, Gossypium hirsutum
tcctcacatttctccacaaaaaaagtcttccaatttttttcccagtttcttccaattttttgcccagttttgctttgctgcaataatcaaaggcagtgggatctaaagaatcgaagggttgtttgtattttagggaaacgaaatgaaaacaggtttggtggtggatggcgattatgtatatgaagaaagagaaagcatctaaactgtgcttaataacttcgctttttc

SEQ ID NO: 249346 - DNA, 210 bp, Gossypium hirsutum
ctctcttttccttcacactttctgttccaccattcgtcccaagggagtaggtgggactcagctcaattttgggacctcacttttgaacattaaatcggtttacgaactcacttagtctgactcgtcggtgattgtgctcccgttattttacatgcatggttggcttacagacttaccaagtggcctctctctaagagcttgacgacctat

SEQ ID NO: 249347 - DNA, 313 bp, Gossypium hirsutum
ttacatttgaaaactagaggcacagatctaagtgaggggcgactgagaagtgagaacacggcaaattttcaatgagtgggaaaatcaccatggccatggctgcactttttgttgttctagctgcaaatgtgttgcagagtacaaatggtgcaacttatacagtgggtgactctactggctggagagtccctgccaataatgatttctacgatgattgggctgataacaaagcctccgctgttggggatgttctcggcgagtctttgagctttaaaaccttcgtgaatcgagcttgttgattcggaatttgata

SEQ ID NO: 249348 - DNA, 398 bp, Gossypium hirsutum
cccacgcgtccgcccacgcgtccgcgaaaaaacttcaatagcctctcaaactctttcattgaactgataagcagctcatgacaaaactacaacaagtcctatgtgggatcttttcatccacccaaaatttctgaaccttcttaaacttgggaggacattgttttctttttttcttgtaatagaaatggaaactttttaagtttgaagacatccttttgagctcttttgaagtcgtttttacagtttcttgtcgaatacccagtttttctttcagcctgttttcttcagtttagtgattcttttatgggaaattgactaaagattgaatttttatttctgggtttttgttaaaaaaagtaaaacttggcatttttgctcttcttttttttttggttctt

SEQ ID NO: 249349 - DNA, 162 bp, Gossypium hirsutum
  unsure (1)..(162): unsure at all n locations
gcgcttactcgtgttccgttcttatccaactgttttcattttctttttgggattttcnctggggcagcacagattctttaanttatctcatgatccctacgattagctctacaataacagaaatctcttgttgatcaaaatggtaaaatctcgttttattct

SEQ ID NO: 249350 - DNA, 398 bp, Gossypium hirsutum
gtcaattcttgtagtggttttattgaatactctttaagtactactagaggggctagaaggctgacatacaatgatccaattggtatgatcacaccacataataggttggccatctctctggatcacgagactcaccactaggaccctgattatgacaggaactatgatcggtacatgcaaagatttgaccctaagtttaaggtcaatcgtggtccatacacaatgcatcctatctacacccctgccattcactacaacaccgtatttccacatcctagatccactcatccaacataaatatctactgaacacctaccttatgctcttccacaacatatacacgctccctgagacgctacaacaaccgctacaagaatcaattgtggccatccttaaac

SEQ ID NO: 249351 - DNA, 345 bp, Gossypium hirsutum
gcgtgcatagagaacgtaattattgggatcttatacacagcattctgtgggaattttggtggggaaacgtaattcctgctagggaggccttatcactgggcatggaggaggatgccaagacatatgatccttcatccacacacaagcaaacagggcttgcaatttctaagagcataaaattagctagtgaagcaaagatgttctgtagggagattgcaggtcatattgaattttatagatgatcctaagttggaacctcattagtcattgcacttttgccatatttgttatttattttccaccaaatatttattaaacggcattgaagaagctattgcatgttaa

SEQ ID NO: 249352 - DNA, 359 bp, Gossypium hirsutum
cccacgcgtccgatgaagtccaagttctacaatggaccagttaatggttcaaagatggggatagatgctgcaaggagccttgatgcttctgccagattgactggagataagcctgtgtcaataatggattccaggaaagaattgctagactctactgtcattactcgccttattgagattttgaagacatcaccatcaaacctgcaaagaaaagtagcttctatcttggaattcataacaataattgaaccaagcatggaaacaataatcaaagtagatgtatcatctggtttggaagctgtttttcaacaaaaagctggaaaagacaaggaagctgatgtagaaagtcaggaactaga

SEQ ID NO: 249353 - DNA, 307 bp, Gossypium hirsutum
ggaaatcttattaaatgagataaatgagattattcagctgcccatgtatgctgatagaataaggattgggagcaaggcacgcatgcatgcaaatgcatcacgacgcaagtaaccgaacagcatgctggctggtgtgtagttgattctattgaggtattggatgcttgggtgtgcctttgattgcatgcgtggtccaagtttctgctggtttcaacttgagagttatgtgcatacctaagctggggagggcatatcattgtatcaggtatctctcctgttagtctttctaggtgagttgtatgattct

SEQ ID NO: 249354 - DNA, 293 bp, Gossypium hirsutum
ggaggtttttaggttattttttatattaacacaaatataactattcattctgggtgaaatgactataacttcatggttttccccaaaattattgggggggccttattaaaaatctttgagatttgatattcaaaattctttaggctactctaaaaataattcttacttgttttcaaaactgccaatttttttgaacaaattttttttcaatttttcttgttttattctattaatatacacccatattaataaataatttagtatttaaatttctttactaacatatatttttt

SEQ ID NO: 249355 - DNA, 316 bp, Gossypium hirsutum
cccacgcgtccgtaaacaaattttaaaaaatatcaaaaaaattacttaaatgatctaataaggaaaggaaaaatgacttttaaaatctaattaaccattaaaaatacataaaatcacataattcccttatgcttcctataaaaataaatgttggggacccacttcagagtttcttttctttcttaacataattccaacagcatatatttttatttatctcactttacagcataaatcaccccagaattataacctgtttcttgagaaaaactctatttttcccacctttaatacttgtttcatcctccccgttttt

SEQ ID NO: 249356 - DNA, 346 bp, Gossypium hirsutum
cccacgcgtccgtaagctttactgatgttactgattcagttggcttccaacctgatgtcggtactttggcatgtggtcttgttgctgatggccagctcatccatattcaccaatatgcagttaggctttgtttgcctactaaggctgcccattctgaaggtatcattatgtcttctgccgtctgcataacttggaccccagataatatgagtatcagtcagggggcagttggccaaagttagatagttgtctccacttataatccatatttccgttttattcttaggggtcagatcactatcatgcatataattactaaatatatgaactgcagcatgtaggattg

SEQ ID NO: 249357 - DNA, 291 bp, Gossypium hirsutum
cccacgcgtccggcagaatttgaacctaaatcttgccagtttcaatgcccaattctggtccgaggccctccccttttggtcaacaacctccctttcctcaatctggaggttcagctggattccccggtgccttgccgccaatggcacggtctggtccgtcacctggtttgatgggaatacctgcagtgcctcctactggaccaccacaatctgctttacctgcaaatgtacccccagggagaccccttggtcaacctttctggtcacttcttccccttttgggtttagacc

SEQ ID NO: 249358 - DNA, 359 bp, Gossypium hirsutum
aaataaaagaaaatgccgtagaattacttagttgatctgaacgagaaggaagagtgacttttgtatctagttaaccattaagatgcataagatcgcatattcccttatgcttcctatgaaatgaatgttttagaagagtgctgtgtttattttctctcttgacataagtagaacagcaaatatttctatttatcttactttacagcataaatcactccagaataagaacctgattcgtgagagtaactagattcttgaagcctgtgaaactagtttcatcctccatgtatagtagcctggcacgaatgacatagttttaatctagctctttatcatgcagcgaaatttggagcagaagg

SEQ ID NO: 249359 - DNA, 409 bp, Gossypium hirsutum
cccacgcgtccgctgatttgtaatgtttatttgaggatttgttcatattggttcaatatggtttccatggctggagtcattcaacgtcctttaatggcagctgctgctgttgcaatggcgtctgtttctgttgattttcctgctaaactcccatctcctacatcggatactgaaacttccatatccaattccttaccagagtccaattcatcattggttgctcttatatcagcttccaagcttgccaacttgtcttttgttactaggattcgagtaccgctacctagttttaactttccggttccgaattcaggccggaatttcgttccgaacatgctgtgttcttctattgcttcggctcctctgttggttaatttatatcagtcagctgagtaacctaaaggatcta

SEQ ID NO: 249360 - DNA, 396 bp, Gossypium hirsutum
cccacgcgtccgctcaaattgattagttagctttggaccattgtatgatattctgagatgggggaaaagcatggggattttcttatgtttagttatatagatattgcaatgatttaaccgattttaatcctgattttactgattttttaaggtttagtcttactatttcacctaatgaattcaataaattttggaattaatatatatatatatattttatgtcgtatgcaagagcatgaatgactttgatacctgggctgtggttaatcttagctcaaactttctccctttttatggactttttggctactcggtgttcaataggagtatattattaccgaatgatcatgtcgtattattaaggagatggggctttaatatttttactttcttcaa

SEQ ID NO: 249361 - DNA, 156 bp, Gossypium hirsutum
gctttgaagtgcaaaataaagggattgtgggtgtagaataagcggtgacggatctaacggggaactccgttttctctttttaccgctattcccgacctatttttaaccccctcaaattctcttaggctccaatccaggtatattattttttgtgtt

SEQ ID NO: 249362 - DNA, 235 bp, Gossypium hirsutum
cccacgcttacgcccactctttcgctcaatctttgttgttcttccaccaaacctccagtggcgaagggtgttgagattagatccggtcatcactcgcttacatatgattactgttcgagagtcttccataaccgcttctaatggaagtcttagcgcgatccctaactgaacagcctgcaatcctgtctacgcttctgcaacaaacagagatgttaccttcccgctgatcattgtc

SEQ ID NO: 249363 - DNA, 416 bp, Gossypium hirsutum
ccaaaatccagaatcctttcctatcttaaattttcattcgggaaacctccattactttctgttctgtggtccaacattgggtttcagcttttaaacgagtttcgttactaaaagtaatcatttcgtcgccattttttttggtgagattatgctaagagttttgacgacggtgacaagatccgaccaaaaacaacaaggaagcaactgtacgatggctttttctggctttggaattgggggattactgttgatggtggctttggcggcctccatggtgtttctcccgttgatgttgccgccgttaccgcctccgccattggtgcttttgttctttcctgttgggatcatggcggctctcatgttcttggcgtttttcccggcagaggttgtcggcaacgcggttgctagttctttat

SEQ ID NO: 249364 - DNA, 385 bp, Gossypium hirsutum
gtaaaattctgcagacccacttttactgaccattttttaagcatacccttaagcgaaaacggcgggaaatggcatccacaccagaaaaattgctgattaatcttttgaagaagaaggagaagtagcagagattggttctttatggctgaaaatgaacgaataggcacggttagatgctgagcaagagcccatcttgtcagaattttactacagtctacttttgtcttagaattcactaaaaacgtgctttgggcaataccatttgttaaacaaagttaagcaatttaagatctttcaaggtgttactctggttgatatattcatggaggttgttttggaagataaaggtatggtaaaagctggcttgggagattttaaagctttt

SEQ ID NO: 249365 - DNA, 407 bp, Gossypium hirsutum
gctactcttcatccaggctgctattcaatctgttctctcactcaggcaaatcttgatgtggatctctgggccttggctaaggcaatgtctaaactacagtacccactacactacaaccttaacgctaatgtatctgctaagaggtgcataatatgggacagtgtattttcaaaggccaagaaactagcaatgatgcttgcaggagctaatgagaaacacaaagctgatcacatactaaaacgcctcttgaactggcgagatagccctccagaacaactgataggactgccaactacactaacgcttgcactgaaaaacacgattgagtacgggactgtggattactggcgtgaccaaactctgactgcaaatatggcattcgtgagagcagtagcacatatagggat

SEQ ID NO: 249366 - DNA, 328 bp, Gossypium hirsutum
cccacgcgtccgcttttttttttctttccattatcttgtttgatctgattttacccgtggtgaattgtagttgcttttgttatgctctgggatctatgcgttttaaatctcatgtattcattttccttcttttaggattagcggtcttgctagattatccttctggtaaagttatttaccactatggaagagtcggttagtcggtttaacggtgcaaataatgctgttaggaagaagaggagttctcgtcggccttgtcctgattcgctgtcttatactgaaagccagaatcacttaccattgtcattgacaccaccttcggatgatg

SEQ ID NO: 249367 - DNA, 349 bp, Gossypium hirsutum
  unsure (1)..(349): unsure at all n locations
cccacacaatcctccactcatacgatttgtttgatttttacatgngttatgtcggaatggtagtggtagttctcaatcctgatctaattaaatcttttacgaaacccaatttacaattatttatttactaagcccgtcttctgcaacttgaatcgattgagcataatgaatccactcaaaaaacaataccttatctttgtcatgataaaatgaagaataatcacatatatgatcgcaagagtaaaaattatgcaaaatgctcaattgataattttactcagatgttcatcatttatcaaaactggcaattccgttgctttttacaatttttattatttaaaggctacta

SEQ ID NO: 249368 - DNA, 416 bp, Gossypium hirsutum
cccacgcgtccgcccactcgtccgcccactctttcgcttgactcataatttggggtgtggtaagggaatgaaaaggtctcgttgttcttcaactaaggttgagaggaagatcattgagaaaaacaggagaaatcatatgaagaatttgtactccatgctcaattctctactcccccatcaaaattccaaggagccattgtcactacctgatcaagtagatgaagctgtgaaatacataaagaggctgcaaacaaagttgaaggaatctagggagagaaaggaaagcctaatgggaagaacgagatcctacagatgcacccacagtaatgatagtactaaacctgctgaaatttggattaacgaaatgggttcagtcttggaggttgctttgatgacagggcccatctgttagtaca

SEQ ID NO: 249369 - DNA, 407 bp, Gossypium hirsutum
tcttaacctcccccatggccgaccatgggttcatcggggggccctccacgaccataccacgaacggcggccggtgctaagcgaggcgggctctctcggccctcttttctgtaggttcaaaggtggaacctccataaccagtagcaacgcaagaaaagggggggggacccttcggttcttcgctctccaccgtggccaatggtcaaacccctaggggttcgacgaccttcagatcggtgagaagacgccggagcgcacccaaatggtggatcgaaggtgcgttttttattactattttattcttttattattatttcatatgtaaaaaagaaaaaaaaaggaacaaagcaaaacggggtaaaagaaaataaagattggaaattgaaacgcaaacaataagatcaactt

SEQ ID NO: 249370 - DNA, 383 bp, Gossypium hirsutum
attttagggttttcccccttttccgattttctaccttgctgtaagtgtttccggaattgggggaaatggggttatattcgaaacgttcaagaaaagctagaggtaaagatttggagatggaggacttcgacgattcagaagatgaggaattattggttaatggcgaagtagaagaagaagctgaaggagaagaagatgatgacgaagaagatattggtgatgatgatgatgatgatgatgatgatgaattagaggataatgatgatgacgatgatggagaagatgaagatggtgaagaagaagatgaggaggatgaggaggcggataatgatggtgagatggaagagcttgaaaagagttcaaggatttttaaaattaggaac

SEQ ID NO: 249371 - DNA, 416 bp, Gossypium hirsutum
cccacgcgtccggctaaagagatcccttcagagtttactggtaattctcccagggggatgtgcagaaatggacaagatttccggctcaagaagaatggataatgcttctgaagttggagatgatatgagtgacagagtttatactattgattctatccatactggggttccatataagggagcccctgagcccaaacctggagttggagattgtcttgattatgcatacactccaagggatgtacttaatctgcctgatggatgtgatcccaatatcaagaagctctatacaaggcttcaggcccttgaggctgatagggaatcaatgagacaagcaataatatcaatgcgaactgacaatgcacagttggtattattgaaagaaatagctcaacagttgtgcaaggaaatgcccc

SEQ ID NO: 249372 - DNA, 264 bp, Gossypium hirsutum
gaaacctataatttactaactggcaagacttgatacattgaataacttgactgttataactgaggggaacggtaaaaacaaaaggctaacaaccttgttcaaccttttattagatgtacccttctttaatcccttgaaatgaacggatttaaaaaaattggttccattaataatattcacgcactttataacatattccaactctagggcccaaatctttttttattctcgcatacaaaccttttcccctaacacgcgaaattt

SEQ ID NO: 249373 - DNA, 327 bp, Gossypium hirsutum
  unsure (1)..(327): unsure at all n locations
cccgcgnccgccacgcgtccggccttgtgaggactactacttcttttatgttacattcctaggtttggctgtctttactaaggcctaagttgtttttctcatctctcattccctgctgcttggggttgtgatctaaaagcacaaaacttttacagtgttattaaaatggatatttctttttttaaagtaaattcatcgttacttttaagtttccaatttgatgttcttccctaattttttggccctcatcttgttttgattcgctgttcatcatcttttatatttcttctttatccattttatagattccctattttaaaaataaaa

SEQ ID NO: 249374 - DNA, 408 bp, Gossypium hirsutum
cccacgcgtccgtttccacgtaaattctgttgtcttgttttacattcatattgcacgataatgttgctcattggcacttcaacaattacgctgaaatacatcttagggcagattttatatgcctatagcaggtatgaaaaaaagataccattttctttcccattgagttacgccatctttgctgagttacttctatatttagtttttccacttctcttgtccttgcaataataattacttgacgatagcctatctagttccatgttaagttctctttgcaggttgaagcctctcacctggaaaggaagtctgaaatgttttgaatttaggttgtgaatatgtaaattcatgctcactgcttgagtttagaaaactagttttctttttggttttttacaaatataaaat

SEQ ID NO: 249375 - DNA, 190 bp, Gossypium hirsutum
ggactgacaaatatagcagaagaagaccacaacccacccacacacgcacgggcacacaaaaaaaaaaaaagcagtcaaaacttgttcttattattaaagaagaagtgagcgaaaacgtttccatgaaaaatcatcaaagctcatcggttttggcgtcggccaccaaatactgcagccaagttggtttgat

SEQ ID NO: 249376 - DNA, 383 bp, Gossypium hirsutum
ccgcccacccttccttttaaatctttaaaatatttttttttcataagaaaaggaaaaggtcccgcatgtgtttttcctacctccttggcaaactccaaaactagaagaccttcactgcaaccctgcttatctatttaaaagcccatatacaaattttttattaaaaagtccatgttacaaattctctcccctgattatatacctcttgattaagaccatgattttaataaaaacgaaaaacactctctattaaatctctttaaccttctatacattttctattacatctcctatacccaaatcttaaatctaattttcttataaattctttaaaatatacaactttttcctttttttatccaattttttactatttcctaatt

SEQ ID NO: 249377 - DNA, 326 bp, Gossypium hirsutum
gcctcttaaacctcaatacatacatgttttttttttctaggtgaatgaaggtgagggtggggcttcatgggcaagcaacttccagacagattttccatacgtctctatgttcagaaagcatgttgttggtaaatacaccatatcattcggtgagatcaacacctcaaatggttggtgctcaatcaatctacatggcatctgtaaaaggaaaagttgcattttgacccagaattcctacatcacgggctctctgattcgaagtacgggcgaacgttcttttcaagatcgtaaactccgacgttgatcataagtacttaattcaggag

SEQ ID NO: 249378 - DNA, 402 bp, Gossypium hirsutum
atcagttctaatcatctcataatgtttttttataccacaacatgtttctcatcagggaggcagccttactatttgacaacttgtgatcttgttatgctgtctacgaactacatccaaaagggtcttctctatgccaaaccagaggataactgtgaagaagacttgatcaacaatgtcttggatcggctcaagcagtccctttccatagccctcgttcatttctatcccttatcaggtcggctcgcatcgaaaatttaagaaaacccaaagtcttatttcttctttttggactgcaataacagcccaggagccaaatttatacatgcagcttgtgatttatctgtgtccgacaattgttcccctacttatgttccgttgtgttgttaatccttttttgaccat

SEQ ID NO: 249379 - DNA, 167 bp, Gossypium hirsutum
aaaaggcttggtttttttcttttcaccaggggaaggttctttggaaatggaggaccattaccgccattcctaagctaatcctccttaatcctattttccaaaaccagggaggttttaccaaataatggcttctggctttaatttcctcttcaaccatagcttttttt

SEQ ID NO: 249380 - DNA, 407 bp, Gossypium hirsutum
cccacgcgtccgcccacgcgtccgcatatgttctgtaaacaaatatgactgcgacgtgggctgatcttcctgttatattacttcagcaggttgcaagccaagttattcgttggcttcatgaggaagctcttatggtgggaataaaaacaaacagatattttctgagcttggcttttgatctagaacagggggagagtgttagcctggtggcccatgtggacccagaagacatacaaggcggcatctcttggtggttagtaatggaagatgggtttgcagaggattggaaacttcaaatggaaatttatgacggtacacctgagtatagaaaatttttgggtcatttaaaattggatgtattatactcaacaatgatggacttggttaccttgagcgatggaggttga

SEQ ID NO: 249381 - DNA, 404 bp, Gossypium hirsutum
cccacgcgtccgaatagagagagagagagagagatcaaatttagtttttttatatgggtggtttttgagagtaaaaaatatatatggagttggaacgtaagaatggggaatggataaaatcgggaagctgtgatcttggtcttagaagaataaaggtaagaaaagaaagcgttgatgaggaagaggagcccttgagtcccatggctcgtatgttccaacagcctgaatccaacgtctacattattgctatgttgggatttaagagccccattgacccacactttctcaaggttgcagatgagaagaatggtggataggtgaaatgggtgaaaacaaaggtagacttagataatcatgttaaaatacccatggttgatcaacatatggcctccccagatcagttt

SEQ ID NO: 249382 - DNA, 150 bp, Gossypium hirsutum
acccacgcgtccgcagagaggtagttatttaatttgttgcacaaattattgatggctgatgttttgaattggagtaattttctgaataataatggattgatgttatagcgagacattttattacttatatatgttttcaatattgtttct

SEQ ID NO: 249383 - DNA, 168 bp, Gossypium hirsutum
  unsure (1)..(168): unsure at all n locations
cttgccttgcccttttatttttccttgcagatcaanattatcctccatgattttgcgtggcaggtttcttgcctccggatctgttgcgtccctttaccaactttgatttgatgtaagattttctaccctaggggtttttttggttcccgatctatgttttacattgct

SEQ ID NO: 249384 - DNA, 301 bp, Gossypium hirsutum
ggcactcgtacatgggtcagttgatactaagtttagcggaagcccatacacagagggtacagaacaagcttgaaaatgcaataaaattaaaattcatgaaaccgacacacagagctgacaataacgtgaggcattaccctgacctacaaggatgcctatggaagagttatttctaatgattaacggactgcccaccctataaactgctcagaaccgaagtagggtccaactgccagaatagcaccgatagcattcgtgctgtatcgaaacgccatatgatgtccttgaaaatccttaagac

SEQ ID NO: 249385 - DNA, 403 bp, Gossypium hirsutum
  unsure (1)..(403): unsure at all n locations
gttataacaacggttagttaagttccggcatatcttaaacagctataagataaagtatacgtgtggtctgtggttgctgaaaccggggtcttacaagtaactaatacggttcctttgaacttgaatagttggacagaagtgtactgccggatgaaaccattgttgttgtagttgtgtttgttgatgagtatttttagattcttattgcttaatatcatcattatgttcttctcatcctgtgtaaatggccatcgtgtaatgcaaggtgcagggcttctgattttccaagggaatatgacggtgaatgccttcaaatgagaatgtcatacagtccggctgcacacctntttctattcttggtgcagtggactgactgtcaccttgcaggtgcactcgggctgtt

SEQ ID NO: 249386 - DNA, 246 bp, Gossypium hirsutum
gccactcgtacatgggctcgtggactctaacatacaggggacgcccggccagcagaggcggcagggttagcttgaaaatgtaattatcttaaaaatcctgaaccggtgacgtggttgctgacgagcactgtaggaaatacatagacctcggacgtggcctgttaaaaagacatatgaagtgcttaatgggctggagacgctggaaacaggtcaatccactgtcagcttcactagacagaatagcac

SEQ ID NO: 249387 - DNA, 296 bp, Gossypium hirsutum
catgtatcagccattcaagagaccattttccttccaatatcaacctttcagatccttcatgtctggcaagatttcgagctcttcgggcaaacaaaactgctaagcccggactcttcttttccttctatctttcgacaacgccgtttcttctatcttgatttactaagctttccaccgtaggcggcgcctcctcaatcaagaatcgaggaaactcgtaacaacatccctcttttgccatttcatgagctactatgttggctacccttgagttcaacttgcgtactatggttagcacg

SEQ ID NO: 249388 - DNA, 337 bp, Gossypium hirsutum
gaaaacccgggggggccccacgcgtccgaggaaatttattaacaaaatcgttttgggtttgctatttaaaaaaaatggaaattggggggtgcgtgttttggtccctcactggaaaatccgggccttgtatataaaattttctcaatgacacccaaattttccgcttcttgagatcgaaatgccacaaaaactctaagatgaaaaggaatcccctttcagtattaatggaccaaggcgtttatgcgtttttttgtgaaggacatttctcacgattcaacatttgagtttttgagaaaaacctaatatgccctaaagatattatattaaccttgtagag

SEQ ID NO: 249389 - DNA, 190 bp, Gossypium hirsutum
gtagggttaagagtatggcatctgtgccaagatttatcgagggaatgtcctcagataatatgagaggtttggatttagccatttcttccaattaatccattgctccaagtttcattgttaaaaaaaaaggctcgaaaaaggcttttcctcctggcttcaggccaaaatttgaaggttttacttactttct

SEQ ID NO: 249390 - DNA, 313 bp, Gossypium hirsutum
cacgatcccaacctcatcagttaaatacacagatgtaaatccgactccaaccccgagcacggagttctattcccagtcaccgcaccactcattcagacaaccttaataccaaccatattttctgcctcaatacacatccgcatatccccctccaccatgggctgcaactcccggttatttcaacagccaaaaccaccgctcttctacaaataacatgatctccactccccaagtgaacaccactgcatcaaattccattacagggcccagacccttgcagcataattgctcattccccataagaggaaccaac

SEQ ID NO: 249391 - DNA, 339 bp, Gossypium hirsutum
cccacgcgtccgaattatcttaatctttccaaaaactttttctctggtcacatacatatcgattgtgggatttggacgatgcatcgccttcgatctctgcatctagctaacaattcatttgctgggccaacaccagaaagtcgtggtatcaataccttacttaaaaatgatccattcacaattgaatggcttgttacgatcaaaaactgcagatactggactatgtagcgatctagattcacagaacgtaagccataatcttttcaatggaccacattacatattctactaacagactaacattactggtggtctacagattatcaaattacatgttca

SEQ ID NO: 249392 - DNA, 163 bp, Gossypium hirsutum
gaaaatacttatttaaatacttaccgaccggttactcagcatatcgtaacggacgtgggagcggcggctgttgttggatatttgatcatatcctgatccaaatggctgaggacatgtataaccttaagaattcggcggtgaagaggatttttcaagatgtcaa

SEQ ID NO: 249393 - DNA, 274 bp, Gossypium hirsutum
taacaacattaccaccctcacattactctttacttctttttcctctctccccacaatgcggcgctttctaacataaaccatttcatcttcttccacctccctaatcaattcaacttcacttcttctacctaatctataccacctatccatattcctctttcttcccttattcacacctaaccactttttaatcttttaatttcactttcttatctcttaaactttaacaataccaaccaatatccccttttctttcttttttacacatacttat

SEQ ID NO: 249394 - DNA, 302 bp, Gossypium hirsutum
ctcactttctctcccttcctttccttcatttttatttctcctttctcattttcactgggggaaattattgaaacaaatttgctaattttctcccataaagagatgaaaaattttcatactattactgtcttttcaacatttctgatgtttctacttttttcattactctcataaaaaactattaccattcccataatatgcaccccttgcctacaactattttcattttctccaacacttttttcactctcatcttcatcttcttcaccttctccccttttaaccttatctactttccacca

SEQ ID NO: 249395 - DNA, 373 bp, Gossypium hirsutum
gacccacgcgaacgctcatctttacatccatattcctacaatctttttttccacatgcttatacaaatgctgcggacttattttcttcccccaatcaatacttttacattcaaattcattaacaaaaactttataaaattctctaccattactctactcatttaataacacattttactattacaaatttttttacaatcctacaaatataaatttttttacaatttacacatatttccaaaatctaaaattttttaactattaataatcattatcttttaccatatataataactttttttcacttcttcttattcattctctatttttttgataataaatttttttaacatattaacccttctatttttta

SEQ ID NO: 249396 - DNA, 402 bp, Gossypium hirsutum
ttcaacttttagcagaaatccctaactcccttctcccaatctgccctctgcaacttcgaggtccgttagtcagcctctccctccgtcgaacgctccctccatcgctcactccattgattggtgtgttcagtcgattaatcagtcgctgtcatctccactggaggattgacgtcatccacgttcttcagagcatgtttctcatattgagaagatccaagccaagtcaaataaggtaaaactccacaacccattatagtttagaaagtcatgaccatgttgaagcgttttgagttccttaaatttcaatgtcgtgcatttttgcatagtaatgaaatacatgccttggtagtgattgggtcttctgcgtaccaaatagtatatacttggcagataaagccatgt

SEQ ID NO: 249397 - DNA, 367 bp, Gossypium hirsutum
caaaatccttataagcatgatgaggagctcccaaccgcactttacagggaccaaatgaaggggattatcatttgatatattggaactgatggagctttttaactcacagccagtctaaaaaagtgctatatgtttcattcattcattcattaattaatttgtaaatagacagttttaactcttctggaattataaaaccccttacctgatattggaaggaatgggttcatttttgttgaggaggaggaatacttttttccatgttatagttcactccggctactttgctccttggtgcttacctgaactgttgaagtaatggcatagattataccaggaaccagtccttgtatcatttcaatcctaa

SEQ ID NO: 249398 - DNA, 238 bp, Gossypium hirsutum
ccacgcgtccgcaactttacagtttgatttcaatttccgaaggatatatattttttgttttgaaggttgttgtgaaaatgtacaagaatttgatggacaaagtttctgcctttggtgagctcctgaagacagaatgatcctagttgagaagaaagattagtgctggcatgagctctggtagctttaaactgattgagctctttcaaggccctaaccctgctgataaacttgttgacta

SEQ ID NO: 249399 - DNA, 353 bp, Gossypium hirsutum
gacaaatctaagccacaaagggctgaatcttatttacaccatgcactaacaacactctgcgtcttacaaaatccacaaatatgctataaccttatattaaccatcatttcacacctatataaactctaaatacaaaacatttacatacaacgccatagcatatatctaaataatcatacgcctgccctctatcttatgcgatcatcttcaacaccaatcccaaattgataacccacactacactcaatgtaactctaataaccatcaaaaccacttctacgctgatggtaaagatctcgagattccacaatttggaaccaagggcttcagcacacatggctgattgtatctaa

SEQ ID NO: 249400 - DNA, 175 bp, Gossypium hirsutum
acaaatccaatctaaatattccttaattttttttaaacctttcaccatcaccaccctgccacttacttactacacatacttcacataaacacaaattaaccatcatttcacctccattaataaccctcacaacataaacatatccctttacatataccacatctatttatcacat

SEQ ID NO: 249401 - DNA, 392 bp, Gossypium hirsutum
aaaccaatcacacggatataattcccccttcttatacctaccatttctgacctatgggcggtggacacattaatagctccctacaatctcatcgactggccccttctatccatttctttgctttctcttacgctatcctccagaccactctattacaattactgcgataataaaggtcactacttactcaaagctgacacagtcagcatatcacctaatcctgcgattacgcgctaataccggtcaccttcacgatctcagctcctactggatacgctatcactgatcccaaagcgggcattgacgtttacttcttccgtttttatatccatttaaaaaactcattactctttttaggtaacatcttgtcctattactggtgccaacttttt

SEQ ID NO: 249402 - DNA, 275 bp, Gossypium hirsutum
gagtaataaactcattgattagctatgccatttattttcctaagccgactcctattggtgcagcctacttaacttgttgaaacctcctcctctatgccaaacactgattcatccaactaccaatgcctcctttgcaccatattgctgcttctttcacccacactatcaaagctctatgagcctttctttaacatctctgctttccatattatacttttacaatcaattccaatcactctatgtctgtctatagctcctgtttatattggtttact

SEQ ID NO: 249403 - DNA, 332 bp, Gossypium hirsutum
  unsure (1)..(332): unsure at all n locations
aagcaagataggacacgataaaacccgntttttttcttcttcttcttattgttcttgtgcggataatttaatattaaagattaaaagttaaagacttcgaaacaaggattcagttggatatctgatcaccatatactgatagtctgataccaaaaagggtttttaataggcggctgagtcggtatcaatctttgaattttgccgtgaaattgcttcttgaactttggaatctgccttttggtggtttgggtgcatggcaagccttgtgggtggctttttatttttataccttttaaagcttagtatagggaaatataaaactctcttttcaa

SEQ ID NO: 249404 - DNA, 275 bp, Gossypium hirsutum
  unsure (1)..(275): unsure at all n locations
ccgcccgattttttctnattnatcggcatcaaaatatgactatagagtttttttatatgatttcaacatataatggggggtcatgaactaaccacgtaaaatttaaatgaaaaaaaagtgtagcatacttaaagaaacaccaagcagttcatgagaatcgcaacaacttcaaaagaaaataatcttttgttgttcactatcaagaactcgttaaataacataaaaactcatcagacattttccaagggaaccatcctttgatttgcttaattctt

SEQ ID NO: 249405 - DNA, 272 bp, Gossypium hirsutum
tcgatataatcaaggagtttctcattcactctttttctagggcttccccaacatgccattgatggggtcttgatgcttcatatggaaatacttagtgaattccttatggggggttgatgatacattgacttgtatgctatctcacagattatatcacttcaaaaactattactgaacaaaattttttaacatcacatattttttccaaatcttatttcatataattaatttaataattaatttattataattaattttaaatatttcaattt

SEQ ID NO: 249406 - DNA, 195 bp, Gossypium hirsutum
acgctttcgattgttttgaaaaaaaaaaaggagtttattttattttcaaaaactatgggaatgggtgggggttctatcgatagagtccgggactgaaagcattcttaacatctagccttcatgcaaatccgccaaagctcatctttcacacatcgcatggaaccattatcgattgcttttttctttccctttcca

SEQ ID NO: 249407 - DNA, 202 bp, Gossypium hirsutum
gatgagggcaatgattctcctgatgagaagcctctagtgtatgaagatatagaagtaaaaagagaggaaatgtgctagagcagattaggttgaggaggtactacattgccattgccgaatattgtagtggctgggtttttttttctcctttacatctctttttctgttgttcctatttttgtatttttcctttctttttttg

SEQ ID NO: 249408 - DNA, 130 bp, Gossypium hirsutum
  unsure (1)..(130): unsure at all n locations
cggaatngaaaacccgacccgcgcgnccgcccacgcgtgcgttgaaagactcaaagactcttttctttgctgaaaagcctggcacttgttggccgcattaaataccctgaggaggggccatagagaaagg

SEQ ID NO: 249409 - DNA, 214 bp, Gossypium hirsutum
cggacgcgtgggattcctttctgatttttctcctcactttggtttcatcttctcaaaataggggatgctgctaaatggtcacaggattttggtttggtaaagcccatggatgatatgcttcctaatacatgcacatggggaccaattgtttgagagaaaaacaaggtcaccagagcaatttgaatgcccatgatggatctttactcaacactaa

SEQ ID NO: 249410 - DNA, 418 bp, Gossypium hirsutum
ctcactcgtccaaccaataataaataaagtattataagaccgtgcatagaatattaggtaggaaggcaccttctcatggaacccatacacttttcactacttacaagactgacaaattcaatatttcccacagggtcagcgctagcacctatctaccagatgcagggcttttaatggaactgcatggacggcgcttcctgcatattatcacgcacatgctcactcctggcagatctcttatatctgatcgatctgagttctcagacactaaatcatggttctcacacaatcacagaatctaccaggctgaacactttgacgcatcctagataatatactatactagtcacgccacttgtaggatcatgcccttcgaactttggcatgttacccacacatctaacacagggagttaacc

SEQ ID NO: 249411 - DNA, 400 bp, Gossypium hirsutum
cccacgcgttcgcgtctcctttttcgtactatccttttaatttacaccccagtaccctacttatacaagcaccttccctatggggtctagttccttttccaaactcaaacagtcacaggcaccgtgtaattgtagagaagtgaggcaagtaactaaatagttctgaaatcatgaagcataaagatggaaaatataattcacaacctgaaaaacctttcaagattgtccctgcaacattgcttgttatcgttctatgtgggttttctttctatcttggaggaatcttctgttctgagaaaagtcgacttgagggaaagagtgtgcagtatgtttccaagactgcttcttctcctaaagaacctgcaatggacccccttcaaatcaatatccatggctttcc

SEQ ID NO: 249412 - DNA, 199 bp, Gossypium hirsutum
atttaattcccgttttccaatcttttttgatatatctttatgctaaaaatgtcgttcctatgggaagaagatcatcccttaagagcttagatcactaatcattcttggttgatgaatctttttcgtttaatgtttcttacgtttaatcatatgatctatgactattgctcctttatctaattatatttctataatattt

SEQ ID NO: 249413 - DNA, 143 bp, Gossypium hirsutum
cccacgcgttcacccattcgtttggccatgaataattaattattataaaacctttcccacaatcttaggaagaaaggcgccatctcatagaacccatacacttttctctccttacaaaaatcacaaattccatatttcccaca

SEQ ID NO: 249414 - DNA, 274 bp, Gossypium hirsutum
ttccccgctgcttttctttttccttccgggttgttgaaagcttttccccaggaccccttggccaaacttccgtgggagcgagtaacttctgcttctgggcgtaagttcgctgaccctgaaaacaagcgtacctggtctaatattctagaagttgacacattgaatcgcaaactcgatcctttctccggtaagctttacactactcggcctcttaccatccatgctccagggccatggtttgttcgcaaaatctttggccaggacatctgccact

SEQ ID NO: 249415 - DNA, 422 bp, Gossypium hirsutum
gtaaagtctgtttatttgttagcatcgctgatcactagcgcctatgcgcgggaagacatcgtgctaacatccaaagtgcccagcgactatcgtatataagctgaagttggctgaccataaaaacacgcatgcctcgtctaatattctataaatcgacacatggtagtacaaactcgatcctgtgtccgataagctttacactactcaggctcttaccatccatgctccatggccatgggttgttcgcaaaatcattggccaagacatctgccactgtgttgaatcaacattggttgatgcccaatcaaagtcaatgcaacttgcaacccgatatgtcagtcttcataagtttatagaggttgaggagaagataaggtatgatcctcacccagataatccaacatgatggaccatttgtcgac

SEQ ID NO: 249416 - DNA, 416 bp, Gossypium hirsutum
cggacgcgtgggcggacccttgggctgacgtttaaggaattggatgtttgcaactttggggcaatcccaattgtgtagcaatatatatatataatgaaaaaaaagtgttaaaaaaataattacccattttcaccaaagtttgccagaaagcaaaggaagcatgcttttgatgttagaaatccatcatctacatcaactcaacccagaaaaagaacacctttctgcccaaaaaacccaacccagaacacaactgaaactatcaaaagacagcttttttatgttccctttttaactgtttttagtttcttgtttcgcttgtctttctagttgcttcaaacagctgaggtgtatatatatatataatggagattcttgttagatgttttcaaattattgcatgagagaagagcttgtca

SEQ ID NO: 249417 - DNA, 281 bp, Gossypium hirsutum
ctcactcgtacaaccacgcgtgcgggtcagcttgcgatggatgatgcttgagttgagaacaggaaatcaggttgatctctcagaaaactagatgcccagatctgcactcctaacaaagctatgcggaccggcgcttttgctgtgagctaatcccatcaccttgcttttcgagcgaacaaaaaagatggctaaaagatctatcatgtgttaaggctgaagttttgtaggagtgaagtttccaaggcactttttttagctacccctgcctgttttctaagatc

SEQ ID NO: 249418 - DNA, 351 bp, Gossypium hirsutum
ccttaatgtagcacttgacatctggtcctcctattaaaatatgagtgagagtgtggcaaccctccacctgtctgtgtggtttaacttgaatgatcttgttgaaggtcccttggcttttgcctaacctggaggtctatggtgagagggtgaccttggtggatttggcgagtctttctatagtgttattgcgtgtttctatcgaaatggcaacaatctcaaaagtgggtgtttttggttcatctgtgaggggcaaactatcaacccttcgattattgtgtcctgatggccttactgtttctggcacccgtttacgctaagtacttgatgtggatattaagcgcgactatacct

SEQ ID NO: 249419 - DNA, 250 bp, Gossypium hirsutum
gtttgctttggtagatgcttttggggtttttcttaatttcatcccgatagaggcttctgcttctgggatagtttataggggtttcttctctgattttggagttgaagttcccttctcttaatggactaggttatgctgtataggaaaattgaatatgggttggttcattgtggattcggttcgttattttgtcttgaatatgatcaatcagattcttggctggcttccttcgaaagccatctaagtcttc

SEQ ID NO: 249420 - DNA, 359 bp, Gossypium hirsutum
ggttttgcaagggaagttctattaatttttatttacaatggaagagtggttaggtggggagcatgtcattttcagctggggatcattcttgtaattcttgttctgaattggagagatggtaaagtcccatgaaaggagtggacaagtgacaaatcaacagttgcgtaattataaataccagctttgagcatgatgttaaaaagttgcagtctcagttgcaggatgagactgatttgcacttagctctagcaagtgctgttgaacattgtggttcaccttcgtctaattctccaggcaagcttgctgatatggcccaataactcttatatagcatatctgttcttgatattacctcttca

SEQ ID NO: 249421 - DNA, 147 bp, Gossypium hirsutum
ctcacgctttcaatattcttttgaaatcttttctatccggtttccttgcccataggtggtgctttacatttgctattgcatatcccctcgaacccgaccaaaaactgagactaaatattggattggatggtttttttcaatgctctt

SEQ ID NO: 249422 - DNA, 410 bp, Gossypium hirsutum
actagcatcatcatgccaaccccaagtggcaccgcttcgcatacatggaatgtgtcgatgagaagcagtgacatggacatagcaaactactggaattgggaagatattgatgcacttgtctctatcgatcccaacatgccatgggatgattctgagatcaaaccatgaacaaggtcttttaaccatatattccttctcttcttgtttttggttttcttatttaatgggcggttttttttttttttttgttcctctttggatgttattttccctttcttagattgttcattaatatgtatagtctcccctttcaacttgtaactgttaaaaatgagctatataggctattagaagctgccatttttcaaattcagcttcaggggggtggtgtaaattttgttctctacctc

SEQ ID NO: 249423 - DNA, 427 bp, Gossypium hirsutum
ggagatctcattggagaagattgagggcagcacggacgtcaaatatttctacgattcctacacaggccacgtcggaaaccaccgtatcctcaccgtcgttacctactgcgagatcaccgccggcaagtggcttaaacaagccaaaaaagctaacaactccaagtccctccctaaaacccttgtcgttggcttctccgttgaacgccaaaacgattactactcccgttacggcctcctcgagtttccgtacgagctactccatatctgcatcggctcacattgtctcctctaccgtttaaacgaccccgacctttacaagcctcccaagttcctcacccatttcctctctgatccggaggtaattgtagtcgggatggggatcaaagaaaaatcgagtcatttggagaaagatttccaagttaagata

SEQ ID NO: 249424 - DNA, 389 bp, Gossypium hirsutum
tggcagtagatttggagattatggtggttatggtgctagctgctgattttagcagtagttatggggggtttgccggacgccccctccctcccctgtaattccccagtaccaactgccttcctcgccctggctttctcttaacctcatcaagatttcaaggctaacaacctttactcattaaaacatttttaatcattcgtattcgacatattacatccttacccactgttaaaagttttattctcttcaatccattacctctgtcacttcctacttccttaactccatctttccttccatccactactttctctaatcctgtctacccattgacttatgatccttcttcattctcctctttcctttcttattccttatcaatctctatc

SEQ ID NO: 249425 - DNA, 417 bp, Gossypium hirsutum
cggacgcgtgggcggacgcgtggggttttatctctcctttcggaaaaataattgtgagaggaatataaaaaaaagttaatctttgttgaaagttaaaaaaaaaattcggtttttatttatttggatatgttttatttattctcgtagtagtttgttttctatttaaaatatatatttttggtggaaattggctatgtgtggaacaatttcatcacgtgcatttgaattgggattcggaactggattcgtgattagctgcggcttctttggagatgtttgattggaacgacgaagagctaaagaatataatatgggatgattctggtgagactgacagccttatagtaccttaccaagagggaagtgaaaactgttgcagtaagaaggaatggagtcaagcaactgcagtcataaagc

SEQ ID NO: 249426 - DNA, 424 bp, Gossypium hirsutum
ctgggaatatctccaactagccccgaggccgatcttaaaaattgttaatcaaaagccgcatcagggtaaatcgccacactcgttctccttttgtcagacttaggacccctgcttgcctctaagataagtgtcttcttctcaactcctcttaattctgaaatgtatcttgagatttgtgttaagatatccttgcttgttgtttgtttattttcgtatattaacttattacggcttgtccaaattatccaaagcccacagcaaaaaaggtgatattgtttatttgtcccttggctgaaaacccaagttagccagttccatacactgtcgatgttagaataaagtatccaagaaaactttaaaaaccgccatacttctgtcgttgtagggaatcgacaggatacatgattactatccttctcatcct

SEQ ID NO: 249427 - DNA, 396 bp, Gossypium hirsutum
cccacgcgtccgcccacgcgtccgcccactcgtccgattgatacatgtagccaggggtgtgaaaccttatgttatgaccaagttttggctactaccacggatgaagaacatggggaaccaacatcaggcaaggacgaaatgttggagaatggagttcctgcaacaattaatgaggtttctgaagtagattctacatttgaagttccaattagcgaaattcgagacaaaacctggaacgtagatgttgccggattgttggttgaagctaatgattctattaatcagaccctagaggaacatgaagatgctgcagatggggacactatgcacaagccaagaagcaaagctattgcaaatgaagcacttcatgaaaagctcaccacgaaatggtcgttt

SEQ ID NO: 249428 - DNA, 415 bp, Gossypium hirsutum
gaaaatgtgggaaccctcactgtaaagggctcaataaggccaccgaattcgatattcagggggaaaccgaggagtgtgttaagaacttgtgccctacggttaaagatggtgtttccaaaggacttctccaattgctgcacaatcgtcacaaggaattggaagctgagttaaagaggctggcaccggttaatggaagagcagtgcttgtgtttcgagctaaatgtggatgttccgttggcagattggtggttccgggactgaagaagcaaagaaagatcaagaaattgggtttaaggatacaattagatagatgaattttaaagctaatacagaaactagctcataatgctgagaggagtttgagtgccttttcaagttatgttgtctttaaataagcttctcatatcaataagtt

SEQ ID NO: 249429 - DNA, 319 bp, Gossypium hirsutum
cgaactcttgagttcctcaataacatggtgagttgtgcttggagctgtagttggagtgacggcttgactcggcgactttttacacatctgaccctaactctgaaaacttgccatatcaccatgctcctctaatgggtgcaccatacagaacctatgctgaagaaattcctcggggcaccaaacttcatcgttcaccacttctctgaaagacttccttagtgaaataccaaacataagcctcacttactaatatgaacaacagcaaccacgtaagcctagacttgttatactaacatgatatgactccgctaacattttc

SEQ ID NO: 249430 - DNA, 408 bp, Gossypium hirsutum
aggagaacaggattgtgagacagagaaccaaaatgcagcacgaacagaacaaggaagagtaattgttttagtttctgataatttacatccaaatgcagatgcaagctagtggctttcttcacagatggatttccaagaacaattcttcaaggaacaaatcaaatttattcatgaagcaagggatgagaaggaggagaagtttgagaagctgcagcagcaacagcgtgagaagtttgtcaagcaatctactaatacttcaaatacagaggaatacaggcgtaggtatgtaattttgatgctaatgtgaatttccatgtgtaatcggatcgaaacatgctaaaatgctgctacacctccttttatttgtttattaatttgtctacatcaatcatgagataccatttttct

SEQ ID NO: 249431 - DNA, 326 bp, Gossypium hirsutum
  unsure (1)..(326): unsure at all n locations
caggagtagttaaagagggcatagcttttttgactttaatttccnaacagaactcnctatatgagaagggttattttctgaaaatttacatccaaattcatattcattctattgtcttttcttcacagatagatttccaataacaattctttaatgtacaaatcatatttattcttgattcaatggattagaatgatgagaagtttgttaatcttcattttcatcatttttacataattctcaatccttttactaattcattaaattcatataattttcatttcatttatttattctatttccttttttctttatttgaatttttc

SEQ ID NO: 249432 - DNA, 414 bp, Gossypium hirsutum
gcctcacgttcgaccacgcttacggtttaatattgatttagtgaatcacaatctcgagggatgaacattaacatcatcctgcctttaaactatatctataacatctcatccctgtctgcacgaattgggctgatctatctaatgtacaactagagaggcagttttccttcatctattttcattcaagataatatttcaagaaggtgcatctggtgctttattcggcacttctgggagcaatgttatcaggagcttctggctgactggtctatctacacaaatattgcatgcccatccgtcctatagtatatatacgcttttaaagcaaccaaaattacatgacgcaccctattggaaaatagttattgctgggaaatccgtggcattaccgttaactagcgagtttgttgacat

SEQ ID NO: 249433 - DNA, 415 bp, Gossypium hirsutum
aactgctgcaaaagtgacaccgggctctaacaaggcaataaaggacaggtccaagtgcagcggatgtggggactcaaatcctacaaaaaatatggcacaggccgttgatctgtaaggaagtatttgtgatgacaaacctgttggggctgccatccacccgggtcttgttatagtgtgtatatactatattatatatatattgaattacagcacgagatgttatggctttattttcttgtcataaaattgctccatctccgtggtagagttgagattggtttggcttggcttgatttgtcatgggaataagccaataaggtcagtagatttcatgtgttaatgttgtaatcagttgtgattaaatgttacggaatgtttaatccatcctttcttagaggttcacaagtaaaaagtt

SEQ ID NO: 249434 - DNA, 374 bp, Gossypium hirsutum
gcttgccaaagttgcaggtgagacattgtcattaaagccaatgtcaagcaagatgggaccgtattggttgtagatcacctatgctgcacattgttaaatgggggtcttgccagtaatctaacttcaaatgtttatctgtgctattattattagtgtttcatgaaaccgaacctacagtgtggtataatacctataaattacccaaacgcttctatcactttgtaccttacatacaattcttgaacatatgtaatcatttttgttttatattggactagtatggttttcctaataaataggattgggtattaaatggatttttaattattgtttgtataatatttatatgttatgtttgattcgttaatacttag

SEQ ID NO: 249435 - DNA, 283 bp, Gossypium hirsutum
gcttttaacccatcctcaactggtttcttgaaattcttaacaatacaagtaggtcttatgcattgggacccttgtaatccccatcttctcttttcccctttcctgtgcccttggaaaccaaagttatatgcttctagcactcgatctttgtcagctacctctctgatagcttgtctctacggttcacccacaggttgcttgctgtggagcatctctcagacgtcaagcttacctctcgcatccttcagagattaaatgtaaaacaagctgaataaacaccccc

SEQ ID NO: 249436 - DNA, 408 bp, Gossypium hirsutum
  unsure (1)..(408): unsure at all n locations
caaaaaaaaaaaaaaccctcttgaatccactccaaaaacattccaatatgttgtttcttcgacttttttttgggtcaatattcatagtttgttgccttacaacgctttcaaacgaagcttcacttccaaatgctgaagtggaagctttggaaagtattggtagaacattagggaagacaaactggaactttactggaacatgcattcaaggcaatggtcggttggaccaaccttcacccgagtttaatgaatcttatgttgataatgttatatgcgattgttccttcaacaactatactacctgtcatgtcattcacatgtaagtataaacatatacatattattttataatgaaatatttatcttccttgagttttataatatttatntttatttatttatttttta

SEQ ID NO: 249437 - DNA, 147 bp, Gossypium hirsutum
cccacgcgtccgcacaactgctgtcagttcctttgttgctgagtgctaactctagggttagttttttctttttcattgagctgaatctttaaaaaaaatggtgacagtggatgaagttcgtaagtcataactttccaaaagttctat

SEQ ID NO: 249438 - DNA, 216 bp, Gossypium hirsutum
ttgacatgctctaggaggtgaccaagcagattgataggtcacacattttgcgctttgggtgatgcagcagcttggcctgggcagggtcttatacggcattttaggcctgagctggagagaaggattagagagcgtgcttaaagggtgtagctggagtgctttgcttatatcttgttcatggattacctgtgcatggggtcatttatgaataaaatt

SEQ ID NO: 249439 - DNA, 389 bp, Gossypium hirsutum
aaaaacccagtattctgtcatcactatggaggccaattggctgctatggtttacaaaggcaggagtaattgcatgagtcaaatggccagtaatcagtgaagccattggtgaagatagtttaaggcaagaaactttgcgacataggctggattatgtgaacattggtaatatacatctagcatccttactattgttcttcatttgtgatcgtataatgtgctaatcttttactttaatcgaaatacacctgattgcacatgcggtctgttattttaatatccatggtttttcttcatctggctttttttaatgatgggttcattatttttacttcctctttcttaatacttacattctttaaaattaatttgtgaaattatttgtatttt

SEQ ID NO: 249440 - DNA, 392 bp, Gossypium hirsutum
ctctcaatgacctatctaatcacccatttttctcacactttgccttatcacactgggtagctaacgggatcttattcttgctcatatgaaaaaaaagttaaaagaaagacaaacgcttccttggttattccctttccctttgttttttgttttgatcaaataaaaaaggggagatctttttagttaaaaagactggtttgtgtggattcactgagctgtcttttgcaaatctcattcatatgaagagcgtttttagtctggtgtatctgcttctcgtacttgcatttttcagtcatattacatgggctgtcaagggcaacttcgctttgttaacatgaccggttttggggggatgattcgacctttacatgtgttaccatttacttgaattt

SEQ ID NO: 249441 - DNA, 106 bp, Gossypium hirsutum
gagagtttcattagccttcctatgttgtgagttaactatatagggtcttacgttcattctgggggttagcttgctacatgggttgttcatttcattcatttaaatg

SEQ ID NO: 249442 - DNA, 153 bp, Gossypium hirsutum
aattagacggataaaaaatactattaccatgggttctgcagacaagagggaggaagttattcaggcatggtacatatattattaatcacctatatcaggtgcttctttatcaccttatacgtatttaatatttttgatgggttaatcttactt

SEQ ID NO: 249443 - DNA, 246 bp, Gossypium hirsutum
  unsure (1)..(246): unsure at all n locations
aaaaaaaaaaaaaaaccaccgatctcattatataaatgactgntttttgtttgtttggggtttctagtttttatgttgctaacctgctttgctttatcaacaacaaagaaggtttttttattatccatttttgggttttcggttctcggttgcgtgcgtttcactttcatgtctaagtagaggagaaatgatattgctttttatcgagttttgaacttttcgcaagcactacttaatttcaacttt

SEQ ID NO: 249444 - DNA, 252 bp, Gossypium hirsutum
ctgacacatgggctgccctatacatctttttctgctaagacaaaccctatcaatgtagcggtagggcctacactgcctgcacaaacagcaaccgacaaagtccgacttttagatgataatattcggccccgagattgccctttcaacttctaattgagcgatgccaccaggaatttgcggccggttctcaagacttccgccgtacggatgcctgaggagatgttctatggatgtactaccttgtgccagtcg

SEQ ID NO: 249445 - DNA, 287 bp, Gossypium hirsutum
cccacgcgtccggagttgaaattatgctagaaaaaaattaaattgtcatgctggcccctgcgaagtttcattataacaacattagcattccagaccatattcatgagaaagtaagcatgttaatgctgtatgaactaatcatttatatagcacgaatagaaacttttggaaaacgttttattaagtttttagtcgttaaaagactttataaaacaatttatgtggatgattattctattttaaattggggatatataggccatataaaattctatcttatacttaca

SEQ ID NO: 249446 - DNA, 403 bp, Gossypium hirsutum
caggttgatccaatgctcaagagagctggtgccatatggaaacgacacaggcatgcgatagttttatataaacaaaactcaaataaatgatatggctttgactgtataacctattggaacatgtagcatatacagtgaaaacactgtgaatgtttagatacttcttgcagagcaaccgttgcacaccgagattggggctgcccaggattatagaggcatgatatgttgccttggtactaaatctaggaggaacttgtatcataacatgcacatgtaatatcatccctcgtctatgttaaaataaagctgtacaaatatatctgctattgtatgcttgccccaagtgaagcgaaacttgccatggacatcgcacatgcagaggggccgccgctctagaggatcc

SEQ ID NO: 249447 - DNA, 418 bp, Gossypium hirsutum
ggcctaagaaggctcaaccaacctctgcttttactcctatgacaagcgcttggacaaattaatagcttttgcaatgatgcatagggggaaataggaagggtgagagaatcagagtggaaatcttgggttctgggttgtctaatagttggagatagtttctccctttttgaagcttttgtaaattgttcatgggtggatgaggaggtctattttatttctttattttgttattgttttttttttctttctttgttctaatttgctatgtactttgttttttttttattttcttctttatgattcgtgctctggggtgtatctttatttctttttttctttctattttctatcactgttttttttttttctgtatttattttcttcttatctcatctttctcttttactgttatttcatt

SEQ ID NO: 249448 - DNA, 220 bp, Gossypium hirsutum
gaccgacgcgtccgcccactcattctattgacaatggactatcacatattttcctgagtttaagttagtatcgcgagagtttttaatacttactgacctccaatattcatctattattgtcatgatgttagcaacattttttactttacgcttttaaagaaggagaccttttactgtgtttggtgattgtgaatcatacatatgatttccaatatgtttc

SEQ ID NO: 249449 - DNA, 432 bp, Gossypium hirsutum
cggacgcgtggggaaaccaacataataaaccctctatgcctaaagtccggagttctcctggcctttacagcctcagcacgcttcatccccaaagtaacaacaaccatagtaatcaccaagtttaccagccgcatcatcattcccaccaaaaccaccagcaacaacacccctacagcggtcaatctccaagaacatccccagattatcggaccgaaaaggccccagggccatacgattttgtgaggggagctatggggcacagtcatgttccagtaaaccgggtctattcagtaggaagacaaaatttggggaatggataccccatgtatactggctgctgcgatgagtgcttggtttatgcaagtggaggtgctaataggagaggcagcctttcaacaagtggaaggcttggtaagcatgatagtccctgtc

SEQ ID NO: 249450 - DNA, 325 bp, Gossypium hirsutum
ctaaaccttttgaacaccccgaatcttcatgtttcttgtagatttattattctatgacaaacaagggattcatttgagtttttgtaagaaacttgagggagttttcaaacatcataagggaggaattgtctaatttagggctaaaatcttctgacagagcatgttttgtcaatcttttaagccagttcttgtaagaaaaaaggaatcttggtgatttcagtcttggaatgacttcaaaaccagatgctaaagggcttgatacatctatgttacttgcaaaaaacatgaattttttttccaattttctcgtattgttctgtgagtt

SEQ ID NO: 249451 - DNA, 352 bp, Gossypium hirsutum
  unsure (1)..(352): unsure at all n locations
cccacgcgttctcccactcttcctccnagatcctattttcaatgagatgctaaagatgcgtcagcaattatagcatgtgcaagcagaactttgtgcacgtggtggttctgatgaagtacaggttctcaaggaaaggattgcttggcttgaagctgctaatgaggatctttgtcaagagcttcaggagttccgtagcagatgcaccattgtggatcaacgtgaaaccgatgctcaagatggaagttcttgttctgtcaaaagtgatgggcttaaaaggaacttgcacagtatagagtctttttgactatcagaggggtgaaaaccattttagctactgatttttagaatattt

SEQ ID NO: 249452 - DNA, 421 bp, Gossypium hirsutum
  unsure (1)..(421): unsure at all n locations
cgaccgacgcgtccgagggaggtgtatcatttcatcaccttcttggttaggttttacttctaatgatancaaccatgctgctccttttagatccaaattgaggccaaataaacgctattaatgtcctgataaagctgctgctgttccaaaatttccttgactgttatgagaataaccttacattctttgatttctacactcacatttttaatcatgttctataagatcttaacactttatgcaatgaaccatgcatgcctggtcatcattctccatacaacacttcccacaattcttaacccactaaacaacattgctaaaggctgttgctttctattttttaataaaataatatcttgttaattctcatattccctaatcattttctcatgtaacactttttaatacattttaaacctcc

SEQ ID NO: 249453 - DNA, 428 bp, Gossypium hirsutum
gtgacacaaggggcttgtcaagattcacataatcgactattcttgtgaattggcctctagttctgttgtctatgttgaagtccaatctgcctacctccctatagtccctctatttcttcaagaatcctttttttataagaaacctgagagtcttggtagacatatccaagccatcaccatgcttggatatggttgtaacggattaaactctttggtccaaggttggacaatcaagtattgcccgtagattattcaagggccttgcgataaaaccttctcaaaaaagtctgtacactgaaactttgccaagacatattttgtttctatatccataacacgaaaggctttagagggtctccgaaacctacttatcacatttgttaaagccccatagtccatgttcctacctagcagtttcataaccaccg

SEQ ID NO: 249454 - DNA, 209 bp, Gossypium hirsutum
gaaagaacatggaataaccaacattagcacaaaccgcaccctatgactaacaaccaaccggtacatacaacaacgcatttaacgtgctagaaataacagaaactgtatgatcatgagaaatagatctacatcaatgaatgggcaagacacaactatgactaaaggccatgtgaatgctaacctcaatcacacaggagcaataccatact

SEQ ID NO: 249455 - DNA, 409 bp, Gossypium hirsutum
cccacgcgtccgccatttattcctcgtgcttttaaaaatcacatctttaaaaaagaaatgctgggcattttcccgaagaattcaaccccccctccattttttctcaagctttttaagaatcacacaatttcaaaacagattattgtattcatttttgaatcattctctgaaaacccaaaagaaaaaccttggatttttgttccctcaaggagccggtttttctgccgataacggttcgagacgggtcggggtcgatgtggaccctcaaaacgcggcagcgccgatgacgatcttttactgcggacaagtgattgtgttcaatgatttcccagctgataaagctaaggaaatcatggctttagcaagcaagtgcagctccgaaaacccgaatacgaacacgtttgtaccc

SEQ ID NO: 249456 - DNA, 384 bp, Gossypium hirsutum
cccacgcgtccgttcactctcttaattacctcttcatcttcattcagcgcaaatctaggggttggtttttcttatagcaccattttcccctatcccgacttcttttttggctgcttccactccaatctctcgatttattttgctagaatttattaatcactttgggggttgaactgaagataaacaaaatgccgtggtctttggtttatcgtgttcgaatggttgttttctttcttatcatactgtaatttattttgggtgaatttcaattgaatttggaattggaaggggattcaattcattcaatttagcgtcgttggatattgataaaattttggttggagaggtttgagaatgtacattgcagcatccacaaagagatat

SEQ ID NO: 249457 - DNA, 285 bp, Gossypium hirsutum
tgtgagttgagtaggcggtgactgatacactttagaaggagttgtgtaaggcgagctctgtggtgattagtttctcatgaaactcatcaaagatgatggcagtattgggactattgacagcatcgataattggttggaaggtgtcatcaagcccttctaggactttttcaataagatcctctacatctaatggtttaccaagagtagctagcttatcttgctagattttaatagcttgcatctaagtccctatagtttgggagcctctttgtaattttttttgtt

SEQ ID NO: 249458 - DNA, 309 bp, Gossypium hirsutum
gctggacttaaagaaccatcaccattctcagtttcaacacggtttttccactgccttaccagtggcttcaccgactgtatgccgtactcctaacaatcaatcacttattttttccgttgatggcatcgatcaagaattcccccaagagaatggtggttgcccgatctcagctgtttccgagttggctgctgctatcaatgataataagcagctggaggattataaaaatgacaatggtaatagtaacaccaaggggaaggccaacactgaaaaaagtgatctccctgaaagcttggatcacattctccc

SEQ ID NO: 249459 - DNA, 429 bp, Gossypium hirsutum
atttagttataagtaacaatttgtaaaaccctcttttttcttctcgccaagatctgagagggcatccaccggcaagcatggatatgcgaagaagcacaccttgctcacgatgcaggcaaagatttatggcgaaatcagtgaccacgtgcagatgttgaatgcccttcatgcaaacctaactatcttcccattccagccgatgaacaatattcttcgagccagcagcagcagtatgggctacgcagccgaatgagatgcttttatagccaaatcagaggaaaagagcatcaaagtacggtaactccttccttaaatcccgacccctcggctttcaactcgatgaagatcagatcaagcaagcgagcagtgctttgcggaatcacttacaacaacttgaagcagtatagacttaaaggaaccattaacgac

SEQ ID NO: 249460 - DNA, 431 bp, Gossypium hirsutum
gagtttgagtgatataggagcctatgcaagagagattgtcaagaatgagattgagatgcggtgcgttatattggcttgccaaggccgattattccctgttttcgggtggaggaaaggttgtcaggcattctgagccctttcttgctggaaagggaagcaactggttttcaaaaggtagtcaaaatgtggttcatcccaatgcagacaagatgttgaagcctagttttggggaaccaggacagtgttttccgttaaaaggaagtagcgggtttgttcaaatcaagctgcgtacggctattatccctgaggctattacttttgaacatgttgccaagaatgtggcatatgatagatccagtgcacccaaggactgccgtatttttggttggatgcaaggtcgtgatcttgatttaccaattgaccccaataag

SEQ ID NO: 249461 - DNA, 422 bp, Gossypium hirsutum
attgctatgtctataaattaattgtacatcccttcgattacgtatctatttatttggaggggtttagcatagttatttccttggtggtggcacaaaaatatgcaacaagctatagtctgttggctgtaagttttaacatgacctaatcatggtgatgaggacctctattttcatttttaagcatttgaagtgagcaaaaggaaagggtctcggttcgataagggggaataagtcttattttcatgtattccttattcttattatccattttatcaaatcttgtacaaaataatgcatccagaaacaagaatttagaatcaagatattgttccttttaaagagtagacacattctccttatattccaaagcatgttcatccattaaatacttgtgccatacggtttgatgatttagttgttac

SEQ ID NO: 249462 - DNA, 497 bp, Gossypium hirsutum
  unsure (1)..(497): unsure at all n locations
acgcgnntccgaaaaaatnntgagtgtcangnntttgaaaggtgtnntcttctagaatatggcttanntgaaacccaagttgctgagggttcgtgctatcaagagcgagattgcgcccaattcnntgggtcaatccctcttttcttcttaccccagaccaanncttgcatgctnntctnnncagggagcannaaaagatnntgtgggggttgttttaccaaggccccaatgagtacctttacccgaagaatctccaaccttttgttggtttggtgtggaagggaggccttgtgggttgccgccatatggcttcgatatcaccaggggcccatcagtatattcgttacccgaccgacaaaagaaggacccggacctgtcgaactttgaaaaagcatagtccctgtatctcccatgtgcttccatatcgacccccatttccaccccggtcttaccgttaccggcttgagaaggatcaatagaaagccataaaactttgc

SEQ ID NO: 249463 - DNA, 424 bp, Gossypium hirsutum
cccacgcgtccgctgcaattgcagctgagaagcattagatcccccaaatctttggcttatgtctacaaattcaccctttaattttctgcacttttcaatttagtccaacatgcttttaaggagcgcatcgacgccgttacttaattcatgggtcccacactcgaaggagccgtcaccggagctcgattcgtcgcacctgattgcccgaacccgatccgtttcgttcaggattttgtgttcgagctccagctcgagctcgatttctgttgggtcgggcgatgactcgagcaggaggatgacgagggcggtgtcggagacggatctgagggagctggtggtccctaagatgagagaagtgaagcgaaacaacgggatcttgaatacgatctttgttgaggaagaagaggatgtggagagagaagaa

SEQ ID NO: 249464 - DNA, 275 bp, Gossypium hirsutum
cccacgcgtccgcccacgcgtccggagatcatgaatattgagtaactggatgggtagtttcgacgggtactctgcctgcagagtcagttttgaagtgtttgacaaggaaaagaaagagtttctgcttccttttgattgctcttgtgtgtttattgctgagctaatcagcaatcataggtaggaggaaagaaaaggttgatttcattctacctttaaaattgccaatggtggtccattatatttttttttatgtcatggttaatcaactattttat

SEQ ID NO: 249465 - DNA, 370 bp, Gossypium hirsutum
cccacgcgtccgctctcacagacgcagttctttctttactctctcaattttctacgctcgaccccaagaatcccttttccatgttctcatctcccaaactagaaaagaaaagggaagacctattttctcctctgcattgttgcgttagatctttgccgcatttcatggatctactacaatcacgccgactcttattctcttcatcttctctctcctagggtttttgttccgtattcttttacttttttattggaggtgctcttgtcgtcttatcattttaagtttttactttttttcggtgtaagttattttgttctcttctttttctttttattagtctccttatagttttatttttctttattttttt

SEQ ID NO: 249466 - DNA, 350 bp, Gossypium hirsutum
cggacgcgtccgcccacgcgtccgaaaaaaaagggaaagcaggtggtcgggaaccggcggagttcgtcggatttcacccattcgtcattggagcttccaaaaaaacaactttttatctgagtttcgatcgcagatatagaaaaaaaaccgggaaaatgaagggatctggacctcttgttgctaccgtgctcgttgcgtctacggtggctctcacttcgtcttcatccgctggagtccaacatgtttctttttctccaaccttcttcaaccaggagtcacagaacagtgcgtcgaggaatcgtacggcgtcagaaagggagaaatttcgcgccacggttttgatgggctta

SEQ ID NO: 249467 - DNA, 244 bp, Gossypium hirsutum
tccacacatacgcccatgcttgtggccgaacggttcggatggctccattgctcaccgaaggagtttagattcaagactccaacatgtttggccccacgctagcgagtgtttgggatttttggagggggcaggcaggcttaccctacaagagagagctagcgtgttcttgggcaacttagtatgcatctgtagcatgttgacagtacataaaattacgttgctaattaattgttttgacgcactt

SEQ ID NO: 249468 - DNA, 212 bp, Gossypium hirsutum
gctattcaaagtggatttggacttgtttggtgttggagaaaactgtacattgggtttggaaacgggtttcagtggttttgtagttctgagaatggtgtaagaatctgtttatcgcgcaatgcaatcccagcagggctccagaattgacttacgtgaactgaaagctcacatagtgaagaacattggggctgagaggtcaaaaaggtactttt

SEQ ID NO: 249469 - DNA, 372 bp, Gossypium hirsutum
agccttccgtttttttccttcaatccggcaaaggataatagatttttttggcctcaagccatccttggggaggggaaaacctaattctcttctcaagaaacccctctttaaattaatttaattaaggggaattactcttataactcatacccaaactccggcaactcttcgcacggtccgagaaacacttcaaaatccgcgcatggacgccaacagaacatgctcaaaattacaaggcagttatgtgcagctaggaggtagaccaccctcgcctcatgacaataactgcttacatcggggagagaccaagaccagctgtgaacgcactatcaaattctcctccatgatctccaagctctcaactctttgcgg

SEQ ID NO: 249470 - DNA, 123 bp, Gossypium hirsutum
agccttcctattatatttcccgttttcaaattttttttaagaattcgttaccaaaaaatgccgtcgtcggggaggaggatcaccctaaaaacttaaaccggcaattcatccaaggttattaaa

SEQ ID NO: 249471 - DNA, 417 bp, Gossypium hirsutum
cccacgcgtccgcggacgcgtgggtgcttctatgtggtacaagccttccgtcgctgatagggcttcaatggcctcgttcaccgtgaatggttcccgctattgggaaacgggtgcctccgctaacaacaacagtaacagcagcagcaacagcactgagctgcaaagcaatagttccttctacgacaataatagctcctcttggggattaccagattgtagcacaccagagaaagaggctccactccatctaatggaaagtcaagcagaagatataaaatggagcgaatatctgaataacccattgctaatggccgctgctttgcaaaatcaaactccacagtccttgtacaacatggacatcaaatcagaaacacatttcctcactaataattcatcaaacagtatgtggactcataa

SEQ ID NO: 249472 - DNA, 420 bp, Gossypium hirsutum
agccttccggaaatttttgtaccgggccctgttttcttacagttcttgttgggagatttttatcctttagatgtttttagaaagagatgtggattttttttttttaattttaattggttacatctggtttttggatgagttcttggaattgtgcgttgattttttttctttttgattactgtaaataaagcacgtaaactacctgatcataggaagcacttctttttttttcaaaaaattgttattcaccagtaagtaaatcataacaaacttcagacagaaaaaaaaattgttttatttttttctcctgtaaaagatggaaaaaattgtatgcttgtatttttgcgcttttcacaaatttttataccttaactgttttcgtttgtctgcctccgaaattcttctcttcaagacgtattt

SEQ ID NO: 249473 - DNA, 279 bp, Gossypium hirsutum
gggacgcgtgggtgggaaagcccaacacaatctttttaaagcagaccatttgacatagattgtgacaatgagcgaggaaacacctgacgacgccataatgctattgcgggtccggaagaaactcttaacacaaaggtatgaatcggaattcggcggtgggagaattagagctgtagaggacttacaacagagatgattaaagtcttgtaagtgtggacagatattgagaagtttcagcctttgatatgacgctgattgtaaagcaagcagtggccctcg

SEQ ID NO: 249474 - DNA, 387 bp, Gossypium hirsutum
  unsure (1)..(387): unsure at all n locations
ggcttacaggagctggtgattgtctagtcggtggaatgattgcatccctttctacaggtttagatgtgatgcanagcgtagcaattggtatagctgcagccaaagcttcggttgaggtggacagcaatgtaccttctcaatttagtttgccaacaattacaggtgatgccaggattgtatattcaactgccaaacttttgcaacatcaatctaagctgtaatgtccaaagaaggggcatggagttttggtaaacacccaaagttagagccatatgtgcttgcctcttttattgttatacaaaaaaaaaaaaacctggaaattgcgaattgagattttatacaccatatttgcagaataaatagcaatgcagccttatattttgttgg

SEQ ID NO: 249475 - DNA, 397 bp, Gossypium hirsutum
  unsure (1)..(397): unsure at all n locations
gcatatatattggcacttgtttttgtattcttctcaattgtcatgctctggaataggtagggtaacaaagggaagcccttagaagccttcagaataatagctccaccaaatcgaaatgcagttgagcagctgttgacattacaagaagtcatctcccaatatgaagcactaatccaaactgcgaatgttattctcctcaagattagggctatcttatttgcagtcttaccacaggccactgacagggttgctctctcactggttttcttggctgtagtgttagctnttgtgcctttgagattcttgatattgtttgtattcgcagaagcttttacgagagaactgccatataggagagacagcaatgaccggtggctgcgaaggcttagagaatggt

SEQ ID NO: 249476 - DNA, 413 bp, Gossypium hirsutum
cttatttcttccatttcactctccccgttgtcaatacaaactcctccataaagtcatatgatgacgccaatccaaataataaaaaacgtaccccgaaattgcaataaaccctactacaaaactgacgccaataaaagacaggtttttgtcttgttgggtgacaactgaagttaacgccgccgacaatgcacgccaagacggactcagaggtcaccagcctcgccccatcatcgccaacgaggtcaccacggcgtccggtttactacgtgcagagcccttcacgtgattctcacgatggagaaaagacaacgacgtcgttccactccacgccagtgctcagccccatgggatccccaccgcattcccatgcctccgtggaccatcactcgcgtgagtcctcatcgagccggttt

SEQ ID NO: 249477 - DNA, 149 bp, Gossypium hirsutum
ggcgaacagaaagaaaagaaggataaataatcaatggaatcaactcgggaatcagccggttcaggggaatgcaatctactggcggtctaccgcgcgtgaacaggggcggcggttttgcaagcacccttgaccgcgtttatttactgacc

SEQ ID NO: 249478 - DNA, 406 bp, Gossypium hirsutum
tcttcttctaaaatcaatctatgaatttccgtctctgttaacaactcgagctcttcggacgcgatcccttgccaacccgtccggactctgttttaccattcaccgatcgttaacatctcgtcttctttcgcaatctatcagttcaaccaccgcaatcggtgcctactcaatccagtattggggactttcgtactgtcttcctgctcgtgccattctatgagccacgtggttagcctccctggaggatttaagtttgcgtatgagagtcaatgcgtctccttccaccacaacgtcttggaagtccatttcctgtgccatagtaactgcttatagacacgctcttgcctccgtcataactgggtctggaacattctcccatgggaagacctgctatgacaaggggcaa

SEQ ID NO: 249479 - DNA, 408 bp, Gossypium hirsutum
gttcgatttaagccctctgtttcttcgccttcgccatcgccattgccattgccgttgccttgatgtttgatataattttctgtcaaattttccggttttcgttactacatgatgatcggcgtcgggttgactcttccggctcagaacttgaacgtcttcaataccaggcgagcaagcttcaagagccagaaatcacctctaaatccaacttctcgaagacatgtttcatcggcatcttcgactgagttaactcgggaaaccctttccaacctcgaaaagctccttcagaaatcaaaccaacccgacccggaacgggtcgtcaaaacttccaccagcaacgggtcgatcgaaaccaaaggtaagggtttactcgaagggcttaacctgtcccggatttggcctgaaatg

SEQ ID NO: 249480 - DNA, 419 bp, Gossypium hirsutum
gtgacaatcagatgtgtagacagatttgctgtatggagaattttgtgggtgattatacgaatatgaaaggaaccctattggcatattaccatcatttatggttattagcctggatttggatagcttaatcacgaatcccgagattaccagcctcagatgatatgatctagtgctaataggtgagcaggtaatctatttctattccgatttgttgcttttagaacgagaaaaggtaaaaataggaagcaacaatcttggattgtcacttatacagaccatgtttagtgttgatgttgaaccttttactgaaaaaaaaaaaaaaaaaattccaccaaaaaaaaaaaaaacacaaccaaatgttatgctttactcccattattttacctttccccattttttctcttaaattaaattttttt

SEQ ID NO: 249481 - DNA, 396 bp, Gossypium hirsutum
cccacgcgtccgcccacgcgtccgcccacgcgttcgcttttcatttccaagccatcccttcggctctctctctctctctcggttaatgctatctttcttgttttccgaattatcgttctaaaagattatcagggcaacattactattactgatatgtagtatactatacggaaattccatgcattgttggtgtttgaatctttgaatctttaatctctgagttccattttcacaccggttatggcttggagcaaactaagatcgcttttctcttttctcaaattccagggcattttgcagcggctgcgacagcagcagcagcagcaggggccatcgcagtcggagagagctacggaggcggctaagcgagccgaatacccgattagaacatatgga

SEQ ID NO: 249482 - DNA, 409 bp, Gossypium hirsutum
gtcgacttttgctgtggttccaatgatttcagttttttattaaaagagaagctagagaaagttgggaagtcgtgcttatttaaaaattatgatctctttcagccaaagaatgattttagttttgaaaagagagattggatgagtgtgaagccaaacgaattaacagatggttctagactgattatgggactgaaccccccttttggggtcaaggcatctcgtgctaacaagttcatcaacaaggctcttacattcagaccaaagcttatcatacttattgttccaagggaaaccagaagacttgacgagaaagatgcttatgatttgatttgggaggatgacagagttctatctggcaagtcattttaccttccaggttcagttgatgtagaggacaagcacttggagc

SEQ ID NO: 249483 - DNA, 238 bp, Gossypium hirsutum
ggcccgcggacgcgtgggtgttaatttagaccaacattttaatgatttggattctataccctccaagtccagtcctaaagaagaaaagaagctttgaatttgaccccataacagccatgtttttgctgcagtgccgtgaaaaagaagttgaaagacaaaatggctgagtttcagattcttaaggagagaatccagcaagagtaccgagaggttattgagcgacgtgttttcgcagtga

SEQ ID NO: 249484 - DNA, 361 bp, Gossypium hirsutum
aggagcacaggagaaatcatcgaccagtggagttgcatacagaccctcttggggatgctcgagccaaggtccaagaagagataagccgtgaatttgctgctatcatggcagctggaacgctgagagctagcgaggcagctgcactggcaaccaggaaagtgatgcataaatacggacacttgaatgttgttatgccacagagttagaagcaggcgaatgtgatttattcggatcttgctctgtaggttgcaaaaatatggatttgagttaaaaagaaaaagcgaaatacgtcggttcaacattggtgtgagttttgtaaatggttatatctatcttattaattttttttgtttttgtgttt

SEQ ID NO: 249485 - DNA, 213 bp, Gossypium hirsutum
attgtatatctcccaaccaccccttctttttttttgctataatccaactctgtaatgtggggtcagtaaaaacatgcataaaatccattccaatgactcaccctctacacctcatcatgacatatgcttttactgagaacaaacatgtctttgttcagctaatcaatgcaatggatccatatcatagtcatcataaagcttatactctatctt

SEQ ID NO: 249486 - DNA, 347 bp, Gossypium hirsutum
cttggctgtgtctctggtgccaggtggcatcatgccagagcctaagcccgggcaggggggctcagaaccgacatcttcggtccctaactaaatagtcactatgttccttccctgttggggattagaaaagtagcaattattccttggaggtcagatgaaaatgattaagctttatggccttgaggggataaaatcacagacattatatatgtacttatatatagctagttaaaatgaagctatgtaaggcctggcatggtggcttacaattataatttccagcaccctggaagcagaggcaggcagatctccctgagtttccaaaacagcctgatctacatagaaaa

SEQ ID NO: 249487 - DNA, 284 bp, Gossypium hirsutum
  unsure (1)..(284): unsure at all n locations
ccggccacgacgcacgcgtgcgntctaccaaggtcaatccacaccccatgatgttagcagaccctccatttctgagtggtgggttcacccttaagccttctgctctggagtcaagttctcagcttcagctcaacttacagcttctccaagcatcgccccgcgggatgttttgagacttccctcttaaatggtgacagttggttgccctgttctgcttcagggtattcagtactgctcagtattattgtctaagagaatcaaaagttcttgtgatttggtctggg

SEQ ID NO: 249488 - DNA, 180 bp, Gossypium hirsutum
tcccggtccggcgcagacccacgcgtgcggtgtgccaaacagactcaaccagatggtttttttggcaggactgtgcctgtccacgtcatgttctgtaagccccgagaagggcgggacgactgttatttctgtctccgtgtttctacactatgtgtacaacatttctgatgctgaatgttc

SEQ ID NO: 249489 - DNA, 350 bp, Gossypium hirsutum
tttgcttttcaccatgtcccgggaaccctgcgtgttcctggccccagagtgtggtggggggattgtcttctctctacttgttgcctccctaggaaagaaggggttgctttctgaacaaagcctgtagaatctgatgcttcttatgactccctggctgcacaagaagaaaacgttctgtcttccatagatgtttctaagtatcctacctctttgaagaaaaataggaatggagtgaggtgacagtgggacaggacacagaaatatgtgtcctttcacgacctttgcttactatgtaaatgctgtgccccttgggtaccggatcggaacattgagatagcaaagccagtagc

SEQ ID NO: 249490 - DNA, 388 bp, Gossypium hirsutum
ctcaaatagggttctagttcttggggtccccatttgtcaaaacttcacgtaagctcgtaagcatgtaaccatttaactgaactggggtggggaggggtttaatatttataacactgcccacccttgtggtacaagcaatcccactgatgacaatcctatttcctttttaaattactaccacaatggcaagtccattgtacaaatacagaaaatcaacatctggttctacactgcccacccccttggctgatggaggcgcatctgactaagcaacatctgtgttcaccaaaaccaatccatgaagtttacacctatctgagcctgtcctcaaactacttaccctattcactatatatagaaagtgcttatatatcttgcatatgacaca

SEQ ID NO: 249491 - DNA, 197 bp, Gossypium hirsutum
cgacatgtctagaaggagctctgccccctcattagagctgctggggacagctatgagccgttccttcacacaggcataactatacagctaattcctactattccatagcatttatacttaaccacctcagtgaaccaagcttgaaggaatttaaaaggcaatttagcttaaatacaaaaataaatttttattttgtt

SEQ ID NO: 249492 - DNA, 401 bp, Gossypium hirsutum
gtgccttgtacccaagtgctttgcttacagcaaatgctgtttctctgtgtcctgacgtcgctggggagaagggattgtttacacacggggatgggagcagactttccactactgtgcaatagagataccgctctcttcagagtaactgtgaacctttttttaaccaacactagctagttttaaaagtcgaaatatttatgatgacgattgtatagcttttaagttatttttctaacgtgtggcttttctgtagccatggtagcgccctagatgtgcatctgggctacccagagtgctgtctctgggcacaattgtggcaggtgtcattcatctcggttttggacactaggcatgagtcctgtctcctttctccttattctccctccacaagctgctcctga

SEQ ID NO: 249493 - DNA, 384 bp, Gossypium hirsutum
atttataagacatttgaatctattatacatcttactcggatatggcaaaaattggcgaggggtttgttcatttggagctatcaaatatattatctgaataaatacattctcattatattaagaggcaaaacctgtcactttagttcttaaccacaagtcccaaatccaacaaccttataacgtgactggatacaaatcatgccaaataaatacctaaagagcatcataaggatcacctttaatctgatatcacggctagctctaatataaatcaccgacaaaggcatgaatcaagtgactaccacctatacacagagaaagatggacgccttcaactacttaagcatcctaacttgaactccacctgcttacatacagaaccct

SEQ ID NO: 249494 - DNA, 199 bp, Gossypium hirsutum
  unsure (1)..(199): unsure at all n locations
aaanaaccatgcattcaaacaaatcaactccactatttttcaaatcactttccactctctaatacacctaattcaaccaacaaaaccaccctaaaataactcactatttcctaattacatttcaccaactaaaacactatctcaactttaaaacatatattctaacaaatctaacaaaacctactaacatataaaccaa

SEQ ID NO: 249495 - DNA, 350 bp, Gossypium hirsutum
aaaatttacttttcaaaccattttaaaaattttaattttcaatcctataaaaatccaaatgaacgtttaatttcctcaataaaaaaaacacacaccaaaccacacctttataaaaacaaacccaaaattaacacctacaaatccttcaatcttcactttaatactaatattaactcctcttccacttttactgctataaaagtcgcacaccatttacccctttattatttttatctaatctaaaaaccaaatccataccatctcctaatatctaacattttaatacacccaacctcgtttaaagtagcaaatttaaaaacttattttaatcaaaattctattctattcat

SEQ ID NO: 249496 - DNA, 369 bp, Gossypium hirsutum
  unsure (1)..(369): unsure at all n locations
ggaagagtcggcgccgctagtgccgggaccagtagcctccgcgagcaagatggccgctcgcgagaccgaggccagggggcaggggtactaagtccggacccgcgtgcccttctcccggccgcctgcgccctcatcaagacctcgcgcttctagccaagacatctacatggattattctcgccgtggtcacgaggccgttccaatagagctctagttggcccagattgagaactctggcatttggctgctctgagctggaacctccgggaggtctgctgcaacaggtgcgaccctgaccgctccatgctcgtgggcncgcggggagcgtgcctcccccggggcggccaccttctgttggttgctgtgcgc

SEQ ID NO: 249497 - DNA, 351 bp, Gossypium hirsutum
gtccgtgatcaccaaggaagaacgaagaaagtgttgatgagggaatccgaaattccttcgagtcgaaccgctgccatctgtcccgtagacgtgtatttttaaactaagccctttgcaatgtcccggcttcctaccctactctgtaattttcactggaactggtaacgtttgtctcgtttcgcaatacagtgtctccattgttgtaaaaaaaaaaaacaaggatgggaagcagtccagaaaaacaaaaaaaaccaaaaaaaaaatcccttaataaaaattttaaaaaattaaaagaaaaaagaaagggtgcaactggtcaaaaacaaaaaaaacgaaaaacatttatttttc

SEQ ID NO: 249498 - DNA, 193 bp, Gossypium hirsutum
acccttccgaaggaagcaatcatggtcctctctgcaaatgccaaattcaccttcaaaacctgttgggggagggtggttgcccatggtgttgaatttgccaagaagccctaacaaagattgtcgcttgctttcccaacaacaaaaccttattttttcacatttatttaagcccccgcttttcccaagtcaaagc

SEQ ID NO: 249499 - DNA, 141 bp, Gossypium hirsutum
aacaatctgatttttaaggtaaattataagatccctattgacttcggaatctgaaatggggacagagcatatctaattgtcaagcaaatctgaacgcaaagttaatttgtgtctgaatgagaaccataaggaaaatgatag

SEQ ID NO: 249500 - DNA, 350 bp, Gossypium hirsutum
cttgagtcatcaattatctctaaagcgtaaagtaataccatactagaagctcggcttacggggacgtcagggaaaagaggaaccctaactgctcaaagccaattcaagagcacacgttggaacttgttgtggctcgctacagactccaactcagcacctactaatgccttacatacagcctatttggtataattgctgacatgctaacctatctgggaatagtagatgctaaaccgaactacatgttcatggaaccaaggattgctccattctggtaattcaagtatagcgcgtatgccatttacggatgacttatgatgcatcatgccaaatatacatattgaataatt

SEQ ID NO: 249501 - DNA, 371 bp, Gossypium hirsutum
aatgagccggtcacaggttcagcttaggttcagtacagaggaagatagacaccccgttagcagcaagagtgctgtcttgtgtgcacaggaaaggggtacttgctgggcctcagctttaaagaccagcttcctttagtatctaacagattaatgcattctacccttatatcaagtgccttgtagcctgaatttcctgaggcctgagatctttgcttctctaccttactgcctaacacatacttcccttcagcacactggagactcaacacacattggatagcccctctatgccaggagtgcaatatcagccctcttcccagaggttcttaaaaagtccacaagcagctgttctctgccccattctgcaagcg

SEQ ID NO: 249502 - DNA, 353 bp, Gossypium hirsutum
cgaatgctgaacaagcagaggaggcgcccagccttccacagtgcaatggaagagagggaggtagttcttgtgaacaaatgtgtgatggaccagatccccaggatgaactgtcctcatcactgagacgtgacacaggagcacaacaacccacaagtgaagagaggtgtacctgtgtcatgtgttccccaacatatgtgccagaagacctagaagcaaggatgggaagcagtcaaggagccatggacactgggaggaaaattcctgcaggaaaatccaagaagaggagaagaaaaaagaaaggttacaactggtcaaaaccaaagcggaggaagccaatgattgtaccgagaaaa

SEQ ID NO: 249503 - DNA, 383 bp, Gossypium hirsutum
gaaatgtcctttaatccagttgcatttctcagtcaattaagtggtgcgccctgctacctggtagggtgtcaacaaagatgctattattaccctctccattttgtaccataatagattttaaaaatctaatgttctttattgcaagacatgcttttgttaactgatttgtttctttgtaacattttacgtacagtttgacatgctcacaggacagggttgtctgtttatttaacattgtagatgtgtaattaataaacaaggctcactacacgatttagagtaggcttcctcatttatgttctcttccaaattcgatcagttagcaaaactattaatacacaaaatatttctacatatgatgagaatggttacaatttcagttt

SEQ ID NO: 249504 - DNA, 143 bp, Gossypium hirsutum
gcgtccgaagccactcttttaagaacttttgtctctcattatacttactgtagctagcttgaaacccgcccggcggcctactttcgtagagcacccaacgttatccatcactactccctgccccttggcgagcggaactctga

SEQ ID NO: 249505 - DNA, 142 bp, Gossypium hirsutum
ctgctaccaaaacaggtgaagaatatttcttaacatcacaaatggaaaccatcttggagggctgcgaaatacctggaatttcgagaacgtaaatgagtttaaaataaatgtggtcacactacattaacctaaagcgcactat

SEQ ID NO: 249506 - DNA, 137 bp, Gossypium hirsutum
ccaacccttccgttcttttgtgggtccttctgtaattgttaagcacagcctggggccaggatggggactacgggtaccatccataccaccagtaccagaactacagtgacaacggatgggtgaacctgaaccgtcag

SEQ ID NO: 249507 - DNA, 388 bp, Gossypium hirsutum
  unsure (1)..(388): unsure at all n locations
cagacttcattcttctttagttgttgactacctcagaagagaagaaaaggacattgcacggagtgatgccttttacacataatatacccccccccacacgctgtaactagaggacccacttcacaaactaacctctgctctttggacgctcggttgtctggttcacgagaattccgtctcacattcttgtgctaaaatacaaaagccctagtaccgggtgcaatttagctagaactttaaatgtagaagtcagttgtgttggctccgaattcatgtcttttgacaaaatacacttggtcctatctacgggttccacatncagactcaaccaacctcaaaaaggagatattcaagaaaaatagcctgtactaaactcatgtattttttc

SEQ ID NO: 249508 - DNA, 279 bp, Gossypium hirsutum
ctctaagaaaatttacttgtttctctacagcagaaatagggagatggaacacatctgtgcacatgtctgcaaagtgggtctcagatcacatccttttttttttttttttttttttttggggtctttttttcggagctggggaccgaacccagggccttgcgcttcctaggtaagcgctctaccactgagctaaatccccagcccttatcctttctaaagcaggcttcttgttgcaaccgtactcctggcttttccaaatccagcacaaatacgtctagt

SEQ ID NO: 249509 - DNA, 188 bp, Gossypium hirsutum
ctcgtttccagttaaaaaaaaaaaaaattaattataaaaaaaaaaaaaaaaaaaaggaatggtttaattttaaaaacatgcaaccacccaaaactcatcataccatatattaccttattaatactgaacaatttatccattgataacaccaacaccacttgtcattattccactcatacaccacatac

SEQ ID NO: 249510 - DNA, 416 bp, Gossypium hirsutum
actggttcggatcccactgtgactgcagtgaatctgcctggagattcaacagcaggctggatttgggcccgtaacttctggcaaccaataatcattggccatagggaccagagtattccgaggggtctattctggaaaacaggaacaccgtttgccagcaaggcacctgctacaccacagaccctgcttccgtccagccatgaaagccctgctcagccctgacccaggcttgcttcctcatggttcgaggctgggatctgaagtctctcctctgtcccctttcccaggtacttgctttaccgagctggccagggcaaaccaatgcacacagcctttgtatgcttgtagatgttaacttgtcgatgacattaatattgtgaattattttatagagttgattttgtatgcatgtactc

SEQ ID NO: 249511 - DNA, 151 bp, Gossypium hirsutum
  unsure (1)..(151): unsure at all n locations
cccatgtttccnaaaaaagtgttacttgatatacctattggttagataatgaagactagagcctgaagataatttataaaagttttgcttatgttgggtcgtccgctatatactaccaaattttaccatgtcactcttgtcgaaaaatacc

SEQ ID NO: 249512 - DNA, 395 bp, Gossypium hirsutum
tgtacttggacatctggctgggcctcgctactttctaatcgtgtcctgcagccaatgagggctgggttctttccaagggggttttccccacctgccacctgttcctaacaattttgcccgaacgcaacttgcttcccggccttaattccttgaatgtgtctgtgcctccaggaattcttttccactcaatttccagccagaaaaagggtttccttgtccagaaaaaaggccaacttttccaaaactcctgagaacccttacctacgtttgaaggactcaaagaggcccagtacccaggactaccatcgtggtcagaaaaacagggcaaatgtgggctgacatagactgtctgagatgagtcacacattcatcctcaggcttggatgtaatggacc

SEQ ID NO: 249513 - DNA, 410 bp, Gossypium hirsutum
ctgagtaatatcatgatatggggaccgcagaatccatctccggtgggatgatggtgtaggtttcctagttccagaaaaatctccttcacattttatataataatttaatcacaatgtccatcgaattcttccttaggcattctttgtaacagtagtgtgctgctctttaaaatattaacctctgacacatgtgtgaacctcattccctgtggtcactaaaatttcttccccactgagcatcaatctttagcagattttaggaaaatactgaattcttagtcaggaaatattttaggaataatcttgctaacagtatattaagtaataaaattacccactctatgtgtgtttcattttttttaaatcacatagaccatggtttttattaaacaatgatttcaatttttccc

SEQ ID NO: 249514 - DNA, 301 bp, Gossypium hirsutum
ttaggccaaccgtgaccaaaaccccaacttttatttttttctttccttcatctctagtagggcggttaaccagagttcttttggaatatattctctacatgctaatatagtcggcgaaggacaaactgtcttgtgttggattctttagcattgtcagttttttcttgacatttctactgtactattataggtcacaaatcctgacgaaggtagggcttgtaaggggaatgccagtgtgtaccaagcatggcgctgtaatcccttcatgaaagagttgtttaaaaattgtctaacaggatcc

SEQ ID NO: 249515 - DNA, 381 bp, Gossypium hirsutum
gatttcttagatggatagggttaaaaaatttttttatatttaaatgtatatttttgagagagatactacattgccaatgactttataaataatcttaaattaacttacaaatttataagatgcaaaccaaaagattttttttttaaagagagagagagaaaagagaaaaaaagcttttattcttttggatctcattatcagaagtattattcagctcgagaaatctgattcccatattggaaaaatgaacgtccttaagtattcctgaagtgtaaaactgggtgtctcctcccagctcttgttacagtgtttctgaccgcttcttcacccttcacagatttaatacaaagttacaagccttacttttataacatatcctac

SEQ ID NO: 249516 - DNA, 266 bp, Gossypium hirsutum
taccggaatggcagggccgacccaggcgtccgcaggaaacggggcattcactgccccattgatgtgtccttgacccctgacgtggtgttgggggcgatcctgtcagccttctgcaaagccacatcctagtaccagaaggccaggcgcgaccgaaccactgctaatttccccgccgggtgatccccgctcttaggtgctgggcagaaagaaaaaggggtgggcatgggaaggaaggatgatggatggtgagggaggtggggagggct

SEQ ID NO: 249517 - DNA, 335 bp, Gossypium hirsutum
  unsure (1)..(335): unsure at all n locations
gtatcactttctactatgaataactttatatagtatctacggggcagtaccctgaggcanagatagttctaattctgtaaaccagctntttgggagctgaggttttaagttctttttatgccgttgtttactagttgacctgaacagtgaggcaggactgttaacatattctccttggtagcaagtcttccctgtttcacaaggatttgtttataaaatcgggataactgttagttggcgaaatcagccagagtcacaaaccaacctgctcaaatggctgttcattgtggagcattggccttttcaggcatttccttggtgcagtagcatgccat

SEQ ID NO: 249518 - DNA, 269 bp, Gossypium hirsutum
ggggttttaactgttactgtggagaaactgttttcccctgagcctaagaaacccaagaccgtcgaggttaaaatagcttgaagcagctttagatttacggttaattgtcaatgggggctttaaataagttgggggttagccctgtaagtagtttctagcgtttgccgtggtggtttctgagtgtgttaaacgtttgatatcagagttctatgtcgtgttgtgttgaaatcatgaaatgcagattttactgttagtattttcttgtaaaa

SEQ ID NO: 249519 - DNA, 387 bp, Gossypium hirsutum
cccacgcgtccgcggatatttgagaatcatgttgtttttggagagcttattcagtcaaagtgggccctacaaagtgacccaaatgcacaaaagtcaatgtcaacaaatttaaacctggattctgaagcatctcaagttactggaggctatagtattggcttctccttgacagtattacagagtgaatgccaacaactcatttgcgagattcttcgagcaactcctgaggctgcatcagcagatgccttacaaactgccaggcttgcaagcaaggttcctacaaatgaaaagagggatgggtcagaagacacactcacttttgctttccgtttcacagatgctactgtttcagttccgaaccagggcgttgatctcattcgccaagga

SEQ ID NO: 249520 - DNA, 414 bp, Gossypium hirsutum
  unsure (1)..(414): unsure at all n locations
aatactcaatcttctaattatctctcctctttttttttagttcgtctcatatcttcaaaatcggcaacaggggaagcaagctaaagcacccaccctcttcccatttttctccaattattatctttattcatccattattctctctttgtgtctatgcttttgttcttctcatagtcttctcagtgttgcctaaatggcgtctttgagctttttttttcccctctggtaagtttttntggactgggttttttgaaaggatccttgtagatgactttgatttcagtactgtctttcaatttttcttcattttctgatatgggttttctttattaattcattgaattgatgttttgatattctatttgttggttcttcttattattttctaaatgtggggtttttcttttttttttc

SEQ ID NO: 249521 - DNA, 222 bp, Gossypium hirsutum
  unsure (1)..(222): unsure at all n locations
attcttgtaaaatattcttccctaatttgtatacctttatgagaaggaaactaaaaaacgagatcgaaagaataaagcaatttcggggtcaccccggttttagcagggcaggtgactgtcctagatgtatcttttagtctttgatgatcatgctctctatgatatctacatttggtnaaaaaaaaaaaaaaaaaaaaaaaaaaaaaaaaaaaaaggacggcc

SEQ ID NO: 249522 - DNA, 384 bp, Gossypium hirsutum
cggacgcgtgggcggactcgtgggcggactcttttgcgcgctcaaaaaaaaaaaaatgggcggtgcataaacccaatcctttagaccgcccatgaaccgaatctcccatatttaattagtttatccaaaaaaaaaattcagcatactttcaatcattaaaccccggcgaaaaatggccgcgtcgctgctattccccgtcgcatcgtcgacgaaaacagccgctcctccaacctactcgccacggaaacctataccttccggtcaccgtttcttctcattcccttccaaaaccaagcctcttctcaaattcaccggcaattcaaacaaacatcggtctttcaccgccaaggccatcgaaaaaagcaaggagagcactgaagacac

SEQ ID NO: 249523 - DNA, 241 bp, Gossypium hirsutum
gatttgcctccttttttcaatatgtcgttttgagcttcaattctcagcgttttgggctggcctgtttcttttttttttccttaatttttgggttaaaatttaaaactgacatgtaatgtatgatgtatgtaaaaaaaaaaaaaaaattgtaactcctagagatctatatttttggcaacttgagaaaattttctcaatgttgcttctcctttattataattaaaaataataataacagaaa

SEQ ID NO: 249524 - DNA, 426 bp, Gossypium hirsutum
cggacgcgtgggtcaatatcccattctctttgttttttagatcccagcgactccaagagcgtatctgggcaatgaatccttccagatcaagaactaaagaaatcaaatttagatcggggaaaaatgaaagtggtcgactagttgccctgttccattttacatcgtccgagattttagattcaagtttcaagctcggggatcgtcagcaaagtctatcacactattgaccgcttttggtatttataaagttgcattttggaactatggcatgtgtaggctgcaatatatttttggaaatgttgaatttggttatgtaattaaagccatgctaatatagcttgctatttttgtttggatttagttttatgggtgcttagttattaggtttagtaagtttggtttagaaatttgggtatgcttgataat

SEQ ID NO: 249525 - DNA, 407 bp, Gossypium hirsutum
  unsure (1)..(407): unsure at all n locations
cttcaataatgatcttcggccattcttgttcaactcctgtttggaccgctttttggcaagctattgcttcagctgcaaaggcgaaagttaccccatggtggatctctgaacaggaaagtaagacaaccccttcttcatttctagctacaattcctaaggcagattgttgatgagtcgcatcattagcaccatcaaaattaattttgacgaactcactagtcttttatttctctctccccagatagcccagagaccgcagcagaagagtttgttctgacatgtagtgagctgatcaaagatctagggaatccactgtaaaaaatccatggtagaatntataagaatattttgaagatttaatagtgtccaaacttccactgtgacaggacattcgcgaaagatatgat

SEQ ID NO: 249526 - DNA, 394 bp, Gossypium hirsutum
  unsure (1)..(394): unsure at all n locations
ctctcttctctttgatccccttcaaatcccagattttcaccgtcttctaaccccaaaacgggacggttgcaaataacacaacccaaagcacgaaattccatcaccttcatcacgactatattctaacagaattagtatcgntaccattttttcttgttttctattgaattgcaggacacaaaacaaggggtttcggagttttggtgctctggatcctttttcttttacttcgtcgaaaaggtggtagatggtggaatcagaagtaaagaagatcaagaagggggataaaatgaagtggagatgggtgatcggagctttcactacgattcttcttgctatcgctttggcttcaagaagtacaccaaagatcccttttaaatctggacagtttagc

SEQ ID NO: 249527 - DNA, 421 bp, Gossypium hirsutum
ctcattttgagtaatttatttattaggtttcccaaatattattaagaaaataaataatagtacgcataaaatttaatccttttttttcacccaccgattcaaccctcctttttgatttgataactttcttcctctcaatttttcaccggaatatgttatgtgttccacatcttcaggctttactgcaccgctgcaatcattgttagagagctacaagagcattttcagttgcatgatccaatggtggcaaaaggctagaagagctatggattgctttcagagtgttagccgtgttaaaggttccctatgccaacagttattaatattcattttctggttatcgagtttccaagatgttgccacattgcatgaccctagttacattccttccacgtctgagctagctaatccaccgactact

SEQ ID NO: 249528 - DNA, 169 bp, Gossypium hirsutum
cccacgcgtccgcccacgcgtccgtgaacacatcatttgctcatgtttatttgaatggagcgtaagacatgcatgtgtctgcagcatttgttatgcctggttaactttataggcttttcagataactttaatattatttagaagtagtgcattatctacaggtttgttt

SEQ ID NO: 249529 - DNA, 223 bp, Gossypium hirsutum
cggacgcgtgggcggacgcgtgggcttggttttggggtcagagattccgaaatatgaaacaatacatcatttcataggcttttttcaacatattcttatggtttctttcggaacggacaggttctacttcagctacttgcgcctacgatgtgtattgtttcggaaaagtattactcgagcttataacggggaaacttgggatcagtaaaagtggagatacatc

SEQ ID NO: 249530 - DNA, 175 bp, Gossypium hirsutum
gtgaaaaaccagacaagagagaaaacaagaaatttttttgttctggatcatgtttcagatgtgtgtgactgttctcacagttccaagcacaagaaacgtaagcagattcaggtgcatctgcttacctaagccgtcgattttcctatgagtgtagatcaagatatcaggtggatat

SEQ ID NO: 249531 - DNA, 286 bp, Gossypium hirsutum
cccacgcgtccgggtgttttgagtttcatgtgtggtgaatgaaaagaggtatttctgtaggagcagaggcagagatggagggggcagtggtgggtactggaagcccatagggagagagaaaccaataatagaaacaggaagcaatgaggtggtagggatgagaagaactatgactttctggggaaggaagccttctaataacaccaacactcgatggttcatgcatcagcattgactaattcattctaatgcaactcaggaaatataattgatgcttaagggtaca

SEQ ID NO: 249532 - DNA, 186 bp, Gossypium hirsutum
gctagatttaatttcgatggaccgctcatatttaatagggataactaacctgataattgggggcatgataagaatttaacggactaacctgattctatgaaaacagttatcattatcaacggaatctgtggaaaaatgggcactgagaagacaaaatctccccatggtatatctacactgaaccag

SEQ ID NO: 249533 - DNA, 430 bp, Gossypium hirsutum
ttcacttttatgggcaaattttcatgcacgctttttttgagaacctgtcaaaccagacagggggacaggaaacgtcttccgtcagtaatgagataccaagtttgtccactcgacagaacggttatgcctgtatttcagccagggctgttctgctccgaggcatttacacagagcggactagaaaggatgtgaactgcatgacctgcgagcttatgacgtgacaggcgcttactatgtattagagatcaccttctgaattgaagaaccatggcacagctggcgataaccaaatgctacgagctgctgagctttactcgccaaccataattggacctgtacaagcccaatttctgacccagggcccaataacagattttaacctataaactacccaggcccaactagtctaacccaattaggccaaacatat

SEQ ID NO: 249534 - DNA, 100 bp, Gossypium hirsutum
acccttccggttttgtcctactatgtgttatattatgtgcctacttaagctacctttcccggttatcaagagtgcctatatagaactctctctctcaaaa

SEQ ID NO: 249535 - DNA, 431 bp, Gossypium hirsutum
cccacgcgtccggctcagtagtatcaattgttttaagagctgggggactaatgcacgagggctggtaaatggcatgcaacagtctttaccggtgacaacaaatgttgttgaaagcttgccctcattggaagtgaaattatcttctcaagaggcttctcccgtgaaagagcccctcctcacttcagacagccatgcacttactgtggagcagccaccggaatgtgctaagaagattggtgaaattgtgccagttgtacaccctgtgaatgatgtaaaccgtggaaccttggagggccatgaaattacttctgctagaacctctaaaactgatacacctattaatgagtgtgttcaacctactggtgctatcgatgaactgcaagttggaagagaaaaaaggcatgatcagccttctgtggtgagagaagtta

SEQ ID NO: 249536 - DNA, 400 bp, Gossypium hirsutum
tctggaagttgtatttcacttggcactgatgtacattagagtctcgaccagagtgatctgagatgtaagcctgggtggaaggatatctttcgtatgaatcagaatgagcttgaagctgagatcagaaaagtttctcgggattcaacccttgatccaaggagaaaagcttatcttattcaaaatcttatgaccagtcgctggatagctgcacagcagaagtctcctcaaacctcagcaattgaatgttcaaatgatgaagacttatatggatgctctccatcttttagagatctagagaaacaggaatttggatgtgaacattacaaaagaaattgtaaactccgtgctgcttgctgtggaaaactatataccctgtaggtttgccatgattaagtcagtg

SEQ ID NO: 249537 - DNA, 349 bp, Gossypium hirsutum
attccaaacactgaaactacttggtttcttgggagttatccttgtgttggttggccatagagtgctttcccatttggctgctacatctgccaagcttaaatctgcctgagttgattgaagattaattcctattcctttgcaagcgttgcttgctgcaagattattctcctcttctcttttggttagcagatttttcttctgtcatttttaacccaaaattttggtagggcttattttctcgattcaagtcaatctgttacgtcaaagaaaaagaaaaattttgctactccaaatttaaagcctcttaagttttattaggtagcagcaacatcgagatgactttcgattc

SEQ ID NO: 249538 - DNA, 292 bp, Gossypium hirsutum
gattttgtttatggatggagtctgggttaaagtgggcgttggaaagacaaaattaccctctttaatatttaaactaaccgagctatcttggcgattggttggtacttccattttcctttttctttcaacttccaagcccctgacttgtcggcccggtgtttgagaaggctacgcaatttttcatatgtactataatacccttaataagtcggtatagccagccataaagctaatgtaggtaaggggtatatttgccaatataaaaattgggaataatcaaaatctatatata

SEQ ID NO: 249539 - DNA, 433 bp, Gossypium hirsutum
acgcccacgcgtccgaaggtttgccaagtgaccaatttggactttcctctgaatttgcgtcaggcatcagaaagtttactgagccagctgctagtgatgaagacggcaatgcggaagacatgtcaaacggtgaatttgctgtaaaggacagtggaaatgtgggtaggcaccaggtgctgttggttgcagctgctgacagttctgaaggtctgccaccagctatccggcgttgtttcagccatgaagtaagcatgggtcccttgactgaagagcaaagggctgaaatgttgtcacagtcactgcaaggtgtttctgaacttctttctgatactcgcttagaggattttgtgaaggacatagtggggcagacttctgggttcatgcctcgtgatttgtgtgctttagttgctgatactggtgctaaactaatctc

SEQ ID NO: 249540 - DNA, 448 bp, Gossypium hirsutum
gacccacgcgaacgaaaacgcgtacaggatctggacacaccgtgtatttagtcttgaatcctgaggcaagggaatgcattatatatcctgacccaccaccccgttattcatcaacgaaggaaccactgacgttctaatgtgtttacaatatagtgctacaacatgattggttactaaaggctagtctacttgagtttctgcatcattttctgatttcaggataactaaatgcgtagaggaaaacctctctacttgaacgaggaacgctatgccgctctaactaacatggttgcttctcatggccttgatcagagttcaaaggttcttggtcaaactaccattggtaccttcttcacggtttagtttggttacatgtttaaggtggtgggtgagagcatttttatccttatgtacctttcatattagcgaccataaggtctaagttaaa

SEQ ID NO: 249541 - DNA, 215 bp, Gossypium hirsutum
agccttccgcgaccccttggccggccccttggcttgaaattgttttgttggtacctggccttttgaggggggggttgtgcctttttccttctggttggctacctcctggacctatccccgaccccgtttggccaatgatccaaaggttgcaaagaagggagggggggggcattcaaatggcctggttgatgtttccaggaggcctttaaaatttg

SEQ ID NO: 249542 - DNA, 394 bp, Gossypium hirsutum
ccttccggccggttgttgtggcccattttgaacccgatcttatatatgatggattaaaatatgaagcggagtggattccatggccaggcctaaaccattcaggggtaatatctgcaataattggttaaggagtgtgactaaaaggctgtcttggttggaacttggaagccctctgctttttcatttgcaacggcgatgcggttgtttcaatatccatggaaagattcaaaactatgtatgaggatggtatgacttctcaatcggattgcagaatcgggctgagaggatagatatgtaaaattcataaaagggtgttggagatcttcataaagttcatgaggtcaaatggaggatgatagaatttaaaacagaaaatgttgtacctaaagaataa

SEQ ID NO: 249543 - DNA, 417 bp, Gossypium hirsutum
aatgcccgaccgacgcgtccgaaatgggatcttttcatggtttatgtatgaatgtgctcgatccaaagagttcctatgaagtatggcaatgaggagttttggtgaggaatttatgtatttaatgtttcgaagggtgataactgaagggttttcttgtttccctccaagaggtgggccccaattcttgaggaatggtatttgagaggctttattgaggtgttggtcttgatttttgagaggttatgtttgaggcgggtgaagggcataacaattctgaatatttttagctacaaagtcctatgtcccaaatgaagtaatgcacttacattttccaaaaattcatgtcattagttgttagattattataaaccatgatgttgatgaaaaacttaattttttaattcatctatttataaa

SEQ ID NO: 249544 - DNA, 368 bp, Gossypium hirsutum
acgaaaacgcgtaaaggctttgttcacggggtgtttttaggtcccaatcctgacctccggccacggtgcattgcttgcacacgcgcctaacgcgccatcgaacacggtggtctgaaggcttaaaaacctttgcccttccacaggtgacctcttttcccttagatccttacttgtatatgataaaacaattcatatatgttcaaaataaagcacgagatatgctattaaatcaccttttgagagactgttggtatttttttttgaatgaatgtctgtgagtttatttctttcttccccaaaaaagaagggtccccttacaccgttttaattcggacttttatagccactactgttattacataaactgg

SEQ ID NO: 249545 - DNA, 335 bp, Gossypium hirsutum
cccacgcgtccgcccacgcgtccgcggacgcgtggggaattatgggaggagaatatcaaggctgagcttgttcctatacctgatccaagcctcacggagcaatacgaatatgcaagtgagcatgagataaaatgtcttgttattataacagacatgggtgtatctcaaactggctttgttaaggttcgtcatcttgatcttaagaaggagaaagaggttcagagagaagatcttgtaagatttctgttgaatgcaattgggacacaattccgaaacccttcagtttggttctagtactgtcttcatcaaatttcagtaggtgtatcagtcagaat

SEQ ID NO: 249546 - DNA, 387 bp, Gossypium hirsutum
cccacgcgtacgcaaaaacaaaatgatgcccagacccagtcttttgaatctcttttgatcacaatttattttattttttatttgggatttgagaggttttttttaaaaaaaaatttgtttccattcttaaagttttggagatataaagagaaaaatagaccttagggttaatttgtggttagaaaataaagagattttcttctctccttttttttggtcccaaaataaagaaattgatacttcaaaaatagatagattctaagcgtttttgttctgttaatccttttagggttttttgaacttttttttgttccttttttgccctttttacagctttgattattcccttcttcttcctttaacctgaaattttttgttctattgact

SEQ ID NO: 249547 - DNA, 403 bp, Gossypium hirsutum
aagatttccgaccccaacctaagaaataactccaatttcggaaattatacgaagattttgtttttataagtgtataataattgcgctcaagtcgtcaaattcatattttgcggtgggtattgtatagattattatttaaggattggctcggttccgatttcatcaccattttcatatctcaaatgatctctctgtaaccccttgctgttaatttttatagaacacacgtccgcattactttcccttcatatttgttggaaactaaaaacaaaatgggaaggatattcatgatcactcttgaaggacgcgtttatagctgcaagcactgctttacccatctggccctccttgacgacattatttctaagtctttccactgcgggcatggaaaggcttatctctt

SEQ ID NO: 249548 - DNA, 380 bp, Gossypium hirsutum
acgcatcatcctccccaatttcatcacattattatttcccatttaaccatttaacgttatggggggcactcccagtataaagctaaccctaccccacggccttagctaacactcggcaaacaaacacgcttcatttcaaaccctaagctttttttcaccagaaacatactcaccttccttatatacgatcacttcctttttcaacaaaccctaaacaatcatctcgtcatctcacactaatttaaaaaaaaaaaaacaaatctcgtttttagcatctcgatcttcgttttttttagtactttttttcgaatattcgtatatttgtcgattcgactgttttttgttatttgattttgagggaacagggagagatggtggga

SEQ ID NO: 249549 - DNA, 196 bp, Gossypium hirsutum
  unsure (1)..(196): unsure at all n locations
cccacgcgtncgcccacgcgtncgnccacgcgttcggtttcttagtagcctctgtgaagagcccaatcaaggaaaaaacaaaaaaacccaactccaaatttgttaaaagaaggaaggttgaagattccaaggaggaaacgcccccctctcttccgagagagtttatttaaaagtttcacacactttgaaaggggtg

SEQ ID NO: 249550 - DNA, 282 bp, Gossypium hirsutum
cggacgcgtgggtacttatctaacttgagagatgtcattcatggaagcaagagacaggctgacaaggcaccacgaatggtcagtccgacatctatagcgagcagtgagattatcaatcagataacccatcaagacgttctcaccgactacaaatgtgttctcgagatcaagactcagagctcagctgatgatgatggcacggagggttcaactattgagggaacccttaggcctgacacacctggtcctggagaccgttttatggaacacgactacaatagc

SEQ ID NO: 249551 - DNA, 398 bp, Gossypium hirsutum
aacaataatactcactgagcactgctgggcagcttctagagtattagatttgaaccgaccggcgttacccaaacgccatcacatcatcctcaaattcttaatctcttttctattactcggtctagcttttcgtctcttcgtctccgattctctcagctttttcacttcatccgtcgtcgaagcaccgccgccgttggtggaggagacgaatgtcgtaattgagcctcctcttccagccacttcagcaggtgatttgttgtcggtaaatgagagcaaaacgattccaaacgaggagatatcaatgtcttttaatgcatcaaatgctgcaggtgaatgtgatctattcgtgggggattggatacccgacccgtcggctccggtgtacacgaattcgagtt

SEQ ID NO: 249552 - DNA, 338 bp, Gossypium hirsutum
ctatctctctccggtggctgctttgtatctgagtgtactattgaatgccgagcaaatcgaggacggcggaagtgagagccactatccctagaagaactgctactccaccacacccatatagcatgcaagtgcaccaaagaggaccttcactgctctatgtcacactgatgtatactactgggagtgttagggatccactccattgatcacttgtatacttactgatgaaacctcaaagatcgaccagaaggcgggtggttgctgattaactccaaggaggaagtcgatacgaaaggtgtcgagtggaagaccaaagaggaaggtcgtgaagctttttg

SEQ ID NO: 249553 - DNA, 402 bp, Gossypium hirsutum
cgccgtttgggacctcccttccaaaagaaaggtttacctaatcggtcctcttttaccctccgaagcctctctcgatctccacccaccctctccctcccagcatcgacatcgacagaagctgccagcgaaagctccagcccatcccgactttcattttcgcatatttctctgctaaacggtctcagccggttatcatttctcatctttcctcttcgcatatttctctgctaaacggtctcagacttccatcttcgcatatttcgcatatttcttcgcatctttcctctctgcatgcattagtgggtgttgttgcatttttttttataaatctgattacgattgtttcatcagtttcttggtaaatcagaatagggtttcttgctggttatgaatttttttttc

SEQ ID NO: 249554 - DNA, 391 bp, Gossypium hirsutum
cccacgcgtccgccaacatcaactagtcagtacactccaagcaacaaggatggtagaagcaatatggatgacaggagtaaacgataaggcatgcaatattggaaaaaagctggagaagaaggcaagttccagtgaggttggttggtggaatgaggcaaaaagatggttgtcattggggacgggacaggggctctgctttttattgtgacaaagggagtgagtaatcatctctataaagttaaacgcccgttgaggacacaatcacgaagccttatgttgagccctcaaaaacccaaaaaaaaaagccttatgctgtatctgctagacctgctatatataccatatgcagtcgtacccatgtaatggaatggtatgggtgagattgagaaac

SEQ ID NO: 249555 - DNA, 393 bp, Gossypium hirsutum
ctaaacttctttaccttagatttccaagttctctgagatcttcctcctcttcccttttgaaggcggcatctatcaaaaacatcaatggctctccgcctgcctagtatcgataactctaagaaggttcccaagggctactgtgcagtatccagcggagactaccagtagaggaacgtgatgccgtacaccctcttgaaccagactagatgttaagacctgctatggatgccacaagaagagagctgatgtagccatactactggcgggctcacgagtcccagcaatgaagacacctacctcgaagttacctgccgcttgtacacattgtgagatgattaacacacatcaggccatacacttttgtcaaccatatatcactaatacatgtcaaca

SEQ ID NO: 249556 - DNA, 271 bp, Gossypium hirsutum
gaagaaaatattaaagctggtctacttctaatacactgtgggaccagatgtgggatgagaatagagatgcactgcagctgaacatgagctatgaaatgaactcaacaggaaaacttacaacatacaatgactcgggttaagaggttgtaaggcggagttctggtaaatataaccagcagtgcgggaaagggataagtggaagatcttggacgttgcaggatgcatctgacgaagagacgaacagctggtggattataggggatatttaatt

SEQ ID NO: 249557 - DNA, 238 bp, Gossypium hirsutum
aaaaaaaaaaacagttacagatcgctagatcattaaaaaatctaaatcgagttcgaagagttgcagctttgttgaggcggttgtttttgtgtgtgtgtttgggttatggtaattgtctgaagagaaacaaaacaaagatggttgcggcagctgcggttgttttcaactaagggtgccggctttcgttgatccatattttggttaagtaagtttcattttggttgttgatcaacttctt

SEQ ID NO: 249558 - DNA, 397 bp, Gossypium hirsutum
ctccttttctttttccttttcatttctagggttttcttttgttttttttaaattgttcactatttgttttaaaattttgtttggttgaaatttcagtttattttatgatattcatcttgttttagtttttagggtttttctgcgattttttttctcattgttgtggttcgattaatgaagtatgattgagatgtaaaatcgtgaagttattatttacagagaaaagaaacgtctctcgctctcctttttctccattttgaactccaaatttttgtaaaaagaaaggaaatcaaaacaatgtcaaagagcaaagcaagaaacaaaaagcgtggatcggagtccttgctcagaaaatcggatccgaaaacccgactcattgatgatttcgatcctgatc

SEQ ID NO: 249559 - DNA, 274 bp, Gossypium hirsutum
  unsure (1)..(274): unsure at all n locations
tgttgtttcacttttagctcttcttctgtttttttctcgtacggnttaattttcgaccgcgcaagagcaaaccgaacagagaagttctaagcattagaaaaagcaataaaaacccaacaatggcgccgggttttgatttatgggcaaaaggcagccataaaggtacaccagatgtggtcaaaatggaaaaggcacacagcagacagatctatcttaaagggacattctgagacgactgtctcaataactacactcggaccggttctagtgaaaa

SEQ ID NO: 249560 - DNA, 398 bp, Gossypium hirsutum
cccacgcgtccgggggctggaaaaaatagatcgtttgttcaatacatatgcaaatagttccgcgggcatgattgatccagaaggtattgaaacactctgttcagatctagtaaagtgcaagacaatggtcgagcctcagaaatcactggtagtgtaccttttagatcaactgatggagataagaagttacctgataggttataattgttagctttttgagcggaggatatgaatctattttgcttcatgtggaggctgaagctttttctctatggtgatgatgatggtcaaccgaatactaatttcagcacaatgcgagttagaatatgctcagtttttggttgttgcttagaatcctctgtttgaacagaagagggaccttcatgtacttcggttac

SEQ ID NO: 249561 - DNA, 198 bp, Gossypium hirsutum
  unsure (1)..(198): unsure at all n locations
cggactcgtgggtggaatttcttggcttannctanntgtggatggccatccaccatgacgaatgtcttgacactggtgcgtacgcgttgttttacctgtgcttcttgttgttatttcaatatgtttcaatttatctgttgaaaccactctttactcatgatccattcctatattacacacttttttttttttatagtt

SEQ ID NO: 249562 - DNA, 484 bp, Gossypium hirsutum
  unsure (1)..(484): unsure at all n locations
agtacaaaaaaagcgnnacaccacacgagaggtgtgtgttgcttannacaaccatgaanntgatcgnncaatgctttgttgacccaagagtgggananntattttgcnnctggcaccaaagtgngtgngacttctcannaaatctngnntcatcccaaacggagtttggacttttctaaacttatgtangcncatngnnctggtgattcaaagggtacaaagggccgtccaagctcaattantnncatgtgnnttatgggatgaagaaccaaagtttacaagcttgatgctttttgcagtcttcttacccaaacaacctttgtctatacaatattgcaaaggtgcacgcgatcntgtgtctattcgttccttcctgcatanctatgctcatctnntgctgcattccgagctcgtttttacatggaaccagagacttcagacagtggatcaatgataagtggcctggcagcagggcgaggaggta

SEQ ID NO: 249563 - DNA, 415 bp, Gossypium hirsutum
  unsure (1)..(415): unsure at all n locations
cgcccacgccgtccgattaaaatctctttgcaactctgttatcatatttagatatnggagaacaacgtcaggggacatatcttgcaatgagctttttggtagcctttccatcnaactggatcntggtanctgatgctatacanggctgcagacacttagtgatggagagtatgaaatatatgaacaatttggtgatgataactactctgatgacgatgacgatgatgatgatggtggtgatgatagctaacgttcctaactccaaagtttacaggtagctttcttgcctttgttttggctccttttagtcattcatcttgcttcacttacagcaacaacagttcaaaatttctaatggaaattaatgcgattgatttgttgtcagaggatatagctagtatctttctaagttata

SEQ ID NO: 249564 - DNA, 477 bp, Gossypium hirsutum
gtaccggacctgaaggcccggcgccaggcgtccggcttcgatcgaacctcgaccctccgtctgccattctcgattcaccgtgatgaacggagatcaggctgtgcgagcctcaaggtggtgtcctttccgccttccactcccctcggacttcgatttcggcgaagcaaaggagatctcacggcgtatttacgaggtgaagtttcatttccctcttttcctttttattgtcttagatgcgaaaaataaggaaagaaaatcgaaaggaatagatcaagtgaaaaataaacaataaatccaaagattcaaagaacgggaatcaccttcctcttttttccttactttgtattcaaaatctgtgtgttttttttttgcgtatcctctttttacaacgattacagatcctagcttttatatccggaaagaagaaagaaaaaaaaagaattaaaagaattcgacatttgttctttggtttttttt

SEQ ID NO: 249565 - DNA, 440 bp, Gossypium hirsutum
aaaaatccaagcctatatcttccatccttgacttttttttaaaagaaaactttaacgacctagagattctcacccattgtgtttcttctagaaaaacaatatgcaacaacaagaagatccccagggcaagccactggcacctgttcaagattatccaagaagcgacatggagttcgggggaattaaacccaaatctttacgccgagaagaaaaaagcagttaatgtctcgtttacgttctcaccatcacggtcgtgctaggaaccattcttttgacattcgcaagtatctttttacgtactagaacacccgcattcaagttccgatcggcacatgttagaaatctcaagttcgtaactaagttaacgtctgcgttcttctacttcacactcatgacgcagatcgctgatgagaacaccaattttggagacttccggctcg

SEQ ID NO: 249566 - DNA, 232 bp, Gossypium hirsutum
cccacgcttccaaattatattacacacgattcttttctctgagaacccattcttgaaagaaggtcacctatcaagtgcgcgggtagagatgaaccacctctctctgaacgacactgtcaccaccactaccactaacagcaccaaccacatcaactgctactataggcccccgagcgccaagatatcaatctgcaacgccagcacgcacaaaccaattttctcagcagcactc

SEQ ID NO: 249567 - DNA, 331 bp, Gossypium hirsutum
cgacccacgcgacccggactctttacaaaaaccctatctaaatcttcacaaatgaactgttaacgctaatacaggtgtatttataaaatacatacatccgcaaaacatatataaaattactcaatcgatctttttattaattattatatcacacaaattaaacaaacgaaaaccaaataaataccataaacttaattaactccaatgagttaacaatcacgaataaaaaaaacactgtatacaagcaacatactagcccttaacaaaacagataataaacataggacaaagaataattaataacctaacatgcaacctttaacgcttaagg

SEQ ID NO: 249568 - DNA, 197 bp, Gossypium hirsutum
caaaatcatacatcccttcttttcatgcttccattattttttttctcaatttcgcagcgttggtcggtggatttcatatcattgcataaacaaccagtcttctttgagtattatcctgattattatcaaacatactgcctttgttgagccaatactatagagaccgtctcctaactttaaacatacctgctaatttt

SEQ ID NO: 249569 - DNA, 272 bp, Gossypium hirsutum
cccacgcgtccgagaaaccggatgaacacttgtttattgggaccctcgaaagccggcatctgagacggttctactatctgccatatggcgtcaccgaagaaagatgatgacgcgtgtaaccagtcaccatgaggacaggtgacccggtgttcaaacggctcacatcaatctcaaagtcaaaggacagctctgctatgacttgttctctaggattaaaatgaagtgctcaacttacgaaactcatgaatgccaattgggatcagggatcagag

SEQ ID NO: 249570 - DNA, 353 bp, Gossypium hirsutum
gagccccatatccttcatgaatcggaaattattgttaagaagaaacttgacatgtatgggggggactaaatacttatagagatatgacaccaacattgaatccatctgaagatctttctcatgatgttctgaatattgtggcgaatataatgaactacaggctgatgcagttgaatagcctgctgacccttgatgtgactgtggtttctcacctatgctcagtgagcaggctatatactacaaaccggcttgcttgagcaaatatgctgattctgagttgctgccgccagcaccctatgacaaagctgcaggaaacctttcaccaccgacttcgaagtttaatcagagacagc

SEQ ID NO: 249571 - DNA, 442 bp, Gossypium hirsutum
ctctttccaacttcgatttcaacgagaggaacctttggcatatctgcaagataaggctgtcggcgctttttcttcaaacaaaatcgatttctttatatttgattcgccctctcttttattcgtttatcatgcgatagatcaatcaaaaaaacataaactaaatcggaagaaaaaaatgagaatcaccttgtggagaccttatttagaaaagcttttatgtattgatcttacttttgtgcatgtgtttgctctattttattgcactgatgtgtattcgtgaaaaaaaatgctttcctcttcttctcctatcttcctttacaaagattaaaagctgggcttttatattcgaaaaaggaaataaatcgcaaaaatacactatacttgtttccattcgctgctgtatttgtttccttcttgcaggtacagagtctgttggcatgcc

SEQ ID NO: 249572 - DNA, 216 bp, Gossypium hirsutum
caaaattcgatacatcctctttccaccgtttcactccttcaactacacatcgatgacgcgagggtctttatcaagactgggcgtcaccatgcacccttcctctaaaacggagaatcacagatcttatacttctaccaggctgcaacctatccatcgctagcaaatgtcggctactgctttatctaccctctgattgtcaatgaatgaacaaatgaa

SEQ ID NO: 249573 - DNA, 441 bp, Gossypium hirsutum
cccacgcgtccgtaagttttaaaagttgtccatatatattaaaaatagtagaagtatcatagagtcggttatactaaaagtcagattacattttgtcttttctattaaaaaatagagtaaattagtaaaagcaaactagtcattttattaaaaagttcatcatttttgctattaaaaactggtctctgtacatcagtaagaagtacacgtggcattttacgtgttattgtctaattattctgtcagtcatactagtttttaataatacaaatggatgaagttttaaagaaaaaaagaccaatttactatttaatctaacaaataggttttattttgccatttttttagtagagtgaaaaaaatgtaatttaactcctaatataatgactttcatgatacttttaccactaaagactaaataagaaaagttagtactctata

SEQ ID NO: 249574 - DNA, 433 bp, Gossypium hirsutum
  unsure (1)..(433): unsure at all n locations
cggggcggacccacgcgtccgcccacgcgtccgcccacgcgtccggtccatctactacaaatttaggcactgaaagttcaaatggtctgcaaaagcttgggtttcctggttttgacttgccacctactaacatgggtcaggtgagtctcacctccatcttgggcgcagctaacgagcagcaacttcctggtttggaacttgggttgtcccaagaaggtcatattggggggctaaatcctcaagctttgagccagatttatcagcagatggggcaggctagggtgcaccaacaagagcagtaccagcaccagcaccaacaccaacaccaacaccaacaccaacccccttccaaggatgattcccaaggatcaggccagtaaangtataaactttgggagcaattaaagaattgcatttctgagagaggatgccc

SEQ ID NO: 249575 - DNA, 436 bp, Gossypium hirsutum
cggattttgaaattggttatcaataagggtttgttgaagagagtttatacattaattgtctgggtttcgagtttacttccgttaagggttcttttacttggtttatctgttttatctagaccagaacatttcctgtttgaagctcttgcattctcagcttttcttgtcctactatgttgtgctggggtctgtatcgtcatactcgtatactgtccggttggcggattgtcttgcactcggtaatcttaatgacttggaggctcggagaagggttattctcgatgatcaaaatgacactgcatcccttatcgccaatcagactcatcttgatgaaagcattggaatcagccccgagcggaattctgatgcttctactaaacgcggatcgatttcttttcggactttcatacgagatgaaccctcgtctggtccattt

SEQ ID NO: 249576 - DNA, 241 bp, Gossypium hirsutum
cacacgcttccagccactctttccaccatttctttttttgaacagacaatttatgagagtgggtgcttaaacaagaatgagtgtgaacaaacaccaatcctatgacacggaaaatggcagattacatcaagctcacagatgaaataaaatacttgtctagacaacgccgccaacgcaactatagtcaatcatatagacatgtctaaacaaatctagttgctcataagcatgttacctgaca

SEQ ID NO: 249577 - DNA, 338 bp, Gossypium hirsutum
ctcaggtcctatccctatcttgtctgctactcatatctacattgacgacactggaagggggggtgaaaagattttttccgaaccatatgaaggcaatagtgacatatcaccctatatgtgtcctacttcagataccgaaaaggccaacagcagcagaattccttactatatcaaaatatttctcactattgcgatcttattcacattctccattttaggatgtttgctatgttcaccgattaagctcaagaataaccatgtcagcgtacagcccaccaagaatggtgatttgtgtttcatactggactatgcatggaagatagcatacaaggatatcg

SEQ ID NO: 249578 - DNA, 437 bp, Gossypium hirsutum
cccacgcgtccgaccaactgcaatcatcctagataatttttatcagcagaagctaatagaaggtcgtgtcccaaatgcattcaaaaagggtatatagcgtccgagatatcagccaattccagtatcttcacgaaacagatgaatatgggaaggaacatggagcaccatcttcgctactgcaggatgatcatcatccctcagagaaagggaagggtcgtcgtaaaagatccatgctgagcgaggaggaaaaaagggaaaggaagagacaacatgacgccagatacaggatgaagaaaaaccaggagaatgaaaggctcaaggaagagaatatcaggttaaaaaaccagttaaaagagaaggacagtgagacaacactagatttacatgagttcatgcaagatatggacattatgcagggttttcctattgatttggga

SEQ ID NO: 249579 - DNA, 262 bp, Gossypium hirsutum
cacagccaacatcaaaaggaagcgaccaactcctatgaaaggcggaaaagcggtgcgagcgagcggtggtggagatgaagacgatgattacgatgaagagtggacaggtgcgtctgtgtatcaccaatgtcaaacgcaactgtcaagctaatagaacagcgatggagttatggaaacagcagtgaaagagcccaaatatgtatcaccaactctcctaacaattgaaagaggagattcaaccaaagaagaagctgtatacatt

SEQ ID NO: 249580 - DNA, 325 bp, Gossypium hirsutum
  unsure (1)..(325): unsure at all n locations
cgtttataccgctaataaatacctccatatacattatccactgcataagccaccaccggcgcggtcacatcaaccataaatacgtaaaaaaactttttaaaacactttccttcattcatcacttcccccttcagaaacacatcactaaacatatcactgaaccccctatctaaccctctctatttttacctcgatttttacctgaacgctntaaccttaaaaaagaccctaaaaaagaacccgctttgctcatcaccggtgctctgatagagttgtcggagctactacctcatctactacctctttctcaggagcacatttatga

SEQ ID NO: 249581 - DNA, 432 bp, Gossypium hirsutum
caaggatcagccacttgatccacctcttccgttttaagaatactcgaaaagcagcaatggagcgaagcataaattgtatggagttggagttgcagcaggttgctttttgcttcttcttatcatcatcttgttcgctgctgttaagttcaataagaaaggggatggagttcttcaaattggcaatgaaagaagtacaaattatgtattaccagctgacctccgtattgaaattgcgagattcgaccaaggtttaagagtgtttacatttaaggagatcaagaaggctacatggaatttcagttctaagtatagaatcaatggttctgtctattccggcagttttgatgggaagatcctggctgttaaaataatgagacaaaatgcatccaaggtggtacaattgctgaagaacatcaatcatttcaatctgat

SEQ ID NO: 249582 - DNA, 531 bp, Gossypium hirsutum
  unsure (1)..(531): unsure at all n locations
gggaatatgaaaacccgggcgcgacccacgccgtccagaatattctgccatcaagtaacacgtctcgctatgttatttataagnnaagactgannagacgctgcgttcgagtggcgttatactaggaggaatacgtagcggcacaganaagatgcctcgataaaagnnggccgccggtgtaacaattacctggtaactttctcaaccaaccatgtnnaccagctancagcnntggattcnntggtcggataaaaccannatttctcgccggagagtttcccttgcaacacgctaactacannaaccccggtcccaacctctcgcaccttctgaacaatctcagtctacaatgnagtcccagcacaagagaccatgcnntccggccaaccgtcttaccaacgcgccttncacaagtttccaagctccttgtcttctgcactcagcannacgcaacaatatgtgttcgacccggtaaaaccggacaatagccggtcaaaggcttactacanccaaacgtacaagaagaatgcc

SEQ ID NO: 249583 - DNA, 395 bp, Gossypium hirsutum
cccggggccgccccacgcgtccgcgtctctgcttataaacaacgtcgtgctttacttggggcaatttttttaacctagtcaatttgtttcaatttagggtatttttcttcgtttagcttcaaatcaagtggagatctggtttggttagtaacgcaaacaaggaggtatggataaagcaaaactctctgaatggggcgagaaactgagaacgggtggagctcaaatgagtagaatggttagtgggaaaatgaaggaaattcttcaaggccccacatccgagtggaaagtcgtcgatgaggccacttctgagacattagaagaacccaactggggattgaacatgaagatatgtgctatgatcaacagcgaagagttcaatgggaccgaaattgtta

SEQ ID NO: 249584 - DNA, 417 bp, Gossypium hirsutum
cccacgcgtccgagaaactcagcaaaagagaagcccaaatctctatggcgatggcgagtctgcgatcgtctccacctgcaccatcacctccttcaatctccgcttcccattttgagtcctccgtcactcttgccaccgctcttctaccaccgcaggctcagtttgttgctaccggcgaaaatggaacgctcaatgtcgatgaccaaaagcctcaaattgctaatcattttgcgtaagttggttttttctactcttttttaactttcaaattttagatataattccattgagcacccttcttccttggagccacttgaaagtaattgcttaatatctctttaaagcatgtgacgttgatttaacccagttctgcacagtaatttcatgtttaaaggaatgattgtgaaagaaaaagca

SEQ ID NO: 249585 - DNA, 427 bp, Gossypium hirsutum
  unsure (1)..(427): unsure at all n locations
ggaattgccgggccgggccgagcgacgcgtcagtccacgcgttcgaaaaagccaaaggaagatttattggtggttcgatccatggcccgtggtctggaagagagagttcaatcgcacttggcctttcctcgttggtttcgccgtcaccgggaccatcatcacaaagttctcccttggtctaaccgaggaagatgctaagaactctccctttgctcagaagcacaagaggtgatccaactgatttcaaaagcctatatggttgcagtcccttggtatgagaggctcagntgtttttcttttttctttttcccaaggaacaatgaaaataacagaggacttcagttctgagtacactttattttggggattaatgatttggccttcaataaaggttttggttttgattaaggttaaaccacctttccag

SEQ ID NO: 249586 - DNA, 402 bp, Gossypium hirsutum
cggaattgaaggcccgggccgacccacgcgtgcacgatctctcttttgactccttctctctacatttttttcttcagatctccaaattgaagcgcgaaattcgtgttttctgcacaaacccaagcttttgttcaaaaaaagttcaaaaaaaggtggcatttttaatatcagatgtctcatgtgaaatgaagaagacgaacattatcgacctccattgttattcttctttttgttaccttttgtttcttttagtttcagtttttgtatccttatgttcatgcgatgagcattatgcttccagccatggcggacttaccgacaaggaagtgtcgtacataaagcaacgacagctgctttattacagagatgagttcggtgacagaggggagaacgtcaccgtcg

SEQ ID NO: 249587 - DNA, 455 bp, Gossypium hirsutum
gtaccggaatggaaggcccggcgccagagcgacccgttcaacttggtcttgctctcccaactccaaacatgcttaaggggttcgacttgaacaaccaggggcttgatcagctcaaagaaatggggggtttggaagcttggaacaaggctgctggttgtttcgctgacaaagattgtgttaaaagtaaacgcagtttcgagcaggcttttggaaactttacagaagagtgtagaacaaagcctttgcttctttggagtggtcagccaaacgaagaagaagatcacaaggatcaaaagaaagcaactttttcaaccacggatgagaacgacgcagaggaagatgatcaagttgtggggtggccacccattaaaacatggaggaagaaaatattccagcagcagcagcagccccgagttggaagggcctgagacaacagggttgcagagaatgaaaat

SEQ ID NO: 249588 - DNA, 220 bp, Gossypium hirsutum
cgttccatgaagacagtactagcacatgatttcattgatccataataaacctccaaagcccgtgggaggactactacaatctagctataaaaggaaatcagcatctaatgccttaaccgcgacacgtcgactgactgcagctttaggaacaccgtagacgtagacgatgacctagatgaaagttatatgtattgtgatacaatctgacgaccctgtaaac

SEQ ID NO: 249589 - DNA, 203 bp, Gossypium hirsutum
cccacgcgtgcggatacgcttgatcatgggctatttcttatcctggttgcaatcaaggaacggggcgaggaacataatgagggagactatcatctttacttactacattcaacactaccatgaccatcacatggcaaatttacttctgaaatacatactgagatacacacttaatacaacactctatacaagtcgctctacaa

SEQ ID NO: 249590 - DNA, 275 bp, Gossypium hirsutum
caaaatcttaatcaaaaacagatagctatgtatttcaagaggactgagaactctaatacgagggcttatacagaggacttccacgcacagaacatacctgaaaaagcgccatcgatgaacataccaattactatacaacagcatgtaccatctacagatcgattctggtcggataaaccaattactgccggaggagttcatgcaaccgaatctacaaaccacggcccgcctgcgacctattaacatacagcctacctgatcccaagcaagggaca

SEQ ID NO: 249591 - DNA, 361 bp, Gossypium hirsutum
ctttatttctggatctggaatactcgccgttgtttagcatgtcttcaacgtcttcgtattggtgttacagctgcacccgtctggttcgtgtggtggttttggatagcgggtcaaacgacgccgttgtctgcccgtactgcgacggaggcttcatcgaggagatcgaatcttcggacaatcacaaccgtcggtttccagctatgtacatgatcaccagcaacgataatagccgtcaaaattcgattcgggcgcgaaatctcgtctttcgtaggaatcgtcgcggttcttctatgatgacggatctgggtcccgtttaagacccataccgacttcgatgtccgaatctctaatgggtttggtt

SEQ ID NO: 249592 - DNA, 258 bp, Gossypium hirsutum
aaaaaccctaacccagaaaatagataaaatacacatatttttttttacttctcttgcagatctaaactgggtttccaaaacctttctctctctgtttaaagcttgggctagtgaaggtgaattttggggaattttttctgggtataaaatatcgagtactttgagggttttattgtttaaagtacgaggtctgggtctcatgagaattgtcaggggaatgcagagattgtttcgtgaggaggcaaacgtgctgggctg

SEQ ID NO: 249593 - DNA, 409 bp, Gossypium hirsutum
  unsure (1)..(409): unsure at all n locations
ccacttcccgtttcggtttaatctcaatattattattacttttttataagagagatgtctaaacaaggggaggcttcctccatttttcatgtcttttcttcttttaaccgncatattcatactcttcatcctttattctacaacccctttaactcccatccccaaccaggccctttcccgtaatctaaggcttccagtcatcaaaccacctcctaatcttccccgtaaaggcaaacccataatttttcatcctccccttcaaggttatgatgatgggatttcgaagtgtgatttgtcaaagggtcattggataccggacctccatggttctctatataccaactcaagttgcactacaattcccgattcaaagaactgtttccaccatggaagaagtgacagagatttt

SEQ ID NO: 249594 - DNA, 353 bp, Gossypium hirsutum
ccaagtcttcctcatgactggcttcaaggctgttttaggaacaaacaaaagggtttcaacggggaaagaagactggagacggttgattatgactatctgcaacaaaaccagcagcagagttgtgaactaatgcggtataggacgatgccggccgagaaccgagtacggtacgactagtacaggaagcgatattggggcatcatgagagactccgaaatggaaacatatgctcatgttgtgtggtaatggttcatcagggaatgtttcagaatatgaagagaaatcagtgaagcaacaggaggagatgatgtatcaaattcaaagcttgtcatcggagaatggtgagagttcat

SEQ ID NO: 249595 - DNA, 401 bp, Gossypium hirsutum
cccacgcgtccgcccacgcgtccgaagaaagtgagctttgggacgactccgccctcatcgatgccttcgacaacgccatgtccaaatataagaaaatgcatggaaagaaaaacagtgaggccaatgtctctgtttctgttcatcaaaccggtgatgaggccataaaacccagggatgcaggagagaacagcagttccagagctaatactgggatggaaatggaggcggcgaaggatgttgaaccagttaaagaaagtcatactgtaaagttacagactcctgagacttacatagattcatcaactagtctgccaatgcaggataaccaagatgggaatatggcctattcggattcgcaagctgcgcaggattataaccaattactcaaccagtattatgag

SEQ ID NO: 249596 - DNA, 237 bp, Gossypium hirsutum
aaataggacatgatagagggagaaagatagtcttctttctaattacaaactacgacggtgagaatgtgcgtatcatacagagagaaagtcaataatccttatactttgctgcttaaaagttcacatctattccttctttaggctcaagttactgcctttgcaatgcatactttgctagatggctatctcataatgcatgtgctgatctagcagtagctgtgataatcatggcatatt

SEQ ID NO: 249597 - DNA, 369 bp, Gossypium hirsutum
agtgaattcttaccaaggtagccgaactgttttgtgcggctggatcacctccttttcggggagagctaatgcttgttgggtattttggtttgacactgcttcacacccaaaaagaagcgagctacgtctgaatgaaacttggagatggaagccttctttcgtttctcgacggtgaagtaagaccaagcccatgagcttattatcctaggtcggaacaagttgataggatccccttttacgcccccgggtccctcccatgtggcgacatgggggcgtaaaaaggaaagagagggatggggtttctctcgcttttggcaatacgggcccccagcgggaggcccgcacgacgggctattagctcagtggtag

SEQ ID NO: 249598 - DNA, 396 bp, Gossypium hirsutum
cccacgcgtccgcccacgcgttcgcccacgtgttcgcccacgcgtccgcccacgcgtgcgggaagcatgcgtctcttctctacatcttcttcaccaaaaccgaactttcctctcttttcgccttctcaaaaccccaaaagatccacctacaaaacaatccctcccttcaaaactcgccttccctctccttcattcctctccctccctccatgcactgccaacaactgcccctctttccccgtcctcgaccaagaagccgaccgggaagactctttagaacccaagcaagacactttcaagaaggtccttgttgttcgacgcccagtcatggatgtttccggtgaagaaaatgatgatgggagtgaagatggtgaagccgaaagagatgacgtcatt

SEQ ID NO: 249599 - DNA, 353 bp, Gossypium hirsutum
cggacgcgtgcgcccacgcgtgcgttctccctggtaacaaacaaaacacattaacatggtgtcgaatccaaaacatgactgaattcatggtgaaaggaaggcaaaacttgccggttgacgtcatccaagtaatcgatcagctagagcgccattgcttatctcccgatggatctcttatctccaaatccgcctactactatctccatctagccagagaggaaatgtccagagaaatattacgctacttacaagcaatcgcaatttactgcgaagcaatgcctatggtggacgagtatcagcaagcactttcctgttcgaatcttggaatgattcgagatattcaaggaatttat

SEQ ID NO: 249600 - DNA, 376 bp, Gossypium hirsutum
ctcattttcctcttctaaagatttttgtacagtcatgtattttcctgctcgatagatcgtcttctcctcttttgtccctgcaactggtgttgttattatttccaattagattatctccatctctgatctacctctgcttcagtaataccatttccgtcagacccaggagcaaggatctgttctgtctgttatcaaaggcagcatcgaagtttatcttgaaaaaatcttttttcgggggcctccataactcggattccaaccttaaagcaagatatgttttcttaatgtctttaacttcttgtatatatccccgtatgaatcttactgtttctgctccaggtctcctgtggttttcatacatcccattgtttttagc

SEQ ID NO: 249601 - DNA, 315 bp, Gossypium hirsutum
ctgctatctctctctcttctatttcaaaaaacataattacttcctctctctagggttggggggggaaaactttcagagaaccacggagggcactcccaccctaaccctaattgtagggttgttacagcttacacaacaagtttattgtggttatttgattcacgagattcaatttgttttctgggaagaataaaaaatagagaggaaatcaagtttactttagcgtctccgacgacgttgcggatcgtctttttgatgcaatttctacgatgatttcatgtttctgggtttagatcatggtgtttggtagatgct

SEQ ID NO: 249602 - DNA, 349 bp, Gossypium hirsutum
actaaccccaaaatttacgttgaaaaaaaaagtattcctgaattcagtggcgaattctgtggtaggatctcctaagtctgcgcgtgtgggaaatcgaggtggtccgaatcccaaactctgatcatttgatggtattatcgaaaaaaattgtgtttttagtgcctggtctgagccctcaccgtatcgacagaagttaataagctatctcatattacaggatcttctcgaaacaccaggtgcaccgaaaaccaaaagccaggttgctagattcaaattcaacggttccttgacagaaacaaaacctaaccgtagcgataaatgatacatgaaacgctagattcaccatgat

SEQ ID NO: 249603 - DNA, 296 bp, Gossypium hirsutum
gttatttcggtgtacaggaggtggtggcggtgttgatacaaattgctggactggctggggcaatggctggcctgatcttgctatttacactccaggttcaagttttcactagaaattaataaatttcaccactttcactgtgttctaattatacgggtgtactcagttttttttttttttgagaatagtacttatgtaatatgtattttttatattaaaaaattgctatgctataataggagatgtaaataccagaaagacttgaacgctacaattatagagatatttaggttttc

SEQ ID NO: 249604 - DNA, 309 bp, Gossypium hirsutum
aacaaacctataaatcaactttagttagcgcatcattatttcgccaaggcaaaaaggggggggctttatatcacaatctgtatcaccaaacgctcaagctttaaagaaccatgcaatctaacaaatcaactccactatttttcaagtcacttgccatgctttaactacacccatctcaagcaacaataccttcccaaaagaactatatatttgtcaactacatctcgcaaactataacagaactgttaaattaaatacgatatatttacaaatttaacataacctactaacatataaaccaatatatat

SEQ ID NO: 249605 - DNA, 394 bp, Gossypium hirsutum
acccttccgcggacccttggccggacccgtgggctggtgtattttttagactccataagtaaagtcatggggttgacaagtgtcctatagagatataataaaatattaaaaaaaaggcacgtgtcaaattttaaaaaaataaatattttaaggaataaaataactataaatgttgttacttgataatggtgcaggactaaggctgatgaatttgaaacatcttgatttgagtggtaatggtttgagtggtaatggtttcaactctagtatattgtcatctgttgctacacttccgaatctaaagactttgaggatagatatctctcaatgcaatggattaatagatttatatgggttgagttactttgtaggagctgtatattgccagcaattc

SEQ ID NO: 249606 - DNA, 397 bp, Gossypium hirsutum
aagagacccaaagtaagactcatccgcggatcctttttgaaggctgtaattacatagccctgggggatctgccctaccagatcgagacatcatccataattcgaaaataaaacaaaaatgtcgagcttggctctctctctccagccagccaacggatctgacatccttctccaaacccgagaatggttccctcctgcccgtgctctaattgctctgcacgccttccgccagacccgtcttgccttctccaacaagtccccttcctccgtcgctgctacctcctcctcttcctcctcatctactgccgaacctagtgctgccactgaatccatcggcgactaccccctttccgcctccagtggccaactaatcgtcggcgttgaaaggtagtatcgcg

SEQ ID NO: 249607 - DNA, 363 bp, Gossypium hirsutum
gttcttagttgctcgcttcaaaattaacaatgtttaaattacttcaatttttttagagggactaatttgttcaatttcaaaattgagaaagactggagatgtcattttcccatttaacatccagtctaatgattaaaccgacggaaagacataattatacaatactaataccttaatgagtcataatttgaaaacgtggggtggaattaactcctttaaagtgatatggtcttgcttacaacaagttacattattgatcaaatctcttacccatcgtggttgctcgaaacaatagcctcgcacagttaagctaaaccatcgaacgctgaagcttttgaagtactggacattgcaattcgtcgt

SEQ ID NO: 249608 - DNA, 364 bp, Gossypium hirsutum
atttttgaatatatgcacaaatgtatattatgtttacatataattacgattggacaggaggactcaatcatgcaaatgagaaaagcagatctaaacagttatgaaatcaatttactgaagaaattgtgaagaacacttgaaaggtccactcaaaactgaaaaaggctcaactctgtgataacatatgttctaaagagcttgtcaaattgtaatataggtatgcactaaataaatctgccattgtagtagctacgctctatgtcaaggtcaggcactgaaaagcaagaagcatcatatttgctgttggagaatgatgatgacagttgatgaagaaaaagctgctaggtcttttgcttctcgcttt

SEQ ID NO: 249609 - DNA, 260 bp, Gossypium hirsutum
ttttatggtgttttgacccatccatctcctcgttttttgtacctacaagccgattccattcgcactactgcgaactggcttctaaaccttctgttggctggttaatcgatttgtttctttgggatggttgccgggtgtagcattttgcgattcatggcttatcaagagaagagatgttagacatgcgtactcttgcatacgacaaacatgatgatgattcgattctatacctatattcacgacgtccaagactaagaaaa

SEQ ID NO: 249610 - DNA, 413 bp, Gossypium hirsutum
cttccgaaaggcagggaaaatttctttcaagaaagaatgtttcaaggtttagaagttcctgaaaaggcgggtgaaatctccagtaacggtcgtccagagtcaactgttatgtctaatgtacctagtttgaatccatttggctcttctgatgtggtaaagccgtggtctcattcagcttcttcttcggacaagccttctagtagcttaagcgagaagccaatgacagttccgactctcccatttttgaattcatctggtccatctagtaagagttctgtgatatcatcccagtgcaatgggatttttggagagaagtggcaggtgagtagtaattctagacctaatccgagtttcggaagtgaactgcctactagaaatggtttttattatggttcgtcatcggggtccaggga

SEQ ID NO: 249611 - DNA, 402 bp, Gossypium hirsutum
  unsure (1)..(402): unsure at all n locations
ccgaataccatcaataagttcattatcataatttttagcatggagaaaaagtaaaaatnggggattctcaagaaacccctacgctgttctctccttacaagatgggcaaattcaatctttcccacaggtttatctacccttctactttgactactctgtcgtttttttcgcatcgatttccgggatccagggaggggggggagcttagatccttgtctttagggcacttttgtttcaggcatgttccgccacgatctcctcggattctgtatatccgaggaaaatacggaagggcaatttggtgaaattaatctaagtccgacgggttgcttctgatggcacgatggtgctagcgcctatgacaagaagcatggcatttaatggaattgcaagcccttctct

SEQ ID NO: 249612 - DNA, 331 bp, Gossypium hirsutum
ctaaggttgaataaacaaaatctggtgacttttataacaacagaagttaaaagtaaactgggtattgttatgctgaacatataccttaaattgccgacattgtgcattgtcttgtttgctttgtttttgtacattgctctcatttcttctgtttgcaactagcagttgatttactttaacattttatgttaaatttagttacatatgtactcagtttatccactcttcccccgcccccccctccagtcatacttttcttcactttcatctggccaattaaaaaaattgaagagttgagatgagcagtaaaaaaaaaacataatccaaaatt

SEQ ID NO: 249613 - DNA, 353 bp, Gossypium hirsutum
cttccgttggagaagagagatggcgttctttatctcggttgtttggatcgagctataattgcttctggtgcatggagatgttaaccgaaggatagctgttatttacatttcatctttggcatactcaggattagcacttaatttgatgagaatgtccttttcagggatgtaatgaaaacaagtcctttgtacaactaaatgttagtcgtaaattctagtggttaactgttgcagcttgtcttgcatacgcgttttacactgtaatgttcaaattgttggacttatcagcaaaacaaacttgttttcttttcatttcatggaaataaaaatgtggtagcttgttcatttgcctg

SEQ ID NO: 249614 - DNA, 414 bp, Gossypium hirsutum
tcggccattttaagaattaaaaacaaccatgaacctttttaacatggtctaaggtttgaggcatgggggcttccaaagcaaacagtgcaagcaaggattcctcctgcatcacttgcttcaactgaacttgttccagtgccagagccagtgtatcctagggaaagctaccagactactactgtgccatctgtatcatcagatgcagcatcaacagagctcaagctacgactagatggagtccaaaaaaagtggggtaggcaaacacactttccctcaacatctacctcaaattccacatcccagaaaacagtcaattgaaaaaggtgctcagccctatattcctgagagtgaacgctctggaatgttaaatatcagcaattttaggaaggattgacatgacttacagcaatgggg

SEQ ID NO: 249615 - DNA, 318 bp, Gossypium hirsutum
cggacgcgtgggtgggttggctgttcaatgactaatgtcctggttggaagaaaggagcggcggttcttgcaatggcctccgtgccagcaccacctttgcctctcctttcaatattcggcatcatatgtgtcctcctcatggtttcttcttacatcaacttgaagagagaggtccaccatacggtgtttaacttgaagatgttccttctgttcttgcctgtcatgttgattttcgcatctcagtttttgagtaagtgtgaaaggttggtggttccttacctcaagactaaaacggactcgtggcggaggactttaaact

SEQ ID NO: 249616 - DNA, 386 bp, Gossypium hirsutum
  unsure (1)..(386): unsure at all n locations
cggacgcgtgggttaacattttttcttttgctgcagccacgggtccaaaacaccctgnggttggggtctggaccatggcgctagtactctattggtacgattgcgtttgtttcggcattgtggcggctgccttccttgggtctttatgggttttatggagaaaagaaactgcatctatatgcgaggacaacagcgtatacaagtgtttgctttcagtttaacaggatgtctatcggttccgtcattccatacccacctttaacttttggttctatcagctaatgaccatttttttgtttggggtgcaccctaaataaatagttgttgccttgtttatttttcttttaacaattttgcttgttttttttatttgttctcttttttaa

SEQ ID NO: 249617 - DNA, 352 bp, Gossypium hirsutum
cctccgcatataaaaatgaagattttacaaatattttgacaagccttcacattcattccatgcacctgcaataaaaaatatattcatctattttaaaaaatgagatcaaaacttttatatctatttaacctgctcctaactaaaatatttttattataattaaaacgtattaaaataaaagaaattaaaattttcgtaataacttcacataaaaaatactattaattcataattcccctttgttactagacttgctaggatctagaaaatgttgctgttttaaccattttcttggtagaaaattccatgcttaatcaacaatataagggtaaaatttatttcaattataaaa

SEQ ID NO: 249618 - DNA, 376 bp, Gossypium hirsutum
  unsure (1)..(376): unsure at all n locations
ggccggccaaggcgtccgtgattttctgtcgtgaattcttacccttttttttatttttagcttttgataattaggatttggtattaacttcgtgtaattttcccagatttgtttgtgtttaaaattgtgaaatgcaattgtaaccaaatgttttttccaaaaaaaaaaaaaaaaaaaaaaaaaaaaaaaaaaaaaaaaaataaaaaaaaaaaaaaaaaaataaaaaaaaataaaaataaaaaaaaaaaaaaattatttatatatatatattaataaaattttttttttaaaaaatattttacatttnnttttttttttttccttttttggggaaactattttttttatgccatttggaaaaatttttttttttttt

SEQ ID NO: 249619 - DNA, 354 bp, Gossypium hirsutum
ccggggcgcgccaacgcgtccgaaaatttgttagccgttgcatttatgcaatatttttaaaggcttgtgccgagcaaataggggggagcttctcccgtttagaatacagtagttcagggagacttcatatgaacaggcaagccaaatgtgatggagactggtgggtagaagatctttctgttattcgtattgatttgtatcaaagagtcatgacagcgatgaaatgtcgcggtgttcgtcccgagagtattggcgcgtcgcttgtaaattatgctcagaaggaactgactaagaaatccagtttgtggaatccttctggacacacgaaaattgatttgttttcaactgaccatg

SEQ ID NO: 249620 - DNA, 189 bp, Gossypium hirsutum
gtaccggaattgacgggccggaccgacccacccgaatgattttgctttcttgtgcaacttacttgacctttactctaattgcatgctggcaagccggtctggtgacgcttgttaacggctagcgatactatactcacatgggtgctgaccgatcaaatttatggggactgaaagtgcagattagtgggt

SEQ ID NO: 249621 - DNA, 277 bp, Gossypium hirsutum
tctctctccaactctagcaacatcctttccgagcgaaaccgaagaaagaagcttaaccaacgcctctttgctctcagagctcttgttcctaatattaccaaggtcatcctcctcctcctctctgctcttcctgtttcatcattttttaattacaaatattgggttgattgaaactgggcagatggacaaggcttccatcatcaaagatgccattgactacatccagcaactccaagaacaggaggcaacactccaagccgatattatggagttggag

SEQ ID NO: 249622 - DNA, 477 bp, Gossypium hirsutum
aacgggcccggaccgaccgcatgccggaggctttcagtgtgacttccctgttactcaagcaccttatttattggatactatgttaggcaatttctgcgctgcgtggtcttgtcggcgattggctcggatgtttataccggacatctctctgatgatgaaagaacaactgacagtcttatacttggcaggaaccatacacgattgtacacctttttggttcaaatcttcaatatgagcacaggcttgtacgtggatgatttcaagaggtggattctgagaaaaggcaccttggtggcaaacggctcgtttaaatgggtacacgcatcacaacattggtttggttgtgctaaaatctatggttctacccgggctttttggtttcatggttaatgaaatatgctgacaatatagtcaaggtatattccacatcgatggccatgctattgacaatggttctgtctgtgttccttttcagtt

SEQ ID NO: 249623 - DNA, 399 bp, Gossypium hirsutum
  unsure (1)..(399): unsure at all n locations
tccgtctcgcccaacgcgnntccggtgcaactctcgtttgggattgtacttgtaatagcatnnggaagtggatactcggtgctcacntagtaagcgcttagttatannttccataattgtgtacaatgacttacttgaaaatatttttaagttttaaaggcctagtttaaggtttggtgatttgagtttaaaaattggtattaaaattgaaaactcatannatactggcaaaagtagattgcaaaagcaggtaggaagttgctttttgtgattgctaacagctcattgcaattgaggttctttttttactgaaaatgtgaccttgtttgactttgacattgcatttgcagacaaatgcagttccaatagaaataccaaatggagtctaatgatttggac

SEQ ID NO: 249624 - DNA, 239 bp, Gossypium hirsutum
tcaacaggaactgctccaggcccaaccattttgtgggtactctttgcgaagcctggcaaatactacccaagaagtctgtggacccactccttcactgcaagtgagggtaacagaatgcctcgagtaaacaccaactatgaccgtaacacaccctgacaatcgaggccttgggatcaccatgcccgcaatcgaggaaagatgatgtatctgcgcacagtacttctgggggagcgggcttc

SEQ ID NO: 249625 - DNA, 215 bp, Gossypium hirsutum
cggacgcgtgggtaagtatgctaagatctattcttccttcctagcttgcttgcttggctacggttttttattaaaaaattcttcgtatagatctgggttagatctagggtttcttatggtattttgcaactggtcggctgattatgaccatgtccgatctgcaactcgaaaaacgcgcttagcgagtggagatttgctatgaactatatcatcat

SEQ ID NO: 249626 - DNA, 206 bp, Gossypium hirsutum
cccacgcattcgttacatgtttgatgcatatatttttttaaccccccacataacagcggggggcatactcaaactggatagtgaaaaaaacctctaggtttaagcctctcaagggtatctaaacccaacagtagccatctgagtcagcttaaaacgacagaaggtgataatgataccatacatggaatcacatgttctaaagtacc

SEQ ID NO: 249627 - DNA, 205 bp, Gossypium hirsutum
acccttccggggccccttgggtgggaatttgggttcagtaaaggaggcccttttggccggacctttttggggggttccccccagggttggtccttaattgtgggaaaatcaacaatgcccttagtgggaggtaattgaggtctttggctaatacttatgcttacgcaatagtcagtagggatattgagagttaaaactaacaagt

SEQ ID NO: 249628 - DNA, 395 bp, Gossypium hirsutum
cccacgcgtccgatcatatcatagaccttaaaataatcataaaataattatttctgtctcggattttgtggtcacgaaaccactatttcgactaggcccaaaatcaggatattacaaagacagtgacctttgtgcttcttgctgtatgttcatgacctttaccaacttttaaagtaagttttttctattctactccattcaactctaaaatgtagcttatgacttgattcgagatatctctgcctgtagagttctttctttcataaattaactgatttttgtatgtccagattgtccatagaccacaacataagagtcgacattgctcaatatttccttgtctaaaaacccaagtaagccactcccagatactgttaagatcattattacatacc

SEQ ID NO: 249629 - DNA, 416 bp, Gossypium hirsutum
agacaacgctttctatacttaatgaggaagctgaggctattttagaagatatcaatccatctccagtacaagttcttgggtatggtgtgggttccatagcagcaatttatgcactgctagagtgggagaaatcattacagcttattggcattcttggccttgtcctgaccgtttaccggcgggtctcttcatacaagaacgctgaagatctgaagaaagatctgacgttgttgttgggtcctgctaaagttggagctgtggcatattcatggattgctgggaagttagagaccaatggcattggactttcgacctcaccttcatccttagatgttcaaaaccgagtgttgcaggctgctgcgaagcttgaatctcaaccatccagtgcagaagatccatcgattgctccaataaat

SEQ ID NO: 249630 - DNA, 418 bp, Gossypium hirsutum
cccacgcgtccggttaatgtcggttgcaattagtagttaaaccccccacaaaacaacagtagccataccggagctggaaagtgaaaaaagcctcttggtttttgcctttcaagggtctctcaacccagcagtagccatgggagtgagcttggaaggacagaaggtgataatggtaccatacatggaagcacatgtcccaaagtaccacctctggatgcaagaccctgctctccttcaagccaccggatcagagcccctctccctccaacaggaatacgatatgcagctctcctggaaccaagaccctctcaagaaaactttcattgttttggataaggagatggtcggggaaaagtttgttcatggaaatcctcatgtggaagccatggtcggggatgtgaatatctacatgaatgat

SEQ ID NO: 249631 - DNA, 368 bp, Gossypium hirsutum
cccacgcgtccgccccaccaaagcgaaaaccctataaaaacccacagcaagctcaggtcatcagagataatggcggtagggctcaggcacttcacggcaagagctggaaacggcgtcggagagccgattctcgatacagataacggtgaggagcttgttcacgtccaaccttccgtttccgttgcagtcggtaaccgtgcctcggaatccctgggcactctctacataaccaccaggcaagtgatttggctgagtgaattggacagagaaaagggctacgccgttgatttcctgtctctgtcgctgcacgccgcttcaagggaccccgaggcttacccttctccctgtatttacactcagattgaaac

SEQ ID NO: 249632 - DNA, 407 bp, Gossypium hirsutum
aaaggcttacggtggatacctaggcacccagagtacgaggaagggcgtagtaagcgacgaaatgcttcggggagttgaaaataagcgtagatccggagattcccgaataagtcatcgccttcaagttctcctgctccttcaccgggcgatgcgagtgatatcaaccacagcaacatcaatgcagaggaaagcgaaaacaagactggtggtggcggaggactgaacggaggaaaaaaagcaggaatcgtggtggcggtggtggcagcggcgtgtttggttggcttcggtggattgatttacaagaagagacaagacaatatcaggagatctcagtacggatatgccgcgaggagagaaatcctgtgaagaagattagacgattgcagatttaaaaaatgattataagc

SEQ ID NO: 249633 - DNA, 287 bp, Gossypium hirsutum
  unsure (1)..(287): unsure at all n locations
cccacgcgnncgnccacgcgtncgaaaaccacaagctgatgttggtatatgtaagaaacactgagaagggagggcgtaatttacgagcacaagtgttactgaaaaacagtataaagcccctttagctcgggtgtcttctctggaagaaccatgtactgaaatttcagagtatgacaaaacacctccgacaagcatgcacgaagcagcaacagattccgtgaatgttagagctctagtagctgacaccaaaaacttgtaactggaaaagattgccgaagtgttggatc

SEQ ID NO: 249634 - DNA, 211 bp, Gossypium hirsutum
attatctatattatttttactggggttttattatttatcttcttcgaataattccactcaagaaaaaaaaaaaaccccttttttcccaaactaattcacacatagggcaactccagacatatacccatgttacattcacaaactatttaacaagttctcattgacaacaataaataatccgaacaaaaaactaaaaacacatcttactttt

SEQ ID NO: 249635 - DNA, 403 bp, Gossypium hirsutum
ccactttccaagaaatgaaaacgtacacattcaatgttgtgctgctatcgatattcggatgaagatgaagatgaagatgaagatgaagaagatactgccgaggaagacggcaatgaagagcagctaggtggtagcagacagcagaacaagaagcaaaaacctaagaatttatcaaacaagaatgtaagacctcatcatcacgcaaaaaataatagatcaaagaagagaaaaagagctaagctgaattaaccaactcttgtgactcattatcagctggagctgctcttttggttatggattttttaaagaaaaatagataatggcttttcaacttatttgagattttgttgtgtctgtcaggcagaccatctaattgaattaagatgagctattgtattattta

SEQ ID NO: 249636 - DNA, 356 bp, Gossypium hirsutum
cccacgcgtacgaccacgcgtgcgtccatgtgtttgtccacacgtccgatacattcaagggatgtacagatctctgtgcctctttctctaccactcaaaccctaattccttaatttttacagaagatcgggggtttaattggagagaatcaaccatgtgtaacaggctgctactgaaactcaagcaggaagcaaatgctctaaccacgttagacaaattaaatgagacccttgaaatgcttgagaagaaagagaaagtacttgcgaaaaatgctgctgctgaagttgaaaaggccaaggaatttgccaaagggagacacaagagagcggctatacagtgcttgaagaggaagagac

SEQ ID NO: 249637 - DNA, 219 bp, Gossypium hirsutum
cccacgcgtccggtgatttaacttcttctgtgcatgtatgagtgacaatgaataactcaaatcacaggattctttttcttttctgtcattttttcattaagtacgattacaatgtatgtatttattcaaattgttataggtgattttttgttgtttcatgtattagatattattgtaaatttgggattttttttggtgtgaaataaaaggcaatcaatc

SEQ ID NO: 249638 - DNA, 231 bp, Gossypium hirsutum
aaaaaaaaagggtttacataaaaaaacctttttccaaaccaaaggggaccgttcccttttttaaaaggtaaaaatacccaccgaccccccctttttaaaaaacccttttttaacaattaacccaagttttcaaccattttgttcccagggttttttatttcaacttttggaaccgttttttgaaaaccccctttttctatggaagcctctatgtgccccttttttaaattt

SEQ ID NO: 249639 - DNA, 388 bp, Gossypium hirsutum
gtgagcttatggcaatttcactggcagcagaatcaaaaagagaagaagagaaagcaaagggagtcaattcagataatgcagagaaccctgacattgttccatttgaggacaatgaagaagaggaagaggaagaaagtgaggaggaggatgaaagctttggtgctgcagctcagggcagaggaagaggcagaggaatcatgtggccccctcacatgccgctaggccgtggtgccagacccatgcctggaatgcgaggttttccaccgatgatgatgggtggtgatggcttttcttatggaccaggtacacctgatggttttgggatgccagatctttttggtgcttcctgtccttttgcaccggattgacccaaggttttttgaaaatt

SEQ ID NO: 249640 - DNA, 220 bp, Gossypium hirsutum
aaaaattcttttgtatgaaacccagtcccgtgtttgtttggatgcaaagagctacagtggggcgccttctgaaagacagaaagccggcttaatgcactgctagcgaccataatcacttatccgatacgcttacatactctctgaggaacacagccacagatgatgtggtcatcatggttatatgatggggtatccgctacactgatattcatgaagccaa

SEQ ID NO: 249641 - DNA, 407 bp, Gossypium hirsutum
cggccgcgtggcctttgacagtaacctcaaatggtttaggcccgttaaaatacaatgggaattggaagctctcctgcttcaaactcgcccttgcaggacaaggatccacactagaccatggcacatatctctccggttcttcgaattctaaacgaaactccccattctcctgtaaatccaatacaacactcgaaatgaagcaggatttgcacatgctgatagtaatttcaagcacccagtttcttcaagtaaaaacctgggaataggagtatcgagctgctgggtactccttaatatacatgcggtgaacgtcggttggggggaggagcaaaaagtgcttctcgccggaaacgacggcgtagagattctcgtaatggtctttgtggaaagaagtctgggagagatga

SEQ ID NO: 249642 - DNA, 291 bp, Gossypium hirsutum
gccactctctcatagtttatattgtctcatttttttaatcacaatatgaaaagagttgggtgaggtagttgttagcttaaagagaaagaatgtcaatcatcttattccatcgacgccagtgatcgaatcaacgtttattcacctcaaccatacaatattagagctatgaatccacccctccatatcaacagttatcttcatctaccatcaatacgctcgtaatcctcaattcctaagcctcatgttatatcaaaaatgcctactttaatatcgacaccttatcttcaccaa

SEQ ID NO: 249643 - DNA, 380 bp, Gossypium hirsutum
  unsure (1)..(380): unsure at all n locations
cggacgcgtgggtttggggattacaatgatttgttctgtttcttcgttgtttttcgtgtggttaaaagcttcgttcgtgttcaattcgagtaaagaagggtcggccatggaagctgctttgttcatttgttcatttggttttgctattgctcatatgattgtggcgtatagaacgagttgcagagaaagaaggaaactccttgtttacaaaattgatattgaagctatttcagcttgcaagaatggatttccaaggtatcaaaagattctccaagatgaaagagtgaagtaaatgctttactactgtttaacaatggaagcatttttccactatagcanaaaaaaaaattttctccctttttggctcatcacttgattct

SEQ ID NO: 249644 - DNA, 365 bp, Gossypium hirsutum
  unsure (1)..(365): unsure at all n locations
gtggaaaaggattgaaatgnaagcttattantatctttaatccactttcatcagaggggggaatattgtggccctgtgggtgatnaatgacaacaggatctacacaagattccccgatttgttgaaagtggattaaagatgttgctgagcttcctttatatttttctcccacgcgttctctttcgccatttttgttcgttactctggtccgttaccaaagccttctttctttcctattttttttttttaattttatctcttttctattttttttttatacataatatttttgtttcttctttttttttttattatttattttttatctctttttcttttttttattcaaaattttattttttttt

SEQ ID NO: 249645 - DNA, 415 bp, Gossypium hirsutum
agccttccgaaaaaaaaggagtggaaaggttagtgatgactttttgttcaatgaagaaaacaatgggtttaaagacttattgagtttgctattagacgagggagcgaaggaagagcaagaacagcatcaatggctgactggatttgaaactttctttgaagctgaagcaaagattgaagaaattactggttttgaaatggaagaagagttgggtaattccagaaagaagcgagctcgtaaatctggttcgatcgccggtacttcttcgacggtttcagctacttccgataacgccggcggtggttcgggacatcaacggaggttatgggtgaaatcacgatctaaagattgggggggagaagtgtaatcatcccgatttttccgatgagaaattcaaacgtgcgttccgaatgag

SEQ ID NO: 249646 - DNA, 406 bp, Gossypium hirsutum
agccttccgaccaaattggatgctgctatgaagcaagattccttgtctcggggacagcttacccgttttggtgctaccactaccacttcagctggaaatgattctcttgaacccacatattttggaaatgccaaacgggcattgcaagataagctttttctcgcaccacctcccattaatggggaatggctgccgaaaagtgctgtctatgcccttgttgatcttatggtcatcatttttggccgtccaaaaggaaatttcaaagagtgtgataaacgaattcagtctggaatacatatcatcaaagaggaactcatcaggcttggtataactgatgatgtgagagaagtggacttgcagcactcagcgatctggatggctggtgtatatttaatgctgttgatgc

SEQ ID NO: 249647 - DNA, 310 bp, Gossypium hirsutum
acccttccggaaaactccggcgaacttgttggatagcactggttatattgatttctgccttgttaggttcgttgtagaaagatttaagtataaattaaagtccatctatatgaacagagatgtggagaatatctatatttttttctttctttctgttgggtgtttaaagttttgatctttccttcattgtgttaatgtttcttgtttctgtttataatttgtggatttagtggatatgtaaatcaaatttaatctgtaaatgttctatttggatgccgttaagacatattaaaaaaattatttttttttt

SEQ ID NO: 249648 - DNA, 413 bp, Gossypium hirsutum
cttccgtttggcctttgttctttctcgtacccatggcttcctaatcttctcccgctaatttcaataatggtccttcctctcctgatgattccttctccagccccatagctaacacctcttccccagctcatcgtcgccggcgtggccgccgtcaagcctccactccttcatccgctgccgcaactccacctccaaacccttctcgtttcgccaactcggcatctaccccaaccccagctcgttccaccaggcgtggtcgtcgcccaggcccagccacgtccccatctcccgctgtcgctgccactccatcctccaccgacgatttctcgatgccctcttccgaggggggcgaggatatggaggaggcgacccctacctttgtttggggtaccaatattagcgtccaagacgtg

SEQ ID NO: 249649 - DNA, 410 bp, Gossypium hirsutum
aaaagggttcaactaatgaagagccagagcaggtatacaactacaaaactccttgctgcagcggcagatgctgggacaaaaaccaaagagcagttaatggctgctctggaaacaggaaaacgacaccagcagaagcaagatgatatggaaataaagaagacattgaaaacctcaagcaatgatgaaaaacaaatcaaaaccgtgagttcagcatatccaagaaactggagcataccaaataaagctcatgaaaagcatgtctcttcaaattgggaacaagttcccctccagaacgagatccgagaagatgtttgtaagtttgttcataagctcaccacagagcaactggagctacctacagatgaaaaatcaatcagtgtcgtaacactagccggagaaaatagaggggc

SEQ ID NO: 249650 - DNA, 388 bp, Gossypium hirsutum
gggatgttgtcatgtaaaactgactttaaggcttttaaatcacccatctggtctcgaacgggtatacctgaggtcaatctagcatttcttctgtcaaaggctaggtcaagctgaactgtaataccctccgtcgcctctgtttgaccattgactctttcgatggtaaatgtgagtttttttctctcggatcccattcagttctgctatgtaactattaactttctgcgccatatccctaactgagacgatcttcctttcacgggtgaattggtttcgggagctccatatacaccataacgcacaataaaaggaccgatattgatcttttgtactcctttcaaaaacccaggttagccattcccagagactttgattcatatgaactata

SEQ ID NO: 249651 - DNA, 400 bp, Gossypium hirsutum
cccacgcgtccgcccacgcgtccgcccacgcgttcggaagggtataaaaattacttttcgtgatgagaattgctgttgcagtactagagggattgcatcaagttctttctgttgggatttctatatttagtagttgttttataattcctatttcgaaacaaacaaacaaacaaaaaaaaattatcattagctaagtggtatgttagcaatgttcaactctgaagtcgccaaaaattatacatttattgttttgaggtgatttctttttcttttcctatgcatgtctctcttccttttggatgatattttatttcttatttaatgcataaattattttgagaatgcttactttttcaagtatagggaataagaattatctagttatgggtagtatctggaa

SEQ ID NO: 249652 - DNA, 370 bp, Gossypium hirsutum
cttccgttctggcttaaagttgccaaagatccatacttatgttgatgttgtggaaagagtggctcacgaaattggcttggatgatccatccaaaatcaggctcacatctcacaactgctactctcaacaacctaagcctcaacctattaaataccgaggagtagagactctttcagaaatgttggtccactataatcagacttctgacattttgtattatgaagttctggatatccctttgccagaattgcaaggtctgaaaaacctgaaagttgctttccatcatgctactaaggatgaagtggtaattcataatattagattgcccaaacagagcactattggagatgtgattgatgaacttaagact

SEQ ID NO: 249653 - DNA, 410 bp, Gossypium hirsutum
cttcggtggaaggctaaccattttctaacctcctgaaagttgttgcctcattaactacttcacatatatgaagattcctttagaaactatggctgttgacaaatttctttggctttatgttgctgttagtgtttaaaacattctcagaagtgtttctcttgcagccagacatagcatgtaccttgtattggaaattgctaaatgaaaatttctcccatatgctaattctgttttgtcattctgcatctttatatgggataaagcaatatttagtccttgaatttggtattttcttttgtccacattgtcttggaacttggcaactcttaccagtttttgtccatataattttttttactggcaaaatcatagagtgtcacatcatcacagggaccaaagttgagaaaaga

SEQ ID NO: 249654 - DNA, 225 bp, Gossypium hirsutum
tgtttttaaaatataaacttacgacatctacatatggtgacctcagtgctacctagagtggaaagcttggcaggcagggggattaaatcaatcccgaaggaatatatcaggcctaaagagaagctaccaggcttaggtaacgggttggaggaaaagaaaaaggaggaagggcctaaggttcccaccatcgattacacaaaatcgattcggaggacaaagaggccg

SEQ ID NO: 249655 - DNA, 301 bp, Gossypium hirsutum
cccacgcgtccgcaaatcttctatttatatatattcacacactaagatcacctactccacggtatgcagttgaccatccttgagaaacaaactacacaaggtttagaaactccgggaaccgccggagatgtgaaggaggagaatcggagtcgtagaagaagttacatggcttcaccgtcttcttcgtcgtcgtctcctagactgcgaccgaggtgtacgtgttcgaaccaaccgggttcggcaccatgtagcaagcatggttacatggtgccaaggcagaacacgaagagatattgtggaa

SEQ ID NO: 249656 - DNA, 341 bp, Gossypium hirsutum
cccacgcgtccgtttcaccctttctcctacaaattcaacatgttcttcctcatctgaatgtaaaagtgcatgcagaagaaaactaattttagttttcttgaacggaaactccaacaaagtttcacagatggtttgggatcaggttcagttgagaagttcttcaggcaaccacccacttgtttctggacacccgaaccgaccaattcctaagctcatggtctgctccatcctcttcgtctcgcttacttaccttctctacactctcaagctcttaacaacctctgctcaacaaaccttccaccataccccatttactttcctattttcgtcgctctacaagc

SEQ ID NO: 249657 - DNA, 289 bp, Gossypium hirsutum
gcgccaagccttccgtttcaatttccaaggttcctttgaaccaaaaaattaaccttccttatttttaattttaaaaagtttttttatatggaaaacccaagaacaaggagtggcatccccttgtgctcatcttctagcctagatgctttgactacaacactaagcagctcaattcaagctctgggtcgtggctttgatgtcacttcagatatacggctgttatattgcaaaggggcacctggttcaaggttggttcagcttgatgaagatcataccgaccatcttgttt

SEQ ID NO: 249658 - DNA, 300 bp, Gossypium hirsutum
  unsure (1)..(300): unsure at all n locations
ttcttcttatggccgcctggtcatttcaagctgagaagggcttttaccatgagcagctanntcggtggctgagnnataaccaacacgtgcttttggaaccctcttcaatgatggcgcaaatgtgagcccactgccatgggagagtacatcggcttgctgccttatgtagccgagagagatgtatgtgcccaaaagatgtcgaatgcacgctgtggcgcaccatcatagaccataacgcacngaatccaatttgtgggattgggtgcccctacgtggattcaaagtgcgggtatcaaacta

SEQ ID NO: 249659 - DNA, 152 bp, Gossypium hirsutum
ccggcgcccactcgttataccatgagaatgggttttttggtcaagctcatgagggtttgattaatcggaaaatgttaaaggatggacaaaatggggaaaatgaacatgtacaccataaccgtagctggaaggatgtgtatcatcagttgctg

SEQ ID NO: 249660 - DNA, 395 bp, Gossypium hirsutum
  unsure (1)..(395): unsure at all n locations
ctctgatgcaattgctagttctcacaaattcttttcctagagatacgtaattgcactcccgatgccccgtaatctccctgacagggtacaatgtctttccctttgatcattacttggcaaaacgattgatgacggaaatcttctctagatcctgacattccaatcttaagtccaagattgaggctctcttgtccagactctgtaaatcattctccagcttcttcgttttgatgacaaaatcttcggcttactttaaggtggactggtttctctccttctgaagcttttcaaaagagggtgctttcaccatcaggaagaatagcagtatcactttcaggtatacatgctgtgctgcatgcatctnccaggactgatctggcaacaaaatatgccac

SEQ ID NO: 249661 - DNA, 299 bp, Gossypium hirsutum
gccacacctactgacatatatccggagacctgctttccgggacctgaatggtctcaagaatggaccttgatctcacgacattgaccaaacgcttgctcattcccttaacatacttggacatgatacattgccagctctgactcggctcacaggtctgaacaaacaaagctaatgctcaccgctactgcaatctaattacttgacgcacataacttttgatgggcaaccctctatcacttactaaaacccacacatccgagtagatcgtattactcactaacaaagccaaacacattgct

SEQ ID NO: 249662 - DNA, 424 bp, Gossypium hirsutum
  unsure (1)..(424): unsure at all n locations
aaaaatgttagggcggatgaggaacctgttgattaaattaagtatctngaagagggttgcaggcctaaatgtgtgaaacaacttcgtgcttacgaggtttgttataaatgatttgttttgcaaactgagctaggttttttgaatctttttcaccattctttcaaatatatgagtttgataattgctgttacaagtattaattcatgcgtgttgttttattctttaaatattggaatttcataatgctagcaaacttttcatcaaattcatcccatttcctacttcaacccagagcttcatttctgcagaaatgctatgctgtttgtatataatgcatcagtttgggaaatcctataaaaccggcatatttactcctttatttcttgttttttaatctgcctccctatattttcatatgattttc

SEQ ID NO: 249663 - DNA, 399 bp, Gossypium hirsutum
cccacgcgtccgcccacgcgtccgcccacgcgttttgtttgattgaaccatctgaatttcaagctggtctaatttgttgttcttttagggttttttttttttaaatattgttgtctttctaacaacttccatgtcctacatcaccttaatcaaatttccttgctttttacttgtgctccagtcacgtgtctacgactggtggaaaccaggtgggaagtttttcctgcaactttcaagagctctgaagttcactccaatgatattttggggaatttttgggtatgcatcaaatttatctcttttatgcttcaattgaacactttttgttcttcttgatattaattagtagattttgctgtcagaaagtctaaatacatattgcatacttttgaatcatga

SEQ ID NO: 249664 - DNA, 412 bp, Gossypium hirsutum
cccacgcgtccgcccacgcgtccgtgatgaaacttaggttaacttatttcagaactttgggagcagttcaaatgcagatgttcttccttccaaaaccaaagaattgtcttatatggttaattctaatgatcagaacttgggatatcaaatgggacaagtagagaacttggaaagtagtgttaacatggaaggtctatctactccacatctggaaactaacggtccgagtagatttgattctttggtggacgttaaaggggttgcctgtgatcatgagatttcattcagagctggatcttaatcctctcaaacctgcacctgtaaagattagctctatgccagatacaggacctagcattcctaaaactcttcacctgttctgcaatgggattgatgagagctctacagccag

SEQ ID NO: 249665 - DNA, 202 bp, Gossypium hirsutum
gtttaacctcttggtgaggttcgacttgagctaatcttttggtgagcatcgatacatttatgggtgtggttttcgaatctacagaagaatttccctattccttcttaggttcaatactctcttattgcgttgccttatttgtgaaaactgaagagtttggaaattgaagtactgaagctaataaaaccattgatattgcttg

SEQ ID NO: 249666 - DNA, 289 bp, Gossypium hirsutum
accgacgcggccgtttttcttttttaaaaaatgttagctttttttaagtggataaaaaagaaaaaaaaaaatatcagacatggttaagatgaaatggtctcgcacctccctatgagtatgaaattgagtccctttgatttttatcaaatgatgaaatctttgttgctagaaatatgatgatgatttatggtttgtggtgttacggatctttctttgtataatatcccttacaaatggattaaaacctttcaattttataattctatttcttatattataatttttaatt

SEQ ID NO: 249667 - DNA, 425 bp, Gossypium hirsutum
  unsure (1)..(425): unsure at all n locations
acacccacgcctcctgtgcttataccattggtgaatcngttattgagtcatctgttgtcaaacgtcttccataaattctttctggtaccttaaccaacattattccaccgaaatctattgaggatgaacacataaagattgatgatctatcttcccatctggattctatctttaattccttcgattccaaattgcttttaacgccattttttaatagtcatttatgtgtgcatgccgcttcttatatcaatatcaatgctacaaaataatttttcaaattattttatctttctccaatattcttatattgatgctgagtttttataaaaatatttaaatatttttaatataattgcttttattaatggcttacctttctcttttttctttaatccaatttaacaatatcttttataataacattt

SEQ ID NO: 249668 - DNA, 335 bp, Gossypium hirsutum
cggacgcgtggggttcttcaatggcgaggagtctgcatttccttcaatgctgccaacaaacagcgggtatcgaaagggctcaacgactgtaatctcgatcttgatagcagttcttgagttcatgctggttcaacagtagctacacatgtgccattactttggggatgcgtcaggtttatctgcaggttcttctcttctgttcatgtctgcatgaatacgcttggatgacatggattttacaatatagggcaatcatggaaatctctccactgatttacatatttctgggactactgcaattatccattgattgatccaaaagaattaatgttttt

SEQ ID NO: 249669 - DNA, 441 bp, Gossypium hirsutum
  unsure (1)..(441): unsure at all n locations
cgggccgaccgacgcgtccgcccactcttcctggaacctcaatttccttagtggacctctatcatggcaattgtctgttgantacttaaggatgcactcactcccanaagaagagaagagggcaaatgggagaagctggtccctacggagtcataacatgattaaagcatttctgctacagtctagcccaccaaaccatctcatcacctttaacatcattcagacagaagtggttttagataagttaattaattgcgtgcttttcaagcacatcatcatcatcattagctaataatagtttgttctctgtctctctttgatcgtggtggtggtgaataaataataatatatgcatgcaatgggcgcattttgtgatggtgattactgaagggatcattggctattaggtttaactttaacaatgatccatcttcttactct

SEQ ID NO: 249670 - DNA, 260 bp, Gossypium hirsutum
cgaaccccacctccttccaccttttcccacttaatatttatgctgccggaacacccagatcttctatcaagttttgccacccatcaaaccacttctttttacttctgtttattgcatatattgatacctttcatcttttcacgtgaaccttataaacaggttgatattcccattccttatgtttttattgtttattttttgatttccattcttatattcctaattagtgcatgttcctgcacttcttttgtcctaacttt

SEQ ID NO: 249671 - DNA, 373 bp, Gossypium hirsutum
cccacgcgtccgattcttgggaaggctttcggtttatgctcctatatttggttgtgtggagatcaggatctccaactgtatgaatgcgagcgagtcacagaagctcgaatgcgaggaatccagaccttagtcttcctttcgacttccttcggggtagttgaattgggatcttcagaaatgatccaagagaattggagcttagtgcaacttgcaaaatcaatcttcggttctgagattaactgtcttggttccaagcatcctggccttgaatctcagctccaaatgtcaacccaaactgtcccttttcttgatttcggcaaggttgcaagtgatcaaaaagagtggattcttgatgaccgaaagcaacaaattg

SEQ ID NO: 249672 - DNA, 409 bp, Gossypium hirsutum
gtgagctcttaccaatggctttcaaagctttgtttctgttactattggccacttttgggctggtctcaacaacagttgcttccaatgaagtgggagagaagactgagattaagtatgctgctcctgttccagtgaaggcacctatccctgctccacccgttaagcctcccaccactccggcaccgccgtacaaggccccaactccagcacccccaaccaaggcccccactccaccatataaaccaccagctcctgcgccaccaaccaaggctcctactccaccatataagcccccagctcctgcgccaccaaccaaggctcctactccaccatataagcccccagcaccagcaccaccaaccaaggctcctacttctccatataaacctcctactcccgcaccggcacc

SEQ ID NO: 249673 - DNA, 422 bp, Gossypium hirsutum
cccacgccgtccgcccacgcgtctcgcccacgcgtctcgttactatataataatgttagcttttaaggcgagaagccttcttccctcaggtcagactttctccggcacttgccctccggccacctccacgtctctatggggttccggtgctgctctccttttcccggactacgaggtcaaggcccctggttcgtgccgtcatcagtgatgacaaggctgtggaatcagctaaaacctcgccacttgatcaaaaacacagtaatggctcatctgattcttcctctaagcaagtgaaggctgttgtgactataaagaaaaagatgaaggaaaacatcactgagaagattgagaaccaatgggaaatgttgatgaatgggatcggtcgtgggatcttgattcagctcatcagtgaagagattgat

SEQ ID NO: 249674 - DNA, 406 bp, Gossypium hirsutum
cccacgcgtccgctttcttcttcctcctcatctttcattgttgctcttcctttgctccgccgcgttgctccaccgtgctctgttttctttctcatttctcatcttttaagaagtgttggtcgtttatgtgcagttgttactttgttcgttctcgttttgttattttttatggctactgcaccgaaacccatcaaacaaagccaccgcgaagaagaacaacaacagcagcgagaagaggagtcatcaaagccgcgagaaaatgaagctgaagaagatgaggaggagactgtgcagagaccatggaatttgagacctagaaaagtggtgatggagacgtcggcggcggtagtgacatcggcggcggaaaagacgagtgaaacggtgggtccgaagtcgatgagattaa

SEQ ID NO: 249675 - DNA, 421 bp, Gossypium hirsutum
  unsure (1)..(421): unsure at all n locations
gcatctttttcataaagcttgaatggtattggttaagggactgagatttgtttggcatgcgggaggccccagaagcacccaacacccttggtttctgtgtaaaagcaaaggaatcttaaattcttctacttcaatacacatacacatatatacatattatatatcaatgttctttgcagcatatactaatggggaatgtgaaggcaacatcatctttcaccttgagttctctctctctctctctatatataagctttcccttgcctttttctctttaacagtttcccttttcttcttcatctcaaagctttgatcttcttccatagctaaagctcttcaagaatctttgacaggtggaaaaatagtgaaaaggtgattgagcatctatntatcgatatctcttgggattttgaaaagaaac

SEQ ID NO: 249676 - DNA, 422 bp, Gossypium hirsutum
cccacgcgtccggtggattttcttcacaatatgttagtatatgaaaccctgacgctttttcatgcagtggggaaattcttgcataacaaaagagacacagaaaatgtagttgcattagaccaaaatgcatttcgagtaggggagaaattctcaagacttccttttaaaatggattatccagaaaagatactctgccaagcacatggtcaatcaagacctattacagattttcttcatgaaaatgttctagattttgtgagcaatgaggcaatggatgatgcatgggctgtggcttcatatcttggtgatgctgatttgcttctcgctacctctcgaaggactttaaatagacatagtgagatagagaatgttctacagtctgctgctgcttcagtcgcagttcgtggagttctttatggaaa

SEQ ID NO: 249677 - DNA, 292 bp, Gossypium hirsutum
gaaaaaaagtaattgcctagttgatttgcaagcttattttggtaaagttcttaaatatttgggttgagatcttctttgagagtgccgctatgggagcgaagggattcgtacaatgaagcatatactcaacaaccgccggaacttccacccacaaccaggacctgatcaaagatctaatgcagctacacatcaaacgacatgctaacaatccggctgaagacgcactcataactgctcatgcttctcatacaggcactgctaccaccatctctaatatccacatgcctactgc

SEQ ID NO: 249678 - DNA, 333 bp, Gossypium hirsutum
  unsure (1)..(333): unsure at all n locations
cccacgcgtccggtaatcacttcatgctgctatcttttttaaaaaatgcctaactaatgggggcacgttagtgatcttcctgtgaattccaataccntgcaatacactgcttcatactcagcagctaatacctataccgtcacatgtatatgacaccgttcctcatactaataaggctgacaagactactgctagaggtgttcattcgcgacgacctgcaccacaacaaaaggaattgtctgactctgatgacgattatgcttgcttcattacgggtggtgtgatgaatgctgcatttaacgcccagattgctgagataagctgcgattacca

SEQ ID NO: 249679 - DNA, 351 bp, Gossypium hirsutum
  unsure (1)..(351): unsure at all n locations
cccacgcgtgcgttcctagcattactgtgtcctttttaaagaatcttattacgacggggagggacctttatatactatgaaactacaacntactaaacgctaaccactaaaaaaactaaaagttattataaaaaaaaaaggaagaatatcttcattccaactatgtactatcttaaccgataaacagatttatactctccggatcaatccccatcactacatttagaattacttcatccaccatcttgaccttcgctactgttcctcttacagattctactcaaaactctaaacgccaacacattgatttcggcagttccaagaaataacctcattcaccacaacaattca

SEQ ID NO: 249680 - DNA, 488 bp, Gossypium hirsutum
  unsure (1)..(488): unsure at all n locations
ggaattcaccgggnccgagcccgacgcggntccgcggaccgccctgggctttcttggagtcaaaataatgaggttactatctaacaatgatgcannaagtttgggggagggggcaatggnccttactctcccactcgcaagaggatgaaatgagactangnntcggagtgattggagccagagacacgggagaatcnntcttccctanntccttcatccaanntatgccaaataccatttggctttttaaaataccatagataaaaggggnccgaatgcattaggtttactttgtgagacatcggagtttgaccagatctaataatncggcaatcctccagaggcttagaggacgacatagatagaaacaacctgcctcaaattctgtatgaagatgaagaccatgacaaagttgtattggcatcagacggtgatcttgcagcggctgtggaacatgcaaagttagttggttggaagggtttgaaact

SEQ ID NO: 249681 - DNA, 410 bp, Gossypium hirsutum
cccacgcgtccgattcaacaagggtgttggcgattttctagattgggaggttgagaaagggggcgagcttgattttgggttcgagaagcgacaatggaagccactttttggtgaagcttccatgtcacataggcctaataagaagattactcaacgtcaagaaccttttcgatcaattgcttcaatggcggaccagtcatcttccctaccttctagttcgccttcattaactctttctttaccttcttcttcttcttcttcatcgaatgcttctttgccttcttcaagaatggttttacctttcgctttcgacgggactcagaatcctgtttactttcctcatccgatgttccagcccgtgccgcaaagtcagcaacaaatgatttcatttagtccccaacagcagcagc

SEQ ID NO: 249682 - DNA, 402 bp, Gossypium hirsutum
  unsure (1)..(402): unsure at all n locations
gcgtccgcccacgcgtccnattttgatttcattttggctttttttttttaattaaattcattcctttcccgccttaacaattgatttgaactcatacatatatttattctttcccttaaaaaggggcattcttcatgttatagtacagtattattcatttgtttttcagtgcactaataaatttcatttccagcatcccttggtgtatgttcccttttttttttcttttcgtatatatatagttgggtgataaaaaaataaaattgaataattaagtgattatttgtaatttttttataattgagttataaaaaaatattaatagttgaaaaaaaaaaaaaaaaaaaaaaaaaaaaataaagtttttaaaaaaaaaaaatattttaacaaaaaaaaaataaa

SEQ ID NO: 249683 - DNA, 412 bp, Gossypium hirsutum
cggacgcgtgggtgctaatagtgacagtctaacatagccattcatttgtctgaattacgttgaagagactctggtataatatatgtctgaataaacttaagttcgaagttgactgaagctgtgtaactctctgttaagcatctttatgcatgtttgatcttctaaggttccatttagttggtagttttacttttagctatttgtcccttgctttcagttcatatttttattttctttttacttctaattgagaaaagaaaaagcaaaagcatccatcaaagccaagatgcaactttgatcgaatagaaatgcacttcaattgtattttctgcacatttgatgtttataatgctctctgtttcagctatttgattgcatctatggggcttcaactactatggagctttggact

SEQ ID NO: 249684 - DNA, 279 bp, Gossypium hirsutum
ggatcaatcaaaactcaacatcaagtgactttctttatctcgattcggagctgcaactgcgggagtaatcagtgtcttttttcagcccctttacatgcatgcacacagaactacatcatatgctgcactacaaatctacgttcaaatacggccatgatctgctatctctacatacaacttgctcattgtgatgttgaaacactaggagtggctgattcaaaacttggaaatgccatttaagcaaaacttaaaattgattgtgttcacactaatgctggt

SEQ ID NO: 249685 - DNA, 413 bp, Gossypium hirsutum
aataagttactctataggactcattcacatcatttgctttatactgatatcccaagccttgggcgcgggcatccgaataatgggcactgcatgctttaatcaaattactccaaacacaaaagaacatatatctgcattatcatgtggttacaatgccccaccttattaatacattatacacacaacacacttgtggctacctggaaaaccattttccaaatatcaacccttattactaaatctattacccaaaggaacatttgccaccgattggcccgatcaaaaataaaaacacctttagctaatagcattttaacagatcgatacgctaaattcattgcatcaattcttttgttctttcaattacataaaagtatgcgaacagtaaattatgtagcaaaattgttaatact

SEQ ID NO: 249686 - DNA, 401 bp, Gossypium hirsutum
cccacgcgtccgcggacgcgtggaaatctgtgttccaaatacagcataccgaagttgggatggggaaaatcgttcacctcaaagcttgcatatcatctgggaggattgtgtccgtcgtttcaaaccgaatctcgtcccccctctctcctttttacttcttctaatccggcggttccacggtccttcgatccgccgcgactctcgggacttcttccacccaacaccagtcctgatctctgtgaagagcatctcctgccagcagatgggcaattttattgcattgacggtgggtatgtttcggttttacttccaaaacctggttcattaaggctttttcgtctgaaacataagggcttatggttgatctgtctaacccctcatgctggattttattaatcacc

SEQ ID NO: 249687 - DNA, 415 bp, Gossypium hirsutum
  unsure (1)..(415): unsure at all n locations
cccacgcgtccgcttcaaacagaaaaaaaaagtttcgtttttctcacagtagcattgttttgtttggcgagggtataatgtaatttttatttgcggaaacgacgacgccgtacctaaatccatggaagtgatttcagagcaagcagttttcaagaattcatgggaggaaagtaggctcttggcgaaacaggatattacactgctttccttgttgccattgatgaagtgtgtggaagaagtaatcatgttcccgttaaacatactcaaggaggctcccataagaaaaggtagttagcatgggaagaaagatgaaggagatggtaatgggatccttttcaagcttcatttcgaacttctataagagcaaaaccttaaaatttgctcaagaagctcangtgtcggacacaaaatcaac

SEQ ID NO: 249688 - DNA, 405 bp, Gossypium hirsutum
cttgattcttagttctcttcttgggttcttttttcagttgctagaaaccatccgacggatgtttcatctcacttctttagacgcttcttctcccctaacttgctaaactgagaaaaaacttagaccaataacactatccccttacgatccctttccacctcttctctaacatactcagtaaacccatttctcattaagcattgatcccctttctttaaaccttctatagcgagcaaataagcaaccctatccattgatctgtggccatgtttaaattgacaggttcgaaatcttttactcagcccttgcccatcataaatataagtacatattttttatttatcattccttcctttctgtaattttttaacaacagaaagggcatctccttcaacttcgatcact

SEQ ID NO: 249689 - DNA, 355 bp, Gossypium hirsutum
  unsure (1)..(355): unsure at all n locations
aagncngaagnnataacaaaaatgcctttcaaactacaccaatttatacatatttggaacccaaattcatctggggttggttctactggcttttttctattcacattaagccacagtatctttatatcagtacacctttttgcagagaaatggatttggcattgaatttctaacttttctgcacatctacaaaaggttgattgcagattttgccatattttgatttgattttgctttcacaattcatatgcatgtccttgaatttgatttctacacttgttcgttcttgtagttttgaagcaggggagccttgtcggaagatggtgagtctatgatgggttcattgccacattca

SEQ ID NO: 249690 - DNA, 418 bp, Gossypium hirsutum
cggacgcgtgggggagcgctaagaatggatggttatttttacgcagtggacgaccaaccccggaagccctctctatttcctctctttcctgctcccgcttctacagttactagtactagcagcatccctcaatggctttccaaccctagcttcaccaccgacctttccctcatcaacgacgccgattactcccttccccgctccctcgacgacgtacaagaagaagatgcccaagaggaagaagaaaacgaagccaagcgacaggagcatgagaagcttccccattcttactagctacttgaggaggaggaagaagaacatgaataagaagatgattctcatggagacaagtactgcgagagaaaaaggaagtagagacgttagaggagacacacgaagaaaaagatttcgaaagaaa

SEQ ID NO: 249691 - DNA, 526 bp, Gossypium hirsutum
  unsure (1)..(526): unsure at all n locations
cccgtgatgaggttattcaananntagtttcttanntgatttatgcctcnntggtcccatttnngccccctaataagggtcggggctcgcttgcaccctgtcttataccatannggaagcttgcanngtgcaggactnnnttctgccannggttccccnnaatcatagagccccaaagctcacatnnttggtgaatagagacccaagggaagctttctgttcaggcattcttactnnngctgttcttgnnngaaatgatgagnnngtagctgcttcatntnnttgtgtnntgttgcattttcttctgtcccaaagggttcaatgccctcgaagtagnnnatgatgtnntgcaagtgngagaaagttnngtcacttcananntctaacagngtnnnttaaacgaaaagaaaaggtgtatcntnngtttttggtaccttcgactnnntagcgatacctattcaaaaacccnntcctaccattcaacgannattgcatggcctctcaacactgggaatatctgaacact

SEQ ID NO: 249692 - DNA, 413 bp, Gossypium hirsutum
cccacgcgtccgcccacgcgtccgtcttttcataacatttctattgataatcaaatccatgtgatgtgttcaaggttttctctcatcatcctgatttctccttttctttcttccaaacgggactgttgtttggaaagaaagaaagcaaaagaagatcaagtggctgactgacttttgagaaaaaaaatggatctgtgggctgtccacttgaagaacgcaaaccctgggaatcctcctgcttctgcttctttgttgttgaagaggaattcgattcctgaaagacccaattcttgtaaggtttccaacttcggagttctttcgatcggggtttcaagaacatgcctcccttcatcttccattcgttctttcaccgttacgtctatggctaagaacaataatcacgataattcatc

SEQ ID NO: 249693 - DNA, 357 bp, Gossypium hirsutum
cttggcttgtcaagctgaaaagaattttcatggtaatcaaaagatgttaatagcaaaagatgtgattagaaaatctttgcctgttctttcttcacctggcattgactcaaatggtgcactcttgggaaaggataaaccaccgtctgtaactgggcctctaccatcttcgagtgagttgaacagtagctggggtgtttttggaaaagtctgcagaatcgataggccttgtgtggttgatgaagttcatcttcgcagatttgatggcttattggaaaatggaggcgttcatcgttgcgttgttgctagcataactgtaaaagcccctgttcgtgaagtttggaatgttttaactgcata

SEQ ID NO: 249694 - DNA, 401 bp, Gossypium hirsutum
gaaattgttttcttaggatttagtttgatatttttttttacctttttttttttccttggtgggatacccatttgtttctctgagaaaacagtcttctcttgccagccaccttatctctctatctatctcccttcctctctttacctttccctgtgtctcttttaggttctaaaagatttcagggcttatcctctggggatttcatttcccagttctttgaaccttaagagagacatggaagctgttttacaaaccagatgtcttctctcattaccaccaaacccaaccagagtgagagtcagaagccttttgaacccatcacaaggcttgaagcagaggcttttttgcttcaaaacccttacgccttagtggtttatctctatcttataaggaagtccaag

SEQ ID NO: 249695 - DNA, 292 bp, Gossypium hirsutum
ctcggtacttgaaggcggataatttctgttgagcccttgaagacttggctgagattgagaatagccgcaggaataccaccacatgagagttctcagttcaatgggtttagtgcagatcttagtgcaagaggtacaaaggatttcctgctaagtctgacagctacaaaggaatgcggatctggccaatcattatgcaggatggtatcactgtcaaagaagtgacacataccgttctccgaccacagctactcaataagccttttctttctttttggcaggtatcacagatttt

SEQ ID NO: 249696 - DNA, 368 bp, Gossypium hirsutum
tcggtaatgtgatttgtccacagtgctattaatgtcttcaggaacaaattcaaccaaccgcgggtgaactcttcgagtaactatcactttatcaaggtcgccagctactttgttatctattcagtgacctgcatcaatggcatcaacaagacctacactggacttgtttattatacatcacaaccacagccaatggaacgggctgggccacatcatacccgtaagagcaccgtcgatagctagactctagtaccactttccgaaactactatagacttgtcacataactaggatctcatcagcgacaacgcaatcgcagttcttaccacgctcataacattatgagcccgatcttaggcgaccgacga

SEQ ID NO: 249697 - DNA, 354 bp, Gossypium hirsutum
gatttatcttactgttactgttctggattgtggtatgtttaggtgtgcaaaatttgttgggcgagaacagaaaatctcaagaaaagtaccattattgaggtttccagtttggaattcttagctgttgccatttaaatctctggtttttaagtagacttgaatccaatatagttggttctgtaccggttttggcggtattggttggtgcaaactgttccaatgctaattcattgtttcacataggtgaaaatttcagtctatattgaacgtattggcttgtcggacgtcacatttatcgcgttggttgatgtataaataatgttaaaaatatataaatttattttttttcatcct

SEQ ID NO: 249698 - DNA, 413 bp, Gossypium hirsutum
  unsure (1)..(413): unsure at all n locations
caccatgccaataatttgcttctcttggtttaattttttccccaatatacgtacagtcagaggtacgccggctcacccatttactaccncgattgtgttcataaatgatgtgagtggctttatgggacaacttatttgttcttcacccgctcagacgaggtgatgaagctcgcatcgcatgctctggaatctcatcttctccttcaccaactaaacgtggtaatcggagagatacgcccctctttattttaacaataacaacaaggaacagcagttgcagctgagcttctaaactgatgagtccgtgtagagtggacaagtgaaacccaaacactctntaaacactgtatggcatgtaatacgtaatgtatatctgtttacgtgtttcttctttgtatggctttttggtcact

SEQ ID NO: 249699 - DNA, 395 bp, Gossypium hirsutum
  unsure (1)..(395): unsure at all n locations
acggcccttatccttcatcgaagtatcatttttgtttttctcctcctatctcactattataggctggactctcatttattccattttgatatgttcgctttcagttagtttttaatttaatttattatttggttatgtttatttacatactgncacgaggtgagaccttagatctatgctttaaattggttaaattggctctggatgttttgattctttgcggctatatgattcatagttacgctcaagtttaaaatgatcctccctacctgaacactgatttggctttttcgtttttatctgctaaaatatcacttgtcaaatacacatgtttttgctatttcctgatttggaattggatacaagggttaagacgtctaaattctgagaaactc

SEQ ID NO: 249700 - DNA, 327 bp, Gossypium hirsutum
ccgaccgatgacccgacccacgctcccccaccctccttatttattttatttttttttttcgcatcaaaattacgccaggattatatatatatcaaaaaacaagacattaacaaaattctacaatatataccatttttaatattcaccttggcaactacacaaacacaattacagctaaaacaaacactcatgtccttttatcctcaatcttccattttactacagtcagcattaattctcatactaaatctagcgatatctaacttgtcatacctgcgtataataactatctttcattcccccctttgctcttaccacctcaccccc

SEQ ID NO: 249701 - DNA, 371 bp, Gossypium hirsutum
aaattattagggggaaaatgggcttttctcttctgatcagatcaaatcagtctcaaccgtctgattaatcagtcaaaaaaagaaaaaaaccttgtcttcctttataatccgctctcggcttttccctcattttcttcactgattattttcattacggattttttcttttcattttttagcggcggattttgaatttttccggtagggtttaaaaatggttttgctgagagaacatagtaaagccttggcgctttagtctagcaactgccttttttttgtttcttttttctttttccagtaaatgggctgctttcaatctaaagtaacaagacaataccctggacacgaagatcctattattctagcttctc

SEQ ID NO: 249702 - DNA, 381 bp, Gossypium hirsutum
caactccttaattatctctttaatttagtaaagcaaattaaaagatggctaaacttgcctcccttttcatcttaaccctcctcctcgtttccactctatccttgagttttgccgcccggtctggcccagctttcgctaacgactcccctgcaaaaacccaatctcaggttacttaaattaatttgactggcttcaatctccctttcattttctctttcgtgattttacatttgatgatttggggtttttgttgatatattataggccaccactacttctactacaactgatgggatagagcagagtgaagataggtgtgaaggagttggagaagatgagtgtttgatgagaagaactcttgctgctcatcttgactatatc

SEQ ID NO: 249703 - DNA, 165 bp, Gossypium hirsutum
acccgtccgtaatcttcctcttttggtggcctttttacctgaaaatatactccaatttaacgatagtcagttcttttatactctgaaaaagcctatctcccgggatggtttctataatttacaaaagaaaaataataatatctggttaaatttcgtcagggggct

SEQ ID NO: 249704 - DNA, 382 bp, Gossypium hirsutum
cccacgcgtccgcccacgcgtccgtccacgcgtccggtttgcaggaaacaaaagcttccactatggcatttgcgacgacgacaaggtgtgagttccacggttttcttaaagatgggaatcagaagcctagaagcagatgatggtactgtttcccatgaattaaagccccaaatcaaacggaaagatccgacgctgaaaattcttcttttaactttcagtcttgtcgcatgttcatgtgctttgcttgcaatctctggtgtattcatttttaaatttcgagttctaagatacaaaaggctgttggaaattggaaatttgggcctaaccggagagcttacgttgacgtcgttttcatacaatgaactcaagagagcaacgaatg

SEQ ID NO: 249705 - DNA, 374 bp, Gossypium hirsutum
gagcaagatggtgaggagttatatctccagaagattgacaaagaacaggcagaactagctcgtgccaacttttcaatcttaaggaaggaggctcaagccatcttagacttggtaataatggatgcaactcatggcagtgaacctggcaagaccatatcactctacgttctggatgcagtagtttgtatcgatcatgagagatatttcttaagtcaacttcaaagtagaggatttttgaggtcttgcttaatgagtattagtagtttttcttctgcggatggtggtcattcacttgactcaatgcaacgggcttgtactcttgaagctgaactcgctttgcttctgagaatttgccacaaatatgggaagtctgg

SEQ ID NO: 249706 - DNA, 514 bp, Gossypium hirsutum
  unsure (1)..(514): unsure at all n locations
attcccggggtcgagcccacgcccgtccnngcccacgcgntcnncgactccatacaagggctatctttctaggcncnnctattcnnccggtggaccccaagccgagccaaatnncaactggtnnctcttannaccaggctnnncgatccanntcaggaccaaacncnntgacagcaagggtggacccannaggccannaatccanncagggatnncatatcannctacggnntcttattaaccccataaccanngaacaantnncaaactanngtgagcntnncagctgantnncaagtcnnaaaggnngaaacanannagataccgnncagttaaccccagtgttntnnctttcaaattccangnnctgataccacnnctttnngaaacctangctnnngactactntcnnaaaatnntggaggtngttnnttccgagggttggaaagcattttctcggattaaagccaacncnnggtcaaaacaatgtnnaccttgataccnnntcagtcat

SEQ ID NO: 249707 - DNA, 378 bp, Gossypium hirsutum
agctgctaacgggtctgcacattatgattcttccaaggagtcaaatactatttgttcaaaaactgaagcatcggaaattggatctttagacaaatgccaagttacttgttccaacccagaaccgtcggattttgtaactgaaaatacagctcggtcactagaacaagaggcctctattccctcaggaaaagtgtttgatgaagatcctcaagatctgccagttgaagttagtgttaagcagttgccaactgaaggagaaaaggaggaatcagagataggtaaagagactacaaagaaactttctgcagctgcacccccatttaatccgtcaacaattccagtttttagctctgtcacagttccgagtttcaaggaccc

SEQ ID NO: 249708 - DNA, 375 bp, Gossypium hirsutum
cgaacatcgataagtatttcccggacagattgttcagaactgtcagtgatttaagtttatctatgttagagaccgaagacacaagccggttagaactacaacaagtccagctctttgaacacatagcaccgaactatagaaggagtaaaagctcaactcgtatgaagcaagaaaggactgctagaagggaaaaactggactcacattgcaagggtgagttaatgggaataattcagaatgcggtttcgaaactctgtttctcggacggattagagatgtctgggaaagattatgcagtcgaaatcactgcaatttaccgaatgttaaacaataaacatggtgtgaagtacacaatgttgaaagatgtgattctgg

SEQ ID NO: 249709 - DNA, 261 bp, Gossypium hirsutum
cccacgcgtccgcccacgcgtccgttctacgcgtccgagctgtcaaatcaaagcatagttcatatgatagcaagattggcacaagactgaaataatcaatgcaccactacttcatatgtgggattcttctctgctcttttctacccatacatcattcaagaaaataaaatgtttgctgcaatttatgtacagtgatataaagttatggtttcgtgtgaagttgtaacaccttcaaatagtaaaacacgtatcgctttcttg

SEQ ID NO: 249710 - DNA, 370 bp, Gossypium hirsutum
agaagacataaagaaaaagcaacattgattacgttgagaagaagcaacagagggctccccgtttcgctcctgagctcgacggccttcactgctttgagacccttgtttcctactagattctttccttcatgggtttgaagttattcaacaatattgattcttttttctttttaatagcagaagctagaaattcttagagacccttgtttcctactagattctttccttcatgggtttgaagttattcaacaatattgattcttttttctttttaatagcagaagctagaaattcttactgcatatgtaaaaatttgggattaattgaaattctttatttgaaatcgcctttctttctagctttatggttt

SEQ ID NO: 249711 - DNA, 374 bp, Gossypium hirsutum
agcggaagagatgaaaatggaagctgagaagttaaagttggaagctgaagcctcaagaattgcacttcaggaagcagataagcagctggtagttgctctggaagaagctgaagctgcaaaagaagccgagactagggtacttgatcaaataaagatgctttctgagaaaacaaatgctgcacgtgcctcaacctctgaatctggagccaatataactatctccagggaagagttcgagtctttgagtcgtaaagttgaagagtctgataatatagctgaaatgaaagtggcagctgccatggctcaggtcgaagctgtgaaggctagtgaaaatgaggcccttaagagactagaggcaactcaaaaagagattg

SEQ ID NO: 249712 - DNA, 373 bp, Gossypium hirsutum
  unsure (1)..(373): unsure at all n locations
gctatttatgcttttacctgatctttcatggaacataatttgtttactagcccgttgagccacattggaataataaggatacttgggtctcttttctgataataacatgccaaagccatgtcccaagcatggtcttacaagggatgtttcttgtactgccaatgccatatcccagatatggtcttacacgggagttctcatatcggtgctcatgccatgtcccaaacatggtcttacgggagacctttcatctcggtgccaatgccatgtcctagacatggtcttacatgggacctctcataacctcaatgatgccaatgccatgtcccagatatggtcttacatgggatctctntacccaaatgttatgaca

SEQ ID NO: 249713 - DNA, 350 bp, Gossypium hirsutum
ctttaatctccacgccttctttctattacttcattacattctcaagagagaaagccatatccaaaaaaatggccaaattattgctgttcattgcactatttgtggttccatgtcttgttagtgctacacgcatggtgaagaacccgttggtggttcaaggtcaagtttactgtgaccattgccgtgctgggtttgaaacaccaaagactagaaacatggctggtactttccatctttgcctttcttatatgttttttctatgtttccttatgcctgtttttagtgtgtttttgttgctggcactgttagatctgtttctttttgtgtgtgtgcacgtgtagttctgtgta

SEQ ID NO: 249714 - DNA, 370 bp, Gossypium hirsutum
cggacgcgtgggaaagattttgcactcggttttccggggatagaaattaatttttagtttttatcttaaaatatgatgatgcttgaatcagctattgccgcccgattccccgccgctgctaacttctgctcctccgccttccaccgtaactctcttcccccctctgcctaccttttcgaaatcatatacctttttagtgctattcatggcttattaagacctgactaatagaccaactcaatgaacttagctgccaccaatgaataccgtcctacctgcagctccgatgaggttactagttgccacgtcacctctcgccgcccgtttcgccgtggtggattcgacgtaactcggaatagatttcaaagac

SEQ ID NO: 249715 - DNA, 347 bp, Gossypium hirsutum
cgaggcagcattgccctcggtgttccttcgtcccattctggcccctcgcctccttctccttcacctccgcaatccactccgtttaccggttcctttggccattccttcggtggaacctctagttccaatgtttcccaggcaaggccaatgatgcgaggaatagggatgggatcatcagttggttcaagttcacaaatgagaccaggtgggatttctgctcagcatcaacaaaggcctttgcaatcatctcttagaccaacatcttcaccaactagccagtccccttctacccaaaatttccaagggcatggccttatgagagtgtcagcggttggttcctcttcttc

SEQ ID NO: 249716 - DNA, 371 bp, Gossypium hirsutum
atcagaatccatacaactgttccttaattggcattcctcatctttaagctcattgataccattagagttgtggattctaagctctttacttgaattgcatcctgttgattcactggctctggcatctgttgcagcgtcctctgcttcctcctccgtacaaacttgagaataatcatgtttgtctgtcgacttaatctctaggagtaccttagattcttcaacaggctctacagcaggggtctcataactagctcttttatcatccaaagttgatgttgaagtagattcgattgaacctatctcagtagtggagttatctaccgattccttggaatgatgatcagggaaattgagacgagcataagaaccgt

SEQ ID NO: 249717 - DNA, 374 bp, Gossypium hirsutum
catacgcccgtctcctctctctctctctctctctctctctctccctcctttgggcatggaatcagctagccggcgattatctttttccgtttattcgaattgatcgccgagtaattcatcaatggtagcatcatttttcaaattcctttgctttataacgacgctgttttcattctcctcggtctcccggaaagagagaatctccaaagttttttttttgtaattcttagctttgtttcagtgttctgacagtatccatctcttcccgttggatttgataactttataggaaagaaaatatgattttgttttttgagctgaaaagttggtgattttttacttcaattttaaagggggtcaaagctaagttcggc

SEQ ID NO: 249718 - DNA, 381 bp, Gossypium hirsutum
gtgctttgatttttggcctaggtgtgttcttggggttctttttaaggagattgagacgagaggacgacaccaatgtagacgatcacgatcacgtatcggatatgttctttcacaacagtgactttcgacatggagcggcgccgaggaaattttccctggaagaattagcaaaagtgacaaatatgttcaaaggtgaaaagctaggagagggaggttttggtgcagtttatagagggtacttgagggacttggatacccatgttgctgttaaaaggatttcaaaggcctctaaacaaggaatcaaggaatatgcatccgaagtgatcattagccgattgagacacaaaaatctggtcaagcttattggctggtgtcacgaaa

SEQ ID NO: 249719 - DNA, 230 bp, Gossypium hirsutum
gctcaaattcggatcgccctgttgtcgggcctttcggtgaaatggccaaagcctcttaaaacccatgatgttatcttgtgcgacccagacgggggagaatacactacttacaattacttgttactggcaccgacggccatactgcgtaagcacgaaaaatggctgacaacttaggcaaaccctggtatcagttatcgagagaaaaatgaatgtgtaagggtgacaatatc

SEQ ID NO: 249720 - DNA, 279 bp, Gossypium hirsutum
aaatccacccctctcaactttaacaaaatccatgcctgccctttcggcaggaggcaagctttaagcaccaaaactacccatctggggaaaatccttgaaaacccatctaggaaagcaggatcccatgttcccaaagcagctgcatcatctgaatctaatcctgaaggagaagctgaatctgttgaagcagcagcagccgctaaatcgaaggccaaggctttacagcttgcacttgtgttcggtttttggctctatctggaacaggtttaaagacacaac

SEQ ID NO: 249721 - DNA, 406 bp, Gossypium hirsutum
gccggtactgactggccggaccgacccacgcgtagggaggcacgtggatcatgaatgggttttcctccctgataatagattcctggatatcaatcaagaccatggaggaaaacgagtttctgattcaaaccttgttttcttcacagactacttcgatgaagaacagtctccgccgtcagggaattcagggaagatagctaaacaagttgtcccagttccatttccattggaaccaagaatccttaaggttccagaaaatgaactagggaaggaaatcaccaaaagggtacctcttgatttcagttctacaccatccatgatccttgagaagatcaaagaagctggtatggaatcagttggaggtgataaagaagtgaagacacaagtttcgtttaggaaaccaagt

SEQ ID NO: 249722 - DNA, 401 bp, Gossypium hirsutum
taccggaacggaagggccgggccgagcgacgcgtcaggatcggtggaacagaggagtgaacgcattatgcgactgtcatggacacgggctgactctaggcaagcagaagatgcgcactcgcgggatagctatgcaaggagcatcatcggccaatagcagatctgcggtgcaggagaaggagaaaatacaccatctagccgatggatattacagaactggtgatttctcaaggagacgacaacttgtggggcaaagtctggagatggcacctgattggaggccagctctaagccttatgaaagcaactgaggagcccattggctaagatggcgtgatgggaagttggacaaactgtactgctcaggggcttatcgccggaagaattgccggagctttgactc

SEQ ID NO: 249723 - DNA, 372 bp, Gossypium hirsutum
atatatgggagagcataaaaccaggaaaaaaaaagagcttaaaacaacaaggcgtgctttgcgttttcaactctttaattaaagaagagttttgtgggagttgttaaaaagttgcgacttagtagaaaaggattcaaagcagaagagctttaaatgtgtccagattttggtctattgttggtttcataggtgtttcgagacattaaaaaaggttgttcttttttggtgtttaccttaaaattttcaatatttttttggggtttcttctaaacgaaaacaatggagtggcatgcttgtctcgatgaatatcaaaagcttgttattcggatgagtactcccagggtggtaatcgacaataccgtttgtcgcaca

SEQ ID NO: 249724 - DNA, 164 bp, Gossypium hirsutum
tttttttttttttttcaatattttatagggataggatattttggcgctctcagcgaccgctctaatgaatgatgttctctatggaatgtctgcaaaaagggcaagacgcttcctgtccaatacctcaccttacacgttccaagttggtgaacaagcgttgtctg

SEQ ID NO: 249725 - DNA, 373 bp, Gossypium hirsutum
cttttcttcccttactccccagagcatttggtccgcaccatacccaagttgaaggacatgaaaccatatatttatgtttccattaatgcttcaatgaaagagcacagccatgtttctggatctgcatctgcactttttgtcgggggattttccgtaatgcaaatgggaaaggatatagcacagttaaatctgacaccagactttaacaagactatcataaccatcttgggaaacacagatgttgaaatccactggcatggccaagatttgttagcaatcaatcccatccagaaagaaggatttggtctcagtcgccgcatcgattatgaggtaaaagcacttagtgccaagcgatttgcagataaaatcattg

SEQ ID NO: 249726 - DNA, 385 bp, Gossypium hirsutum
cggacgcgtgggctactctgctctactccacaaccctatctcgccttaccggccccggacctccacacgctctatgcttacactgcgccccctgcgtctaccctattattagaggattgtgttagaggatgagttcaagaaaagggaatgggaatccttttgtttctggtggtattaacaacccatcgtccaaggggaaagacatatctggatcctctagctccaaggttgagcagctaagccagggtgtagcggacatgaacctgggtttgcctctagacgatggtgagtgggaggttattcaaaggaagcctaagaatagaactggaagcagtgctgcaagaccttggggtcctcaaaattccaatggtaaaccgcggggagc

SEQ ID NO: 249727 - DNA, 384 bp, Gossypium hirsutum
caaagattaaaatgaacattaataacaaatttctttcctttcaaatttcatttgtgctgccgttaataaaacacccatgatcggcatattataagaaagaatattcctcctttatattacaagttcctaaaaattattattattatcagattgtttttctttgttattcttcttgttttgggatttccctcaatccaagaaaatggggaagccaaccgggaagaagaagtttcaagaaacaggcaagaaagtcatggaagccaacaagcagaacaaaggcgccgccgctgatcggacgtccaaagctttcgatgaggacacggcaatcttcatcaacatgtcccaggagcttaaagaagaagttaaccgactctttcagaaacg

SEQ ID NO: 249728 - DNA, 363 bp, Gossypium hirsutum
attttatttctagtccctctcgattggaccaggcaaggttttttgcttacctcctttgactactcttcttaaccaccttctgggtttcctttcttctttgttccatatatcatttctgggggtccttcaattccttcatttttatcactctttcaataacccctttctcagccaattaagtttccatggatactacccttttccaagattttcccagttccatgtatgggttcaaactcgatcatggagcagtaccagtatattcaattcacgacttcgtcagtaataataatgggtttattaaagatagtcctccacaggttgttccgagtccagactcacctgttgagtcagtgacaacaa

SEQ ID NO: 249729 - DNA, 376 bp, Gossypium hirsutum
attttcttattgattttgcttatcttttctctaatccttttttcaagtggagaggtgtttatacgtttggttgttgttgaagaagtgctactaccatggctacaaagaagagcgttggggacttaaaggaagctgatttgaagggaaagaaagtatttgatgggtcatggttctaaagtcatcctctctagtcatttgggaccgagcttggttatcgagaagttttgctcctgagttttggtcttgcagctttagcactggccagtgtcatctcaaatcttgatatggaaatggaccctaaaacaggagattacaaagcactaactgaactgcttcccctaatattggtcacacttgcacttgttatattaatctt

SEQ ID NO: 249730 - DNA, 377 bp, Gossypium hirsutum
gcgccattgcacaactctttcttctcctctctctctctctttggcccatctctgggctttggagagactgagaggagagaatctcaattaccctttcttcatgcatctattctttcttgtattcctctgaattttcttcgttttgtcttattaaccaattttatccaacatccatttccagttgcagaaaacccatttcatattcaagtgttttagaaggattaaatggctgaaaaaagtttcccacttcttcaacatggctacaaagatgtggtttttagtgattcaggtgtcaagattgttgaatgttctttttctcttaagagagttagtttgaaagcaaatgggttttttgctagtgttaatcaagctggaat

SEQ ID NO: 249731 - DNA, 385 bp, Gossypium hirsutum
cccacccttccgcccacgcttccggtgtttgcggaacctcaccaggagatttaacaggcccgggccatgattgaagaaccaaaaccctcacttggacctaatgaagctaattatggagatggaaccgcttcatgagccaagaagatggcgaagaatgactcgttactgatgaagagagagtagagtcattcaaagcagctttgatatctgcaattgttggcacccttgctggattgcccatctgcctaacccaagtttccagcaccactcagctgctgctccctctatcactcaatttcatcagctgcgcattgttggggatcacttttggctatgcaagtaggagggactcggacaactttcagctcaagaccggcacatctgc

SEQ ID NO: 249732 - DNA, 384 bp, Gossypium hirsutum
ctttttgcccccttgccttctctgtttatttacggatatagcattcaagttatgatagcgttttagtgaccggaaacctgagagccgccgcaccgctcccgctctcggtttccctcgcgttaggttcttccgtttccggcgcttgaggcaatcgtcgactccgctccacccgtattcccaacaagaaaaaaaaaacggagaagagaagttcatttattacttttttttttattttcttctttatatttctcgtttgaattattgtataatatgacacttggaatatgccgaagttgacgaagctgctgttgaacgtgaccattcaagggagtctcggagctgtacaagtagtgctgtcgccggaaaacactgtcggtgacttaa

SEQ ID NO: 249733 - DNA, 355 bp, Gossypium hirsutum
  unsure (1)..(355): unsure at all n locations
cacaantaaaccttatacggttgttttgaaatcgaccggaaaggaacatagtagagggcgcctagctactggtttcgatctgaaccagaaggtaaagaccaaagaaaccactttagctcatccttctcctatgtttgacttaaaccaaaagcaacagaaagttttcagcgaaaagcatagaagttactttgcgaactagtttaccggctctcgactcataccagaaggaaaggccttatagcgaaaaggaggctactgcatggcgccggttttcgatttaaatcagatttcggtgatctattcgtagtttagtatgaatctgctttttataatcttttgcgtaaggggttagttc

SEQ ID NO: 249734 - DNA, 221 bp, Gossypium hirsutum
gctgaactcatggattttcggatctgttttctcataccacatactttaatgttgatgtagtttgttatgctccctctgtcaccacctagcaactcaaggtttattttattttcatctctttatttgttttccccttagcatgtaccttcataatttgaacttgatttattgctgagaaagaatgcattgcaataaaatttgtagcatcatatattggaatc

SEQ ID NO: 249735 - DNA, 382 bp, Gossypium hirsutum
cccacgcgtccgaaaaaaaaaagatagaaaaagaaaatggggatatgggactagatttcatggtcaaccgactcagtgaagggcttttggcagagctcttgcgatcatggttccacagtgatcacaaagggaaaggaagtatcagttgatgcactgcaaaaggtgaaccatcatggttccgcagccatcagcaagggcaaggaggttttgtgtactgcactggaaaaggtgaaccatcacctgtctgaccctgaaacccggtcaaagatctccaaggtagctaccgatatttccaagaatgctaccgttgagggccttaaaaccatccctggtgcatatccaacatacaaaattgtatcaaagtcgataagtgatgatgatc

SEQ ID NO: 249736 - DNA, 388 bp, Gossypium hirsutum
ccgggccccctgggcccaaaatagaggtcctaaaaatttcccataaaaccccatttcggtttccttttataaaaaaaagagaaaggggcggttgaggtttccatggaaaaattggcccgtgaaagtgaagcctttgaagctggaagggttacctagaattgaggaagaggttgttaagaaaatcgcgttgattgaaatggtggggagaggacccaagcctagtttggtttcgtttcatgtatcgtcgtcttcaaggcataaatggaatcgcagctgagaaaattttaggaaatgaggaatcaattgaatgggacgatgatgaatttgacaacttgtgtgatttcccagttgtttccaaagatcttggtttcggttcctaggatgtttt

SEQ ID NO: 249737 - DNA, 387 bp, Gossypium hirsutum
atcaaacgttcttgcactcggtcttacgacgtgcacgctacattgcctacactaggacgcccttccctgtgcgatgaaataaatagataaaaaaaaaaagggctgcagaagatcgtctcattttcaccatttccagagatccaaaacaacaaataccctcacttgcttaaaaagatgatgaggatgtagactaaagcgaccggtctgtccccggcccagacaaacaaagcatcaagttgtgtctgaggcggggaaccagactgctcatgaccgggagctcagacccagaggcatgctgtatcaaacgccagacctcgacaactgtcgtgcccctatcccaccgccgacaatttgagtcagagtcaaatacaagtcaatccatcatga

SEQ ID NO: 249738 - DNA, 285 bp, Gossypium hirsutum
tcagcaagcctcctctccttttttttttttattttttatgagatgatttttttacacatatctacgcctcctaaacttttcacctataccaaacttcattccacaaacacattattttttattgacccaactcacatcaccacaaaacgcgctcctgttttacaataccacaaccaaaaactttactttatatccatctccaattcatacacactttcacaaaacattattatacatctctgccttatacacctccaagattaagctcaactactccctaacaaa

SEQ ID NO: 249739 - DNA, 381 bp, Gossypium hirsutum
cccacgcgtccgcccacgcgtccgtccactcgtccgctttggtgacaaaatagcgttttttgaaaaggaaaaaaagcttgaaaatgttgaaatcaacattagttgagcctttccttcaatttatgatctaggttttgcttagttctttcattatgggcgattaattagaaatttccttgttattgatctttttaatgttctcttgtagaatttgagttgtttaacttagctttatcctataatagaattttggcatatggcgatgttatttccagccaaacatgccatattaccatgacatgcacattgcgcaaaataaatttttaattcatgcttcataatgttttgcatcaatgtgctaaagatatcattgaatggatt

SEQ ID NO: 249740 - DNA, 385 bp, Gossypium hirsutum
gggccatttaattactcagctcgagatgaagctggtattccacgagaatggtatgacgcattgtctacaaataaacaagagcgtgaagggaattggaagagtagtcagcagctttctgaggtttatgataggcttgcttgtattatctccatggagagtgagaattcaagtttaaatagaccacctgaatgacttttatttaaatagccactgttaagattcctgtataaatctaaattctggaatttgatgtccagtttttcatgtaacaaaacttgggcaagatggcaagggtcaggcacaaaatttaaactactttgtacatcaacgcaaaagctgtatcaaacttaggttttgcttagtatgaaggatggaaagaagtgat

SEQ ID NO: 249741 - DNA, 387 bp, Gossypium hirsutum
attttctttttttatctttccaggtactttgagaattccagtgctatgagagggcagggcaacggtggtgtaagaggattcacttcgccagacaggggtgtgcacgagaagagaggtggcaacaataacaattacaaccaccacagctacaaccatgataaccaccaccacaacaataaatcggcggcatcttcggagacagctcaagatagcaaaaaaggagggtcatcttctgggagcggtgagatagctcctgcacccatggtttggccacctaaattcgtgattgctttaacaaataaagagaaagaagaagatttcatgacctttaaaggatctaaactgccacaaagaccaaaaaagcgatcaaaatttattcaacgtacc

SEQ ID NO: 249742 - DNA, 365 bp, Gossypium hirsutum
ctgggaactaagtttcttggtttttttggcagccgaatcaccattactttggtgaccatctacatgcaaaaagtacccgttttccctgttgaagacacttgaacaagttttaaaagggtttaatttgtaaagtaaaatgctacttgacctctcgccattatatccgcatagcagaaatatttgtggctttcatcggtttttagttgtatgtaataacaatgagtaaattaagaagaaaataaaaaatcggaaaaaaaagcgaaaagtatgaaatcacctctgatctttgtattcaatctctgtatattttttccttttttttctttttacaactgatttgctgcttcgcttttatagccgaagag

SEQ ID NO: 249743 - DNA, 380 bp, Gossypium hirsutum
ctttggtcagtcatggttttaatttctagtttctcttcactagctttatctgagtctcaaatccatgcagttcaatactccagtatatcagctgcccctgcattcttgccagctgctcctctatcttcttctcctggtttacccccagatattgagcctttacttcctactcctaaaggtatggcaccttcccctactgagtcatcattccccaccattccttcaagtcctagccctcctaacccagacagtatgttggctcctggccctggttttgcaccttcaccatttgggtccttaccagcatccactgcggtttctttagcttcagctggagttctaaattcgacattgttttttgggttgctagtggcactatg

SEQ ID NO: 249744 - DNA, 386 bp, Gossypium hirsutum
cccacgcgtccgcccacgcgtccgttttctttttaccggccggcggcatatgttcgtctcctagtgtaggttacgtcattcgtgtgaaaaatttaaagtttagtaattctttttgttttgtttaatccaacgggtcttttggttttcggatttgctggattttggctacgcttctcctaatattccggtttccagaagccaaccactcaacagacgcacaaaccaaccaaaacgaatcaaaatctcccctttattttctttttcttccacaaatatggttaagagggaaccaacaaaatagttcaactccaaacagcttgacaagttcgctctgtaaaattagctacgtacagtcaacactttccccctaattacgcttccttttt

SEQ ID NO: 249745 - DNA, 300 bp, Gossypium hirsutum
ctttacaaagtatgttccaaaaaactcatttcatgtttgaagcaaaagaagccaagaaaagggttcttaaacggcgtcaagaaaatgattggctgattaagagcagccgattaagcttcttccagcatcgtccatgtgccaaatcaagaggcactggttcttccttgcaggatccttcaactcccgcgtcgtacaatctacgaaattctctcaaggctcccaatcaaaaccctcttccaatgcaagtgcggttgcaagagatttctttgatttatctgcgatcctgaatttgctaagctt

SEQ ID NO: 249746 - DNA, 217 bp, Gossypium hirsutum
cttgcagcagcagccagtcagcgcccttccagatgatgatgatgatgcatttgaatagagaggagtttgagttgccagagaaccatcaacaatttctgctgctttttcattctcactcctgtctggatgtgagctctctcattttcgcatttaaattgcaagtatggaggagtgacggacgatgaatctgtagtgtcagattctacgaatatcattg

SEQ ID NO: 249747 - DNA, 381 bp, Gossypium hirsutum
cggacgcgtgggcggacgcgtgggttcagcttcatggggcccaagctttgggggaatactactccggttgatgtgggtaagaggcctgtgactggcctccgtctatatctagaaggtaaaaggagcaatcgcttggccatccacttgcagcacctttcctcccttccaaaaatattccaacttgtagatgatccaaaagggaacttctgccaagagtctcatgatcgtaaatactatgagagagtttattggaagaactactctcacgtatgcactgctcccattgaatctcaggaggaactttcaattgtaactggagcccagttgcaggttgagaatcatggttttaaaaatattctctttttacggctatgcttctcg

SEQ ID NO: 249748 - DNA, 382 bp, Gossypium hirsutum
cccacgcgtccggctactttgagactcgggttaacaaaattttccattcgttgtgaaacctatttcccttttaaacttttatttgtagcctttcttctattttgtagaaatgatcttagccttactcaaattcacgatcgggaaacaaacgactcgaatcaatcacgaaacgagatcgtatcagaaaccataaggtgccccaaatcctagatttgcacaaagggtgaaaaatggctcggcagacactactagaagcacaaaaccaagaagcaatttgaagtatcgaggagaactaaattttagcctaagatggtccaaaattatatgtattaattcataatataattaatttttatttatatccaatttaatttgggttaat

SEQ ID NO: 249749 - DNA, 386 bp, Gossypium hirsutum
caaggacatacttgcaagagctttttggtagctttccatcaactggatctggtactgatgctatacaggctgcagacactagtgatggagagtatgaaatatatgaacaatttggtgatgataactactctgatgacgatgacgatgatgatgatggtggtgatgatagctaacgttcctaactccaaagtttacaggtcttgtttacatatcagttcctaaattaccaattatcaggaaacgtcttttagccaaactgatttgtgctttagataaggaaacatactgttatgaaaaagacatggtcctttgtaaattaagaggagacaacgaatttccaggaataatcatcacagttgaagcattagctctggttttggtctttt

SEQ ID NO: 249750 - DNA, 423 bp, Gossypium hirsutum
taccggtatcggcaagggtcggcccagcagcgtccgtgcagttgaatatatgtttctctcttcatcagtctaactagctctatattgcagggcatttcatattatcaactgtcaagtcttggcaaacttgatctctcagtttggagatggattctattattgtagtcctgaaatgagcgtattggtagttgttaactcatgccttacttattgtttagccagaaagtatgaagttgcatctttctggcatcgtacatcatgcaatgagaattgaggaataagaagcatatcgtctattgcaacatccggtcttaccatatagttcatgcatctcaccttagttcaatcagcatttttataagcttcggttttttcctgcatgcagatgacaacgagttcgaggatgtcaacatagtaaaaccg

SEQ ID NO: 249751 - DNA, 260 bp, Gossypium hirsutum
aagaaagaagaggctaagccttctatttgtggtctgctggaaataagtatcggcgctgtatgtgctgagcctggaacgctgtcaaatgacaagaaaagggatatacaacagctgggtcatgggcaagagagggctactgagcttgagatgcattttcatattgcctatgaagaaggtgggcccccgtcatcagacgtagaactcgtgcagaacatgctgacatgtttcaatcacacactgtcgtgatcatgagtgcgcat

SEQ ID NO: 249752 - DNA, 344 bp, Gossypium hirsutum
cccacgcgtccgcaataatttgtttgatttttctaattattatttttaaacagggtttaatagatatattactctttgttatttgtttttattttgtttacttaaaatttatcggtcaacctgaaaaaaagtaaacttttaggctgcactttaaccaatgtggttaatttttaactttgttttggaaaattcatttttcctggtcatgaatctagcaataattggttacataatgctctagggggggggacaattggtagttggtaattaattaatggcccttgccttttagtcgcaactgacaattgttttctctcttttggttggcattttttggggtcatt

SEQ ID NO: 249753 - DNA, 338 bp, Gossypium hirsutum
gccaatcttacggaaaaatttaatttctcttaacaaatataaacaataagacagggttgaattgatatattactctatgttatttatttttattctagatacttaaaatttacttgcaaagctgcacataagtaaactgttaagctgccctttaaacaatgcgtctaattctttactttgtttctggaacacacattctcctggtcatgaatctagcaataattgggtacataatgctctaggcgggagacaattggttgtatgctatcaataaatggccctagccttttaggctcaactgacaatggtttcctttctttggcttggcttttttcggg

SEQ ID NO: 249754 - DNA, 349 bp, Gossypium hirsutum
gggggacccacgcgtccgcccactcttacgtcaattcttatattataatgcacacattaatactcagcgggaggtatcatttccacacaaaaaacttccaaatatcacaaatcatacaaacctaccaacacctatcatagaaaccacacaacagcaaatccaaccattcattccccccaaacaaccttccaactcagatctgtcaccatcactaactccgatacactcaaaaccatccccaacagataattggatttgttctttcggaagcctatttcgctataaaactaccagactctattagattctctaaggataaaccgtgaaatacaggcttcaaaggcaaagc

SEQ ID NO: 249755 - DNA, 385 bp, Gossypium hirsutum
cccacgcgtccggaacacttctacaggctttggaaaactatcatccacattgagtaatttggagatccttgacttaagttacaattacttgaatgatagcattttgttatctttgagtgagctttcctctctccggtatttagacctatcatacaaccaatttgaaggatcaagtcatccaagaggttttcaattgctttcaagactcaataacttggaaactcttgatttaagttggaattctttgaagaatagcattttgttccatatgagaaatctttcatccttgaagactttaagattgagacgtaatcagttgaaaggaaggctggatcatattcaagggttgaataatttgacaaacttgaaatacttggattaagtg

SEQ ID NO: 249756 - DNA, 385 bp, Gossypium hirsutum
aagagctggttttcctctttctgatagcggtgctgtgaggaatactgaggaaagctttcaggaggactgtcttcctttctttctagatgatgattctagtggtcctgatggtagcccttcctttgcgaaaaagaggtccttgatgaaatctgcttatggattttctgctgatgcaaaagatgctagagaagcaacatctagtcctgtgaatagagtagactttacatccaaatatagtggtgcaagacaaaaattgaaagatgctagtttcaggcttgaaagctgcaaggtgtcaagtgaaactctgcacgaacctcacaaatccatggatcaaagatctgtgaatactcgttcaagagttgcagagtcactggagttgattgac

SEQ ID NO: 249757 - DNA, 230 bp, Gossypium hirsutum
agccttccttaaacttccacaacgtgcttgaccttttaatatgccatgggatgatggtggttagtgggtaatacgtattggcttttgtaccatgccctgtatttgttaaaacccttatatattttgggttgggaaaggacttgggaatgggctttgatataaaatgtccacataaattaaattccccaatctcttctctttaatcctttccttcattttttttccaactg

SEQ ID NO: 249758 - DNA, 391 bp, Gossypium hirsutum
aaaaaagccctacttttgttgttaatgaaaagaaagaaagacagactctgcagcgatgagactaaataaagaagcacgcaatttatcaaattcgtcaacgaatacaaagtctgattcatcgaaagaatcaatggcagagccttacattgaacaagtagagtatctcgacgttctcactaaaaccggtaaaaagacaggcgtttccaagcccaggggagatgtccatcgagatggggattaccataaagcagtccatgtctggatttttgctgagagtacacaagaattacttctccaaaaacgtgcagactgcaaggactcgtggccagggttgtgggatatctccagtgctggccatatatctgctggtgactcatcgctaataacagca

SEQ ID NO: 249759 - DNA, 326 bp, Gossypium hirsutum
agaaaaaagaaactcctcaatgatctcacggtggtaaagtgacatgctgcatagcggcggatgcatggctggctgaatatccactgtcaggggatgtagtgctagaggaaccatcacaccagcgtcaacaccgattgaaggtgcaatacactgcttgatgtgacactgatgtatactactggactggactagggttatcactcaaagctgcttctcctacttagttatgaaaactaaaaaaatcgggcggagcgtcttgaggatccaagctgacgtacgccctcatgcgacttcattccttatctatagcggcacctgcattgaat

SEQ ID NO: 249760 - DNA, 386 bp, Gossypium hirsutum
ggaataggccccccaaaaggagaaagcatttatgaagaagctgtagaatttgagccggttattcatcacaaccaattctgcccttgggtgaatggaactgttgctgctgctggctgtaatggctccagtgctgatgttgttgcactctgtggatggcagttgacgttggatgccttggatgccctgcggtcacaggggcatattcctgtacaaacagtacagtctgagtcagcagcatcgctgtatagggatgatcaccaaactcctggtaaaaagctccatcgacggcgtcctatgaacaaaaatcacgggcaataatgatggccaaacacgacgtgtaaagacatcttcaatggctagtaagatggaataagcattctcaacgg

SEQ ID NO: 249761 - DNA, 298 bp, Gossypium hirsutum
gaggaatcctatatgtactaattgtggcggtccggctattatcggcgacatgggagtagacgaacaacttactaaaaccgaaaatagctcgtctaaaagaggagattatatcgcgtctcgtgcaccttgctggtaatggacctaggtccggccagattacagcgacctggcattaccaagactcaatgtgtcgagcttagggcatggcacgcaagggtactacatggaaccgactatgggtactactacaacattgcctttaagacatgaagctttaccaacactgggagtatctagt

SEQ ID NO: 249762 - DNA, 329 bp, Gossypium hirsutum
cccactcgtccgcccacgcgtccgtggacgcgtgggttttctctttttcgttcgctttttttttctttttttttcctttccatttccatctaactaatattttttttatttattaataaaattatagatatccattcacaaggatctctcaacataattaaaaaaaaattttcaacattacatttaaccattttatctaaaaaacatcacacctacatttctcaaaatgctcaaagtattcttccactttaaacataacaacaccattttaaaaacaaaataaattggtaaaattgtatttaaaaacaaattatattaccccatatgaa

SEQ ID NO: 249763 - DNA, 361 bp, Gossypium hirsutum
gggatggccaatgggatgttggattcaagttgttcgatgaagaagacgatggtgacggcaatgtgtttgatggctcataaagcgtacatttctttgctcatactgggaaactgatttcggtcatgtttgtatatagctttgccctttgcctttgttggtgaagttaattactttagacactttgtatttccagggtagttgtaaaaaaataaaaaacaaaatgctctttagcgtgaaaacactagtaactcagtgtgtaaaatttcctcaaggctgttttgcccgtatgacggtgctaaactgctaattgactgttaatatattgatattcaattgcgtggatatcctcttattatgttcc

SEQ ID NO: 249764 - DNA, 390 bp, Gossypium hirsutum
cccacgcgtccgtggaattcctttcttcaagagcttagagcttaattttgatggggaagcacgacgatgagcgctctgtttttcctttaaccagtctccaaatcggagacttgcagtcttatctatcggatcttagccttttcttggcccctgaaagtaaaaaattctacattttggtggacaaccggccatggcttagggacttaggttcacgtcctgctcacttgtggcaattgatggttaccaagtccaggttatctccttttgctaacaccaaaggtcgtagggcaagaaaggatggaaaagaagcttcttccaaatcaaatgctaaagatgccaagaagttggagagatggttctctttggtagatgctgcaatgctgtcgaaaa

SEQ ID NO: 249765 - DNA, 341 bp, Gossypium hirsutum
  unsure (1)..(341): unsure at all n locations
cccacccgtccgcccacgcgtccggtttttttggggtctagtttttccttaaccatcaatttaattcccagtggctaaacctggtttggaccatctttaaccaaaattacactcccttttttcctttttttctttcaaaataatttccaaagaaacaattcttcgatttcttagctaaatagttcaataggtgccttntctttttattttatttacatacatattatattataaggtgatacagcgttcagattcgaatggaagacgatatgcaatattcctttcaccttctagtaactcggttgaagcctcttcagaccgagatgaaatatggactgtgt

SEQ ID NO: 249766 - DNA, 383 bp, Gossypium hirsutum
cccacgcgtccgtggaaattgtatgagagaaagcgggtgattcctggaataagtggagatgtttgtccctgtaaaggctagttggaggtgctgtcggtgtgcgactcttgacaaagggttcgattgaatgattaacgactgcgacacatcactgagcagccttgtcttttacccagcttaaaatgtttttccagttccttggcagaatgattgaagagttggataaatgcttggaaattctcggtttgtatataaatttttttcttcttcatgatttgagattttacttggtggaggatatttcattcactgagcgatgtattattacttagaatgagactctgatacattagtttgagatccctgtgatttccctatgttgg

SEQ ID NO: 249767 - DNA, 373 bp, Gossypium hirsutum
cttccactgttttagaagcaatggcttattcgactgctttaagaagagtccctgtatcgactctgttttcgaagctggccaatctttcaccagcacgtaccgtttcagtggcttttcccaccgtggctcgctccttcaataccaatgctcagctcaccaaattcaacgacgaggatcgctccgtcgacgttcagcgccaatctgatcgctctgtctctcgccgtcgcgattctccccgtttcttctctgatgtatttgatccattttcaccaacaagaagcctgagccaattcctgaacctaatggatcaattcacggaccatccattgctgtcaaactccgagttgtcgtcaaggaaagggtgggacatgag

SEQ ID NO: 249768 - DNA, 399 bp, Gossypium hirsutum
  unsure (1)..(399): unsure at all n locations
agccttccgaaggtttttgcaaaccaaggggaaccttcttttgctctttttttgtccaacctggggaaaggggttgggggtggattttaccccattattgttttttaagggcctcctcctaagggggttggccttgccaaaaatttttcattcaggcatcccaatgtttttgggaaaaaaagacgtcttaccctttttgttttcgtagcagatgaatcaagtgacactcccatggcatcacaggatttgtttctgcttaccatccacatgctgaaacacagagtaatgaccagttgagtattccacctacattggatgaagaagataaaccaatggattccaacaactcgaatgatggggaaactgtacctncaaagtcagagagctcacaaccctgtt

SEQ ID NO: 249769 - DNA, 385 bp, Gossypium hirsutum
cccacgcgtccgcccacgcgtccgttgagtgggcattgttttaagagagatggattactggaaattggtgtgggtgtttgtggttgctttcttatttggagggtatcaaagtgaagggtgctgggagattgagaaagctgctctcttccaactcaaacctttctttcctcgtgttaacggtgaagagatttcttgggggaagggaaattgttgccgatggaattgggttgagtgcagcacttccactggacgagtcacccaactcttccttgaggatagttatgatagagagacaacaaggatatctatcagggatggtatctcaacatctctttgtttcttcccttcgaagaattgaagagtcttaatttaggaggcaactaca

SEQ ID NO: 249770 - DNA, 383 bp, Gossypium hirsutum
  unsure (1)..(383): unsure at all n locations
cccgggntcgagcccacgccccgtccgcttattgggcaactcaatattctgtaagtcatagtattggcctaagagacctgttgagtgttcggtaggtagaagttcacaagtccaatggactcaccatagatgcctcgcacacagcttccattatgtgtgaccggcgagtgaagttgacaacagttggtcatatttatatggtgctgcaatatgccgagatttatttgccatcgctacttattttgtatacaatcacatgtgtgtgacaagtgatgcggatacacagagtcaatgtgtgacctctgataaagggcaagtgacgaatgcnggtggatgttggcatctcttggcattgctttgggcttttggtcgggatgaatctt

SEQ ID NO: 249771 - DNA, 336 bp, Gossypium hirsutum
atcctgcatgtgcctttgttgtgatcggtgttgctatctccgagtgaatgaccgcctgtgatgctaaaatctccccttccttgtttcgtacaagtaagcccatagccgatctagaagattgacggtcaaaggctgcatcaaaataaactgtgacttttgatcttcaacaaatctagtgaatgattccattagcctgaaagattgaccagagaccacaacagaaatgtcagatctgttcgttagtacattgacggaagactcaagacattgttgaaagacatggctactatcctcttcacgctgaaagatacgggggcactgatcattctccacaac

SEQ ID NO: 249772 - DNA, 383 bp, Gossypium hirsutum
cccacgcgtccggttggaattactgtccctgtggtggaaaacatggaggcacgactaaaggaagatatattgtctgaggttagacagtctggtggccgaatgcttttacatcgtgaagaatattgcccatcttcaaatcagtccagtgttgtagggtactgggaaaacatctttcctgatgatgtgaagacacctgctgaagtttatgctgctctaaaagatgagggttataatatagcatatagaaggatacctttaactagagagagagaggctttagcttctgacgtggatgaaatccagaactgtcgagatgagtcctcagcatgttacctttacgtatcgcacaccggatttggaggggttgcatacacaatggcaat

SEQ ID NO: 249773 - DNA, 388 bp, Gossypium hirsutum
aaaaaagctcaataagctaaactaattgaaggctacatataatagatgtccaggcttgtaaattctggagaactcctttgctgtaaacctatcccagaaggtcagcagccaataaaaatattgttagatctactagaaaacaaatcaaacaagatggaaattggatcttgttgcataataacttgagccaacaagttatttcaggaagtcattgtatgttttgatgtttgtacaaacataattcctaaatgaatttatcacaatatactcacaggagtcagggaggccaaagaactggaattgtaagctgtactttctgaaccgtgactagatatatcagttgatccgcaacttggtggccctgaaaaatctgttctttctggtatgg

SEQ ID NO: 249774 - DNA, 257 bp, Gossypium hirsutum
  unsure (1)..(257): unsure at all n locations
cggacccctggnttccaaaccatggttacttcaggtgtattcatctggcagcgatcaatctgctcaatttgctaattcgtggaaaagaattgctgctttattgaatggggttgcaaacattggcatggtagaacttggtgaggttcaagttgcagcctacctttctgagagaaagccaatgggccggttcttcttcaggaatggtcttccttcagtggttgctttcccatcagggtgtaaaacttcagactgtctta

SEQ ID NO: 249775 - DNA, 386 bp, Gossypium hirsutum
cacgccttcgtccaactcctccatttacgtctccaacaacccacaggaagcccgaagcaaccctttcctagaccccatcgaacactcaaacaaccctccagctctggccatgccgcctccacaaagccgcaagcccgtgaccgagccctccccgacaagctacagctatagctcttcctcgccagacaaagctgcgcctcctaccgagtctcattcgccgcaacggcctggcatcggtccataccacaactctggggtcacgccgtcatacatgggaaggcagtccagcgctctaaatgggctgaccatgcacggagccgacagccaaggcagctacacaaacactgccgtggagatcgacggacagagcaatgtcggtcgtagcg

SEQ ID NO: 249776 - DNA, 304 bp, Gossypium hirsutum
cgaagaccttctttacagcaaagtttataatgaagaacacttatgtgtgctcagatgaccttaacaggccaattctgttcacaatgccaaggcttgatcgtttcaagaccttaaccggcctcttcagttgttccggcaggaccccaaagttgcttagtttgcttaactctttatttgtagtgtggagatagccaaagggatattaaatatttgaaagaaagccccaatgtaaaaaatgtgtgtgctcttctcgaaatgcacctcttacacgcccatcagatgggtatcttatcaaatgtacaca

SEQ ID NO: 249777 - DNA, 308 bp, Gossypium hirsutum
cccactcgtccgcccacgcgtgtctttttacaatattttcaaacctacaacggagggaatgttactatctaaaccacaaacattcaacatccataccatttatgtataaataacatatcttcctgtcttccctacataacactcttaaaaacaaattccaactcatgaccagtctcctcccaattccttaacatcagaactgcacacttataccatacctccgctgatccatgtgccaactatctgtcaaagaaattacccattgacaccaactatttaaaacccatgcagcacaggaccgacattac

SEQ ID NO: 249778 - DNA, 307 bp, Gossypium hirsutum
gaaaaacttgccccttacgacttttttctatggcctgatcttcatctactgagatcttttaataactaggctaaacaatacaatccataccaaaccaactcaaaagccaaaacctaacacctaactatttttttccttcacttttgacctccattatccatagatctgttgatcttattttcaagcatagaccaaagctgtcaactaaacacacaagtgttgcattattgcagtcatgaagcaatctgaacttctgctcacggttcaagcatctaggtactaactatattcaccgctcatttagatc

SEQ ID NO: 249779 - DNA, 388 bp, Gossypium hirsutum
gtcgggagaattaaaggttaacaattttagttttaccgaattccattggtacctgggagcacttacgagagcttgacttggcccgatctgaggatatatgtgaacttccgaggactttttataagctttactgcttgcaatcgttgaatttgggagctactagtttgaagcagttgcctgacagcgtgcaaaggttgattgagcttagatatcttgtaataaccattgaagctacgcatttgaaagaaatacgagcaggatgttggacttctcttcaatacttggaattgtataattgtttcgaattagaatgtttacctgaaggaatgcagtatctgaagtcacttcggacacttatccttacttattgtgatagccttgtctcatt

SEQ ID NO: 249780 - DNA, 380 bp, Gossypium hirsutum
ctcgaacaaaacttttacttctcaactctctcaaattcaccatggctgacaaggggggcaactgcgactgctctgacaagagccaatgtgtttaagtaatccataatcatccatccatgatggagcttgccagtagtttctagtcttgtgtgtgattttgagatcatcatgctgtttttgttgtgcatgtgcattttactacgtatatgtcaccattaagctggaccaaagctttttcaaaagcatttatgaacccatgtttcctcaaggatgttacccagtacgcgagtgtaggatatagatatgtgtcaaccggaggatcatattcttatactcttgctcgaatatcagataccagtattgctaatcttgttacaact

SEQ ID NO: 249781 - DNA, 388 bp, Gossypium hirsutum
cccacgcgtccggattcttacaattttgttgaaggagaaagctgatgaaggtggtaagtgtttgtccgaaagtcactggaattcacattgcgttgttacgaggaacaagttcgagagtatgtgtggaggacaaaaggaaggttatgctgtgttgagttacttgtcagggtgcaggaaaggtcaatatctctccaccaacaagaaagaactaatcgagggtataaaagtttccctttcgtcagctgtggtttctggtgtctcgagtttagatttcgacactctccacctcatttggactcaagaaaaacttcaacaacaactcgatgtgatcgaccgacgctgggaaacgtcaagacagtcagcattagcctcgttgaagtctgggaac

SEQ ID NO: 249782 - DNA, 368 bp, Gossypium hirsutum
catactcttggactgcataggagcttgagtgtttacggctatattctgcataatggatatggataaaccagataagcctcaccactttgagccacagatatataacatggaaaggggagctcgtgataagttaataaatcactacaataccatgagcattcgggattttaatgagaaatatggagatctctgggatttcactatcaagaaagatgatataacagagagataaacttctctcgatcagaaaaagagaactgtacttattagctactgtcatgtgagcatggtctgaaagatgtatttttcggtccgatgcgatcacgtccgattgcagtagatactaaatcgaaactgtcgccttaagt

SEQ ID NO: 249783 - DNA, 387 bp, Gossypium hirsutum
taaacattaccaaaatatggggttttctgttgtagtactagtagttaaagctggtttgcttgtgcagctttcagtgttgttactgagcaccttcactgtctctgctcccatttggcctcaggcttctcctcctcattaccatgctgtttcaccctcaccctcatccacccactaagcccccaacccccactcctcctccagttcatccaccacccaaggcgccagtgcaaccaccaaccaagcccccaacttctgctccacccaagccaccagttcaacctccaactaagccaccaaccaaacctccaactcaacccccgcctaaaccaccaactcagcccccaactaagccaccaaccaagcctccaactcagtccccgaccaagc

SEQ ID NO: 249784 - DNA, 381 bp, Gossypium hirsutum
  unsure (1)..(381): unsure at all n locations
cccacccttccgttcgaattatttttttgtaatagtttataggcacttctagctgagaactcccctgacagttcccctctctacacttggaagtcatcgtaaattgtctctgccaaagggatctgcagaattttcttagcagtatcctcattgaagctcccaatatccataagtcaccctaaacatagatacgatcgtcgtgcctacccttcaacataagccttttttcaaaattcctttaactgcccagacactcttccaggtaagtgaaggagagatactngatccatgctgantttggagatcaaagtcatatctttgatccctgaaatagtttccgtgcacaagaaccgctaggtaagtattttattcattttatta

SEQ ID NO: 249785 - DNA, 356 bp, Gossypium hirsutum
  unsure (1)..(356): unsure at all n locations
cggaccccttggccgaccccttggcttttttaatcttcactatttccattttttgtattaattttcaaaacctctgtcctctctctttcttaatttcaatttctttataattaatttttccttattttttgagctcatgcatatatattgnttatgattggtcgaagttgagataacagctcgtgaatacagttatagatgggaaattgctgctccgacgtcggcggcaggatggcagcttttggtggcaccgccgccatcacttgcaaccaaaacgacgctgtcgacatgtacttaaaatctcgtggcatccacggcatcctctctcagatcgagttatcattttctgctacaaa

SEQ ID NO: 249786 - DNA, 218 bp, Gossypium hirsutum
gtctcatcctgggtcataaacatatttttccatcacctgcagcttagctactggaggttcattgtctaaggcaacaagaaacacacctggaccttaatcatacactcgtgtctcctgaatctactacactgactcatcttcctaacgaggaatcacttgtaaaaaccagcctacctcatcatatacctcagcttccgatgacgttcatataactacat

SEQ ID NO: 249787 - DNA, 317 bp, Gossypium hirsutum
  unsure (1)..(317): unsure at all n locations
ctnccattacctttattcgcaagcgggccttttccccttttttaggacccaaggccagatgtgggcctctcgatccgtacaactgacatattcaggtgtttaatttgacttcaacttcacatcttataaaaaacaacgcaattgtcctaagataagctcttcgagaacaaaaatctctaattgaacaaaaaggtaaaatctcatatgatccaatttacaatcctaatacaaaccttactagcatttcctatctatcctttagacctacttaatttgaagctagaggcctcagaaatgttaccacaatgataactctc

SEQ ID NO: 249788 - DNA, 385 bp, Gossypium hirsutum
cccacgcgtccggccttatacattctgccagacctaaacccttgcatccattgtgttcttccttaacctaaacctaatcccctgttttaaacactcatccaccattgtcaacggtgatttagcatatcccaacctcgagggatgcgggtttcggccatgaaatcccttctttgctccgatttcaacggaacagacggaacctcttagcactcgtaaggtaaatctctcattttccttttttctcttttatgcgaagggattttgtagagaaatgaaaaaagaaaaatgaattgaaacactggaaaatgcaatatcaaattaccttagtttttcattgctttttcctctcttttttttttattttgtaatcccgatttcagtgttt

SEQ ID NO: 249789 - DNA, 310 bp, Gossypium hirsutum
  unsure (1)..(310): unsure at all n locations
aatctccagctttcccttttctgagtagtgacccttagatgcagtcccaacggttacccttcttcttcccttagcatatctttttcaagcatcgggcagtcttgaaactccttcctcttgttcttcttgcctccgtcgctctctcgcctgatggaaactctgtggatgcagccccagcaggtaatgtccttcccctcttcttatcgcttctttaacaataaaatgggcgttctcattttctgttttaggagtaaaataaaaaccgatattctgaaagaaaactttnttgctgtttatatatctgattatc

SEQ ID NO: 249790 - DNA, 185 bp, Gossypium hirsutum
  unsure (1)..(185): unsure at all n locations
taaatgaaaatgcctttattgagttttccccaggatttgggtttgccccccctaaaataaggtaccatttaatgcttggtaggcaaatttggcctttggataaatcattgcanagataacacatacaatgataaacagaaacagcatcttcagataatgatcctgctggccttgtgcggtgcgat

SEQ ID NO: 249791 - DNA, 392 bp, Gossypium hirsutum
  unsure (1)..(392): unsure at all n locations
cacattctcaaatataacaaaagttttttcattggcttctgcttattcaattagaagtntggctgaattaaaactagaagaattagggggagaatgtgacctattttaatctgatactaaatcaatgatctttttatcctattaacagcatgcaagtgaagaggaagaactgcaacagagtccactgtcggtgcttcatttcgaatacggtggtgatgatgaagatggtgaagaagcaaaggaaatcgaagaaaaagcatgggagctgctgaatggtgtgaaggaaacaagtccactaacaaggtacaaaaagaacaacatttgtattgacaaactgcttttggatctatttagagaagaactggagacaaagtgggatcaaacaagaaaca

SEQ ID NO: 249792 - DNA, 407 bp, Gossypium hirsutum
acccgggggggccaagccttcggtccaccctgaaaaccttaaccctctttacctaatggttggaaatcctccccacgaaaagcttcctaaaaacggtcgtcaccaggttcctgattttgcatactctccgaatccacacaatggcggttctggttccgaaaagaataattcggaacctgaaaggaaaccgaagctgatccctcctcgaaaagatcctccctcaagacctactcacttgactcctccacaaaatgtacagagacaaagagaacaaaaggaaaccaattttgacgccgaaaggctagcttcggcaagaaaaaggcttcaagaaagctacaaagaagctgaaaatgccaaaaagcaaagaacggtacaggttatggacattcatgagctaccgaaaccca

SEQ ID NO: 249793 - DNA, 389 bp, Gossypium hirsutum
ggtaatagtagtggtggtggtagtcatggcctcaggcgacgtgaattctctcttgaggtggtagacaaggagcctggttaattgtctagtgagagtggatcagaggatgccattgagtctgagtcggtggttaaagatagtgaggttgagaaggttatggagaatggggctttatctcctgtggggaggaagaggaagttttcacctattgtgtgggatagaagtgacaaggatgtaagtatgtccaaaagtaagaattcacctgtagttacagtcgttcatcatacaccaccacgttcaaaagcttaccacacgtcacctaacatcatatcttgtaaggctgcacagacatctcttgttatagaaaactaaagccagaaaccacattc

SEQ ID NO: 249794 - DNA, 383 bp, Gossypium hirsutum
catatcttctatggagactcctctttctaggtgtctcgtccatctctcctccggttcgcgttgaaggtggacgatatctgctccctccagaatggaggactgttttcgaggctaaaaactcacccatctccccccaaaccaccagacccgaggtcgatctatcaaaagctgcgtcaaaataaatagctactcttgcgttcctttattcccgtcttttttctacaaccatatgaaattgtccaaacaccacaacaaaatagccgacattgtttgctgttacccatggtgaaaacccagggaattgtcgaaaaatgtggttgctatcttctttcgcatttcgacaccgaggacaggaaatatttgcagccactcttcttaatctg

SEQ ID NO: 249795 - DNA, 362 bp, Gossypium hirsutum
ctggtattcatttcagtaggtagtttaattttttcattcattcattcatttgagtgggggtttgaatccatacaaaaagtatgattcacatcagaatttaacctctgatcatctaactctggttggagtttggttaggccacgtgttattgataaggacatagattgagcaactggcttcacaagttatcctcggttcgggattcagccacgtagccttattccattcattcccctgtaatttctcccaatttatcatacactttatattttgtgtatgtgagtcgtgttattaatgatttctattaggaataatgttatatttagtcctctaattttatataaaaaattcattttaatttt

SEQ ID NO: 249796 - DNA, 388 bp, Gossypium hirsutum
  unsure (1)..(388): unsure at all n locations
gggggccccacgctccggcaacccttnccccaacccttcctttctcccttccggacaactaataanaagaagaagattattaggaagaggaagacaaaaggggggaggaggaagaagaagagagtgaagataagggactaaaaaggtcaaaggtataagtagaaaggggcgttctatgaaatctggttgagattaggctgacaagaaagagccagtgacgcctagtagtgataggcctacaagggaaaggaaagtcgtagaaaaggttttgtggtttcttttggaaggcagccagaataggaaaaatggtgcataacacaagataagtggattaatagttcaaatggtgaagctcgagcgcgcagtgcaggtaaaaaaccgttgcttc

SEQ ID NO: 249797 - DNA, 219 bp, Gossypium hirsutum
  unsure (1)..(219): unsure at all n locations
gtaaattatttggggccttacggtattcgattgtccctaaagggacccactaggaagggtttaccctaatggtctgaacccatgcgaggatatcaatnntgttcaactacctgtggtttccaaaggaatttattcctcctttttgccacttcaaagagggccaaagagattcttcaaaaggtgttaaattattgccatctgagttctgctgggaattct

SEQ ID NO: 249798 - DNA, 338 bp, Gossypium hirsutum
gtttcttcctcaccaaccgacctctagcactcctcttcaagcaccaattcacctgcctaaatggagaacggtgttttcatgccttgagggacatttttttagcctcatgatttcattttgactttgatttcgacgaaaccaaaagagatctacggcatgtttgcaaggtaagtcctctattttatttcattacactaaaaaaataacaagaaagaaatgaaacagattcgaagaacagaaatataaggtgcttgaaatcacctttcaataatttttgattgctcttctatttaatatgcatttctttgcgtgttcttttttttgtgagtaatatgcct

SEQ ID NO: 249799 - DNA, 393 bp, Gossypium hirsutum
  unsure (1)..(393): unsure at all n locations
ccgtccgtnngttggtggcttttgacgacacttgttatgtctatggagaaggggttcctgtggatgacaggtgacaatacctctggaagagattaaaataattagtgtcacagtatttgtaaatccgtacttggaacctgatgaagaggaagagaaagagaagagcaatggtgacaaggcagctgaggatgaagataatgataagattgggtcgtggtatagcaatccaggaacatgaacagcagaatccggagctgttggtagtggtggtgttggaaagtacttaaaggctaggaacacccaaagtgagtctgctactgctgataccaatataacagcaatttctgtaacgaagaaaaggaaagccactcctggagaatttaaagatttttc

SEQ ID NO: 249800 - DNA, 373 bp, Gossypium hirsutum
ccggtccggaaaggcccgggccggcccacgcgtccgcccacgcgtccgtttgaatatgattgttaactcgaatgaatagaaatggagatgtcagtcaaatgggacttaatagtagtaccatcattttcctgtatcttaatatattggatttttatttacatggtaggatattaaaatgacaaacaggaaggcacctcaacatattttgagcattgttttcgggttcagtagcagcaaatgatgccaatgtggttgagattggtgcggtgaagattgctctataatttacagccataatgtgaatctgatgtccatctataagggattgtcagattaagtgtcaaccttaactagaagataagtcatcaaagaa

SEQ ID NO: 249801 - DNA, 375 bp, Gossypium hirsutum
atttttcaatatactgcacatttttctttaaaacagacgaaagatcgctgaccgaggaagattacagtccatggcgactcaactcaaacccaacttaacacagaaacagctccatccatctaactggctcaacgcactcaaagccctggtcaagattggcagctgttaaagtcaggtctctcgtttttttcttctataagtctcagttttcctataatttttccatatttatttttctatttgtatttataatcactagtttggtgacctaaagctaggtttcttttaatttgggaagttatgatttgggttttgatccgggatcttgatataaatatatatgtgatgaaggtttttgaatttgagttttattag

SEQ ID NO: 249802 - DNA, 389 bp, Gossypium hirsutum
cgtccgtttttgtagtattagtactaaccctgttttctaagaccttgataacgggttcggcggggggcttaggagggaagatgattccaacggtggctttggcaatgggtgtttcaatgaaggaggactgaagaagagtggatatggtgatatactagcttcgttgttgttattagaagaagaagccaagcaagaagaagcagagtggatgagtgaatcccaacaagagaaagctttgtttgaatccaatcacaaaagaaaagttcaagcaatgaatgagttttacgatcagcttcaacaacattactctgaaactgtgaaaccatcttggaaatctgtttctgttttggctgccactgttgcaacgactttagggaatgacacgacaa

SEQ ID NO: 249803 - DNA, 381 bp, Gossypium hirsutum
cagctactttagggtgtttagtttttgtttaaggaagcaactcaagcagtgggggtgatgaatccttcaaaactggggtgagtggagacccgaacaatcaggtagcaaagcgtgccaaagtggaggaaggtccatcgtcatctcgtaaaccatcggagagccatggtggaagaagaaagggaggtagtttagggggagtgcttagaaagaaatacttctgctttatgccattttagatgggatggtaatttcagagaaagtaaattagcatggaatttagatgattaatgaaacatgttttttagattaagtactgttctgtatagcagcacctaaaactgcaaagtcactgcattagtcaaagtaatgagattcttattc

SEQ ID NO: 249804 - DNA, 391 bp, Gossypium hirsutum
cccacgcgtccgcccacgcgtccttccacgcgtccgctcccttcctcaaggccggtgcctctcctcctcatctctgcctcgctatctctatctctcgccattttctctccaaatgcaacaaaagccaaaaggtgtctatgataaaattccaatacataaaattccaattgatatgaacttacttcttcggggtttttggataccaaaggaacagggttcacaaaggcatgaaagaacatctggtagtggcataccagaatcatcacagggtcaaactgaacaaactagcatgaggaatcaatctgatagagaacacactgcctttggccttccagcagcagtttccttgggcaatgcttgatctagtagtagctttcaaaagacatagctg

SEQ ID NO: 249805 - DNA, 286 bp, Gossypium hirsutum
cccactcgtacggaacatattacatatgatgttgccgatggcaatgcaacagtcactccaaatgtcggtgctggccccagcgatggggatggggatgggtatgggtatgggcatgggcatgggtgtcacggacatcaacactatcggccgtgccaacatcaccggcatgtcacctgttatgcctaatcctttcatggctatgacgctcctgggatggcttccgtgagaggttacaacaagctgccttagcagcagacattatgccagaccctctttccacattgct

SEQ ID NO: 249806 - DNA, 389 bp, Gossypium hirsutum
aaaaaaaaaaacagttacagatcgttagaacaagaaaaaatctaaatcgagttggaagagttgcagctttgttgaggcggttgtttttgtgtgtgtgtttgggttatggtaattgtctgaagagaaacaaaacaaagatggtagcggaagctgaggttgtttgtcaacaaagggtgccggtgttagatgttccatattttggtaaaggaagtaacatcgaggagattgatgaaattgttgcgatttcatcgccggtttcttcacccaagctcggaaaagttggccttcccgccgatttacccacacctcaactggttagtctttctctttccgtttcccccccttttttttttaatgtttgtaaagatcctgaatttaaacattagatt

SEQ ID NO: 249807 - DNA, 398 bp, Gossypium hirsutum
  unsure (1)..(398): unsure at all n locations
cccgggcggcccacgcctcccaattcttgtattttaaaggttttttcctagtgaaatggctgtagttgggggcagatcacaaatattggcccacgcgtccgcccacgcgtncgttttcatttatgttttcagatcttctgaaattttttaatttttttaattgataccttaagcaatcttaggtttggaaaaaaccaaataataatatgttagtccactctaatctcattcttttttctttaatttcctttcattttttgtattgtcagttaatttcttctgctgttcaaagatgtcatttatccgaagatctttgccaattatcaatcgttctcaagagctctcctccaatcattcgagtttcaagtgaatacttttcagtgttcctttaatttttg

SEQ ID NO: 249808 - DNA, 383 bp, Gossypium hirsutum
cccacgcgtccgccaaaaccaaagctctttcgctctgatttgcagagaaaatccgaaggacaaattaaccagcctatagagaaacagagaggaaaaaaaaaatttaaacgaagaaacacgagaacgcgaagaacaacagcaaatcaaaggaacaacaactgaaaaaaaaaaaaaagaaaagaaagagaaaagagacggtgtattaattttttgacggaaagagattcatttcatttttttcttcttcttatccaatcagtagaatttgttaatcttggctgcgttatgttttggggggagaaaataaaattgtggttgttacagtgatttgaaaattcccattgttatttttggggattttcccgtctgaagtccggaggggg

SEQ ID NO: 249809 - DNA, 273 bp, Gossypium hirsutum
cccacgcgtccgggattatgttttttgaatctttccttttaatttaggggttgagagtttgatggttgatttatcgtcgatctgaaattgtgtttaagtaaccaaaagtctttaaaaagctaaagaataagtaatttgtgaacctaatttacataaaaatattggtttgcttttaacctattttattcggattcgagatgagtgccgtcaatatctgtatatgtattcggcatgaatgtcaatacgagttttttagaaaagatgaagaatcta

SEQ ID NO: 249810 - DNA, 204 bp, Gossypium hirsutum
  unsure (1)..(204): unsure at all n locations
cccacccgtccgtagaatttttgttcttcaatgctgaatctatccatncgttgtttatataagcgggttagtgagccataacaatgnttnnttaacatcaatgttgaaatttttaaacttcgacttacaacaaaatcttgggaaaacccttcaacaacattgtttaaccctttaaccatttattaactttaaaaaaaaatatcc

SEQ ID NO: 249811 - DNA, 431 bp, Gossypium hirsutum
  unsure (1)..(431): unsure at all n locations
ccgtccgtnnataatgccaggaaggacagtaggttattaatttttctctttttcttttcttgcttggcgctgagtttttgagattcnnttcctatcttttnncttttctgtgaatctgnnatggaatgcaagtggtatncggtcanntgtaagtaccgatnntagaaatatttggtcttncctgttgtntgcttattgtattntgttggtggagccccgccagtgtnncaagtcagattngaatatannntacgtggcttatgnnatgtctaaaatctaacctatcagnnngtgtttggttccaatannactaganngcttcttctannattggtttagtnntatgtaatgtnaatatnntttcaatttggttgatannaaaattttctttcctttttattggngctaacccgtcctanntttataggttg

SEQ ID NO: 249812 - DNA, 379 bp, Gossypium hirsutum
ctttgtcctatgagtaacatttagtgtaataaattcttgaatgccgttccttatgttatgaaatgtacagtctgtatgcttggttgaaaatctgtgcaatctacatccagacctttagtgtttgtctcaacgactctgatatgatattaaccactttagttttgtcagccaatacacaccgtctgctggtaacatacacaaatgcattttcatcttgaattcttttgatgtctcatccattactctggcaaaaagaaaaggaatcaacctggtatttgatgaacccattttgtaatctgtacttcatcttttaatcaacaacaattcttatgtttataattgctccattaatacctctttacactagcatatttgactg

SEQ ID NO: 249813 - DNA, 487 bp, Gossypium hirsutum
  unsure (1)..(487): unsure at all n locations
gcggaccgccgtggnngcgggaagaagacattagtgtctatnnactcggtngnncccaatacccaaaacgtgggctgnnngagttgtacttgggaccgnnataatannagggtcccccgaccttccgacttcttcnnccgaggctttacctcgtngnntagaaccccctgatccnnntgatganntggnnngaagatnnaatttgcnncggaaacccaaggggcgtataccccggaggggaattgcnntgaacccatcctcngnnacgattcaagaatccccggttaggtgggacccccagatcccgnngcgattcaaagggaccctcgannttcggtcaatcagggggagtttcgannagaagaagaatcttatntnntccggaacagnnngtggctttaccccggaaaccgatattngnngattccggagaaggtcgaggccccggagnnntagggtttcttatttttgaaagcttcggatgatg

SEQ ID NO: 249814 - DNA, 384 bp, Gossypium hirsutum
  unsure (1)..(384): unsure at all n locations
gttgaagttagctttttcgttatttgattaaatgaaaagatttagggtccaacgtggtttgttgacgtataataaacttttaagagcccgtagcaaatatggttccttgcatgaagtacaacagtgccttgctgtatatcaggaaatgcggaaagcggggtatttttagcattttctctgaattccttatctgcatgtgtaggtgtttaattgcagattgccttgttgatacggngttgcgcgcggaccaagatcgagttgccaagtcacgggaaactcctacgaaaaccctaaacaattagatctgaaacgaaacaganaattaaaagattagaattttgaattttcagatctgaaatgaaatccccaaatcagcaaagaatc

SEQ ID NO: 249815 - DNA, 304 bp, Gossypium hirsutum
atctcatttaaacacaaattttctatcaacccccacaatgaaaaccaagtcggtttattcgagtgctggttgccccaacaacctcgacaacgacaacaaccaaaaccttcaagcatttcctcacaatcaacatctccataagtttgctgtaaatcctttaggcgacgaactcaccttctatgtctacaatatcaatagaaattcacacaagccctgattccccatcaatcaggttgttccaactcctggacgaatacgactttcactaaatccaagaaccccatgctcacgtagaatatgaata

SEQ ID NO: 249816 - DNA, 383 bp, Gossypium hirsutum
  unsure (1)..(383): unsure at all n locations
cggtgaaancctttgganaaacttctttatatgtatctttccaaggctgctggtgatgcgagaagcctctgtgaacttgaatggtaagcgtaagattttgtttgatgagataaacaatccaaagaagcttgagagagaagctcatcatgttgatttatctgaaaaacccaaaacatcacatatctccatgacaacagaagatggctctactgcggagaatgaagatgtagctgaatctgaagttgagggttcacccttgaggctagtttcacgtcatgatgatggttccaagcggtttattggagttagtgattcttctgaggtgccgaaggaggttaagcttggaaacttgaattacggcaatccatgcccggttcaatctg

SEQ ID NO: 249817 - DNA, 333 bp, Gossypium hirsutum
atttagagatctcttaatcggaattcaccttctatttttgctttctatgtcgtctgtatgcttgagtaaaaaagaacccttatacaatataaactcatcggctttatagccgaatgttcaaaaaaaagaaataaaagaatacaattttgttcttttttgtattggccattgttgctgttgtccttttgtccatttctttgcaggtacaggtgcgctggcgtcgtacagagactgtgctggcgtacgagggctgttgacgtggaggcacgaacgttgtacggcgcctggaggctgctgggggtgttgcggcccaagccaaggctgctagggttt

SEQ ID NO: 249818 - DNA, 373 bp, Gossypium hirsutum
  unsure (1)..(373): unsure at all n locations
tttccttttcattccactgcactgtaaccctagatgagaagaaatcggaggaggaggagttgaaagataaagaaaacgaanaggggagtaaggaggtttttgcgctttgttttccctcctttcttttacattgccttactaagatgccattggctgttcgctgaaataaagagataaaaaaaaggcgtaggaattttctcctataataccggtcgtccccttatcctacaccgacaattagagttagagtcaaatacaggtcaatctatcatgaaatcagcatcaattctcaagctacatttggttgcaagccacattggaacgcctggcagcaaaactagagtcagtgtataaagcatcagggggaaaaaga

SEQ ID NO: 249819 - DNA, 386 bp, Gossypium hirsutum
  unsure (1)..(386): unsure at all n locations
cccacgcgtccgctccaagtcctttttatttaaaaagtccgtgaacggagtttgtacgaggatgggagacgtttcacaggaaataaaaagagtgagagcacaaatggaagaaaatgaagatttggctatactaatgagaggacttcgtggccaaaatttacgggattcacagtttgctgatgacaatattcagcttcggttggttgaggttgatgaaagcagtgagttcttacctttggcatatgatccggctagcatctcagcatactgggggaaacggcctcatgctgttgcaactcgtatcatacagttactatctgttgctggnggtttcctctcacgcttggctatggatgtggtaaacaagaaggtcaaagagaatgaag

SEQ ID NO: 249820 - DNA, 377 bp, Gossypium hirsutum
cacggagtcgctgaatgacatgaaaaaggttaacactaagtatacttgtgatgtcaaggggggcaaattgaaagaaggggaaaagccaaaagatgagaaagaggaaaaagatggtaaagatgaatcccgaagtaatactaacaaagaattgaaagaaaagaggaagcctgaagagccttctctgaagcatcctggattgattctacaaacaaagtggagcaaggattctaaattgcgtccgttgtcactttcactggattcacttttggattatacagacaaggacattgaagaatccacatttgagctttcattatttgctgaggtgctttatgaaatgcttcagtatcaaatgggttgccgtattttaacatttc

SEQ ID NO: 249821 - DNA, 415 bp, Gossypium hirsutum
cggaacggaagggccgggccgaacccaccggtcttgggtcgcatatgtccaagattccgtacagagcaggaaatcaaataaggatgaacatttgaagcttgtttcaaagcaacagtgatgagacgacagggacaatatgcagactctggtggcaatgcatatgtacctgctcagatgcagcatatgcctgcacaaaggatggagatcaagtctggtcaatttcaaggacaactagaagcatttactcctgaaagggatcaaccatatcgaactccaaaatcagatggccagtggaggtgggaaagagatggatcaaaagtgtcaaaccaaataacacccaaaatgttcaatgaaggcaagattgtctttcggacactcttcctctctctacatgccaagggactgatggatcaag

SEQ ID NO: 249822 - DNA, 289 bp, Gossypium hirsutum
ctcacgtatgctgacttcatcatatttgttgcattgactatccaatttacattgtgcgtcatattaggtggcacaaacttaaatattaacccctctaccactcgcaaacaaatgaagctcgatacgatgacggaaatgctcacctacactcatgtaccaaggtcacctagatctgtgagggtcagagaccttgaacataggcccctgatgcgaaacatgaactcttgacctttataagtcaccattgtgtttggcactacagctgtaagcgtgatctcacttacgttta

SEQ ID NO: 249823 - DNA, 361 bp, Gossypium hirsutum
  unsure (1)..(361): unsure at all n locations
gaatccaagcagctcttgctgcagttggagctctgaaaatctggttgggagtgtacaggcttgctgaaacaggagaagcactggtatcttctgttgataaaatcatatttgtggatcaccggtgtgggaaagatgataatggaaaatgctgctggacccttataccagttacacttgagctcgggggaaagatgcctttattggtgcgaagacgtagatattcaacgtngcccaattgctgtcagggccgctctccaataagtgggcagaactgtgctggagctgagagattttatgttcacagggatatttataattcatttgtcaatcaagtgactaagattgtgaagtctgtttcagc

SEQ ID NO: 249824 - DNA, 380 bp, Gossypium hirsutum
ttctttttggcttttggaatatatttttaccttcaaataactttttttttcactccctagaattttatttaggagaaattgataatgctatcacttgtagcccctaacatagctagtaattttaagacatgaaccgctagaatgctcaagtttttagcttgctgatcttagatgtgagtctgttgttggagtctttgagaatcctcaaattaatgttgcactttcttgaagttcatattgtcaatgataaatttagttcatcacattttgacagctccgatggaaaagaggttatggtggacatccaatattttaaaactaacaatccactgctgttaatcagcttctatgagcaacatcttaagtataaccctccatct

SEQ ID NO: 249825 - DNA, 213 bp, Gossypium hirsutum
  unsure (1)..(213): unsure at all n locations
cgcgnntccgcccaccgccgtccgctccaacgccgtcctttctctctgtcgtccgatacccaaagagtgcgagcgtgggagtgatagaatgattccgggatgacttcgacnnacccggtgtacccgttgganngttcgccggagggaatcaccgggaaggtgggtttcttgaagtggagggagcctttaataagaaagtncgaggggatttgg

SEQ ID NO: 249826 - DNA, 380 bp, Gossypium hirsutum
gcgcccacgcgtacggaaaagcgaccgtttgtaaacaaaaaaagaaggaatgagagaagaaagagaagatccgcagaaacttaagagaatagcggcggcagcctacgactacgagaacgatccccgatgggcagattattggtcaaatatcttgattcctcctcacttggcttctcgctctgatgttgttgatcacttcaagcgcaagttctaccagcgctatatcgatcatgatcttgtggtagagtccatgccatcaaacaaaccatcgcaatcagcaaagtcttctgcttcatcctcaacttcatcgtctgcagtaaataatggggttcgacctcgcaatgcaggttcggcctctataagttcaggggcatcagcag

SEQ ID NO: 249827 - DNA, 383 bp, Gossypium hirsutum
cccacgcgtccgggcagattttaattaatgttagttttaataaatattcattggatattattaaagaattttaaaaaaaaatattataagatattattaatatatagataaaggtattctaagaaaatttaatttactgataaaattttattcgaatttaatatgaacttttaagagtcgatttgcatcctaacttgacattataataccaaatttcatccacacggtttattgaattgcattttagtctttagtcttttatccttgcaaaagtttgaatgctcttgaattgcctatgcttccttttcgtttattatttacattatcatgttactttatttgaggcgaaatgcgctaattttgctattacttttatggaactg

SEQ ID NO: 249828 - DNA, 326 bp, Gossypium hirsutum
ctggatcacaagcaggaggagagtctttttgaagatatttcatctgcactttgcgagcttacgcagctttgtgaatacttgaacgatagcaatatgaatcgtaacttgaatgaaattaactcagattcttctgaacaaaatgatacaatgcagaagtacattcagaaagccacagagctgcagggcatgtgtaaatccattagagtaacactggatcaacatgtgttccgagaagaacttgagctctggccgttgtttgacaggcatttttctgtggaggagcaggacaagattgttggtcgaattattggtactacaggtgcaga

SEQ ID NO: 249829 - DNA, 442 bp, Gossypium hirsutum
  unsure (1)..(442): unsure at all n locations
ccgtccgttacccanccattctgcataccatcgtgatgagtatgttacaacgatanntttcaaaagatgtgtctcgttccacgaattgagcgataaacgctctanttcaatcataccggatgttaccttctatcaatgggtgttgggattcgctatatnatcttgcaccacgatgtncgttgagaatgccttctaatgatcntgaattctcttgatgcgtgaagatatttgagaccatcccctgcaaacacaggtnccttgctactggagacgttgccttcagctttagcannataggaaaagaaacgcatgngtgctttaaaacttggatctctggagggagannngcaagattgcacctagtcccaaaaagtgggagaatccccaatacccatcaaaccgattcccaattacctgtannaaaatagctgcaccttgacac

SEQ ID NO: 249830 - DNA, 376 bp, Gossypium hirsutum
ctcgagaaataataaataaacaaacatattagcaaaaagttcaaaaggaataccctaacacataataagcttcccaaatgcacggtcacatctacctatctcgtttagcatctccctagcgtcgtcgtttttcgtctctcccgccgatcagatcaggcttctcaccggcgagagattgtcactgtcttttctctactgtttattatcacgattcccaggccaatgaagggggaaatggaggggtttcatgaggcatagcctataggttttttattgaagttgcttttttgggacttcatttcagatgttgtttgacaaagtaatgtttattgatacaacattgtgccatcagttcaagaatgaaccaccatgacct

SEQ ID NO: 249831 - DNA, 360 bp, Gossypium hirsutum
ctcatacctatacctttttctctttcagcctcaaatggccaaaaccaacctcattgtacccgctgccattctcgccgtccttttgtttgctaacgggatcaagttttccgaggaagtccgggttttgaagcggaccataaaacacatcatcattccagtctaaatgtgaacgtcaagggtgacgttttaccagatggatccgccactgtcaacaatgtccaaaaagctgcctatcgcaccgacgctttccgttccacgactcccggtcacagtcccggcgctggtcactagaataactagatttatcacacgaaatattatattattttcattttaagtacgtactgctatcttataata

SEQ ID NO: 249832 - DNA, 176 bp, Gossypium hirsutum
acaataacaaaaaaaactcgaacgggcatgaaaataaattacattctattggacaaaatgatacaatgcagaactacattcaaaaaggcacagagctgcaggggaggtgcctatgcagtacaaccacactggatcaacatgaggcccgcgaagaacatgaactctggccgtagttg

SEQ ID NO: 249833 - DNA, 279 bp, Gossypium hirsutum
  unsure (1)..(279): unsure at all n locations
ggaaaaaagggcgggggacaaacggacaaaaaaaaataaaaagtactaaaaaaaaaaaaaaaaaaacccgcccttttttacaactcgcccccccccccaaaccaatagagaacaaagcaagtgaagcacaacatcttgataacaaaatataaacacaatccctattncagacctccatactattcataaacagagaaaagaaatcaaattctaccaaaaactcacgatataacacaaatcatatctaatttacaacttactgctcagaaaaatctctat

SEQ ID NO: 249834 - DNA, 461 bp, Gossypium hirsutum
  unsure (1)..(461): unsure at all n locations
cccacgccgtccggcaaccttattgcttctacttcagcgtttttcttttcttttttgaaagaatttcgtaaacggggaaaatgtggaacgtgaagctttgggattgtgacggaaacccccacgatttctttggcccttacatgnngatttagaacaacgnntggagctgattcttcannagacacanngatatgagacccccaaattggcttannaatcggtattttggnnaaaacgatagatatttcgtttacccccaganttgcgccgtnnttccagcttttcaggggannaatccganntgtcgaagcgggatcttttcgatccttcctnttattacgacgtgnngtttcaattcacatgaagggaatttaccgactttttacacaaattnnttgatgaatggtcttgctttattatcgannagatattatttaattaaacaagggggacctttcgat

SEQ ID NO: 249835 - DNA, 351 bp, Gossypium hirsutum
aaaaaaaagacaaaaaaattttttaaacaacaaaacaaaaaaaccagggccgccaaattggaccttttcacttcactcccactctgagccgcctccaatcccctggttgttacaaatgttaaacataaaccggagaactggatcgagtagaggactgaagcatctactatggtaacgactaccactactactagccttgatgcggtaggccaataccgggttatggcttcggctcaacagatagtgaatagtctcaacactgcaaaataggttcgtgaagatatgcttttgattttctcgagcttcgataacactcttattcaacatcaccaatttaataaaaaaatactc

SEQ ID NO: 249836 - DNA, 442 bp, Gossypium hirsutum
  unsure (1)..(442): unsure at all n locations
aaagaaaacaaaatcnngcagatttcgtttgtgttttacgcnnttcacggtgtaacaagatttttatgtcgaggaaaaaaaaatggggtgtcagnnggttcggcnnattaagcgccgnngcagccaaaccaagcgnngagcaattgagtgaaatgatgtgcgaaccatttaattttcaacgaaagaaatcgttttgtgggccagccccatcgatgctttatacctcgaggcgattaccgttanntgccccaatgttcctgtatanttggaccgaatcgcgcctcttttgccanntcgcagacggaatgattgtgtttgaaagtggaagaaggatttgccggcgagctattcagctcgactacaattctgtcaaggcacactacatgttgggacttgccttacttcagaagcaaaaattagatgaaggggtcaaggaactaca

SEQ ID NO: 249837 - DNA, 363 bp, Gossypium hirsutum
cccacgcgtccggcaaatttcccttcattccatataaaaatcatctcagcttgctctggctcttgtccctctctctctctctctctctctctctctctctctctctcatattagctccgcctggcctaggcgccattctcatcatggctcattttcagctttgttcattaaaaatcttgcagattttttctcttcttctcatcctcctttaccctgcaacagtctcttgcgattgtacttgataaggaggacatccaacaaaataaagccgaagcactcagatataaactcggtgccattgctgccattcttgttgccggggctattggagttagcctcccattgttggggacacgaatccct

SEQ ID NO: 249838 - DNA, 330 bp, Gossypium hirsutum
  unsure (1)..(330): unsure at all n locations
gaaaaaaaaaaaaaaaaaatttagtgttaaaaaaaaaaaaaaaaaaaactggccgttttaattaaaattttggccgcccaaaccactaacnaacnatcaaccctcccgctataaattccccctttgtttacctctaatttaattcaaagaacaagtccttttctttctaacgctcttgtctccgttttatcttctctctcccgtttttctttttttctagatctgcctctccctctcttgatcctttttttccctctctttttaacatttcgtttaaattgaatggattatgtttaaaaacatttttcacacccttcgatccgtttttat

SEQ ID NO: 249839 - DNA, 383 bp, Gossypium hirsutum
cttgtttttctcttttgggtcaatttgtaatttagaaatctaaaaaaaattcattggttttttttttggaataatagaaatgcagtgtttgaaaccagaaccggagttaaccaccaccaatgtcgtaacgatcaacgtcggcggcgaaaattttcagacgaccaaacagacattaacacaagcgggaccgaattctctcctttctcaattggctgaaacgacgtcggatcgttttgttgaccgggaccctgtttacttctcgctcctcctttcactcctccgtacaggtgctcttccgtccaaagtcaaagactttgaccttagggatctcatcgaagagtcgagatactacggcattgagtcccttttgacgaactctttga

SEQ ID NO: 249840 - DNA, 386 bp, Gossypium hirsutum
  unsure (1)..(386): unsure at all n locations
cgcgtccggngacaggganactatatatcttgtggttttgggcttacaagtgattgaaagggggggggaagctgattttatcttagcccatgacaccgaagccttggggcttccttcaggtttggtacgtcctatgagtcttgacggccttgagaaaatattagagcattgggcagctaaaaagattccaatggtgggagctaatccggactttgtgactgttgaagctagagctttgagtattatgcctggtaccttggcagacaaatatgagaagctcggtggtgaagtgaaatggatggggaaaccacataagataatatatgaatcaaccatggccatggttggtgtggaagcttctgattctattgctgtacgtgactctc

SEQ ID NO: 249841 - DNA, 419 bp, Gossypium hirsutum
  unsure (1)..(419): unsure at all n locations
cgggtccgacccacgccgtccgattttnnttttttccaaatattctcgaaatcttttttttcggtccaacattcgtcgttcacacgttggagttcgcagncgatgtncgaaccgacgttcgccgataagcgtacatnccctcttttgatacgcttggttatttttttttaaatttcaagattttttttgtttgaatctcattttgactggctattcaacgagatccgtgctaaattaatttgaaaatttccttctaatttatcgatctggttttgtttctttgtctatttgcatgttatcgtgccgatctattgtttttacaagtttaatttgggttctttttatttattatgagaatttcgcattctgattctctcaatttagatttcccccttttagtaagatctttggagattatt

SEQ ID NO: 249842 - DNA, 382 bp, Gossypium hirsutum
gacgaaaataagtaggaataggttttctatcagttcatgtatttgttttgtttgttttttttccttttatctcgatttgttgcgatactatatcggggaactgcagaaggggaaaagggtttaagaagaagatggagttaggctggaaattatcaggatcaagggtcagatttaagtaatgaattcattctctgtgcccatgtggatttggtatatgtacgagctatcgctagtatgttgctggtattgattgagaagtcatatcctaaaggctttcttctctccagcgcaatttattcagaattttactgctaggggtagttgtaatcttttgtttgtttcggcagatacttgcatgttgctttattgagcttggttgtag

SEQ ID NO: 249843 - DNA, 374 bp, Gossypium hirsutum
atggaggagaaagaaacaatttttggttgatcaaatttggtaggtcggatgataaataaatgacaagcctttgctggtcttgcttttggcagtttctgtttatcagaggggaatttccattctactattccgcttttacacttcagaatcttctcccttcagttctcaaatggaaaagttgataaatttagaattttttttggaaaaacaatttcgttgccataacatttttaatcccaataataaatctgtaaaagaattgtaaattagcctaattccttaatttgtcttataattgggtaacaaacaaaattttagaagtttttctctttgccttttcgtatatgtgtttcaaagtttgaccttccactttt

SEQ ID NO: 249844 - DNA, 372 bp, Gossypium hirsutum
ccgcacctcattgatagtagtagttaatgctcgaagtgcaacagcctgttcgggcaactgttgttggaattttttaaatatgtcactagtattatcacctgtagacatttttttttaaaacctgcaaaacactcaacactcaaaaataaaagttatcaaacctcaccgttaatcactcaaaaagaaaaaatcaaattctcaaaaaaaaaaaaaaaaaaaaaaaaaaaaaaaaaaaaaaaaaaaaaaaaaaaaaaaaaaaaaaaaaaaaaaaaaaaaaaaaaaaaaaaaagggggggaaaaaaaaaaaaaaaaaaaaaaaaaaaaaggcagaaaaaggacaaggggggggaaagaaaaaaaaagggggggggc

SEQ ID NO: 249845 - DNA, 386 bp, Gossypium hirsutum
cttcagccgaaaccaacataaagtatctgctggatcgccaatctcaagacccgcaaatgggaaaaaataaagaggtaaagttacctatactcggcgtataatttggaaggttcaattccaagaaatgaaaatcgaaaaaaaaaaaaacaaaaacaaaaaagggaaacaaaagttagggttcatttactacaggcaaggccaagacactaatacatagccaatcacttggtacctccacttccacttccacttcaacttcagcttcaatttcaacactcctgttttgctttctgtttggttttccctcttaaacagttgcattgtctttccgcagagtctggcttgatttctttttcattaatctgcattgtgattggaggtgaata

SEQ ID NO: 249846 - DNA, 368 bp, Gossypium hirsutum
gaaggaaaggttttttttggaaaaggagatagcatcaacgcgggcgatttgtaacgggcatcgagccacaaatgagaacttgaaaagaattaggcttgatttgaacatggacactatcaagaactctagtttaattgctgatgaatctgagaaagtaccttgtctgagagtaccatcctcttctgactcaaccttgccaccggaagcccttgatgatgatcgtaaaccgtcattaggttcatgcaatgtgggcaaggttaatagtagcgagaagagtgtttttatgctacccgatctgaatatgatgcctgctgaagatgattcctgtccggcaaagttatactggactagctgaaaagagaagagtg

SEQ ID NO: 249847 - DNA, 369 bp, Gossypium hirsutum
  unsure (1)..(369): unsure at all n locations
cccacgcgtccgaaatcttccatttttatcatgataagagaatgttgaatagatagtgcattgctttaaaattgtgataagaagcatatcagcgactccatggcaatggaggggttagcactaaattgtaatcatgaaaacaacaaaaacatgagaaacacaagattttgttggttgctaacttttcttttctcttgtttctggttattgttattgatgatgcattttaactccttttcctgacttgtcaggctatggtcgattcttagggcaagcctttttatgacgcctttagtgagtccgagagcgtgcagctatatgaagntctatattttttctatttaacttttcattcctttttggcatgtg

SEQ ID NO: 249848 - DNA, 279 bp, Gossypium hirsutum
gaaaccggcgacccacgcgcgctgacagctccaagtttttctaaacgaactgagctggtccctttggacagtatatgtcatcgcagacagacggcagacatagaccaggatgggaccaagatcatttaagcatcgctgccccacacaggcggtaccctggggattcaccccctacttgtctacactgggcaagaagggctgcaggggatgcaagtggctttggatatattacacaaggctggaaaggccattgcacctgtgagacctttgtcatggaca

SEQ ID NO: 249849 - DNA, 433 bp, Gossypium hirsutum
  unsure (1)..(433): unsure at all n locations
cgggtccgacccacgccgtccggaaagttgcnaactgattgtgaccattactcttacactgttcttacgaggtnctcctgcgcgtgtcaaagtacntgctactggcgaactcgctctggctttcaacacacaggcaccacggtgtattccttactaaccaggnnacccctttctgcaaaccttgaaagaactactcaattgcgaaggagacacttcccttcagcgatttttntgagaagcnggcgggacacggctggtgaaccaggaatccatatctctaatccatcaacaccaaaatcattcgatgacaccaaagctaacctcagtgctgcaacttcatcagaatcgggttgctttggtaaatcacctgttgctcaagaagaattccatccaaaagctccagctcatgttgcataagttaagcatatacgaa

SEQ ID NO: 249850 - DNA, 386 bp, Gossypium hirsutum
aaattttctagggttccctcaaccctttgagcgccgccgctccgattgcgacggagatggccacgactcggcgggttcgacgtaaaggtaagttttttccttccttttctttatattttgagccaaaaaaacataaaaacaagacaaataacttacagaacgatgaacaccaaaacaaaataaacgagggaaatcacctttattcaaagaaaattttctatttctctttaatctttttctctgtatttttgtatctttttctcttaccgaattccccccccctttttgagtacatggaatagggcttttatagcctaaaaataatagaaagaagaagaaaaaaaaactattctctattcgaaatctgttatttttccttctttttg

SEQ ID NO: 249851 - DNA, 375 bp, Gossypium hirsutum
ggaaattcttagcttccgattttgattcattgaagatttacatttcgagatcgtaattcttcagtaacccaaaggaactggttgttcttggctatggcgaattccaaggggtcaactaacataagaaatttgatgttttctggcaagcatgccttacttcctcctaaaagtccatttcctacagtggcctcaacatataatgatagtgcccccaacaatgtaattggatcaaaagcgattcaaaaacctagagaaggaagtacataccaccagcgcacttcctctgaaagccttctgatagaggaacaaccttcttggcttgatgatctccttaatgagccagagactcctgtgcgcagaggaggtcatcgacgc

SEQ ID NO: 249852 - DNA, 381 bp, Gossypium hirsutum
aaaaaacagacatctccatcaacatttacggtttcggaaccaaaccaagatctgcgagttgaagaaacatcatcaaaaccagagtttacacgcaccccatctctccatacaaggtccatgagcgaccagttgagcttaaacagcacaagcttcataggttcagcttcgttgtcgcccgactcggttctccactcaccaaagctgcataaaatcatctcgggtaaagaaatgacggaagaagagttgcaagataacgggagtagaatccaagaagaacccaaaaagaaggagacagcagcaagcaacaggagaagtagtagaaggacaaagaggcaaaagagaagaagaagaaggatgaggtagaagaagatgaagaagaat

SEQ ID NO: 249853 - DNA, 309 bp, Gossypium hirsutum
cccacgcgtccggcatgttattttttaaccaaattgattctgcactggcctggggttgttgggggactgatgagctgcccattagatgacgctttgaattcttctctcgaaagagtggaccttcttaacaatgttcatattattgctttgcatttgagccttgatgtgaccttgttcttttgctacttgcgagtgagtattaataagattgatgttgttggactcgaatttgattccaagcagcggttatctatgctgtgtaaactctcttgttgaagaacttgaatagaactttgaaagattctttgt

SEQ ID NO: 249854 - DNA, 354 bp, Gossypium hirsutum
gtctttggtcaaagcttggtttttcatggtgtgtttctttctttacttgggctgaaaccgttaatggaagaaattacatgcaataactgttaatggctgactacgatattagcaaaagaaacatggcaaccatgagaaaatttccatgtatttccttgcttcttttttcatgtttttacatgcaggtttacaatggaacagttgcagccactgatacccttttccaatgtcaaatcatgacggcctcaggtctgttaacatcttctggaaatgcctttgagttgggattcttttcaactggctcaactaatctgtatttggtgattcggatgaagaatgttgcaaccaaggata

SEQ ID NO: 249855 - DNA, 322 bp, Gossypium hirsutum
agttaatgagactgaaatttttttttttgaaagctgcctttgcaatcattttcggcggttttctctctctctctatcagaccatgaattcataatcatcgtcgtcgtcgtctccttcatcgatatatctctttcgaatacgtttagaggaaaaaggaaaaggaaaaagggtacatacatggcgtttcaccatagcagcacccacctttctcaagaccttcctctccatcactttaccgaccagcaacagcaacagcaacaacccaaccaaacccagcaaggcgaccaacttcaggaaaccgccgctcccaattggttaaact

SEQ ID NO: 249856 - DNA, 201 bp, Gossypium hirsutum
tgggctccttttgaggctgcatgaccggggtaacgacatcctaccgttaaacgaccgcgctggccgatcagtgccatggtcgattgggactggtaccctctaccgcttaaaacgggtctttgccttggaacgtgaacagttatggacgccactcttactagcttgtccggttgcttccgcctgttcaccgtaccgccaggc

SEQ ID NO: 249857 - DNA, 383 bp, Gossypium hirsutum
gttcccgttggtggtgtgattgtttgtttcaaaaccccataacacatctggatttcatgtgactgtagttgagagttttattgaacatcaagatgcttgccatatggggcgtgtaatacggccagaatcacaaggggtgcagttggcttgcttgtcacgaacagcttcaagccccagtccctccaatgataccaatttcagtacagctccttgcccttggcctagtttggcgttaccgaagacaaaggatgccatgttcttgagccctacaaaatatcataattcccctaaaaatgcgctctcccacaatttggagcttcaactcttgaccacatcaaatcccagtgaggtatcagtttcacccaaaaaacatgataacgatc

SEQ ID NO: 249858 - DNA, 259 bp, Gossypium hirsutum
caatcatccattgccaccaatctagctagaaagctgccatcatcgctctgtggggtttcctcatctcctattaccaaatccactactgtcatctcaccctcgtcaatcagccatagcgcgacccttactcatgtagtcctcgaaaatctctacctcatcaacaactatcaacaggatcaaactctccatactgtaagcttgagatagaagataacaggactggtatcagccgtgatagacgccgacaacgaccgtaaac

SEQ ID NO: 249859 - DNA, 310 bp, Gossypium hirsutum
cccacgcgttcggaaaagcgctttaaagagagggggagggggctgagtcagtggggcttgtcgagtgaccgagtcaaatatccaaaaaaattaatctcaaaacccacccttccaagttacagcccacacccaaacgataaaaaggaaaacacatgggtggtgtgtctaccgcaaaattttgctttaccagcaaataattgttactataacaacatatgcctacacttgtctttcggtaaagcctctttttctttttaacccttccattaccatatgtttcctttcctgtttttttccctttaactaccaa

SEQ ID NO: 249860 - DNA, 389 bp, Gossypium hirsutum
cccacgcgtccgctttggaataagatttaaacacacttctcacttcttcatctgttgatttctaatgagaactccttcactttccagcttttgtttctgtccagtatttgtaagcaaattaaagaagccgagcaagggaaaagctaaatcatcgcttccccaacatctgtaccgtcgattttcactccacgagatcagagttgccaccaaaaactttgactcccacttggttcttggtaaaggtagcagcgcagtagtatacaaaggatttttcgatgatggggcttcggttttcgctgtcaaatatttgcagcacggatcctcacgacagacaatgcttaagactttctaaatgaggcgcagctactttgccagctgcgccaccaaca

SEQ ID NO: 249861 - DNA, 233 bp, Gossypium hirsutum
  unsure (1)..(233): unsure at all n locations
gaanggggggggcgacgccacgcgtgcggaanaacaatacnttgaagctttttttcgaggggaagacccctgttctgtggaggtggtcatacatgatctcttcccatgccgctccttaggttgctatgccttatactgacaagctcgccgagttatttaagtaaagctttgtcataataacggtccctatcgctgctacttaaatgccttataacaaaaattatcacatttat

SEQ ID NO: 249862 - DNA, 336 bp, Gossypium hirsutum
gacatttcttctatctcatttcttagtccagaagatttttgctgtattgggacgaacctctgattccaagaccttgataacaggttcaacaaaaggcgttagaaggaagatgattccaacggtggctttgtcaatgggtgcttcaatgaacaaggaccgaaaaagagtggatatggcgatatactagcttcgacgttgttattagaagaagaagccaagcaagaagaagcagagtggatgagtgaatcccaacaagagaaatcttcgcttgtatccaatgacaaaagaacagctcatgctatgaatgagttctacgatcagctttaacaacattac

SEQ ID NO: 249863 - DNA, 259 bp, Gossypium hirsutum
cccacgcgtcctataaaaagctttttataaactaaggtgatttcatatttattgtttcgtgttctgatttagtttttttttctttgttcctacatatagatttttcacagaaaaataaggagaaaatgacttaccttaatgctgtctccttcatgtctttgcttgcttcgtcgtaatttaagcttaagcgagaatcttgaagcttcttattggactcgtggtctaacaatgccagattattcctttatgcgatgttcat

SEQ ID NO: 249864 - DNA, 268 bp, Gossypium hirsutum
gaatggggggggcgacgcacgcgtccgctcttcttatcttcaacacttttttctaaaaagcaccaatttccggaggtggcgggcctcatcgtagtgacttaactcccaatggtaactcccttcatagggtaccgtccatggccttacttaaaacttttcttctccaatttaacgttgggaagcatcaaaaaactcgggggctcatcagacttcggccaaatgagattccatatgggaccagttctcaccgtcgacattaacgtgcaca

SEQ ID NO: 249865 - DNA, 181 bp, Gossypium hirsutum
cccacccgttcgatgtgactattgttgttatgggcaacggtggagttcggacgtgagagagtttgaaatgtgtaacagaagaggagcgctatcgcgcaacagatcaatcagttggagcagctgacaccagtgagggtcacacgctcacgggctaggattgcattgtatgtgagtgattcac

SEQ ID NO: 249866 - DNA, 386 bp, Gossypium hirsutum
aaaaaatgttttcctcttcccctactctccgtcccctcagctctctcatacggtgagtcctctgtcgatcttcagccaccactcccaccgctccaaaagcaaccatgttctctagataagttgactctcttcttaccaatccttcagttaaagtgatatgagcaaccgtatttgcttctctgtttgtaaagaggaagacgcaggtctgaaatcctaagctaatacttttagaaccgtttatgagtgcagcaatctcagatctatcctcattttcttcttgaagctttcgaatcaccgttcaagaatcaccctcgatctccacctccctcatatccggttgtaaacccagttgtagcgcttgaagcacgccaccactttagcagcga

SEQ ID NO: 249867 - DNA, 246 bp, Gossypium hirsutum
caaacacgtggtgccttgcctattttcttatccctggcatgtgtttcaggagcaaatccttctataggtgcacatacaccactcccaccaccaaaaaagctagcatgagaaagacgataagcctgaaaaagtgccaaccaatcgcttaatctaataagaagcaccaaccaggatcgcatgaacttgatgaagaggaagacgcagctctattttactaacaacctacttcccgttccggtaattact

SEQ ID NO: 249868 - DNA, 351 bp, Gossypium hirsutum
attgtattgcaaaggatgctgtttttgttccccatacaaggcttttgataggagagacttagcagaatttggtgcatatatcaatatgggttattgctggggatctggttcttccgatagagatgctactagtcatgtttacagctccaccaatcttcctactaccccaggttaattacttgttcttaccttaactgtgttgtgttgtgtttatgctagttttcttttagtcaacgggcttgtttctctgcaacaggtacatcaaataactgcagcaacaacatggaatcttcagtaaccagtagtattagcaacagcaggagtcaattctcggtatcagtaagtgaaata

SEQ ID NO: 249869 - DNA, 394 bp, Gossypium hirsutum
ctcaccaccaccaccgtcacctgctttttgtattgagccacctacaccaccaccgggggccatgcaccgtgtgtcgagtacacaccatcaccctcacccccaccaccattaccataacccacacccccaattcactacagaccaactcgcatcacctgtacccacacgcgcaccaatccattatcattgacctacaccaccatcacctacaccgggtcccgtatacgaagggccactgccacctgtaatcggagtataatacgctccaccttcaccgacacctttctattggtgctttcaagaatttacctctaacctcggttaaaaaaaaaccgcccaaaaagacgagaaatttttttccataaattatttcgtgttcggagttgtgtaaaaa

SEQ ID NO: 249870 - DNA, 231 bp, Gossypium hirsutum
gaatgatctaaacaattactttttttggttccacaagatactcacgcgagagtagagatagaaaaatgatcaaagagaacatattgaggacttcaactaagctccagaagactactaatactaatactttcaataatattgctcacaccaaccacaagaagttacttcaagctctccctaatgaattacttcacaagaacaagttattatgatcacaataatacctccaca

SEQ ID NO: 249871 - DNA, 260 bp, Gossypium hirsutum
ggtcaaagccctaatctctcttttttatctgctttccatttcccctttggcggcggcagaatctctcgtcattcagtgagatgcacttccggtcatcatcataccaaatgcaggtattgagttggtttacttttataaatggactgcaagaagttcatccaattggttgaggagaagaagaagagagctttggagaagaaagaagcccctttaaaatgggaacagaagctagaagctgctgcaaaggccagggcagttgc

SEQ ID NO: 249872 - DNA, 377 bp, Gossypium hirsutum
cgccatcgcccataattacacactcacccctttttctttctccctctctgggcgctgcttcgccgttgccgttgcttttcttctttttccccttaataaccaaatgaggaagggagctaagagaaaagccgcttctcatgagcaagaggagaagcaagtaaaggcttcgtcttcttcgcaagagaatctcaacaacaacaaccgtaaacctgctcccaaagctaagcgtgctaagaccttcaagcctcagcccgagcctgagtatttcgaagataagcgtaacttggaagatttatggaaagctgcattccctgttggaacagagtgggatcaactggactctgtttaccaattcaactggaacttttcgaatttag

SEQ ID NO: 249873 - DNA, 391 bp, Gossypium hirsutum
gtccgttctgctaaatcttctcccctttccttttccccttccccttccccttccccttgcggtttccctttccctttccctttcccttccccttgggttttaaatcagtgccattgtcaggtaccctcctttatattctctctagtctacccatttttatctcttggatgattctgatctttgttatctatctttctttttttttttcaatctcttagcaaatttgcataacgatccaagaattatttgtcctgtttaagcagtacaactagtgcagtaggaatttacagattgcgcctattatcaccctcattgatatgcactttttttgagttgatctccattcttgtttttggttttatcttttaattctttttctcgctattctcat

SEQ ID NO: 249874 - DNA, 379 bp, Gossypium hirsutum
cccacgcgtccgaaatggaagtgctcttgacgaacttgtgatgagacttagagaaaagctactagatgctgagagaaagaaggaacggcaaacagatatctcggatgagaatacttcagaagaaccagttccaattgaaactaatgatgaagaagctgttatcgccattgaagcttaagtgtgcttagatttgaactgtaactgccattgcatattctgttggataagtagtagatatttcagaggatacaaggatggaaggatttggaggtcctctaattcatagccacatttgaacccttgttaaggtcgacattaggggcttggattgacagcattgtagctcgagtttattggccgtgtttgtgcatgtgggggt

SEQ ID NO: 249875 - DNA, 316 bp, Gossypium hirsutum
  unsure (1)..(316): unsure at all n locations
cccacgcgtccgcatggctaccattccttcagctttcatcattttcttggggggggtagtgttggctttcataagaaggccaaaagtggtgaatgacattaagtttggaccttcagaaatggagattgtaaaaataactggtcattcatggaaggaaggatttatcaaggggacaattcctcaactacctttatcagtactgaactcggtgattgctgtctgtaagttgtcatcagatctttttccaggaagggaattctcggccacctcggtttctgtaaccgtggggctaatgaacttgngggggtgtgggttt

SEQ ID NO: 249876 - DNA, 224 bp, Gossypium hirsutum
ctcctttacagttcaattattcaactcatgtctttctctcagtactttgccgttagttgttgactgaattagcacctacaagaagaattaataaggcatgggagcttgctcattcaatcattatagaagcctgagcttctttgtttatttatggcatcacgggatggtgcatctgatgagggagagcgtgatagtgatgaagaagtatcagcgcaatcactgca

SEQ ID NO: 249877 - DNA, 364 bp, Gossypium hirsutum
caactttcttcttcttcttattgttctgcctaaaaaaccctcttttctttgtcgctggaaagtcaaataacagcgttaagttacaacgttaacaccgacgaaccagctttcatatattaacgatacttcactaaataaacattctcaaacatataccaaaacccccaacactgagacagagcgataagacaaaagcaaagtggtttcagtttgttcattagatcggaccataaggaagttacagacatctgcatggagaagcaatcagattgtgctatagtttactcgaatggtgtttcaaatgatgaaacatttcatagtcatcacaatgccatgcagtcgtatacggatggggatcccaagc

SEQ ID NO: 249878 - DNA, 186 bp, Gossypium hirsutum
gcactctcttatcattctcatttttttacctaaacaaaccccaaacacatgttgcgcaatataaaaaaaacacccgaaccaaacaaaaattgccactcatcttaccgaccataaattttctcaattcaaaaataccttaacactcttcaacatttaccaaaacctttaaaattctaccaaagcttt

SEQ ID NO: 249879 - DNA, 373 bp, Gossypium hirsutum
cgccatcgtccataattacacttttttccctttttctttctccctctctgggagctgcttcttcttttccgtctcttctctcctttttccccttaataaccaaatgaggaatggtgctaataaaaaagcctcttctcattatcaatatgagaatcactttaaggcttcttcttcttcacaagataatctcaacaacaacaaccttaaaccttctcccaaatctaagcttgctaagaccttcaagccttatccctagccttattatttctaatataagcgtaactttcaagatttatttaaagcttcattccctgttctaacagaatgatatcaacttgactttgtttaccaattcaactaaactttttaattt

SEQ ID NO: 249880 - DNA, 378 bp, Gossypium hirsutum
attccctttactttcccccaatgcagattacccccgaacgtttagttccccaggcctggaatctccaaatcccctaaaatttcccccaattggatatcctcaaatcgatttctcaaaatccccaaatcaaaatacctttgattttcgccaaagtccctttgatttgctctgctaaaaatatcagtagttttcccataacccttaacctcgatctatttcccaaattttttttctgtgaatcttctttgtatcttgcattcgccggcagtctccaggaagctatcgtcgtcagatcagctaaaaactatagcctgaagttcaaacactaaaaatttgcagacgacaatctgcaatggtcccaaatgaataagcctgcct

SEQ ID NO: 249881 - DNA, 198 bp, Gossypium hirsutum
agccactatcgatagaaagtggaagtggcaccaccccaaaagcatgaatcgagaagatttttactgtttatgacactgatgtatactactgaggtagggtcactcttgttctgatctggcataacctaggatcgggagagtgggtgagggggaagttgaccgggaagtctccttcttacgggaatgcaagagtcccct

SEQ ID NO: 249882 - DNA, 385 bp, Gossypium hirsutum
cggacgcgtggggtcagctttgatatcttatcagggtttcagggatcattgttgattgggtcaactcaaccgtgaagacttaggtcaaaatttgcagtggccttttaagaaagagaattgaacgattagaaaaatctcttgaagtcgtctcctttgttaatttggagatgaaaagagaaacccagtttgagtttttttcttttttgtgattgttgatattagattttgtttattggggttttaccttggttactgtgcatcattaatacgctgtattgagtatgggcaacattgaatgaagtaattaaggttccaggagttgattttgctatgtttctctcctttgatattacttggatgcaactagcagaataagtgatgcttt

SEQ ID NO: 249883 - DNA, 269 bp, Gossypium hirsutum
gcaaatcattgccgaggccacctttttatcagcgggcgcacgggccctaactgaacggttttacatgcttgatgacaaacacatggatgaccttgattctgaatccgcgctcgacatcgacagccgcggggagattatctatgccatgtcatctgcagaaaacaggtggggacatcatattgagaggctgataagacatagctgcagagtatgtattccactgtgcctggcatcagatattaaaactatagtatggaagtgcacgattc

SEQ ID NO: 249884 - DNA, 270 bp, Gossypium hirsutum
  unsure (1)..(270): unsure at all n locations
tccactcttccgaccacacctccgtttgaatcatacctcaatgcatataaagaaggatgccgtgccctttgtttgaatcctatannatataaataaatagataatatggcaagtgggtatgttttcctatacaagttcctggaatttcatttcttccaagactttttcagtggattccgaggtgctcccgttgctttgacctttcaccccacttgccatatctaccatgtgcgtcttaaaaagagtaagactctttgattaattgttttt

SEQ ID NO: 249885 - DNA, 365 bp, Gossypium hirsutum
tccacgcgtccgtccacgcgtccgtttgattcatacctcaatgcatataaagaagtatgccgtgccctttgtttgattcctattttgcattatgtaattgcgtttatggtgatttgggtagttttcctttacaatttcctggaatttcatttcttccaagactttttcagtggattccgaggtgctcccgttgctttgacctttcaccccacttcccatatctaccatggcgtcgtttccaagtgcaagatccttcatggcaggtatttagcaacaccgtggttatcaagtcctcattttcagactacttttctcaattttttcgggaacccttctgctttcagcttccggagacaactttttta

SEQ ID NO: 249886 - DNA, 301 bp, Gossypium hirsutum
tttcggcatagaacaacatgcgacacacgtggcatcaccacctacatttgtgcgggggtcacctccgagtacggtttctaatccgcttgtgcaagatgctcaattacgtgatgaaagacttgcactcttttcaacattccaaattccaacttcatcggctccatcatcatcatcatcatcacgcaaaggacggtgtgttaggatgaagtttggccttaaaccggccaccgttggactagaaggtttcgatcgcctaaacacagatcgccgaatttccagcattcctgctacggcctaaaac

SEQ ID NO: 249887 - DNA, 207 bp, Gossypium hirsutum
  unsure (1)..(207): unsure at all n locations
tcgnggacgcgtgggtctatcttctttatttgatgtgagaaggatctttcggccggtgttctccacctagaagcgttaacaatacgattggacaaaaagctcaactacgtgatggaagacgagcacccttttcaacattccagattccaacttcatcggctccatcatcatcatcatcatcacgcaaaggacggtgtgttaggatga

SEQ ID NO: 249888 - DNA, 255 bp, Gossypium hirsutum
atgctcttgattggggtttgcttttatagatggcgaccaatacattactgcgacatggacacacactttttttatgccaatttcagtccttcctgaaaaactggttaagaagttgaccacatttcctacttcccgccaataaaatatgggaaggataatttatatccaactgagaataatggttggaagaattcaaacagtggtggtgatttaaccacccaaggtgagaggcctcaatcttttttaagctggaga

SEQ ID NO: 249889 - DNA, 446 bp, Gossypium hirsutum
  unsure (1)..(446): unsure at all n locations
ccgcagtattgttccgtgtcaccaaatcttcaagcgttgggaaccgcgtttttttcgggttcgtgcttgtgcttgtatcgatatcttctcgggtcttttgctttcccaaatggttcgtttcatcgagacgtcgtgatcgatacgtcggtacgcttcgtcggtcgatccggacgtcggagagcgatgcgcatacccaatcgctacctaaannnaattccgnncggatcgtttcgatcccttcggggtcgcgttaccacgtcgttattcggatttcggacgaccatannatcttanccccggactnnngcttgtggccccttttcaccttaaganntatgattggctcgcgcaaatattgaactcnnttcgagcacgtcttacccttcgtatcgggccaatagacctggccttatggtttagcgtctttttcggtcacctttatgtgg

SEQ ID NO: 249890 - DNA, 372 bp, Gossypium hirsutum
ggtaaataatcagccatctctctacacctatgccaacttgattatccataaggggatatacctcatatgtgtaatttataaatttaaattattaagtattttctataataaaaaaaaaaaaaaaaaaaaaaaaaaaaaaaaaaaaaaaaaaaaaaaaaaaaaaaaaaaaaaaaaaaaaaaaaaaaataataaaaaaaaaataatgaggctgaatgatgataaagaatataaaaaaaaaaaaaatgcggggccccgtttaagccaccaattttacctgctcttacaagggggccttaactttttttttagtgcaactgaataggattctccgcaggcccattttaaaacctgtgcctaggaaaaaacttagca

SEQ ID NO: 249891 - DNA, 372 bp, Gossypium hirsutum
ctcaatctcaatattgccgtcgcaaaaccccattttgccctctctcttttgctggtcctctctatcaccgccatcaaatccgccaccgtaaaccgatagctctcgttgccgcctttcaccgccacttaaaccgtcgtaaatctggaaaagaaacaatatgtccggcgtcctcccgctttcctccagagaagacgagccatttataggtgctagaaatagtgctggaaatggagactcgttagcaatcgagatggagcaagagacgagtacttcgacgagttctggcgggagttcgaggaaaaagaacagcagattgaaatgtttcggcgtcgatctgtcgccagataatgtggcagttgctatggtgtactt

SEQ ID NO: 249892 - DNA, 364 bp, Gossypium hirsutum
attttcctcgtttaaaggtgtcggtttgtaaagattttaatggtttagaggctgtataagctggacagttcttgctttgtcagctaatatcttcacaagtttagagttgtatcacttgttccttctttgctcatagtaaatatttgttggtttcatgatgtgggtcttcattattttgagctctggttgagtgactcctttaagattattgctaattgttggtcttcaaagtagttgaagaaaggtgatcatattggtgtggttggagatcatatctggtgtgtgaaggagatggagagtggttgctctaagaatgttgaatcatgtcctaaacttcttgatttaatacctcaagaaagagagt

SEQ ID NO: 249893 - DNA, 357 bp, Gossypium hirsutum
gcgtaaataaataactaggaattttgagttgtacctcaaggaaaatagactagtttggatggggaattaaccctgctcattcataataggaattgtagaacgaaatgaactattgtgcctggaggcagataaaagatggctgcaggagtctatacattatatttcgaatctccttttaggtacaggacagtagacgttcgaccaaacggtgccatcaagacctacaaaatctgatgttacggcacatgcactcgcaaaccattcatgtctctgcaacaaatgaagaggattcagaccactggggaaaggggacaactaatgaaattcgcattacaactaagtactaatatctaactg

SEQ ID NO: 249894 - DNA, 286 bp, Gossypium hirsutum
ccacctcggcgtatttttattcaaacttttgggctcttaattcgatggtaccttcttttaggtatttcaaagaaaatggggcaggctttgggtgtattcaagtggagcagcaactggcttaacagaagcattgggaagtgatgatgtgcttaccggtgcattgttgcggggttggaaacaggcgtgtctcttctgggtcacactggtgtcgggacaaaccagtacggttgtaacgggtgttaatcatccggcctactgaagccaaatcttttataactacacctga

SEQ ID NO: 249895 - DNA, 368 bp, Gossypium hirsutum
ttctcttctgtttttaatataattttttttgttaattctaaaaattatattgagcgttcggccgtggatttctatggtagaaaaacagtaaagctaagagaaaaaataaaagttcttagtatcatcacctccgtctcactgtcccttgtctccctgggtgctgccgtcagcttctttggataaagaaagaggaggagaagtgaaagggagttagagggagtgtgccggcggcgcacgatggtactcggttccctaatctgaacttagctttttcttacttcatttcatgagctatggtggacctaaagagaatcctcttgttctttcgttcttcattgttcattctcttagcagattggcttgatttt

SEQ ID NO: 249896 - DNA, 347 bp, Gossypium hirsutum
aaaataaataactaggaattttgagttgtacctcgtgaaaaaaagacttctttggttggggaattaaccggtctcatttcttttagttcttttagaacgaaatgaaattatgttcaaggaaacaaatatgtcatggttgcaggagtctatacatcgcatataggcttaggctttaagttaagggcatcgtggtataatcgttcaggtaccgcaggacctaaaaaatcgaatggaagggtacatagacatgtaaatcccttatgacactcctttaatttaagaggattcagcattcagggcgaagtagactactcaagaatttcacatttcattcatgtcctaatttt

SEQ ID NO: 249897 - DNA, 385 bp, Gossypium hirsutum
ggaacggaacgggccgggctcgacgccacgcgtccacacttcctgtttaggcttaccctaatttcccacactttctttgtctctacgacaggatccgctaatcaagctcacactgtccttccgcatatgtatacgaacaaatgcagggcattataacttctgctctgtaggttcttgctatatgcttaatcatgccatcctgtttgcaacctttacaaggtactctatctgagcttcataagttctttaccgtgtaaaggtctattcctacataataagagagattatgtcggcagtgatcgtagagttgaaatgacctgagagactttatatacttgctatggagcctgctggggatacaaaaacaccggggccatacatgaac

SEQ ID NO: 249898 - DNA, 358 bp, Gossypium hirsutum
gccggtaacggaagggtcgggctcgacgcatgcgtccaacgtccttttactcttacgttatttttcgacttatactgaaattacccggcagattaccaattcaaaagtccactttgcatattgactattgttggttcaatccacatcattacatttttgatccaataaggactggctatacaaataataccctcatgttgcaaggacgagtgccaatgtatttgccttgagagaaataaactctatagaggcgtgacctgtctacaacctacatatcgaagacccattgtttcccaacttatgatggcttgaagacgcacctgcgcttctgtagaggtaatataacctgttcttgcta

SEQ ID NO: 249899 - DNA, 370 bp, Gossypium hirsutum
ttctgttttacacaaggaagtaattttaagtggatgccagatcggaagagatcgagggattcttccaactgatcttatgcttctgagaatttttgaatcccacaatgtgagaagcttaagcgatatctccatattcttccaacaagcaagccagttaaggttctgttcagttgaagattgtaaagggatagaatccattctcgactcgtcgtactcgaactcgctgtgcagtccacttgagaaccttgagtacttgtggcttgaaaggttggataatttgcatgtgcttattaaattagaagcacctctatctatttctaggtcactgcctctactaggcatcttttctcatcttaaatcatttgtgatt

SEQ ID NO: 249900 - DNA, 379 bp, Gossypium hirsutum
gcgtccgcgtcaccggaatcccaaacgtcgccttcgctatctacaccactcacgtcccgatcgtggctccaaaatccaacgccgccgcatatttaaacaagaaacaaacggagaaaacccaaaaacaatcgtattccatcacactccaaggtatcgtagacccaaccggcgttttcactgacgtttcaattggttggcctggttcaatgtccgacgaacaaatcttcgagaaatcggcgtttcatcaaagcgccgttaaaggccaagtaaaaggcgtttgggtagtcggaagtacagggtacccattaatggattgggttttagttccttacgctcatcaaaatctaacttggactcaacacacattcaatgagaagat

SEQ ID NO: 249901 - DNA, 314 bp, Gossypium hirsutum
gagaatttgttcagagacaactacagagatcaaccttcttcttgataactggaaatacgttcttgctggtctcatctttcagtatattcatggtctagctgcccgaggagttcattaccttcataggccagggccaacacttcaggatcttgggttctatattcttccagagcttgggcaagataaagcctacatcagtgagactgtgttcacctttgtctttttatcatttttattgtggactttccatccattcatcttcaagagtaaaaagatctacactgttcttgtttggtgcagggtgctagcatttc

SEQ ID NO: 249902 - DNA, 295 bp, Gossypium hirsutum
cctcaacacataccttcatcttaattttataaacccgccttcaagcaacacccgcagtcataaaatattcaccctttataacatactatttcattcccaatactacaactactctgtaacttcacccttcaataatacatttgacttatcttttaaatcaccaaattcataaaccaataaatcacctatcaatttaaattttacagtacactaaatccatactcgaacacaatatctttatccacagattattttttatctacacctacattaaattaacaaaccataattttac

SEQ ID NO: 249903 - DNA, 191 bp, Gossypium hirsutum
  unsure (1)..(191): unsure at all n locations
cgggaacggaacgggccggagccgacgccagcgcgttacgcgtactttgaagtaccatctagtgcatgaatactatctctgatgcactagccattccaagatggggacttgctaaaccatcggagcaagggctcgggaaagggggcaaagccgaccagctnctgagggtcccctttgacttcnncatccag

SEQ ID NO: 249904 - DNA, 316 bp, Gossypium hirsutum
cccacgcgtccggggcataagcagcttgtggcaaagaagttagctgaggaggaggctgaaaggaaagttaagggagaggctaaaaaagaaaaacatttggttgcagagaaggggcatttcaagcctgctaattacttggattcacatgaaaagtttctcattggtattgctacaaaaggagtggtgaagttattcaatgctgtgaacaaagcacaaaaggctcagaaaggactggacccttcaaggtctaaagatgcaaaagtgataaggaggctaaggaaggaagcctttttttcagaactaggcaagacatcac

SEQ ID NO: 249905 - DNA, 257 bp, Gossypium hirsutum
  unsure (1)..(257): unsure at all n locations
ggaattccgggggcgaggcaggcgtccgcccacacgtccgttacaanctttatgcacgacagaagcctcactttgggggagtccagatttttatttatacttcacctcacttctcaacccttaaaatcaacatactctctcacgtaacgttcagaaaaccactatccctgatcatacttgtacaaaaccccaccaaccctaccctccttcgttaccctgacttcagggctgatgcacatattgctgcaccaaccgaa

SEQ ID NO: 249906 - DNA, 277 bp, Gossypium hirsutum
cccacgcgtgcgctgcccctttagttcaatacttatgtcaaaacatgcgggcgtttggatacggttactaggaaaaacaaccatcagaggaagctagaattctgactaaatagactaaacttatttagcataacgaaggagatatatgctagacctgaggataaagaacatactcatgaagaccacatatatcctagggaggtgtaccaacggccagaacgcattgagatggaacaccaactcttgtcacacattgccaacactccacacaggaaca

SEQ ID NO: 249907 - DNA, 205 bp, Gossypium hirsutum
  unsure (1)..(205): unsure at all n locations
ggaanaaccgggtcggacccgacgcgtccgggataacgtgggagcatctcgcccgattaatgataataccactaccttttaaccgttgtgttgggcttattccgtgatattggaggccggcccacaccacccgtctttttggacaccaaggcgcggctttcggcccggccgatccgggccggaagacatttgtcaggatggggag

SEQ ID NO: 249908 - DNA, 313 bp, Gossypium hirsutum
cgcgaggacaacacccatctttgtttttctcaaaaaccagtaaccacttgccaggcggcgtctttcatgagcaaaacttccttcacaatcaagcctcccccattaaaggctctttcctttggccctgtgtatataaatattgcttactaaccttactctcccattattcactttgaaaccactctcctgtgaccgagctggctggatggttcattacagaaggggctttgtgcactttttgcgattaatatgtcttagttgctggaaaaacatgtgggtctatagtccttgctatccacccaagagcagatgc

SEQ ID NO: 249909 - DNA, 199 bp, Gossypium hirsutum
ggctctcataaccaacagagcttttgttttctttctaaagatggccaaatggtggcgagaccatcgtaagtacatgtctacgctaccttatgtaccgaggagaaattatgcccaatgatgttaatgcgcctatggacactattaagaccaagctcatcatgcaatttgacgacacgtgccatactggatacaagttcgg

SEQ ID NO: 249910 - DNA, 364 bp, Gossypium hirsutum
  unsure (1)..(364): unsure at all n locations
gtaatatgataataatttataacatgttttggcaaagaagttgaatggttgagggggctggtgatctttaagctgtttgcancttctaatgcttagacactcatgtaggaagttcctaaaagaacttattatccatgtagttttgatcctcattaagacactgatggttcagttagttactccatctaccaagaacacatcaactacattgaaaagaaatttttgtctttacggttcactaccntggaattctctgatttttcttctttttatgggcgcatacatttaattagtggttaaatttactttttattgccaagtattaattaccttgttaagtcaatgaagatgataggctgatttt

SEQ ID NO: 249911 - DNA, 360 bp, Gossypium hirsutum
atagaatggtggtggtactgagtagaagggaatgtggagtggtacagacaaattggctctggaaggtgatgtgggcagatcatgcagacattagggctgggatcgggaagcactcctggagttggataagacaaagagccccccctacagacgatctattactgcatgccattgcagcttgggtgttgcataagaggaaaatgatcattgagaattatggcagcacagatgacattattacagagtgcaatagcatgtcgggcgaggtcgatgtatggaaactcctaaacgatgcacacgatttggtggtaactttttacgacaagatagaatcaaccctttgactggtaccgataaatt

SEQ ID NO: 249912 - DNA, 384 bp, Gossypium hirsutum
cccacacgtccgaagaatataaaggttttggcagccaacaactccaatagaacaagatgcacttttaaaccttgacttcctaacaacaaataataaggcaagataagaatacagaggttttggcagccaacaactccaataaaacaagatacacttttaagccgtcacttcctagcaacaaatactaaggaagataagaatacaaaggttttggcagccaacaactccaatagaacaagatacacttttaagccttaacttcctagcaacaaatactaaggtatgcatactaacacatgttttactatattgaaaaaaattatatgtatttataacaatctcttcagtccttagaatgttaatttaagtatataaatattttct

SEQ ID NO: 249913 - DNA, 380 bp, Gossypium hirsutum
tgagaatggtaattgtcctgagcaaatattcctatgcgaaagcttgtgaaggagggaggttctttagtcattatttacaatgggagtttacgatttgttggctcagtgactcctagcccgtgtgataacaaaaacgataattggtttcatatggttaatgctatttttaatttttctgtttgtttcagtcccctgatgatagtgcaattgccatagccagtttaattcgccaccatgagacagagtacctggcatctcttgaggttgttttcaatgtttggttaatttcaattccttgtgcttcctaccgttatctactgacagttgaggtataccgcaggcatcctatttgaatttgccagatgccactttcaaggtat

SEQ ID NO: 249914 - DNA, 292 bp, Gossypium hirsutum
ccaaaccttctttttattcttactactacatgaccaaacgctaacatccgtagggttaacataatgttagcagctaaatatcattctagtgtaatatcagacactgttttaattctcaaagtaaataagaacaatctttaagccttactccttcgaagtcaagcatactactttttaacaaatcatgatcttgctcaaaggctttaccaaaaaggtttcttccttgatccatatcacacttgaattgaacaaagcatatttttttttaaaaaaaaaactccggaaaaataaa

SEQ ID NO: 249915 - DNA, 303 bp, Gossypium hirsutum
caaacacttggcatcactaactttttaatttactctattcacaaacaaacaagaagggtggtttttatctttgatcacatcacctgagtatcatgaacaaactttagagcttaaacatattgatcgaagaatccatccctcattgcagagataacttttttccctacaatgctatgaagaagcacattaagccaatataccccaaaaatacgaacgagaagcaccctaacaaacgatccacatttgatctatttcactgcaacgaataacgagtacgagcggctgcatcattctactttatag

SEQ ID NO: 249916 - DNA, 374 bp, Gossypium hirsutum
cttttcaccatctcttcaaaagagctatccaaacaccatttggcctcaaatgtaaacgtcttcacaaaattgtcttcattgttccttgtcactcttatagtatcaatgagaaggggacaatggtcggaaaaagagtgactcaaatgttcaagccgataccctggaaagagattaacccaactcaatgtagtaactccacgatctaaccgttctcttatatttgtagagacaagacgtcctcgttcccatgtaaaccatctgtcagtaaagcctagatctgtaagagtgcaatcctctaacgcctcgcgaaattccttcatttaccgatctgaacggagacgtccactctcattttcaaaagaattcacaatttc

SEQ ID NO: 249917 - DNA, 279 bp, Gossypium hirsutum
cccacgcgtacggacaagcaactttttttttaccagtgtccgcttcattttgggcggcggtagatatctcttgactctcttttctttgcctccactatattatctttggcttcttctttatctcttgtaatttcaaacaataaataacgtgcttctcctgcggtcgaatcgagatacatggctaaggcaccaatgaaggaaatcacggtttgcatgaaaaagcagaatcatcgaccaaaaaccaaaggggcaaaaatttatgggctcgttgtcatcaaa

SEQ ID NO: 249918 - DNA, 318 bp, Gossypium hirsutum
gctcatcaacacctgacctcaagaagcttttggcacctcttagaaatccataagcgaaaaatataaaagttaaaactccagtttttacttcattaaatcattgatgttattccttaaaattaccaacttgcagatatgataattctaaggaataacatatctgcaagttggtaattttgttttgtagatatgacaataatgattcatgtttccacaaggtaatagatacctccatgtaactttgatataattgcgtatggtatacatgtctatacccaatggttgaaatgagccgatcgcaaaattcagactcgaaat

SEQ ID NO: 249919 - DNA, 392 bp, Gossypium hirsutum
cacgcgtccgcaaaacaagtaatgcttccggaggttggactttaggggcaacacaaaaatggagtcgacaagtcaccgtggagccagatgggagtcgacattggagaagggatccatggccagcgaatggcttcaaccaccaatcgtgtaggctggtacaacaaaacacgagctccgtctagcgaaggaccatggtgaatgtgatagatagcactcagagataaacgctataggagagaagaaagagggttaggcccaaagtcaggagcgatcggaaaaaggctttcagatcaccgatagaaggtcaacgaacgagaggggcacggttcagacttcattttgtccaagtaaaagaaaaacaaatggaaaggtaaagaaaaggaggaaggaat

SEQ ID NO: 249920 - DNA, 263 bp, Gossypium hirsutum
taaaatattgccttaaaaccaatttttaaaaagaaagccaaaatacaccattcgtacgttcttaacaatctaaaacacaccccaaatttacttcaccatcttattcttcatcttcgacatcctatcaactcttaaactctcttctccgacaccaaaccaccacatcaatctaatctcaaaccatattaacatttactcccacctcccagtttcatacacactcccatttatctcacatttttcacccccctaaaaatcccatt

SEQ ID NO: 249921 - DNA, 272 bp, Gossypium hirsutum
cccacgcgtccggctatatttttcactcacatcctcaaatgctaacaaccggggggccttcttcctattactcgcttaatccacctatcaaccaacatcagaaacagcctttattctcaaggaagaaatcaacaaatttaagaccatacttcatcgagggactgcatactactattgatcagaacatgatgcttctcaaaaccataacaacaaaagtcaccccctcgatccagagcacagtcaatagaataaagcatatgaacatgaccaaa

SEQ ID NO: 249922 - DNA, 223 bp, Gossypium hirsutum
  unsure (1)..(223): unsure at all n locations
cgcgtccggcaaaacctaaaaatgtnattgatttgtttaaaagtccatcaacngaaacgagggggggttttttttagtctcatgatggcttcactatatccccacaccaaaaatctgacatcaaaactctccaacatctttatactaaagattcttctactaacatgtcaatacattcaaaaaggggatctgctcacttctcctccttattcgttcgacgacc

SEQ ID NO: 249923 - DNA, 276 bp, Gossypium hirsutum
gtcgaaattgaaataccactatttttaacgttattttacttattccatgggcgtaggccgtgtacagctcctatttatgcacccaaggccggcttgagtcggacgatacgggcggaagacattgttaggtggggagatcagctgcggcaactcatttgttcatagatagttcatgtgaccttagatgcgctcaataggacctgatagtctcagtgggacaaacagatcgatcatgttgtgattgaacatatacatccgattactaacctagatagt

SEQ ID NO: 249924 - DNA, 301 bp, Gossypium hirsutum
ctcacttataggccgatttaaagataaactaaatatactctctctaggtatcggagtgggtagcttacttaatgcttctcttaccacattatacgcaaagccatatccagatcttcgaacaaactggaaggcttcttgctataaatgtctcgaataatcgcccttagtaccgatctgcatggcgatgctgattaacaggtatataagaccgaatttgaaataactacaatgtctactgattgcaaccttacgacacttactaactatactattaaccaactgagcatatgcctctgccatc

SEQ ID NO: 249925 - DNA, 375 bp, Gossypium hirsutum
  unsure (1)..(375): unsure at all n locations
cgtaaatgtaacatctatgattgtttcacaaataataatcagattaaatctncgggtgatttatatacctaaccctacacacatcatttgcatagtttattatactaaatgaaatacaaatccaaatcttcaaaattcatgttttcataagtaactgtacattgaaatcatgacttgttgtctatatttgttgttgtaggttttctcagcatgttcatggattgatatgaaagaaattactgcaactaatgatcttgttactgttaatcaagatcatgtaagtttgccaactcgtgaaaccaacatgatcatgatcttgttcctgctaatggctaattttattagtttgagaaaccaactntatgatacaacaaa

SEQ ID NO: 249926 - DNA, 258 bp, Gossypium hirsutum
  unsure (1)..(258): unsure at all n locations
aactttttgaggggctttcttgctttattcttcactaaacacatgcantaaaaggagttgctacaagatattattgggttcaccccaaataaaacgaatcttctacgcagtgaacatatgtccaacggtgagaaggtaagattttaagcctacaatttattgtgggcgatgacatttttacagaacaatgctatgttaattatcaattatgttttccatacttctgcatatacatgtattgaattatcaaatggtatg

SEQ ID NO: 249927 - DNA, 376 bp, Gossypium hirsutum
gtcgacctgaattaccatctcttaatttttaaattctagctggtaatgccttgcagtgcatgtagacagtgcttttattaacaaggtccctaatatggatggttattcacttcccaaagacgatgccttaagagataacgaatgtgaagaagaaatatttaacataaattgtcacgaaagtgcaatggctgttgagccacaaccagatgaagttccccaaacagaacagctttcaaagccatgcacagtgacaaatcaagatcatttgggcagaaagtatattgaaccttcagtgtcatccccatccttgtgctgtactttgaagccacaagtgcttgatactgctgaaccctcaggtgttctgaatctggatata

SEQ ID NO: 249928 - DNA, 195 bp, Gossypium hirsutum
cgggggggccgacgcgtccgcggacccctgggtactaatccatcttctgtggaggatgaaactaataatgttgctcgctatttttaacattatgatcactccccaaacaattatcttacatattgcaaggacactgataaaattgactccacaaaataatgtaaaggtagccctaacactgatgaagtttctttt

SEQ ID NO: 249929 - DNA, 209 bp, Gossypium hirsutum
  unsure (1)..(209): unsure at all n locations
ggccgacccacgcgaccgctccttannaacaaccattaatgttcatctattaaccctctatatcgnttctatccgtagttttaaacaatttttaatccttcccactaccaaattctttactcaattctttaattccctacctattcctgctctaattctttataatacccttatcattcattgcttaaaatctccttactcctaaaaat

SEQ ID NO: 249930 - DNA, 277 bp, Gossypium hirsutum
gccacacgtcctctcaaactttcataaaaacaccccacgtcacatagggggccgtgccctttacaaatctccacacacaccacaaacacccaagcaccaccactcccaatccactcacaaccccatcacctctaacaaccttaacaaccactcctcaactaaaccacaaaaacaactatatctccataaaaaacaccccatacctccataaaaaaatttactcttacaacacttcacagtattcccatacccaaacacatcttataccaactcactt

SEQ ID NO: 249931 - DNA, 262 bp, Gossypium hirsutum
  unsure (1)..(262): unsure at all n locations
atgatattcattgcaactcattcatttctctgcaggaaggatttctccaacgaggaggaaatatacactgatctatttatnatcaactgtnaagattgcaatctcaattgaatttttacagattcaccataaatgtaatgctttttttcctttaactctttgtaaaattgtaaactttaaaattttaaccaattcttttttcaaaaggcttttaaattttttccatttttacttttttttccaaatcttaaaaattacttaa

SEQ ID NO: 249932 - DNA, 149 bp, Gossypium hirsutum
  unsure (1)..(149): unsure at all n locations
ccgggccggccgaggcgtgcgaaggcatncactataacattnactaatccntacccaccctnactttctcccgggacggaggtttttaaacattacacaaccctcanctgccaatttcccaccatgcacctctaaaactaggtttctta

SEQ ID NO: 249933 - DNA, 265 bp, Gossypium hirsutum
gggcaatccgagcagaggaggcattatagaaagtcaaggtggacaaatgctgctagtgccgagcggcttcaagacgaatttaagaagctgtccgttgaaatggccagtaggattgatgagaatgaaaagatgaccattaaagcagttgaagaagccaaccgactctgcaatgcaaaaaagagatctggaagaatggctccaaaaggccattgaagaacttacgtttcttaaagatcacactgcagtcgaatggcaacaccttaca

SEQ ID NO: 249934 - DNA, 373 bp, Gossypium hirsutum
  unsure (1)..(373): unsure at all n locations
atttacaaccatatcttactcaatgccagaatctatcaccggtttttctccccggcaaatccgaagcaagcgtcaaagggaagctgaaaggaagcctttcgccccacaaatacaacacaatggatccccaaagtgaaagagcaagcccatcaaatgattccggcacctcgagaataatcttggagtgcacgtcaagcaatcttcataaacaagaattcacctccgaacaatctcaaccgggtaagcaggacgatagaagccaatgcaatggagatttaaagctaatacatgcaccagaaacaccacaaaaggcgacgatggagactaaacggagactncaacccgaaaaccaagtcaaaacaccagaaaacac

SEQ ID NO: 249935 - DNA, 194 bp, Gossypium hirsutum
caaaacttcaatttctaacctaagaaaaaaaacccccagaagctgaaatagggggctgcccctttgctaccacttcgccgccgctactctgccattcaactggtacatgaagcaacctttttttcagggcttaaccattggtaggttaagctgcttaacactttgagaattgagggggatttgaataccggtat

SEQ ID NO: 249936 - DNA, 195 bp, Gossypium hirsutum
tccaattaaggatagatactgcgatagttcatcaaacaccagccatactctgggtggggtctggaactacgatgcggtcaactatacactaaattaaacatgtccataactgaactcatagtgattttgagatcaagataattagctattattgagacgcaacagcatctggcgatttcatcttggtgatctact

SEQ ID NO: 249937 - DNA, 180 bp, Gossypium hirsutum
tccacgcgagcggacattatatgtacatggtgatcacagcatccagaacctggcggcggatttgaacaactaggcggacacccatgccctaaaatatgcttgctggcacagaactgaacgcgcacctcatgacatgctcgatcgccatcactgggcaacatctgaaacagaggaatacat

SEQ ID NO: 249938 - DNA, 380 bp, Gossypium hirsutum
  unsure (1)..(380): unsure at all n locations
aaatnccggggcggaccaaggcgtccggccaaagacgccgccctgggattccttactccaacatatgcaccatctgcagggcggcatatacatcttccgccatcgatgcctggtaaccaagatatttaatttcatttaatttgtgcaaaagaaaagcaacggctgcatggccgagacactatatgactggaagctgatgtttaatgaatttatgcagttaggatatggtcaataagttgtcagaaactttaatttctagtttagaaaccaatttcaaaaatatatatgctacatatctctgtttttgaacaattcaagattaccactagctaggatatatatgcaggtttgtggaagggtgtactggaggcaatgcgtct

SEQ ID NO: 249939 - DNA, 325 bp, Gossypium hirsutum
  unsure (1)..(325): unsure at all n locations
gcaggatgtgatcattaaaatgttgtcttgaagttttaggttttaggtaaccatagtacttacttccattgtcttatgtttgatttcactgttatagagtctatgtttgattcgctttatagactcaaggtcttatgttgactttgtttagttccctgcaggaccatgtaacaggggtttgacatttttatgcatgtcggagagaaactttaatgctggattttgctcttttccttttttgtttgtgtttttgcagtgattgcatgaagcatacatttgagagatttcttcactttccagaagcanatatatattttctacttac

SEQ ID NO: 249940 - DNA, 363 bp, Gossypium hirsutum
attccgtacccttggtggtttcaaccctaacttgccgtgggatgaggctgagaacttaagtgaattaaaagaagtcgaggttattgattttccttcaatgtcggaggttgctaggaaagcaaaacgaaccaggtctcgaacttccaatggtctactaaaagcaaagaaacaaaagactagtatgggcagcattatctcgcagcggagacaaaacaaagagaaattgaggtataatgaaggtatgcctcacctaaattttaattatttggatgtgttatgtatctcacattctaccaggggtgttatacgtttcattgctaatgttttggaatccttgcaaatcttcggtcatttctgtatgtt

SEQ ID NO: 249941 - DNA, 361 bp, Gossypium hirsutum
cttggaactgatctttaagaacatgtttaaaagaccaaggtcgggtttgggagtgaaaggatcgaggctacaatgatcccttgcttgcatttctaacttcttccgtcgatcgtagggctccttgagctggtttcgggctccttttccccccttgatttcttctcctttttataaattgatttggggcttttcatcactgtgtgctgttctctctatctcatggagtggatttagtttctcacgccttttgtctgggatctcttgcttgggttttctgctagttggggttctctcctttgctcaagctttctaccaaactgttcttcctctctttcttcggtcgggtttttgttaccgtttt

SEQ ID NO: 249942 - DNA, 138 bp, Gossypium hirsutum
gcacctcacagctttgataaagctccacaatcaaaagatgtggggtcctggaatggctgaaggcttgcaatccttgagagttaaagtcatatgacattcaatgaactgatgtcatgaaactattcatggaacgtgaag

SEQ ID NO: 249943 - DNA, 341 bp, Gossypium hirsutum
atcattacagaattggctccttgatttttccttcccttgtaacagttagggacgctttaccttcaaatggataagttaactgcagcccatatatatacatatatataggtttatgtattgataatcaaactgtgagaaagtacttaaaatttttctaatgttcttgaactactagtggttattattttttgttttagttttattattactgttgttattactatcattataagacaactgcccttttaggtatatagaataaatatgcatgtatacaataaataggacatacactattatattcttatgtatacatgtatataacaaggccctctaattgt

SEQ ID NO: 249944 - DNA, 329 bp, Gossypium hirsutum
caactgctccagagaatccatggaatgatgctccatataaggatgctgcgagagaaaactgcactgggagggctatcacttgatgcatttctatcagagtgggcgcttatgacactcttagacccagctcgtagcttggagaacttgatatacattggatatcctggcgattcttcctctgccatccgcatcactaggagaaggcgtctggataggaagaagcaacaatcagaaagaaatgttttccagtgctttgtttttggtccagcaaacgctgggaaatctgcattgatgaattcttttcttgcaggccctatttggattcatat

SEQ ID NO: 249945 - DNA, 377 bp, Gossypium hirsutum
ccgattcttggattgaagccatctttggcatcatcaacatctcaagggccggttggttcctccctggagcatgcagaagattcagcttcccaggatagtaattctgatatagcaaggactccaccttcgaaaagtagcgcaattacttctgctacagcaacaccgagtggaagccatccaatccctgctccactgaatctttcacctcatagtttgtctggtgcttcaacgcctccaattgttcttccaggttcaagttctgctcgaagtgttttggaaaacacaggcaccaccaatccgtcatctcctgtaaatttgccaaatgctacaaaagaagaagatatcacaagcttccctggccgtaggccttctccatc

SEQ ID NO: 249946 - DNA, 378 bp, Gossypium hirsutum
cctccgtactaacatttactcaaatcaggttggaaaccaccccaagccaaatggggggtgcaggcctggcccaatatcccaaccaggtctccgcggcgtccagtttactatgtgcagagcccttcacgtgattctcacgatggagaaaagacaacaacctccttccattccacgccggttatcagccctatggggtcacctccccattcccattcctccatgggccgccactctcgtgagtcttcatccagttcgttttcagggtcgcttaaacctggatcccgcaagatctcgcctaacgacgctccgttaaggggagctcatcggaaggggcataagcagtggaaagaatgtgatgtgatcgaagaagaaggcctc

SEQ ID NO: 249947 - DNA, 370 bp, Gossypium hirsutum
tctactcgtgggtctatatgttcatattcagttacatctccaggaaaggggtcggttcattcctatataggttaaacttctgcatcttaaatgttggcctcacaattcattgtaataaacctgaagagttgccttagcagatattatgttttgtacggttaatctgcatcgactatattaactatcaccaactcattctaaatcaatagcctctttatacacatatgctttaacttaaatgtttatagctattttttaataatataatgatcattcacatttctgcgttggtaccttcaatttttaatctcatttatctctacccacataaataattttcttttttattttctttatttcttaacctttt

SEQ ID NO: 249948 - DNA, 261 bp, Gossypium hirsutum
cccacgcgtccgggaagcttttcaaatctgaagtagttggggcaaaacgtgagggcaagagtgtatatgcttttttaattgaagggtttttgggttgctgtttcattgatgtgggagagaaactaaacttcgtatcggaatcaagctctttctagtatggctatttgcagttatcgccgttttcatttttaggttaaggtcactacctgggcttgtgcttgaactattcctcgaaaagttaactatggacttgattatgat

SEQ ID NO: 249949 - DNA, 324 bp, Gossypium hirsutum
  unsure (1)..(324): unsure at all n locations
cccacgccgtccgcttataaaagtaatatgtgaacaaagaangagaaaactatttgtttgttgttgaaagccattagtttctctcttgatgggcaacctgttttttttcttccactagagtcgattctacccaaagcccccaaccaacttctgcatcaggaggctcaagaatttctagcaaaaccagtcgatcttcagctccttcaagcttgactcttccatctttcagtgatacaagtagtattaatggatgtcttccaacaccaacgactgaaggagaaatattgggtcccccaatttgaaacctctcttgttcaatgagtt

SEQ ID NO: 249950 - DNA, 281 bp, Gossypium hirsutum
cgaggtttatcgtccaaggtaactcaaaagagttccccgttctcatcgcgtgtctgactgctaatggatcaaaggatgggggggttgcagattccaccttcgcccatcccatatcaggtctctccagtctctcaaaactggatcgtcaaggcgtggatgctaatattgttccagtaaacaacttcaatccgttaaaatcaagctacgtgcccaagcaacttgtagaagacgaggtaccttgctctttcttgcagcagtttaagggatcaaaggaggaaaaa

SEQ ID NO: 249951 - DNA, 300 bp, Gossypium hirsutum
gcgtccggaagttattacgaaaattttaattttcttcattttaatacgttttaattataagtaaagatattttagttaggagcaggttaaatagatataaaagttttgatctcattttttaaaatagatgaatatattttctattgctggtgcatggaatgaatgtgaaggcttgtcaaaatattggggtcatctttatttttgatatgctgagaaaatgaaatgataaaaataattgtaataaaaggggttgtctgtggtgtattgtatttattgcttctgttgttgtggtgggggggg

SEQ ID NO: 249952 - DNA, 365 bp, Gossypium hirsutum
cccacgcgtccggtttatttcgattcttgctgataatattttgttaaatgaaaggttgtaagggatttgctttgtcgtttgtacttattagggttttgagatttgattgacaattaatatgcttctacgtacgatgttttaaagaaaataccttatttccagttaacttgattagggttggttttcgtatctcgaataattttaaggtttttgtttttagatactagaaatcaggatgggttttctggttcttttgagtttgtttcttttctctcgaaaatgagatgatgttatttttatgatttatgacactttgtgtggtatagtcttatgttgacagtgcggtgtattgtcattgagataca

SEQ ID NO: 249953 - DNA, 377 bp, Gossypium hirsutum
  unsure (1)..(377): unsure at all n locations
tttgactttcaatcacacgggaagatttagaaggggaaaaaatggaagtggtgagagcgggtactcaagtgatggattttgatttcaacagcgctagatcatctccacgtacaagtgctccttctacgcctagacgatttggtgactgtttcttcagtactcccacaagtcctacaagaatgtcggagttttatcgcgaattcgataggttctcgatgatggatgataggcagaaaagcaaaagaagcacttgtttggcgattccttttgattgggaagaaaagccagttacacccaagtcaccaagagccgcaagaaatgacgacgatgatgatgatgantttgcttttgattttagtgaggccttggagaaaaca

SEQ ID NO: 249954 - DNA, 373 bp, Gossypium hirsutum
gggacccacgcgtccgcctgtctctgttttgcttccatttctttcttcaattatcttttctcttcagagagttcaactcttttctcagaatgggaagtactgatgggacccagtattgggcttacacctattaatccctggaaagggagccttaactggccatccgagaaactccaaatttccatcaccggtgctggtggcttaatcgtttcgaacatggttcgacgtttgaaaagggaaggccattccataattgcttttgattggaagaagaaggaccacatgccagacgatttgtccgtgcccaattccaatttggtggacctccagtggagggaaattgcttgaagttaccaatggagtggatcattgt

SEQ ID NO: 249955 - DNA, 375 bp, Gossypium hirsutum
gtccgtgggttttttcctgggttgttctttttgttactgagcgacaattattcctagtggaagctgatctttatgtttcttatcaaggctgccattggttttgcatctgttcttgtttagtctgatgtttcccttccatttggttgctaggtgtcaaccatggacgattacccttactggattgttggtgattgcctgtagttggctaattttacgttcacttgtggtcacagcttttgccacattggggatatgcacatggtggtacatctttctatattcttatcctaaggcttatatggaaatgatagccgagcgacgagagagggtggagaatggtgtagaagatacaatttggatgagcaagaattcaat

SEQ ID NO: 249956 - DNA, 384 bp, Gossypium hirsutum
cccacgcgtccgcccacgcgtccggatttcttctatgccccaatttcgacgaaggagagggaatctcttagcacattcgcaagtctattttgcaggtatgcacggcgtggagaagccgttcatggtgacgtgtcgacgcagagtggcgcgcgtgaaatgtgaagccactggtggctgtttgcggtacgggggaccctttgccctatggttttctgaaaactattaaggagatgggcctatcgggcttgcttaggttatgtttagtctaggtctaggcttttaatgagtatttattaattgggttagctttaataattgggctgatgttttatttttgttttgggctatgtaattaagtttattgggacttttgggccagaagtg

SEQ ID NO: 249957 - DNA, 420 bp, Gossypium hirsutum
ggaccgggaacggaccgggccagtcctgacatgcacttactcggtgcactgtcagattcatgggcggttgtgccaactctatctgaaaggccggctgctgaggctgatgcccatgctaaaggttctatgccctcctttgctgctaatccatcagcatctaactccggaaatcagggttttgatgatccatttggtgatggtccttttaaggctctcccttcaggggatgctgcctcagctcagcaacaaatattgactccggcgactactttccaggctacaatgagccaaaatatggaagcagctcagccaccttctgtaaaatctgagattgtcacaggcttcgacttcggggaatcattctctgcctactccactctcaatgcctcaaacagtcaaccttcatcaggaaatttccag

SEQ ID NO: 249958 - DNA, 308 bp, Gossypium hirsutum
tcggtcgtattccgttttggatctatcattctccaaatccccgtaaaaacactgaaagacagctcctttgatttcgagggaggtgtgtatatcttcctttttctacttcgattgtcttctcttattaatcgtacacatttctctcagacatgaaaaatggggctatctttcacaaagctattcagtctgcttttctccaagaaagagatgctcatattgtaggttggacatgacgctcttgtttaaaccacaattctccacaagtctcaagttggaagagattgttactaccatttccaccatacttt

SEQ ID NO: 249959 - DNA, 247 bp, Gossypium hirsutum
ctggtctttgtattggtcatggaggcggacaacgatgccaaaaagcagggtgtaacaagggtgctgagagccgaactgtcttctgtaaggctcatggtggagggaggaggtgccagcacttgggatgcactaaaagtgctgaggtgaagaccgacttttgaatcgcacatggcggaggcagacgatcggttttttctgaaggatgcgcaaaggctcaacttttgtaattaatgaatttgcatttgca

SEQ ID NO: 249960 - DNA, 199 bp, Gossypium hirsutum
  unsure (1)..(199): unsure at all n locations
tcgggaaattttctcttatncactatcctattatttttaatgattggcgttaaaaatgcatagggatcctcgtgatggtttgcaccatggtatgatggatgatgaaaattgtctgttggtacattttagatattttgatgtattttgatcctaatgtgattatttgttctttttagacattatcaaagttacgttttac

SEQ ID NO: 249961 - DNA, 217 bp, Gossypium hirsutum
gaggggcggggtaggcgtacgcgtcacacatcctcatgctatggtgttttttttctaacgacgacaaagccagggcgagtgtttatgctgctccgatgaccgactacacacaaaccgggtactttaaagttcgtgtaaaaggtgcattgccttagatccaaccggcttacgttcaaggctaatttggtgccgaagaccgattggaagaaaatttaag

SEQ ID NO: 249962 - DNA, 217 bp, Gossypium hirsutum
caagagcgtatcccacccccatagtgaagcatgccttttatgatctttgtgacgggttttttctctataatatcatatagtaatatatatatatatagctctctccattgacatactggtcttcaattgtagttagttttttttcatttatgtttcggattgacaagttaatgattttgtatatatacctagttaccatatggaaatatgcaatttt

SEQ ID NO: 249963 - DNA, 371 bp, Gossypium hirsutum
ccattctatccttcaatccaggtttattggtcctctcctctaccaggcaagaacatgccgatccagatctgctcccatcaggtaaacgttttactctctggcaagagcactttttgccaacttatgcgcattcgagttctatgatctatgaatgtgtggaaaatctattttctggaaacatgatttcttattttggatatcgaagattttagccccaatcattgatttattgattgtattcttttgacattttttatgactggtttggcgtactctatttatctggttgtttgcattattagtgagattcctaactttatacttttcaatcattgcttacgcttttacagcgaacgaggaagaaaccttgt

SEQ ID NO: 249964 - DNA, 166 bp, Gossypium hirsutum
ctttctttttcttgaggtctccaaagcatttctgttatatcggtaattttctctgaggatctgacgaaaaaattcgaatagattaaaacttaagaatgatcaaaagatgatcgttagagcatttaagaagagttattacaccaggtactatgagatgctgggtgtt

SEQ ID NO: 249965 - DNA, 360 bp, Gossypium hirsutum
gaagcatttagtttcggaaattgtcttattgtttctaattcggtatgtcgtttgcaggaaaatattcccctttcccttccccttcccctttccctatcattgacacctgatcttctacttgccatcagccaacatcgattcttaacaccagacaccggcgttcatcaagtctgggaattctgccctgaatcaggaaccccgaaagggctttctaaggtggaaatggctcatcagagttttcgggataaccgtttccataaaaaacatagttctaatctttctatgagaattcgggttaatctgggtgctgaaattgggatttggggtttttttgataataagttgtcatgtaatttgttt

SEQ ID NO: 249966 - DNA, 347 bp, Gossypium hirsutum
cgtgttttaaatagcctatttatatactttgaaaaaatagattttcccctgccacgaaatccttttacaaccatggatccatggctgaagctttctgtactagtctttatgtggttttttttcaacagccaactctccttaggagcagacaccatcttagcaaatcggtctttttactgtaattagacctttgtttcatcgtgtggaaacttcgttgtagggctaattcaaaccaggttattctttcaaccagtacatatgcaaattgtacggttacatggtcactcaacagaccgtattttggtttgcaaacagggagataccagttcttgatacacattttttat

SEQ ID NO: 249967 - DNA, 348 bp, Gossypium hirsutum
  unsure (1)..(348): unsure at all n locations
gtagngcttcaactcatcattttaattgaagaatctgttgctgtgtttttgctgataaaccactccaaaggagattgaccctaaacctgatttttgaaaatgccgccctcgttctcgttaagcaaggagctgtagctagatttttcgagtccgaattcgcttgaaaaaggttcaacgtcaaataactgtttttcaagaaatacaggctctcctctcttgattttaaactcactttcaagctttttaaacgttgaagtttagtcgcttgactcaatgctagtcggcttgtcgtgttatcttcaatttttaactctctatttcctgtgatccattcttttacttttgtgt

SEQ ID NO: 249968 - DNA, 158 bp, Gossypium hirsutum
gcgacactctcccaaaccgtccgtaagttttattaacccactccagggggaggggtactcaaggtctaggaggatccaatactccaacaattcaaaaaataccttacagcactgttccgcccttaaaaattgcctcaatctaagcttcaaactatcac

SEQ ID NO: 249969 - DNA, 250 bp, Gossypium hirsutum
tttctgttcatttatgatctacttatctttttttgtccatctgaacgagggcctccaccggaagatgaggccaactgagttccgtgtttataaggaacttcagcccttcgatgggaacaaattcaacttcatcaaagtatttcttcgaagaggtgcttcttatatttgaatctagtgaatatggctaagctcatttctattcaaccatttctcattgatgctatattatttttcagagtctttgccattt

SEQ ID NO: 249970 - DNA, 227 bp, Gossypium hirsutum
gttcgaggtgtgaatcgcgttacataggacattacatcgaagcccccatcgacgagtctaatgggagtgatgccatgccctatagcaaaggtgatatatatgtgtctttattcgatgctagcattttttaagctacattatctttctcaatgaaataccaaatttctattggaactttttagtaatatttagcattatatattctttagtctagtggatttcatttt

SEQ ID NO: 249971 - DNA, 308 bp, Gossypium hirsutum
cccacgcgtccgggataaaccagttttgttaatctcatgttgaagatcgggaacaataaaacatctcccaaagatgctttgcggaagagcaagtgagaaatggcggttgcaacacgagctatgtgttttttataaaaaaaaaaaattctatatctacttcacataaaatctttgttgctggagctttttcatttttcctatctttatacgaatctgacatctatgttctgaaacatatttgatttgtacgagtgattatgatttctctaaatgttttgtatatcgtttacctgaaagttttatttttt

SEQ ID NO: 249972 - DNA, 364 bp, Gossypium hirsutum
ctcttttatgtctgaggttaacaagggacaaaataaagttccaagagagtctacatactgtaattataatttttgaggggatgtataatttccatagtttcctatagaaatttttagttcggcgtgtaaactataactactaggatccaagttagtctcctgtaatagtttataggtgctcctgacttagaaatccctggacagttcccttctccatacttgaaaatcttcatgtgctgtctccgccagtggaatctgcaagattttttttgctacatccaatcgaaagatcaagaaatacaaaatccggggctagaccgggggaaggccaagctagtagactaaattcaactagtcacccact

SEQ ID NO: 249973 - DNA, 326 bp, Gossypium hirsutum
atttgaacacaaacctgctggttttatgagtttgccaatgggctgcgtgtcaggcgaaatcacaagttaaacaaaacctttcccaccaggtgtcaaaagttccttccccattggtgaattcccaaccagtggagcaatttaagagcagcccttgcatagatacttctgagaatgcatcgacttatggacctgcagacggtgcacctgaggaggtagaggcctcgcagtgaaatctagaattgttttataaagagtcatcagcgtcctcctagttacacgacctggtgccttaaaacattatcatttcaagaatttgtggacatttt

SEQ ID NO: 249974 - DNA, 179 bp, Gossypium hirsutum
ggggcgagccacgctttcgaccatattcgaaaacctaaagattttccttccaaaaccaaacctttaaatatgggcaggagagagtagagagaactcacatatccacacacttaagatcattaatttagggttccttaactctattccccgattacccgattccccaattttacagatca

SEQ ID NO: 249975 - DNA, 184 bp, Gossypium hirsutum
gttcttttccatccattgtccacagttagtgtttctaaatttacaagtcatttagtgagaggatgggtctttgtagccggtattcctcatacaaatggttgctaatatttcatccttttcatgcatctttcaaccatgtttttgtgttttaacgtatttgtatagatcgtttagctattttaat

SEQ ID NO: 249976 - DNA, 257 bp, Gossypium hirsutum
tcgcccactctttctgcaattatcatcaaagttttctcagagaaaccccatcaatgggggggtgacatcaaatgatgttgcttttcaaaggttctgctccatcaagtgtttaacccatggcactgtttttggttccaagttggcttatatttaatttggtaactcagatacacattgcccatgtctatacatttgtacatttcaccatacccttcttcagaccacatattctattattgtttgcattcaacttttat

SEQ ID NO: 249977 - DNA, 174 bp, Gossypium hirsutum
gcttaagaaagataagttttttttttatgaaaacactaacaataagcggggtggagatggatgctgctttgtctacatctagtgatcattttgaacctcccaatgctacttgtgttcaggcttgaagtttataatgcaaaaatacttcatgtagatggattttccaaaattaca

SEQ ID NO: 249978 - DNA, 308 bp, Gossypium hirsutum
tgtcttttgtaaggtttttttttattgttttgctaaagaaatgaagacgtgggggtaccatttcattggaaattccataaatcctcttctagattcttctttgggggcataccctattcacctttttgtcttccaaggatgaaataaagtgaaagcattgcttggaaatatattttaatgacttgatgtgcatggcgtactccacctattaagaggagacttagttggataacactaaatcggaatggggagggaacttacggatgttgacatggtcggtatggcaaattcgttttgtgaaaatcaaa

SEQ ID NO: 249979 - DNA, 327 bp, Gossypium hirsutum
cccacgcgtccgcccacgcgtccggaaataaaaaaaatgaaaaaaatcccctatgtttgctgctattttcttttctggtatttctgctttttccttgctctctctgcttttgcgttcgtttgcttgtcctttgcaggtacgggtacggaggctcccgtggcacagtacatgtggggagagaggcgcacgtgaggggagcggctcgaaggcgcggttcgtgcgagggcagagcctgcggcgcctagatcttctggaaaccctagaagttttctgtttctgatttgggttgtgtggtgttggtccatttgggccgatttggttttgggt

SEQ ID NO: 249980 - DNA, 373 bp, Gossypium hirsutum
accaattcatcaactaacaacaacctacatggaaatggggatcaaagaagccaggatggaagagaaagtgacggtggcgatgttggttcccccgcatctcagggcgaccccaatcaccagcatccattcaatgagaaggaagaagaaggaaaaagaggggcttcacctgttcaatcgcatgtaactgaggacaagtctgtggaagaagccaatagagatgcagaaagctctgagatatcgagatcagatgatgttttctctgttaaagttgaaaatgagtcgggacctaaggaggatcttgagagcacgcttgtcgccattcggcacattaagcatgagaagagctctagtagcatcagtagcaggagcattt

SEQ ID NO: 249981 - DNA, 346 bp, Gossypium hirsutum
cccacgcgtccggtcgtttaagattcttgtcttctgtacgaagtaaaaccatctgtgatgtcaacaattataccccaaaggtcgtttctccctcgcccttttttcttttgctgcgtaactagagttcaatttgatgaattttacagatagataaggttgtagcctgaatttctgtggaagtacgatcattttatagaaaagaaaactgagtttaggaaaaggatggaaaagcagcaacctggttcctcagacgttggtggtaaatgtcaaactgataagctttctgaggaaattgttcttgccaagagtggtcttgtaaatagtatcttcgactctaactttattg

SEQ ID NO: 249982 - DNA, 333 bp, Gossypium hirsutum
gactttaaagtgatagttttgttttcccgaaatcacgagataacaagacaaaatggaagcaaaagcagataacattacatctgaggaaataataatatcgtcgttgttgcagtcttgtccatttgcttgaagctagttctattcaaaacccagatcaaagaacacaaacttgttccaagcataaaacattcaaccgtagtttacagttggtaattgagggtgttgtcctggggggcaggtgtgaaattccattttctgagaagaaaactttctttgcccaaacaacctgtatcagaaacctagtggccatgccacggggtgaatttaaaagct

SEQ ID NO: 249983 - DNA, 369 bp, Gossypium hirsutum
gtaaatgtcaatggctttgaaatgaccgaagaaccttctgagcccgaagttcaagatagcaggaataaaaatctgtttgatggtggtcgagtagaggcttccagaaacagcagcgatgctgaatcagagaagcagaataagaagaatgatcattttacaaatgacttcatggatgccattgatgggaatatggatatggacaacccttctgtggttcacaatgaaaaaatgtctacttcgaaaaatgtagctgagagagtccaacatgattctctgctaaagaagattacttctcaggcagaacatgatttaaatggcacgactgatgttgctaagtttgaggtggctaacttggcaggtcgaaacctt

SEQ ID NO: 249984 - DNA, 370 bp, Gossypium hirsutum
gttgaaatctttgacaaacctgaatttgttgaacttgagttacacatacgatctgaggaaaatcccatcgcatctgatatctagtttttccaaattacaaatatttagaacatggtgcacgacaagtggatattatccaaaggaagataatgttctgaatggggacaatgaaaatcttatagaagagttgaaaagtttgcgacatttgaacatactaacgataccaccaattaaaagcttgtttgctctagaaaggtttgtgagcttccacttgtttcaatgttgcacccaagcactacatttgaggcatcttagagagtcaaatgtgtttaatggtttatgcttggaaaacatggagcggtgctagaga

SEQ ID NO: 249985 - DNA, 331 bp, Gossypium hirsutum
ggggcgacgccacgcgtgccgcttactcctcaccatggcaataacctttcttcattgactccactaccggtcgccaccgtctgggtttcccaactttggcaatcagttgactccgttttcacatgtctgtccgaattgggtattcggaaaggaaacatcgtcatcatcatcgcaccaaactccattttcatacccattgtttgcctctctgtgatgtcttttggagctattataaccactagcatccccctcaacacgtctcgtgaattcgtggtacaaatggctgattcaaagcccgttctcgtcttcaccacttttcaagtcttcccaa

SEQ ID NO: 249986 - DNA, 346 bp, Gossypium hirsutum
tctttacatctttttgaaatgcttttttttgaagaggaaatgctttctgcgatggaggggaaacagctcaaggagtggggacaagcaatattctcaggctatccttgacgatcgcaccaagaaagcagaggcatgtcatcttgatgctgcacctcgtgcacggtatactcaacctgctattacctattacttgcgctacattcgctcaaactgtttttgaacgaaggtcaaatgtatcttaagcacatgaccacatacaccatctcatgatctttttaccacattgtctttttttgtgggatcctaacatgtttttgtaaaaggtcggcattacaagtttttcaac

SEQ ID NO: 249987 - DNA, 152 bp, Gossypium hirsutum
acccattctttgtctgagccttttttatctccaatcacaatttcaactaaagagttcctttctatgaagccaacaatacctaccagtcgattagttatttatgccttctcctattaagaatgctaacaaataacccacacttataattatat

SEQ ID NO: 249988 - DNA, 210 bp, Gossypium hirsutum
cccacgcgtccgcccacgcgttttttcacgcgtccgtccacacgtccgggtgaacgaaccggtccatctatgctgagttttcttccttcctacatagcaatatatttgtgcttttacaagtaatgatggataaaagctgatgtggatatttgttagtttagaagaaaaaaagggtaattttctggggggttcaatagcctaattatcatg

SEQ ID NO: 249989 - DNA, 317 bp, Gossypium hirsutum
gttctatgttatgcaaatttagaaacagaaaccaaataatttcctggtctttgactcttgaactctctgaagcctttggttgatctcgcaaatgggttcagccgtttggttatttttggtagaggtttctattcatatctatatcgttgcagctgaaacagaccctgatgataatagttcgctaagagctgtcatgagtgagtggaaaaatgtaccatctaattgggggagaggggatccttgtgatgattaatgggttggaattgggtgctctggttcacgtgtgatcttcatttatctgtcaaacatgatattgg

SEQ ID NO: 249990 - DNA, 200 bp, Gossypium hirsutum
cccacgcttccgtggacgctttgtttgcaatctcttttttttagagtggggggacaccttatattacattgggttctatcggtgatacttaaatgacacccacccatgtctcagatgaggaagcctacttattcgttatgcatcttgccagtgcttttactcttttccattgacctttaatcatccattgtactagtctt

SEQ ID NO: 249991 - DNA, 256 bp, Gossypium hirsutum
tcgatccgattcaacttgcgtcattttcccacccaaggtcttccgagttttggagaggccggtgcatgaattccaggggcatcagctctcaaattttggctctttcctggtctaagaaagggtttttactgtcatctttctgtcgacatgaccgttcgtctgtggcaagtgggattctattgttgctcgtgggttttttcttataatcaattttgttacttctgttgtcttcatccctgtggtagacttttttttc

SEQ ID NO: 249992 - DNA, 365 bp, Gossypium hirsutum
cccacgcgtccgcccacgcgtccggtttagatatgatttcagaaggtttggatactttaaagaacatggctcatgatatgaatgaggtaaggctgccttgattgtcatttgaaactattcaatatgatgtattgtaacatttatgcttgctacttaagtgttacttgtgatacgtgcaggaattggataggcaagttcctttgatggatgaaattgaaaccaaggtggataaggcagctggtgacctaaagaataccaatgtcagacttaaacacactgtcactcagctgagatccagccgaaatttctgcatcgatattgtcttattatgcatagttttgggaattgctgcctatttatacaat

SEQ ID NO: 249993 - DNA, 225 bp, Gossypium hirsutum
aaaaaagttcccaaaaagaaaatttttcttcgcaaatagcagcaatggagctggtgaatcgtctagggttcgattgctatgatcgtcttcgacctttctatctacccgttttccaagagaggcattctagctgaccctttttgaatatggctgttgaataaaccactaacagcacttatgagttttcattctattagctttaaatacagttggagttcctacact

SEQ ID NO: 249994 - DNA, 187 bp, Gossypium hirsutum
cgcgattattggaattcgccgagtgactttcctggcccgttaaagagatagtgcggggattaatgcaaagacctaagagaggagaagaaggataagatctacactttggggccaggcgggtcataccgtctaactggaatgagtaacccgcttggaaatataggaatactagtgtagttcatgattt

SEQ ID NO: 249995 - DNA, 214 bp, Gossypium hirsutum
tcgttggcatctgccatgttccgcatattgtatgaagccttcgttgctgagaaatacaagcattggatggttgtgcgttggacgaacctatgagatgcagtaagaggagcctatgcgttgtcagatatacaaaatcaatcttgaattcatagaaaacttcaataaaaagtggtattaaacatatttagttaagtaccaaagtatttgctttctt

SEQ ID NO: 249996 - DNA, 309 bp, Gossypium hirsutum
ttcttccactcgtctctccacgcgtcctttttttttcgcctgcaatgtatgatatgatgaggattaaacataagcttgtgagcataatgtgacccatctgctttactacttgagcacaatttctgcaggtgtttttaaaattttcaggtgattaattttgttgggaaaaagaataccttttaacttgcatatcttcaagaattaagctgtttgtttttgattcaatttcttaatttacccttggtagctacttttcatttattgattccctctacaaagtgtttttttattttttggaactataaataa

SEQ ID NO: 249997 - DNA, 143 bp, Gossypium hirsutum
gaactacatgtgtatgagttgaattagatagatcgtgggagtacagcttaccggggtgtgagtcagtaatcagtgaactcactgggtgatcttggcctctttaacaacaaaatatataggggggacttggtggaactattcgg

SEQ ID NO: 249998 - DNA, 192 bp, Gossypium hirsutum
  unsure (1)..(192): unsure at all n locations
tatgtctctaaatggcctgatttttggaggaattttgatatcagagtcggnggnntatcttattctgttagcaacttttagtccatagtctctgatttcaattctttcaacactgaaggttggaaaattggtgccaccaccaacatcatatggttcggtcccatttctccgattaatactggtatttacttg

SEQ ID NO: 249999 - DNA, 147 bp, Gossypium hirsutum
  unsure (1)..(147): unsure at all n locations
cccacgcgtccgctcttntttttatataatggattgaaattatgattgaagctcaaggtttctcgcgtaatttctcctccaaccaaacaaagcccaaaagagaaagtaaaacagccacactttccaagtgtaaatggctcatgcttt

SEQ ID NO: 250000 - DNA, 186 bp, Gossypium hirsutum
cccacgcgtccgtgatgttgctgatccatgtaggaacactgtcaaaggttcacggagtattgatggggacgacggtacaataattgagaaaacctgtgtgttgcttgaattcattcccacggtaaattcatcaggaagcaacgacactataaacagatgggagaacattgggcctcttttaaaatc

SEQ ID NO: 250001 - DNA, 226 bp, Gossypium hirsutum
cagaatcacaattactagaacctttttgagcacgaatactaggataccgggggtgtttccaaagatatggcatcggtcaatcaattcgtatacgaggaccctgttccttcctctttagatgcgggttttaatgcttcatataatgcccccttgtacttcaattcagtcctgggtagtaacctgagcaattgctccgcctattgttggggagaacagggtgccaaaa

SEQ ID NO: 250002 - DNA, 269 bp, Gossypium hirsutum
tgataatggttgagatagcctatgtaacagaatcgtggcgaagaaagcgggggaattcaaatggcctggtgtttgtttatcttaaattcctgccataaacccggtttatgataaacctgatcatgttcaaatttctatctagcctatgccaaattatgcatctgttaatgaaccttatcaaatctgcatcaaatgaagtcctgtgagatgtgtcaaatagaggaaagatacattttttcatatcacaaccttcttattttcagtattcc

SEQ ID NO: 250003 - DNA, 300 bp, Gossypium hirsutum
aagctcactgccggtttgtttagaatgatttagcgaattttctgaattatttatgaatcgctggaatttctgttattttttcttgagttcgccagtgttggtacacatgtagaacatatttatatattaaaatactgaaggttcatgatcaggaatacattactgacccatcacctgcccttttcaaaagctccaagaagggtgttttcggctaatccacctgctgaaaactttgtattgagtagagatcacggttaaaggattttatttgtggtaaagactgttaatatttctaatttt

SEQ ID NO: 250004 - DNA, 314 bp, Gossypium hirsutum
acaccatacggacagaacacttgctgctagagaaagccctggttcggctataccagagcgctatgctcgacaacctagcttttaaggttgacactgatggggataggaatagggaagttgaagtggagcgaacatcaaggatgagtaggagggcacacttgggaagcgatgaaacggctgactcaaaaaagcttatgaactttccatcctctgtgatgctgaggttgatcttacattttctctaatcgtggaaactctatgaattttccagttccaacagcatttgctggttcactagagaggttcaacaggtg

SEQ ID NO: 250005 - DNA, 142 bp, Gossypium hirsutum
cccacacgtccgctcaagatctagttataagaactatgaagcgcttgctggagcggggttataatgatatttagcacgactaaatccatgctgataaacaggctacattttgaatgaccgtcgatcttgcacggcaggagta

SEQ ID NO: 250006 - DNA, 193 bp, Gossypium hirsutum
ctttatcctaaaaactacttacatttgccgtatccaccaaacaagttaaggaaaggagaggcaagtatcaccaaaccatggggtctaaccgctagcctcgaaagactccctagttaacctaaggtggttcctgtgagttacaacgggaagacctactgtttactaattgtactttcctctacaaagaactgtc

SEQ ID NO: 250007 - DNA, 127 bp, Gossypium hirsutum
cctagtacaaaataggttctgtttagtaacaatagatggtaagcgtgaggcgtgaggctgtgtaagaccaaacctattttgtctcacatgaaaacccaggtttttatgtagacctcagggacaaaaa

SEQ ID NO: 250008 - DNA, 233 bp, Gossypium hirsutum
ctttattagtttttattgctctacattcttgacttcctacttattcaatatttgtggggagaggtgttcaaagtatgttagctatggattagaaatggtgcttacagttcattgcatttcatggtttgggttcattattactttcttgttgtcagaaaaagaaaattattcatagttgcttgtttattaattaaccatgctttgaatgtagtttgggtataaaaacttatgat

SEQ ID NO: 250009 - DNA, 184 bp, Gossypium hirsutum
ttactaagaaccctaattctatctttcctaatagactaaaggaaggcaaaatggtgggtttactttaaagcccggccataaacttccaattacaccatttttattggtcttgacaattaccatatctagtagctcatcaaatttcacttcatctaatatatttacctccatgttgatataatat

SEQ ID NO: 250010 - DNA, 314 bp, Gossypium hirsutum
ttggacgcgtggggaatagggacatttactattcagctcttctctcttttctgcgtctggtcatcaaaccccaaactcttaactagcctcttcctccttctctttactttaatttcattttgctttcacaaattttataccagagcttccaaatgattgaatttttaacctctcaaattaaaatcctttcctttttctcgtttttgttgaaaatttgtttaaaaaagagggtgattttaaaacaatgtattctgattcatggagagcttgtctttcttcagtttctaagagatatcaatcggctctttcaatta

SEQ ID NO: 250011 - DNA, 376 bp, Gossypium hirsutum
gtcatcccctccaagttctgattgcctacctgagagcatatcctttctcctccgtctatcaaatcgaaattgacttgcccatcatctcattccttcttttaagatatctagctttagcaatatgcttccagatgatgactcccataaattctcgacttcttcattgaaagacttccattatgcaccatgcttcaaacttgtaagctttagtgttcaccctcttttcgacccgcctagtagtcattaagagaggacaatgatccggacaagagtgcggcatatgttgaatagtgtcctctgtaaacaaactcattcatgcatcatttgcaactttgcgatcaagttattctcgaatatttgcttccgggcagatttt

SEQ ID NO: 250012 - DNA, 375 bp, Gossypium hirsutum
cccacgcgtccgttggatctaaagtgcccgccctccctttctctcctccaagagccaacattgcacggctaccttaatttaccaatattaccattactactaaacgcttaaactagcattttttttcatacctctatacagtaatatcatagccggtcgggtataacatgaaagtacatgacaattcagagagacacacacacagagagagagtgagagccagaccgagatcttcgattgattgatacccttgttattatagaaaaaaaggtacagagatcaaaggaggagtgaatggccaacacgagaacagcaaatgttaacatgaagagcgggataccgcactggggaaattaccaatttgggcggaatttc

SEQ ID NO: 250013 - DNA, 335 bp, Gossypium hirsutum
gcaaaccctaattcgaacgttgataaaaagaaaaaaacaagcgaagaactaaaaatcaagcgaaaatctcaacagaaaaataaaggaatgaagaatgagagcgcgatgtcgagttcggtcgctgtatgtaactcccctgtgttttctccgtcgtcgtcttttttctgtggcaaaacttcgatcatctctcagtcgccggaagcgttgaacttgtctttgacttacctcaagccttcctcttcttcttctgcttctccgtctccttcctcgccttcttcgccttttcggattcggctacaaaagtccacgttttgggtctttttttgtcaacgcca

SEQ ID NO: 250014 - DNA, 196 bp, Gossypium hirsutum
catgaaaagagcttttgcgggaatgttgctgcagagagaacagatgtgcgtggggacggagaaactagtaataaagattgacatctgtgagactgcagctgatgggattgtcatccaccaacatgataataaccggcccgtcataatgcgcatgcctatacgttctaatgcaagtttataggatccatttttttgg

SEQ ID NO: 250015 - DNA, 157 bp, Gossypium hirsutum
gaccggacgggccggggcgacccacgcgtcctgtttgatgtaaatccatgttttatttggacacatgcctataaatgaggcgaagggatgtattcagaatatgcttaccatatagtacatacttgttcagctacataaacattgaggttcttcgata

SEQ ID NO: 250016 - DNA, 377 bp, Gossypium hirsutum
  unsure (1)..(377): unsure at all n locations
cggacgcgtgggcggacgcgtggtgttttgatatggagactgttaatttgaacgagtgcaatgatctctttttggaaagtcagntgttaagggaagacattagggatctgtacagaaggtagatgctgggaccatgggctgaggcggccatgggcagtttccttgtggtgcacatgtattttcttcttttgtagtctgtctttggatgttttcccggttaacttttgaaagcatctaggcagttgcttgagagcaatatgaatagattccttgctatagaaatgaccttttttgacagtcgttggaaactttatcctcgtgttcaaggatctttagtgcatgcaggaatcgatatagatgcttactatttgttcatg

SEQ ID NO: 250017 - DNA, 300 bp, Gossypium hirsutum
gaaggggggggggaccacgcgtcctccactctttcgtccactttttttttttcttaactcacaaagctcaggggtgggggaatcagtttaaccggtctccaaaattaaaaattacatggtgatgccaacacagactgaggctaccacgatccatggctcggacccgaccggtaatggttcaaagtacaagggtgttaggaagaggtaatgggggaattgggcattcttaattcgactttccaacaggctgtaaactgtatttggtttggttacttactatctcgtcggtataaagccttt

SEQ ID NO: 250018 - DNA, 208 bp, Gossypium hirsutum
tatttgtattaagaatcgcttttttttgatcagtgaggagaaaaaaaggggcgggttgtggtggaaactgcggttgctactcccgttgtaatgtgcttctaattgctgaggttgtagcaagactaaccctttgattgaactttgctgagcaaaccacatccgggtcacttgttcttggcgtgtcaccccggaaagtgctctttgatgg

SEQ ID NO: 250019 - DNA, 368 bp, Gossypium hirsutum
ctaagatggaatttcccacttatgatggggttggagatcctttaggaggttggaaagatgcgaaaatttttttggcaatcaacagaccaacgaagaagacaaagtcggcctagcttcattccatcttttaggagaggcacaattatggtttgatcaaatcgaaaatgaggaggcatatctggattgggaacgctttagagagtgttgtcatatcaggtttgagccacctatgagtaataaccccttgggggaacttgcaagcttgagacaaactgggacggttggagaatatcaacgccatttttaatcactactcgctaggactactgatcttaaactcttgcaacaagtaaacttttttactgttg

SEQ ID NO: 250020 - DNA, 349 bp, Gossypium hirsutum
cgttaatcgcggcattcactcaattgattctctatgtttagttacatggaaagcgggcgtggcacatctttttgtcctgaaaatttttcttttaacaacaactacaacagctacttcttttgcattgtggatctggaatctgggtacaacggatacaccaagaggagggttagaaaagactttgaggaatctattgttagctgatagagagggtttggtgatatactttactcgatttcgatgttgtatgaggaagcaaagcaagaccagttacaatgggtgactaaccgtgatcaatatagagcttgctaccaagccaattacaagggttatgtttatgaaatgaatg

SEQ ID NO: 250021 - DNA, 149 bp, Gossypium hirsutum
cccacgcgtgcgctaaactatcattatatgcccaccagaataaccacgggtccgactcttatataccatacaaagacttaaagacatcttgtctcatcttccaacttcaaccaagacatagttgcatctgggaactacgggagggacat

SEQ ID NO: 250022 - DNA, 373 bp, Gossypium hirsutum
gctatccataatcatcatcatcatcatctttgagaagttcccatggctgataaatctgcttgcaacccggacctcattattgctcataaattccccgatagatgtagctgtctatgccttgggtgttggagcatgtggtaggaacgccgtcgatactgacgaacttaaatacgtttaccatgaaaacggacagcagtttatcaaggttttgccaacattttctactttattttcacttagaggtctgccacaacttagtggtgtgcctggcttaaagtttgataaacgtcttctttgcatggacaacaatacatagaaatacacaagccacttcctttaaatgcctctctacttaacaagacaaaccattgca

SEQ ID NO: 250023 - DNA, 384 bp, Gossypium hirsutum
cggacgcgtgggtttacaacgagagcgctcagttgaggtccgaatcaaaacagttggagcgaaccaaattaacctacttgagatgagcttcaataaattgaatgaaccaattgataaaaggcagctggatctcaataccaaaagctcatctggcgaattaaattctgaagctgctcatcaaaccggcatcacctctaaaactaatgatcttaagaaggaaagtacagagtatgaggcttcaaacaggatttccaagatctcagatggcaatgataaaaccactgatgattctaaagaagtactgccttctactgaacttgggtttaaaagacttagaggagctgaagacactgaggccatgttgagggatgagcgaaatgtttt

SEQ ID NO: 250024 - DNA, 378 bp, Gossypium hirsutum
gaagaagctatcatctcagctggaaactagtagtgttcgggatgaattgcaggggtcggagctcattccgcagtctgaatctggaaatgtggattcctgggaagtgcgaagttctagtgtggcatcgagcacaagttggaggagaaacatgattcaaagatctccaagtgcttctgggggcttggcaactcgtgctaacgcaagcaggtatgggttgagaaatttaagatgtaagtccatatccgatgttgtcccgtctggttgtttatcatcagattcaagcattagaagaagggaagacacggttaaaacgagaaactctgatggagagggaagttcctccggttccagtaggggaaagatgttaagtgggtcatt

SEQ ID NO: 250025 - DNA, 314 bp, Gossypium hirsutum
agaacgagaaagtggggatgggtttagtagggtttttcgagaaaacagattcggggggaaatgaagggaatttggaagaaagtgaaggaaaaaataaggaaagaaatgaacatgaggaagaagaagctgtcgttttttataggcagcagcagcatcagcatgcaacgttcttgggtctcgatcttaatctgcagccgcctgaggaaattgatttcgggaacgagtttggggggtttgattttggtgttcccgagtatcaatcgtataattttatcgtgtttcatagttgttgtttttttttttcttttttaatt

SEQ ID NO: 250026 - DNA, 225 bp, Gossypium hirsutum
cccactcgtccgaaaaaaaccaatcaaagatttttttttttggtttccggatcgagttttccccttttggattcgattaaatctctccccaaaccctaccatttttcattctcatggtgtaaaatgtaagtacgaatctcttgccgtctacaagaaatacttactttacacgccgtttcaactgaagaatcactcctcaaaaccctagaaaatgtcgggctgatt

SEQ ID NO: 250027 - DNA, 258 bp, Gossypium hirsutum
ccctctctgaattgggttttctatcgcgcgcggggtctctatttataggtatatgtccctctattacttctccacaaaagatcccatattttttttttagatcactctctcctgtgcttacgataataacatatacgtattcaccaatgcatgaacttccgatccaaaggaattttgatccctaactaggaatactttaccgagtttgacccacctgattgactcactgtgtgggggcttctacatgttggagaaact

SEQ ID NO: 250028 - DNA, 162 bp, Gossypium hirsutum
cggggcgggccaggcgtacgcataatttcgcaagtttacaattttttctgctccatggataagattaacttagtgctggcaatgggtagcgccatcatttgatgctaatgaatcctttgctatgatgatggctccttttgttgcccacgtagagtccactgg

SEQ ID NO: 250029 - DNA, 359 bp, Gossypium hirsutum
gataattttccaagtttacagattgcatcagctgaatagagctgctcaactggggacagccctgtcattcacagtgaaaggtgctgaaatgactacatacaacatggcaataaacagctctttgggaacacttttgaatgtactccagtgccttggggttatctgcatttggtcactctcaagtttcctcatgaggttctacccttccaccaccaggattacatagcgggaatgcattttatgttcagaaggttggtgaaactgtcagtacatggttatttttcgagacgactgcatttgatcttactaaatgtaattaaaaatatattggacctggcatatgctgtttggttacgctc

SEQ ID NO: 250030 - DNA, 162 bp, Gossypium hirsutum
gatggaagaacacaccagcaatctcctttggcaacttcagtgatcacacttacggtccataaattccacacttggccgaacacttatgctcacacgattcgatatgcgagcagtggttacgtgttcgaaagatgctctgacgagaggaggaattttgatatc

SEQ ID NO: 250031 - DNA, 127 bp, Gossypium hirsutum
ctttaagaagctatactacctttttttatatctcaagtactttaccgcgctgtttataaatcaaactgagggtcttcacacactaaaaaattctcaatgccaacatcaagacgatcatatgatctta

SEQ ID NO: 250032 - DNA, 299 bp, Gossypium hirsutum
cgcacgcttgggcagaacatgtcaatatgtttatacctaaattttgggacaatggcgtctttctaaataatcataattatcggaagacacacaactggccctcaacgagtaccgccaagcaacaaggaaaggctgataaaataacttactcatgttcaagagaggactaaacaccttaatatccttcttcacaacttgtgagaaaaaaatgcacatttctatgctcacgaactacttcacaaaaactttgatatttttcaccacacacttatctagatgacttcttgtgcatcttcacc

SEQ ID NO: 250033 - DNA, 264 bp, Gossypium hirsutum
aaatattagcacagttacaaacacttctcgtttgatttgttaaggagagtggttgtgattaaaaaaaaaattgggtaagatcttggagagagagagtcaatgaaagagagagaaagactgtggtgggttatcatcaattcttgtttttgtatgtattattttgggtttttcacctcttccccaaagtaattgtgcatttgatgtgaaggggatagctttaaaaaaggttccaatatttaagctgttttaatggtgaggtggatt

SEQ ID NO: 250034 - DNA, 394 bp, Gossypium hirsutum
cccacgcgttcgaaggaggctagaatgttgggtggcgagttttctaagcaggtgtaaactgtaaagcaactgtttgtggagcgtacggaaaactacgggattccggagcttgagagattgtacagttttattatgaaaggcatttttgaaagtagggagaaaggagtcggagatgatcccaagccttcaattttgaagtttttaatacaatttgcagaggacgaggcaaatttctgatctcatttgtcctcttcacatgtttttatttttaataggtaggctgttgtcaagtccgaattttctcttttcaattcatattagtgagtgggaaaaaaaaacattatttttttcatcatattaatattttattttatttttcttgctcttctttttt

SEQ ID NO: 250035 - DNA, 213 bp, Gossypium hirsutum
  unsure (1)..(213): unsure at all n locations
nccacacttacgcactctttcgagtctatttccgagtcaactcaaaactccctccgggtgtacccaaacagattgcgtaattattcgtcactatagaaccatctgcctttcgctccgctgtggcagctatattataccaaactcacaaagatctctaaaatgtctatgatcatgccggcacagagtcaccgttacgaccctgcggtctatgga

SEQ ID NO: 250036 - DNA, 375 bp, Gossypium hirsutum
  unsure (1)..(375): unsure at all n locations
aagaatttctctagagtttgtacagctcctgtagagtgttacaataataattccatagtaactggagctcaggtacaggtagagaaacatggattgaaaagcattctctttttacgacttcatttctctaccgttttgggaacggtaatcctaagccgttcagaatgggatggatcatttggaattgcacctcagtccggaatcctatctgatcttttgagtaatcctttaacaccacctccaccacaaagaaagccagatacaagctgttcagtttaccctggtggccctccaatgccaaattataccccaaaactattgaaatatgttgatacagcagagatgaaaagagggccacaagatcctnctggatac

SEQ ID NO: 250037 - DNA, 281 bp, Gossypium hirsutum
accaaatttctactttgaaaggattcatcaccgcaagagatcaagctccaggggtgcgtctttattgccactgtcaagcaactgtatatcataaaatgatctatactagcatccattattttgcttggttgtgcaatacttgtttcgtgagcgcttctaatcattcggaataatggatactccgaacattaactccttgagccggacgactttgacacagacaaagtattcactaacgactccactgtctttactcatggtcttcttaatgctggaaatga

SEQ ID NO: 250038 - DNA, 366 bp, Gossypium hirsutum
ctttctttcaagagatttcgttacgttacagtgaaggtgtggccgaaatttctatgctgatttcaagcggcagatctaagtcatcttaagcaagtcctttaaaacgacaaaggttgagtgatttgaaggccagaccggctgctgttatttggcatgttggaacgtgagggcagagcattctcgatgtacaagaggatgccatctagagatcgttcggatgtaatggatgtagaagagaattcagctttctcacaggacagcatggatgtagaaactacaaatccttcaatgtggctttctttcccacatgttgtagtgggaaccctatcttcattcctatttggctaccaccttggggtagttaat

SEQ ID NO: 250039 - DNA, 292 bp, Gossypium hirsutum
  unsure (1)..(292): unsure at all n locations
atggcactataaatgtcaaatgtgttcaaaggacaacctaacaaacaggtggctgagaatacctaagatggagaacatgggtcgcgagtcagcagacatgggggacagagtacatttgggataccattggaaaggagggtgggaagcntgaccgtatgaaaccgacttactttacgagcacggaaacctccatgtacgaagggacttagaagcggatggaggttggctaggcatgtgtgcaacagccgggcactgcgacactatcatacggtgatgccaaggcgatccatga

SEQ ID NO: 250040 - DNA, 320 bp, Gossypium hirsutum
  unsure (1)..(320): unsure at all n locations
atcccacgtgaataccaaaaaactggctacagtctgtgtgcggacactcgatgagtgttgtatcacacattcaggnagatttaaaggaatggtgagaagacagttagatggacggccaaagcttttatcntgaagacggaggggcactgatgtaagatatnnggctgaagatgatagcatctgaaatcagcttctctatctggtcaacttaaagagcttgaggagaagcttaaggtgctactgcttccaagtgatcctcttgatgcaagaaatataatgcttgaagtgagggcaggtactggtggtgatgaagcttgaat

SEQ ID NO: 250041 - DNA, 369 bp, Gossypium hirsutum
gatttatcggatcctaagtgggctgtattggctgataaaatccatgagaaagaggaaatgctttggcctcttgaaccgaagccaatatctgggaagtgcaaattggtcatggataaaatcctttctttgaaaaaggaagatgatccttcacagcttttggctgaatggatacaacttttgcaacctactcgtgttgactggatcactttgcttgataaattggaacgaaaaaatcccggcatacacttaaaggttatggaactggttttgggtgaagagtctttgcaaacaaacgttcgtgactataccaaactgatcgatgcctatgctaaagaggatcgtgtagaacatgttgagaggatccttaag

SEQ ID NO: 250042 - DNA, 367 bp, Gossypium hirsutum
gcttgtcattccagaattttgcttctactgcaatttcgaatacaaccttttgatagaataaaaataaaaacaaatccgttttattacgactcaaaatttgtacatcgatgctctgctattgttgctttttgtatgcacttgccttttcttccctccatgcagctgttaccttttgcctccattcaccaatatctgtagggagtgtatttctctggacggagacaccgcgatgaaagaaaggaggccattaccgcacgactttgcagtcactttctcattgatttaattttagtgtcatggttgtattctgaactttaatttttttcattttaatttcaggggtctggacgtatttctattaaataag

SEQ ID NO: 250043 - DNA, 162 bp, Gossypium hirsutum
ctggccctccgtctacatgggggatttcagacaatcgacaaaaccttaaccgggaagaccataaccctagatgtagatagcaacaacaccatcgacaattgtaagtttaaagccaagacagggaaagcatccaccataccagacgggctatcttcattggaa

SEQ ID NO: 250044 - DNA, 337 bp, Gossypium hirsutum
aagaggactaccgatcatttctacacgtctcttccacattttccagtctcgttgtatctactttattacagaatccagcagctcatgctgcagcaagctttgcggctacattttggccatatgcaaatgttcaaaattctgatgattctcctgcttgtgaccagaaaggttttccttctagacaaatgaactctgctacaagtatggctgcaattgcagctgctactgtagcagctgccactgcttggtgggctgcgcatggactgctttccgtatgtgctcctctgcagactggctgtacttgtgctcctgcatccacagttgcagtaacttctat

SEQ ID NO: 250045 - DNA, 312 bp, Gossypium hirsutum
ctcagtaatctagtctccctttctttaactcattggttcatcaattgcactcttcttgaggacgggtttcgtgagatggatgacctactttttaatttaaagaagtccattgaatatgtcactgaaacaaaacatggaagattgaaattccaagaagctgtagatcaagtgaagctacaagatgggaaatcatgggatgatctttctctcaagctggaatcagactttggcatacttgatagtgctttgagatcaagagaaatctttcgtaaacttggagcaaattgatggcaattttaaactaaacccatt

SEQ ID NO: 250046 - DNA, 138 bp, Gossypium hirsutum
cttcttcctttttttttttttcatgcactccaggtgtttaataaaattccgatattgctttttttctaagctggggaggttgggtatctgcttaaagatgaaaggaagtcatttcttatcttccttaatctaaacatt

SEQ ID NO: 250047 - DNA, 201 bp, Gossypium hirsutum
cggacgcgtgggctgacgcattgttttgttcgtaaaaaaaacccttgtttgtgtctttgaatgatgtgggcaagttcagagggaggtgcaccataggttactttagaaacctctatgggtgccttcactgttgagctatattacaagcatgcacccagaattagttggatcttcattgaacttttcatgataggctattat

SEQ ID NO: 250048 - DNA, 275 bp, Gossypium hirsutum
ggaaggaacgggtcgaccgacgcatgcgtaccacgacatgagcatccacgcgttcgtttactcgtccggtttcttcattctcggctggggcttcattcgcatgccccaatgtttgacgcatcaccaacgccactcttggtggccaacgtcgccgataaatgagtctttcgacctcgattccaaggctgtattttgatcgtgaaggcgtgatgcggtactcacatacttggggcttgcaatatgctagctggcggatgtgcttgatgttccaacat

SEQ ID NO: 250049 - DNA, 369 bp, Gossypium hirsutum
gaacaagatatgagaatagaagcttcagttgctttcacaagttcaagacctctggttcctctattcatcttcctcttctttattccaggtttccacgcaagaaatctgcaacaatgctcttcttcatgcggagatttgacaaatatcagctacccttttcgtctccagggagatcccgctggttgtggtgatgttgattttcaactattttgccagaacaacaccgtcatcctgaatattctaggaggaaagtactaccttaaaggaatcttttactataagcgtaccatccgtgttgtggatgtttacttagcccatggaacctgtggtctttcttacaagtcttttttcattgagttgaagcccccc

SEQ ID NO: 250050 - DNA, 224 bp, Gossypium hirsutum
cggacacgtgactttacgttcaactaatctgatagtactatcctcctaaaacttggagatgtagataagcgtctacggttgaaaataaataagaaaggaggagggttgaataaactggattggcataaagatggacagcgtggtacatggttgataagattcaaacattcccaccgcacacaatgttgcacatgaaagtgaactgatcaaaggaagggaaaggc

SEQ ID NO: 250051 - DNA, 363 bp, Gossypium hirsutum
aaacttttcaactaatcccccccatggattgcttttaactttaattccttgggtgagaccatacctaaaccaaaagtagtacccaattaccctaggtggcttcaattaattgctaatgtctccttttgacaaatagttatatcaaaattaggtgtgatatatggaccaatagtatgtcaaggaatagtaaaattaccccaaataatcttatgtcaaggaactttgcatgctcaactatgacatgattgagtttggactagcaacacactacgacctttaagaatgtaaagatgaaccccaatcaatccaaaggaaccttgctttcattcaccctaccacgaaattttgcgttatacaaacttt

SEQ ID NO: 250052 - DNA, 323 bp, Gossypium hirsutum
  unsure (1)..(323): unsure at all n locations
gggggcgacccacgcggccgcanggagcaaaaaaanaaaaccaaagacaagaacaaaaaccaagcaaaaagggaggaggnagaacgancagcagaaaaccaacccccccccgcaaaaccgggcaacacagaaagaaaaaaaaaagaaaaaaaaagagcagaaggaagggaacaacccgcacggnaaaggaacaacaggggcagagcaangggacnacagcgaaccaacggcggacaacggcgccgcaaacaagaagaaaagcagcagcggnggggcaacagccaaggacaagcagaaagacggggacgggcaagagaagacca

SEQ ID NO: 250053 - DNA, 215 bp, Gossypium hirsutum
gaaacccggggcggcccacgcgtccgtccacgcgtccggccttgtttcgatgttaaggatatggggaaaccgctggaggtgcgcgatttgaggttgcatttcaaaggctgtccttatatagcactgccgctggagaattatttcgcggtggttggagaagggatggcgtgcttgactgtggtgacagatggcggtgttggtggaggaatggctgt

SEQ ID NO: 250054 - DNA, 334 bp, Gossypium hirsutum
gaaaagaatgcctaaacaggagatttggattggaattccaggtgatgggagatggttgttccgctcggtaattcttggcgcttggttgaggtcggggaagcaatctccaactgagagatctcaaaaagttcttgcagatgagcttagatctaaagttgcagatgaattcatcaagaggcgggcagacacagaatggttcgtggagggtgatttcgataactatgtagtgcaaatgcggaagcctcatatttggggaggagagcctgagctgctcatgtgctcacatgtgctcaagacctgcataaccgtttacatgaaggagaagatatctgca

SEQ ID NO: 250055 - DNA, 364 bp, Gossypium hirsutum
tagaaaattccctcaaataggaccaacatcttatacatatcttgatactgagggggctttcgatacatttacatatgaagagatgtttgtcatgaactgcagtacgaagatgaacaagccatggagtggggctaactacatcaatgcttgtcgttgctcttcttgtcccccaacaaataagaattacgtttattttttggatggagcaactgcaacttctgctttccatccctcttgcactgttgaagccctggttcccatcagtcttcataacataaatggcctctctacttttgatatttacagaaggcttaggatgggcacccaaattacatggaatctttaaatctaaactgggttgggg

SEQ ID NO: 250056 - DNA, 209 bp, Gossypium hirsutum
cccacacttccatcgacagcatgttcagcgcgagctttgaaagggaatcgcgttggaatttctgaaccgggacgcggaggctgacggcaacgttagggagaccggttacgtctgcgggggcctcgggaagagatatcttttttgtttaacggtcagcccaccctggaaacggctcaaccggaggttgggaccaacggtcggatgagcac

SEQ ID NO: 250057 - DNA, 312 bp, Gossypium hirsutum
ctgagtttttctacaaagacatgtctgcactgctggaggccaggggacggtgcgggtgactctagatggacgggagatattcactaatattgtttcaagtgcaatgattcatgcaactggaccttttgatgataatgaatggatgcaaacaaagattgacggatatgaatgttctggcactgttgagcatggtgtgtggtggtcaccaacaatttgaagaggggaagatcaagaagcactttacatttcaaaccacaaatttactgtaaatgttgtgagaaattttatttagaaaacttattggctcattaa

SEQ ID NO: 250058 - DNA, 162 bp, Gossypium hirsutum
ctcactcttacggcaacgcgggcattttgatgctgctccacttagcggaaatcgacgcgcttattaatccgaggtgagcatcttaccacaagaccgaacatatgttggtcggttggagattccaggatccacttgtcatagttttggtgatactactgggca

SEQ ID NO: 250059 - DNA, 319 bp, Gossypium hirsutum
cccacgcgtccgatttcgagcaaagtaattttgtttattttgaaagcacagggagtaaaaataaataaacatctctactttctcttcatgaatttttggttggtatcaggaaacgtagcaagtagtatggttagttgttactcagttaaaaatagatttaaaattgttattgtcataaataaaaccaaaattttaataaaagaatatgcttactaggatttgaaagattgaactaattattttattgtgttgattaaatcacgagagcttaattaaaacactttgattatggtcctacacatattaccaaatttttata

SEQ ID NO: 250060 - DNA, 292 bp, Gossypium hirsutum
catactctttgtccagcagtatggtcaaagcataggaggtggctattaatgtcgaggctctgtcttaatcctttagctcgtgtaagttggtagtggaagaattcatttatgcagcgagtgtgcttctgtttcaactgtccgaattaccaaaatacctgcgtttaccctagtttttctcgctaagattgctgctttaaattgcacttcatctaaggaatgtactgcctgcacacttcctgcaaactaaagaccctccttttttaaatcaagcactcaagtcttattgtttttc

SEQ ID NO: 250061 - DNA, 136 bp, Gossypium hirsutum
ttaaagagttttaaaatgaatggatagtagagttgcggctggtttaaaaccattctactatactaattgataatcattatttttgaagacatggctgttcaatctatatctgtgccctacattaatgtaattgaac

SEQ ID NO: 250062 - DNA, 182 bp, Gossypium hirsutum
accgctaatgaatgccggaactttgttactttccaagagaccaaccacggcggagctttggatttacgacgcgccgcctaaaagtgctctaaagccttcttgcatcttgcgatagacggaaagctgctagcttggcccgttgactaacactttccagggtaccatgtataagagcatactaa

SEQ ID NO: 250063 - DNA, 386 bp, Gossypium hirsutum
cggacgcgtgggtcagtccggatgccttggtcgatacttctccagagcttgacgaacgtgttctggaatccctcccaccagccctacttgagcctctgccatgaacggagtagctatatcagaatgattgaccattttcgatgctaagatcttcccctcttcatttcgtacaagcaagcccgaagccgatctggaatgttgttggtcataagctgcgtcaaaataaactgtaacccttgctccgaacatgctgtgaaagcttctattggactgattaaccagagtccacaatagaaaaatttgatctgttaactagttccctgttcaaagacccaagtaaaccactcccacgtagtctgagtatcaatattcagtacccaagacag

SEQ ID NO: 250064 - DNA, 338 bp, Gossypium hirsutum
aatttatcatggatggctgtttggtcaccgtcgagggagaagaagatattgggggatctatctctgctgatgccccataccttgaagtaagcaaagacgcagtggaatgtttcttccgatcccttgaatttgtcaatgccacattcgtcgctgagggaaacagaattcccgtgccaaaactatcaagaaataccaggatgagtatcaagcttgactgtggggagaggagcccgagcgaggaaaggtttgggaaaattttaacaaggaatagtcaggctctaaagccaatgcaccacaaggcccgatactgcttgggggtttcaggccaaatttgcgtc

SEQ ID NO: 250065 - DNA, 379 bp, Gossypium hirsutum
cccacgcgtccgggtactacaaagtttacttattcattatctctcttgctttggtgtttcctgaatttcttgagaaaattccgtttcatataattttccttcaatgatttgcttcttcttaatttatatctgaatgttcgattgtattgttttttttattcaacgatttcttctgatccaagttaaaattttcacagatctgtgcaagatgagcaacggtgacagtcattggaatgacgaagattggagactcaatataggtgatctgattttcctgagtttacttattcattattatctcttgctttgattttcctgaattacttaggaaaaatctgtttcatataatcttgcttcaatgattcgcttcttcttaaat

SEQ ID NO: 250066 - DNA, 297 bp, Gossypium hirsutum
cccacgcgttcgcccacacgtccggaaagtttggttggttgctgggatctggcaagggtttcctgattaatcgacctgctgagaacgtctataaaacataaaaggaaagcggaaaacaaaaaggagaaagggatatggtgggatgagggaaaaatggctagagaaagttgacccaaagctttgggtttcgggcagtgctcgtataaaatgataacactgattgtttgctttgtaaacattgttattgctctctttgttcttcgttctcttttattcttcgctctacatttattcaaa

SEQ ID NO: 250067 - DNA, 288 bp, Gossypium hirsutum
gccagatcagcttcactcttctctttagtctttctgtatgcaaaattaagttggagagagagttgtctgggcaacactgtgcacccagttaggcaagtattattgcaacatgcttgaagaatttggtatcatgccgaattactaccttctattcccaagtgtagctcagaagtttgtaactaatctctgtggaagcatctactgtgaatcagcttgccaagcgactggcctgcttgatatcgatccaaaattgcgattatgatggggacaacaggctactgagtatgc

SEQ ID NO: 250068 - DNA, 336 bp, Gossypium hirsutum
ggttgctttaagagaatattagaattttaagggattgaaggaaaaaaaatcgggagattatcaatcattgaataggattttggctctgagttcaggaagaaattttgagatttggtgaaaagaattgtaaaattgaaggttatttggtggaataatctgcacattagctggaaagtctgaacaggtttctttaaggattttttcccaacaagttctgacggatccgtctactgaaactaggggttgcaactgtctggctggtctggagtgcatcttaagcattatcagggcccttagaatggggtccttcttatctgctgaaagcatgatcccttc

SEQ ID NO: 250069 - DNA, 118 bp, Gossypium hirsutum
cggacgctagggcggacacgttgtctggaggagtggatcgcaatgtggagagtgcaagttatgcgtccaagccatgatattctcttttgaatgcgtccatgaaggttggggagtttgt

SEQ ID NO: 250070 - DNA, 329 bp, Gossypium hirsutum
cttgaatctttggaaatggctggcatacggcttcttaatgaatcttgttccgacgcagatgagccaaaggagaaacggatgagacctaaaccttcttttgcttcagtgattgggcaagcggttatggtgaattacttgtatactgccttggaacctgtccttagaaaagtggtgaatgaggaagtggagcgcagtattggagaccggctccgatcctttacccggtcttcgttgctacgaattcaagcggtggaacccgaaccatctacccttagactgatttttcctaaagccctttccttggctatctttacctgaagcaagattct

SEQ ID NO: 250071 - DNA, 131 bp, Gossypium hirsutum
gatcaagaaagggtagtggatcacccttttcctctttccttctcttttcgaatgtcgtcgcaaaagtaggactctctcgttataattaggtggtttagtggttctaagggtggctttagtggaggctctgt

SEQ ID NO: 250072 - DNA, 254 bp, Gossypium hirsutum
ggcctttctgcattggtatactggtgattgaatggatgagatagagttcacacgtaggggagatctacatgaatgatttggttgcacaatttcaacaatatcacgactcatctgtggaagatgaggaagagaacgagggggaagagtgtcttgacgtgaactatcagacctaaaatgctatggcttttaccatatatgaaaaccttgcttaagctatagaatggaaccaactttttgcctagatatatactgct

SEQ ID NO: 250073 - DNA, 214 bp, Gossypium hirsutum
atctattaacagggaaaacagtgtctttaaagaaggttagatttgatactttagagaccatagagtgtaaagttcatggcaagagagatactcgatttaaggaaactaaatcatccaaatgttattaagcttgaaggcttagttacttaaagaatgtcatttcagactttaccttgatatttgaatacatggagcttgattttgctggccttgc

SEQ ID NO: 250074 - DNA, 375 bp, Gossypium hirsutum
attttaataaaatttactctttaaaaaaattcaaattgggattttcgggtttcatctcattgttgcataaaattattgtgatgatatcagtatagatttttttttctgttcaaatgattcggttttgagtattatttgtctgaaaacttattttctgagaaggaaaaaaaaaaccaaaactatataggaataattgctagttttgatacttttgtttaacaacactatttcggatttgtacacagttttcttttacatttaggttcgagatttagttttcctttatgttttttttctgttggctcaatagcaataaaaggttggatttttgggaccagagtttggatctttcttgttcatgaattaagcttttgt

SEQ ID NO: 250075 - DNA, 171 bp, Gossypium hirsutum
aaacttcgaagaaaaaagagagagtagagccatgagtggaaacgactatagattggagccatgtggacatccctcccggtgatggtagtagctactctttgagtggcaaaattatgctcagtgccatcgtggttttgttcttcgtagtgtttcttaagtttggtcttttac

SEQ ID NO: 250076 - DNA, 239 bp, Gossypium hirsutum
aagaaatcttcgctttcctgtcattgatgatcatccgtaaaatgcggttctatggggcctttttgaatatcaaaacactatcatattaatacaaagagaggacccaaacacactttttataaccatgaacagctttgccgactcttaatagtaaggcacaagataaaatatcatgcaatccagttgcaaactgaactggtatagtggcaagaaaacccttcccctgacttcaaacacaa

SEQ ID NO: 250077 - DNA, 375 bp, Gossypium hirsutum
cccacgcgtccgacctcacgtacttttaaacatagaccaccgacgggtgctttggcctttcctactactttccgacaacctctgcgccacaaacaaacatgccgtcattgaaaacctagcttcatccctaataccacattccgagagactaattttacacctcaacagacaactactgcaacttgttatgcatcaagtatcacattcaaccgcattactttctataacttagctcccaaatccttgctcgggtcattccataacaacatcttcaccttgaaggaacttcttaccaaattgtttaaacacaattccatatttgtgctcaacccatattttttcaaccttttcatctttctaagccatttatttttt

SEQ ID NO: 250078 - DNA, 354 bp, Gossypium hirsutum
aaaccgtatgggatcatagccattgtaatcccattatcctatccagtatccgctctcacccggcgctttctttcttaacaggcaaataacaaacatcaatctcttcaaatccatttcaatctcccttttcttcttcttcttcttctctatcgagttctctagcttccaatggagacgctagtttattctcaaatctggcggcggtggcgccgtctctgttctcggcttccccctccaacatcttaagcgtcacactcttcctggttcaaagaaaaatcagagcttttggtgccataaaagcttctcttgccaagactgaaggtgcacttctcagaattggcaccaaggataagc

SEQ ID NO: 250079 - DNA, 328 bp, Gossypium hirsutum
  unsure (1)..(328): unsure at all n locations
cttcttttcaatatattaagccaaatttttacaatatttaaataagtcattatatggtattttccaaataatatcactcctttctctcctcaaatttgaattttcttaatccctacccaacattttaatatcttataccaaaccaccttctttatcctttttcctnttctttcatcttcttattctctcacatcctatttttttttttcctatttttttctatatttccctcttcaaattttaccttatttttttttcatcttcactcttttatatattaaattctttttctaccttttcttaacactattactatttttctcttctt

SEQ ID NO: 250080 - DNA, 291 bp, Gossypium hirsutum
  unsure (1)..(291): unsure at all n locations
cccactcgtacgggtcagcacgtttttttgtcaaaacttcacctggggggttggagatgttcagcacactgatgaaaaacataaaaaccccttgtttttttttctttctaagtatcaaatatattcacgtattattatatgattcttttaataatttatggtgtnttgctggttcattaatatcataaagacttgtttgaggttagattttcttaatatatgtcgattaatccacaaactattttatgtccttcgatgttgtgattatttttatttctattgatcattatt

SEQ ID NO: 250081 - DNA, 134 bp, Gossypium hirsutum
ctgtaatggcatcttttctatgggttatcacttatcacacacacgagcttatttgcttacttggtcatctttttgtttctccaatacctctgtttgatatttattacattggaactcgaaataacacaccttgc

SEQ ID NO: 250082 - DNA, 375 bp, Gossypium hirsutum
ggaaaagaaagggatactagcaggctattgagttttatggtttagcaaaggtggaaaaagtggcttaattgtgatttgatttattttggttattggtcatcagggagaagccccagcattctttgttgataatctacaaaatggattttcaaccggatttggcttaaaatccaaaggctttgagaccttcaccgacgttggtgacaaaacatttgtaattggtggggcaaactgtgattccgcatcatctgttggaattcagatttatgacaaatctactgggaaatgggtgattcctacagtcctgggaacaaaaccgaagacatgtaagggccattctgccattcttttaaatgaagatcgtattatgattag

SEQ ID NO: 250083 - DNA, 373 bp, Gossypium hirsutum
cccacgcgtccggcggacctgatggatttataattaaaatgagggatggtaggcatttaagatgtattcaaaacaatccgcaacctggaaatctgccagattatgcaccgcatcctgcgattgttctgaagatggaagatgggactggtcttcttctcccaatcattgttttggagatgccaagtgtgttgctcatggcagcaatgagcaatgtccaaattcctagacctacaatgtatcaagttgttaaggacatgattgaaaagatgggctactcggtaaagcttgtcagagttactaaaagggtgcatgaggcctattttgctcagttgtacctaacaaaggtgggtgatgaaacagagtctgttagttt

SEQ ID NO: 250084 - DNA, 337 bp, Gossypium hirsutum
catctaccactgaaatcatccactttctacgatttgccttaacagcagggcacggctgcttctgtaatcaaagaaactgctatcctgaaacctgttcaccacgtagctaacaattgcaacgaccctactgtacgtggatcatgtgacaccggctgcaacatcaagcgcccttcttctaaaaagcccagcaaattcctagtccaatacacccacctcttcgaggacgaggctggtactacacccttgagggaaaccatcgacgctgtggatatacgccctctggccccttgagaggcgaccagaaagcttaagtttattgaagaggtggatgcttatt

SEQ ID NO: 250085 - DNA, 304 bp, Gossypium hirsutum
aactcttgaggtagaatagctttttattacgagtcttctggaacagtatagatcttgtttttatttgtctcaccaaagtttattctattatactagcgttttcacagggcttcaattttttttttcccataatatcaatggagtctagtgaattttggcacgtattgttttatctatagtaaccattttattatgaatgattttttttggatttttttttgtccattttttttttttcattattattttttacaaatattttttttttttttgtttttttttttttaataaaattttttttttt

SEQ ID NO: 250086 - DNA, 111 bp, Gossypium hirsutum
aacacaaccccatcacattctctttgtatccatcaaacatagaagggggaactaggggcctttaagtgcactggcgtaatactagaacacttgttaccttaacgcacattt

SEQ ID NO: 250087 - DNA, 349 bp, Gossypium hirsutum
gatataataaataagaattttgtagatggaatggaataggaggtgtcccaaattacaaattaattttcaaattccaattcacctcataaaaggaaaagaaaattattgggggaaagcacaaaactgaaaacagattatagaatggtattttattatggaaggcttatatgatattattgtttcaaaacccagtttttctttaatcttttgggtggtgactaattgcttttacgttttgtatatttttttttgtattataaaactttttttttattttttaatattttttttcattaatatttattttttttttttcactatatcttttttattttctaatttatatttt

SEQ ID NO: 250088 - DNA, 347 bp, Gossypium hirsutum
cccacgcgtccgggttattcggcgttccaataggaggagcggcagagcgggccggggaagaaggagaaggcgtagggactgaagcggcgacggcagcagacgaaacgcaattacaactgcaacagcccggtggaagtgagattattaaattagagccgttggattgccagaaccgagggcgcgatgatgatcgtgggatccaagacgcgccgtggcttcggcaggtgcaccgagcgaatcaaagggtttgtaattgatttttctttttttgggttcgggttttttaggtagctttttggtcggtcatcgggttgtggatgatgattactgtgttcataccggtatat

SEQ ID NO: 250089 - DNA, 343 bp, Gossypium hirsutum
ctggactttctctggtgcttttgaggcaaggcaatccctcatcgtcagaggccgtttccccatgctggctgatcctcgacatccggcggagtcgaagagtggctcaaatgaatcggttttaaaggttgctttagatcatggaaaggcctcaggggttataaagccacatgaccgcgtggtggtttgccagaagctgggtgatgcatcagtggtaaagatccttgaacttgaagattagaagctaatatgtggatgagaagttttgcttaacctaaaaccctaagcatggcatggattaaacaaaccgtatctatacatgtattctcaaactatccaggatatt

SEQ ID NO: 250090 - DNA, 315 bp, Gossypium hirsutum
aaaaaatcaataaaatggttttttttttttaaaaaaattggaattggaaccgggtggtattccagattcggaaacaaatagtaatacagaatctgttaaacaattggaaccaaataaggaaacatgccctagaggaaagaatagtacatacattaaggtaaagatacacaatatagtagtaatggcctacatagacacagctttctatatagagaaccataatgaaataaaacgaggaaaaagaagaatattcataaattattaaaaaaaaaatgaatgatgctaccataggagacgcctatataagctttctag

SEQ ID NO: 250091 - DNA, 245 bp, Gossypium hirsutum
ttgacgcgtgggcggactctttgtcccatctcttctctcatacttcactctaggggttccttggaggttttaggaaaacaggaaacaaattaaggtatggagaccttcctaattaccttggagacttgtaacgagggactttcctacaagctttgtcatcagatctctgattcaattactttagcctgttttgcacaggatcctcatagcatgttgtcttttttgtcctgtatctagacaaacat

SEQ ID NO: 250092 - DNA, 282 bp, Gossypium hirsutum
tctttgatgcgggagaaatcagctttttttcccaatgtacatttagagcaagggacaggcacttgggtacttgaagaaaaaggggtaatcataggagtgcatttacaaaacttaatatggttatgaattgactgcatttgcattatttaccattgtttttgatggttgctttttataatattcctttctcttttattattttttattccttttttttctttacattcattaatttatttattttttagctattatttattatttcttcctttttataatttt

SEQ ID NO: 250093 - DNA, 114 bp, Gossypium hirsutum
acatctcctccataataagattattctttacatcttttagtacaaacatactgacgcatgtgatatattctttgataactaaatcaaacccttgtctatcctctaaattatttt

SEQ ID NO: 250094 - DNA, 257 bp, Gossypium hirsutum
  unsure (1)..(257): unsure at all n locations
caaaaccctagatttgtattttctaagagggaataaaaagtaaatgggggtgggggctatctcatcttcgtcttctgttgatgagtccaccggcttaaaccgtaattccaatctcgagccggttgatgaacagttcggtttgttgtcattgaccgaacctgnnnaattggaacctaatcttggaaacggtttttgattctccaatgtttcgttgaaccgtgagagtatcaactgcttggttttttttgaacgatttt

SEQ ID NO: 250095 - DNA, 176 bp, Gossypium hirsutum
aacgaactaaggaactaaataaagatctttacctgggaacactttctagtctcggatgtcttcactaatggatggtatttacctgcggagataaacacatgaggaatcagagcacaaagctctattctctgtaatacaacattataacctaccggaaagttacaaataaacagaat

SEQ ID NO: 250096 - DNA, 169 bp, Gossypium hirsutum
attatgtgcaagttgatactgtaagttacattctatgggtgaattgtgctggatgtgacaagggccccacaaaatgtgatcctggtctaagattaacattatatgatcaaagaattcctccacttcaagcctgggttattgtgatcaatatttttgtacttcaacatat

SEQ ID NO: 250097 - DNA, 373 bp, Gossypium hirsutum
tttacgtttaatttctccctccctccctccctccctaatctctcggcgtccctggccttcccctcccttcctcccaaagtcactatcactacattagctcctttcttttcttttctttctcattcccattcccgcccccccttttttttttcttttttttctttttttttcccatgtgatccacatttcttttcctcttccaatcctttcaatatcaataacttatttgatcggctaattcttttttttttttcatttcattataaatttgaaaatacccccaatccagaaaactggaagatctggagtcattaccgacttcttccgggaacggaaagatccggtacagaacaccatcctcggccgagttatt

SEQ ID NO: 250098 - DNA, 382 bp, Gossypium hirsutum
gggaaatgtatactatttagaggaacccttttacagaaaaaagaaagaatctgagtaaacaggggtgcgggtttaaaagctgtttaagttttaatggataacaagggatgcaataaagtgcaaccagtagcgagaaaagcaaaaaagaaacaggtgaaggatgagttggatcatattaaacaggctgagaagaaaaaaaggcgtttggagaaagctcttgctacttctgcagccatccgatccgaactagagaagaagaaacagaaaaagaaggaagaacagcaaaggcttgatgaggatggtgctgcaattgctgaggctgttgcttagcatgtcctgtttggtgaaagactcgggggattcatgtgagattattgtaaag

SEQ ID NO: 250099 - DNA, 317 bp, Gossypium hirsutum
cccacgcgtccggaattctgtttcaaaaaatatatatttaaaagaaaaaaccatggctttgagagtttgaatctatttttaacatctcctatgagaataatcacaaactttttaaaacacacacaaaatgtattttttttaaaataaaattttaaaaatcaataattgaataatatccttagttcccttgatttctacgaaaattttcttttatttttattttcattgaatcaccaaaatgggcttatgatctatgtttgctgttgctaaagtttcctgttgcgataattgttatcattggctcttttttttttttt

SEQ ID NO: 250100 - DNA, 310 bp, Gossypium hirsutum
  unsure (1)..(310): unsure at all n locations
tccactcgtccggtcccgttgaaaccatctaatacctgaaaacatgtcnttcggggccatctgcacactttgcttctgcgactcttacacctactgcgcaaccaataatcctttcttttgctaccaatgtaaccgtacctttaccttaacaatttacccttccgctgactctttttttcctctattcatcgtatggtttctttttttattctataactctatttttgaaaaccctattctttactcaaacctttttttcgtaccctttttttcttgtatctaatcctttttttttcttgctcctgctttt

SEQ ID NO: 250101 - DNA, 361 bp, Gossypium hirsutum
cggacgcgtggggcgctgacgacttctcagctctataattttaagggggtcatggcacccatcagcagtatgggaaccggactcgggccacctcagttggatttggtgatgtttcacagcttccattgctttagactctagctctaaaggttgttgagctccgttggagtatggctctatccttacatggtcgtgcacggttttgcgggttccttcttgatggcctaaaaccatgaacacggcatctcatagtcacttgttgaggcctgtagttgcggtcttgatcttcttctttttcttccgtttttttatggtcattgtttttgactctttggttggttataggtatacctattgcttt

SEQ ID NO: 250102 - DNA, 272 bp, Gossypium hirsutum
tcgagtatgtaggtttcaatgtccccttactctattgttatcagaagatgctgcgacaatgaatgtggaacggcatgttggtctctataactctctcgttgaatgtctaggattgttgctaatcctctcttagtatgacatacttatatgcatatctcaataagtttcctcgcaagagaccaataagttatctgcaatgcaataagtgaattctgaggtaactagaatgcagttctctagcatgttctgtaattagaagtgcccacttggag

SEQ ID NO: 250103 - DNA, 190 bp, Gossypium hirsutum
gggagaccacgcgtgcgagcaaccttaacacaactcaccaacttaaaaacctcaagatttcacttttaaaagacttccgagagacactatgtttggcacgggcggcaactttgactgcacttaccttattcaaagcactaatatgggaaacagcaacatcatgatcgttaagactgagaagagctacatc

SEQ ID NO: 250104 - DNA, 287 bp, Gossypium hirsutum
accatattaagatatttattaaatatttgtatcttgtaaatctgagatgcctggggtgtgtgatctgttgaatcaaatctccaattgaaggacgtaaatagtggtattttgtaccaaatcagctgatgttcattcatccagtattataactaagcggaaagttagaactgaacagaatcagttcgaaggcaagagtaaaaattctcaaattgttaaaacataaatagatatacgttaagaaaatttgtggtcagaaactataatacaaatgcttttttttttggctt

SEQ ID NO: 250105 - DNA, 343 bp, Gossypium hirsutum
cagtagtgtacaacacttcctggtatgtacatggctctattgaggaagacgaatcgcccatggctgatgttgatgatgagattcctgatgattcaaaaactgtttctgattctaagcccgaaatggaagtactggcaaagaagtcatatgcgtctatgttaaaggttcggaaagagaatgcaatccctgtgtgatcacctacacaattccctgtgaagtctgcagtctagagccaggagcatacacctattgctgcaccaccttctggttccatgcctgactaagacgctcaggattctagcatcaatgtttctgtaaatgggtatcatccagatgcaaaggc

SEQ ID NO: 250106 - DNA, 382 bp, Gossypium hirsutum
  unsure (1)..(382): unsure at all n locations
aaaattcttgccctgaaatccgtctctctctctctctctctctncgattttctgttcacgagtttctcggttcaaattccagcaaaggtttttcggttctagaatcttcgcgacgcggcacacggtgccgtacatgtgcttgtgagagagatggcgatagataccgagcaaaattaaccgtccgatggcaaagtttggggaatttttaagctgccttttcgccaaaccgggattaataccagaacgacgccgttttcttcttcagcgtttaatctatacgttcaaactcaacctcatgtcgaaggatcgaatcatcacggctctgccatttcggtttcctccgttgcaaagtcgcttttgccgactcggcgtcggctcaaac

SEQ ID NO: 250107 - DNA, 364 bp, Gossypium hirsutum
acagtccggcgacgcgtccggcaattctaatgtttatctctacaagtcaataccccgttacccggacaagcttagcaacagtgccagttctagcaaatccagccatgcatcagcagactgtgcaagtctccaactcgttaaaagctccgctaccttctcgatattggaacgggacaaccatgtcgagggttggtccttccatctctcgttatcagaccttattgcgacaggaagacaacttaagaaacaatagaaggaatatgatgatttctttggcgaacatgcaagtggacctcaacttggccaatgagaactcaaacttcattggaaacgttgccttccctttcaggatccaaattgggcc

SEQ ID NO: 250108 - DNA, 224 bp, Gossypium hirsutum
acaaggccggcttttgtcatgttatcctgtcagaagacatcgccaggtaggagacgagtttatcaacagagccagttctagcaaatccagccatgcatcaacagactgtgcaagtgttcaactcgatcaaagcctccataccatctccatcttggaacgggacaaccatgtctaggggtggttcctacatctgtagttttcagaccttatcgcgacagggagac

SEQ ID NO: 250109 - DNA, 383 bp, Gossypium hirsutum
cccactcgtccgcccacgcgtccgttggatggcaacgaattttattgaacttgtggcattatgttgttcccatgaaactcgagtgcgtatctttggtatatacctcttccttctccccaactgtatattattcataagttacacacacctatgtgtttagagtgatgacaaaaatttctggcctttttatccgtttcaattcctggtctaaaatcctggaatgatctccttcacactgtagtgaaatagtgtactcaaggtttcacttaaaaggagcataaaagttttatagttaaatcaactctgttttttggttgattaggtctgaattttgacttgaagcttggttatatcgcttttcgagtatgtagatgaaaattgtt

SEQ ID NO: 250110 - DNA, 383 bp, Gossypium hirsutum
cggacgcgtgggttttaaaacaatttatattaaaaactcttccaaaactctctgaggccccaaaccaaacgcagctccagcgaaccccggccaccggggacggcgccgctatctatggtggctggaaaatgccgaaatgtccctttttttcctttcttttaaaacccaaacttaaatctaatggtgaaaaccttaaaaaatagggagaaaaggctcaacctacgtccctttgacttcttgtgcgcctacttcaaagcatgaacgaaaacccgaaggggtttttgagactttcacgacggaggaaatcttcagtgacggtgatgcacgaacgaagcgggtcagtttgaccctttttattcttcttactttgtgctttttttatt

SEQ ID NO: 250111 - DNA, 383 bp, Gossypium hirsutum
cttaaaatagactcggtacttacttttctcatatcgagcatcttcgaatacccatcagacacggaatagaataggccagattcggcagaatcaagaaaagaaaaaaatccgggttcatctctgtttcctgaaaaaagcttttttttgttgcttatttcatgctagaaagtgggggctgcccttacgtaaatggttgaattgaagagatctttcaaggttggttgataagacagatataaggattgtgtaaacatgtagcaggtggattacgtcagatttcatggctggaaaaaagaggaactttgagggctaacattttgaatcaagcaaatgaggtgttgacagtggaaagaggaggctgttaaattgtattacaaccatgc

SEQ ID NO: 250112 - DNA, 407 bp, Gossypium hirsutum
gaccaaggcttccgttcctttaactaatggtagctgttttttataaccacagccacttgaaacttctatggggttccaggacggataacaataataacagagtaaagcaagttgctattccagaattcaacaagaaaaacgccatatgtaagtacccatttgaatctaacagtggagaagagctttccactgagttgcacaacaaaacaattcaagagtattgcaaaataggggatgtagataatgctatgaaacttgttgctcaattggaggctatgggtttccatccaaattctatttcttatggttttttaattgatactttgggaagtgttggtaggacattggaagctgatgtcttgtttcaagaaatgatgtatcttggatttaaacctaggataagattg

SEQ ID NO: 250113 - DNA, 395 bp, Gossypium hirsutum
ccaacccttccggggcagacttgcttcacgtccttcaaccatgaaaatactcttggggttcatgattcttacagtcttgatgctcatttgcatggaaccaaaccaagttgaagcccaagtggagccgccctatcctccagattatgaagtaagagctcttcgtgagatagcaacagaacttgggaagaaggattggaattacaatgaaaacccttgcaacaataagtcaagttggtttactccaccgccgccgccaaatgtgcctgaggccattaacaacagtactgtcacctgcaattgctccttccccaatggtaaatgtcatattgatggcatctaccttttggggcaggatcttgatggtgttctaccacgctcacttgtcaagctatcat

SEQ ID NO: 250114 - DNA, 341 bp, Gossypium hirsutum
cgtactcgtgggcggacgcgtgggtggtcgcttgggcggacgcgtggtctgacgcgtgggctgtctcgtggggtcggatctaaatatgctaatctgatgtctcactttccccatcctactacactgcgcaaaccaataccaaacgaccatccatcatggctgcaactgcatcgtctccttggggcaaagccggcgcttgggctctcgatgcataagaaaatgaagctgaactccatcaacagagccggggcgattcttctgttaaaaagctcgcggttttccttttttaatcggcaacctccttcaacaaaaactattaaaattagtggccaaccaatttt

SEQ ID NO: 250115 - DNA, 385 bp, Gossypium hirsutum
cacgtgtgtaccacattattccaatttgagagatgcactctgtcccttcatcgactgagggaatggcatctatgaacacttctgcatcaccagacaactcactttctgacatgtactgttctactccaatgcccttgccttgggatgctgacactagatattttcgcttacaacgtgatggtcttttcaagatgtgagaagggttcaagtcattcacaaaaggaatcagagcctttaagaggtgaagatgatgcaggttctgaatctttgagtaaaggggacgaatggaatgcttgtgaacaaggctcaacagagcagtattgtaaatcctcgcaactctcatcaacaaaaggattagatggaactgggtacttctactcaccaa

SEQ ID NO: 250116 - DNA, 321 bp, Gossypium hirsutum
atgtctctcaggctatggctactgctagttgagcacagaggaccccacgggaagaaacgtgtatcaatgacatagttgcccctatttccttgtgcaagcccttgaagatacgggccagtacacaggagttgtttgctatctcctccatatccatcttatcatcttgtcagacggactggccacaacttatgcgacttctctgggagcacaacatgaccaatcccgctatacacttaagacccgtggtttggagcgcctcatcttaaattacaaacaacatgcaccgtggcggaacaagacctattttagtttattgtatat

SEQ ID NO: 250117 - DNA, 381 bp, Gossypium hirsutum
atttgggtcagtctgttttatttttcttatactttataagattttaaattctgggtaagtattatttccttttctttttctcttcttgaactgatgcctttttctaataaagaaatgctttttaaaattaaataaagaaaacaaatacattttctgggtatctttggggattgctaaaacatgagttgatttatgtacccaactgtcaatgaaaaacctggtttccatgagttcatctgagtttggtgtagaatatgatgaatggtatcgctgtttgttgaatcaattttatttctaagttcccagaataacctattatcaaggttgggatacttgtttctaatgaattgatttagattgttttccttttcggggataaat

SEQ ID NO: 250118 - DNA, 212 bp, Gossypium hirsutum
  unsure (1)..(212): unsure at all n locations
ctcnttgttngaccgccngatatgatcactgaatattttgattatttggaagaaagcaatatcccgccatactctgtttgctacaaaggcttatcgtagataatatttgatgataataaaagacatgctcgccattaaatacaatcagtcctactgttgaggtaaagcatattgtatgataaaccttgctgctgagaaatgtaactctgcac

SEQ ID NO: 250119 - DNA, 158 bp, Gossypium hirsutum
  unsure (1)..(158): unsure at all n locations
ccactctttcgcccactcgtcctccctcncttttcttacaaatctaaatctgatcgatagatttgattaatcttgccacctcccatcacgacaaataatcatttgaactgtgccacgttgaggctccccttaattaacaaaaatcatttaatcttgtc

SEQ ID NO: 250120 - DNA, 125 bp, Gossypium hirsutum
  unsure (1)..(125): unsure at all n locations
cgtccgggaggatctttctttctttattccgtacatcttaacctnaaccacatcatggaagagagttctcttaaacggtcgagttatntagactgccttttcagcagcaagtagatccatnncca

SEQ ID NO: 250121 - DNA, 142 bp, Gossypium hirsutum
ccccaaaccacccccaatgcgctaggaaagagagggatcaacgcacagaattggacatccttggccgctagttcggccatatgaccagtttgctactcaagtcctagattgaaaaaaaaacctcgaatctcatgatttgatt

SEQ ID NO: 250122 - DNA, 417 bp, Gossypium hirsutum
cggggcggcccaaggcgtccggttgacatggggtctagtcctgatttctctagtattggtcaaccaaattctttggggacatgctgaatcctgtggaaactcggttatctaattatacggtgtcttctggtggggcaacgaatggaaacacatttactcctgatgttaggatctttagtggctggaattctggtgaaccgagctctagattgagaacgcaaaaccaggtgtttcaggatgttctgaatcaccatctcgatgatgatgatggaacaaaaatagagcatggttggtcttcttcttatggcgctgctggggatgctccaaggtcggaagaaaggcagattgaaccaccaaatgtgttttttcctgggagactgaataatggtcggagtggcaatcagatcagaagtggac

SEQ ID NO: 250123 - DNA, 420 bp, Gossypium hirsutum
aaaaaccgggccggaccaagccttccgccaacccttccgaaaaccctagagtaatcttctaaaagcaaaggtggctgaaccagggggggttcttaaaactgtggctcatcatcagcctactggtggtgctgccgctgatcaactggctagattgacactaagtgacaaccttgtatcctgaggcttaactgcctgctagagacacctccttgaacaccaccgtagcgtgaccgaagcatagactgaatcagaagcttcgtttgacgctagacatgaccatatacttctacagcgtgaattggaactgtaataccgcctgacacatgactaacatgctgcataatgaatggctatgtgattgagtgctgcattccatgcatcacacgatgtcattgagattgaattgattggtgcaataaa

SEQ ID NO: 250124 - DNA, 383 bp, Gossypium hirsutum
caggccacgattggtttctacttgtttccgaataacaatcacttccatactgttatggacgagataagcaaattcgtgagttctgactgttaatataattaacctgacctacaggctgccataaatgacaggagcttgacattcctccccttgttccaaccaacaagtttgcagtttatgattgtgtagtattactagttagtgtcgtattaatgctggtattattttgctccatattttctgactaccgagcttgattatatggtaaagaagaggtattccagcgcatagctggatcaggatgtgttctggtctgcattcactcgcctgggcttgagtgttatagttcgatgaagctcttgtttcggttagagcctttttga

SEQ ID NO: 250125 - DNA, 361 bp, Gossypium hirsutum
caagaaacaacctgcactaaggatttttcctcccacaacaacaagagtgaaatgcgaaaaagcctaagaagtcgaagaacggaaatgaccccaatgctcgctatcacgctgctaccgtctatgcatattcatggtcgactctaggaaatgttacaaggaatcgaacccagttgctaagggtgttacatgtgttgcaccagtaggttgcgtgagatggacatctatggcagtagacgtaacgtagtgttacgagcgtcaagcatcattgctgaaagcagagtatgaaaaggcaacagaggaggctgataatgctgaccctcaaaatgaggtagaggaaggacgttacatcatggatacccct

SEQ ID NO: 250126 - DNA, 347 bp, Gossypium hirsutum
cgtatccaatgattcatctcaccccaacaccatataaacaggataagataattcatctgtatgtgcttcttgcactttgataaagaaagtatatcattacatcattgtggtgattgctcattcagaaacacaatgtgattagttatttagtaccttagtcaatggcggcgattaggggtaaaatttaggagggcgaaagtctttgatcagtggccgcgactagtgggaggatgaagactagccaagtaagggggttgagcaccattttttccatttcacaattgttttgttacggattttttaagtgtaattcccagtttgaataaaatagaaaaaaaacttttcta

SEQ ID NO: 250127 - DNA, 391 bp, Gossypium hirsutum
  unsure (1)..(391): unsure at all n locations
ccgggtcggacccacgtcgtccgcccacgcgtnccggtgtaggtttttattgtaagaagaagcntgaatcacgccgaggagaggcaagtcctatacgtcgtcgttacaagagactatatggagatanttgtcggcgataaccgttgcaggtaaaattgggtacccattgaaacccctgattttctttcccagaaaatatcccataactgttccctaccgattctggcatctggagtaaataccacaagccttgctcaatcccaactcaccatcttctatggcggaaaagtttctgtatttgatgcaatttccgctgaaaagattcaagaaattatgcttattgctgctgctgtggctgctgctgatgttggctctgttgacatgaagaatg

SEQ ID NO: 250128 - DNA, 340 bp, Gossypium hirsutum
caaggaaaagccaacagagccagaagacctttccactcatcacaactcgtacacatcgccagcagccatttcatcaacgatctccacttgctccaaagcatgaagtatgccgtggttatcagaccccaccacgggtgaggtaagttggcacactagctcaatttgttgcaggtctcgaattaccgtgctaattgtttttcacacaattcccatttctttattcttttgcatatgaatccactacttcaacataagcagtccggcttgtgtcaagcatatggatatgatagtccttaacttgtaagcattgcagtaagtacacggagttgagtttgttatc

SEQ ID NO: 250129 - DNA, 384 bp, Gossypium hirsutum
  unsure (1)..(384): unsure at all n locations
cttaaagccaagttttgtgccgtttcntcggtagccttctgttccatagctagcgggaacccgccaattcgccaacgatgtttcttctttagctcttctctttagggcatagaagtcttcctgagttagttgtactggggaattgtctgattctggatgatcggtgtattgaagtgcttttgctgctgatgctctgaaagcatctgattctattcgcactgctcgtaatgtcagttgcaacgtgcgaagagtctgtctccttagccgcaaggtttgttttagtttcgaccttgttctgcgctcttcatccttgtctgccttcaactgttccaactcttcacgcatttgctccagattccggtttgtttcattgatggtctttac

SEQ ID NO: 250130 - DNA, 364 bp, Gossypium hirsutum
cggacgcgtgggcggacgcgtgggcggacgcgtgggcggacgcgtgggcggacgcgtgggaaaaaacccaattcatcataacgtaaaagggtttttcgattcacaatgggagagaaaaagaatggaaacaagaaaggagggaatgaaggagaaaagaaggaaaagggttcttcgaacttcgttttcaaagtcgattgtctttgtgaaggatgttccttcaaaatcctcaaatgcattcgtgaatttcaaggggtggagacggtgaaaacagagagcaactcgaacacagtgactgtaactggagctgtggatccggccgccattaaagagaaactcgtgaagaaaacgaggaagaatgttgacc

SEQ ID NO: 250131 - DNA, 374 bp, Gossypium hirsutum
cacaaataaagtgtttttgcacaaattgcaaattaggtactcctaccatctattgtcagaagtccttcacggggaaataaaatgagaaattgggtcaaataatggctttctaatctcgtgcaacaaggggattttggaccaaaggttatttactctaataattaatatttggttaaggtttttggacagtgcttctaatatgttagttttgcacatcgctgaggtagggtgtactgtgtatgaacatctcttaacatggaatggacatccgttctgctccaatttatcttttctgtctctttttctttcctgggtacggggggcagtgaactgtttagcttggagcagcaagggagggagaggatgcaatagca

SEQ ID NO: 250132 - DNA, 382 bp, Gossypium hirsutum
ggtggaacaagagtatgaagctgctggaggagaggttcttcttgataatgaagacaatgatggttggttggcgactcatgggagacctaaagatagaaatgatgtggaggaaatcttgccttcaatggagactttagaaataaggcagaatgagactgtaaggtcgataccttcatattttggaatcggtgaaaatgaagaagatatacccgacatggctgactatgaagaagcggacaatgctattgatactgatgcagcaactctaccatcggattaccttgttgctcaagagcctgatgatgacaatattttacggacccgaacctatgatgtcagcataacgtatgataaatactatcaaactccaagggtctggctt

SEQ ID NO: 250133 - DNA, 381 bp, Gossypium hirsutum
gaggataaaaagtttcgtttcccttctgaattgatatttttggaaaccctagagtttacctcgattgtagagctttttttagatggatttggctgcatatgcattacctacctcgattctttagtcgtagaagcgcgatgtattcgaagaggagccggagtaagccgagactcgagcgccgcaatgcagcgaagcacatcgactacgatgcagcgtcgttttcttcgtctctcgatgatacctcttcatcttcttctctaatcacgcgatcgctcgatttgtccgataaaaccagcttccgtatccaaggaacagagggagagttcgaccttatttgtcggaccttgggcctttctggtcctgaaagattttccattccag

SEQ ID NO: 250134 - DNA, 310 bp, Gossypium hirsutum
cccacgcgtccgaaacattcaatatgaattacaaacttacaggtgaccaccgggagccaatccttcggctggtactggcatatttgcagagagcttcgtattaaattgtggacaagaggagcttgcgaggccacagataattgaaggatctagcgcatttatgtaataaatcacgtagggaaaagggtaattgctaggtcccgccccagactagaacatttaagttatataccatttagtgaatactggactggaggaacatggcagctcttaaatatttagcatattaatgtaacgagcacattattga

SEQ ID NO: 250135 - DNA, 176 bp, Gossypium hirsutum
  unsure (1)..(176): unsure at all n locations
tccgagaagtttgtaggttttcaaggttgagtgttgttggnnttgaggttgagggtggtttttaaaaagaggacatgtgtaggacgttttgtgtgcgtggaaaaatttaccttgcnnattgtatgtttccaattaggcccttcttgtatagtaagtatccatatgttttgtcttcc

SEQ ID NO: 250136 - DNA, 307 bp, Gossypium hirsutum
accacccattttaacaaccatttctatttccttaccataacctctacgagaggggcgtgtacataacaatgcaccgaaccattcaactaaaactcacactgaaactcctgactgcgaacctaaattctttctaaaaatgctacccactatacttcactccataatttacacccaaatgtccacccatatggtctagcaaggcgatgtacaagcttctatacttgataacatacttataacctctccaatcatgcctgcaatcattttaaatagcgatattagtagggcccttatctacactcacgtc

SEQ ID NO: 250137 - DNA, 382 bp, Gossypium hirsutum
cccacacgttcgtcttggctgacttataaatatggagacggttgcaggtgaggcgtgaaccaagtgctaacggatgcggaggctgatgaggatgcttaggaatttctggcaggagctgagattatatttgcgtacagaacggagtcaaatattaaaatggatcttgccattagaatatggaaaaaacaaagggaagagagaccttgaagtttaaagagtgagtgacgatgaccatgagaaccgttcaacatagaagaaactcaggctctctaaagaacaatcttcttttgtcgaaccaagttttaaagaacagaacactctaaatgctgctagtgaaagaataatcaatgatctctatgctttagggttttaatttgttcaa

SEQ ID NO: 250138 - DNA, 378 bp, Gossypium hirsutum
cctagatatttccaggaaatttctttcacttccctacccttttttcctctttggagaagaaagtaaagaagcaacttttagtttcaataacaataattcttttctatcacgctaagatttccttcctaatccttgatccgtgctgtgcggcaataagatttcagagctgatcattcttcttttaggggtggcctggtgttatcattcaggaagctatagttatgaattatccaccagaaaagcttgtgaggttccaggactggaattcagggcgaagcactgaaggacgttattctgataataattggataaattcggggaaaattagattcacaataaattccttttcagaaaagttacaaagaggggttgaatctg

SEQ ID NO: 250139 - DNA, 385 bp, Gossypium hirsutum
gaagtgctggtggtagtcccaggacaacaggttccacttctactggcaacaaaggttggcaagcatctagtttatcatctcagctgaccaagaactcaccatcattgcctagtcagatatcatctcctgttggtgggaggagtgtgccatcagtcctgggaaacccccatttaagttcatcttcaagtatggggacgaagccccaatcagtgctacatcaacagcagcagcaaaagcatgcactacatcaagcgcaactgttcttctcaaatgcttacattcaggcccaagctcaacactcaccaaccacaacagctgcaaatgggttctttcttcaaagacaccgtaatgagcaacagcaggcactgccttcaagatcatcaac

SEQ ID NO: 250140 - DNA, 384 bp, Gossypium hirsutum
gcaagctctttgttatcaaaggattagaataacaccgtaaacgctggatacaggtcccattcaaagttgaaccctcagaaattccatcgaaagcttatatttgattctgttaatgagattctagttggaaagttggctctatttggagcatttccggagcctaggataaattccggcaagttggcaaagaagaccctcactgcacaacagcttctaaaagaattatgtctcgagattgagcagcttcaagcaaagaaaccgaattgtgacccggaggaaggtgaggatggtctgaaaaacatattgtgggaagatgtaatgagtcgatcagagagttggacggattttaacagtgagatttcggggatggtgctggatgttgaa

SEQ ID NO: 250141 - DNA, 377 bp, Gossypium hirsutum
atcaagcttcacaactttatgccgtggaaaagaattcacaactctatcacgactaaaggcggcgcaaccaccgccaacagaggcgaaatcagcggagttcgggatagccataggaccgaggatcaactggcgactgatacattgataaggttcagataatattgagattgactttgagaaatagaaggctaaactatttagaaggaaacaattatgtatttggacttcaaaacttacctctttacacttagagcataatatttatatagagcttagaagtaactgctctataacaaacttgctaacagtcttagctaaacgctaacaacttggataacaacttcaactaatgctcatatccttaacactacctttcg

SEQ ID NO: 250142 - DNA, 330 bp, Gossypium hirsutum
cccacgcgtccgcccacgcgtccggtgatttgttcccagctcatggctgtcacaggtgatcccgcacatatgtttctgctgtctatgccttcagcaggacctggtggccgaaatgtgcgggaccatgtggataagttcttggatatgatgcacagtgaggatagagagagcaagagggggctggtggatgctgttgtggattgtcttcacaaatcggggcttaaggaggaagctgggtctggatgggaggtagctgctgcgcaaaaagagtacccagatgctgctggagagcaaagctcatgatattggctcatcaacctacatgtgatg

SEQ ID NO: 250143 - DNA, 357 bp, Gossypium hirsutum
gttgaaatcccttactaactaccattgttattttcttaagattcagcgatgtggggtgttttaactcgaaattaaagtttgatagaaaatctcaaaagctgggaaaagtaaagaaatattcttaagattcagcgattttgggtagttctattgacaagcttttctgattttcagctttgatttttctttcttttttgtctctgggatttgagagttgtgaaggttaaggtcttgagtgatggcattacaagagaagttagatagatttaaacagcagcaggagaagtgttagtcgatgctctccaacatttcagcaaaatcagcatcttctaggtccactccaaaacctgcacttgc

SEQ ID NO: 250144 - DNA, 383 bp, Gossypium hirsutum
attcatacagcctgggacaggaactgccaacggaggagcattctataatgtgcgaaatagcaatggagaaccaagcaaccatgtgaacacagcttttaacgtcgacactgcacctaccatcaggattcgatctcgtgctcatcgaattcagccagacacagagaacttcgacacacagggtattgcatcgagaaggtgtaaacttgtggtccattcacctcgcttcgaagagaaagaacatgaatcgaaacccatccttacgaagggtgtaaaagccatggaagagtatatcagtgttggcaacgatgctgctcgaaggaccatggacgaaccccagattttcgagacaagcaaaagagatgttttgaggtcgaagagcaaga

SEQ ID NO: 250145 - DNA, 381 bp, Gossypium hirsutum
cacgataatcgcaagtgcacaaaattctgtagaatctgatcctgtcagagacacgtatgtccaaagctatggatcagcaaccagagttgggaagcaggggaatgcctctgcccatccaaggtgataatatgcttgtgcatccccttcagagaccagtctctgaggctcaaccgactgagtgctttattggcaatgatacagtgaaccaacaggaagatctgactattgaaggaggaacaattaacatctctagtgtctactccgaagagttattgaactctctgacacaagcactgcagagtgcgggtttggatctgtcacaggccaacatctctgttcagatcgatctcggaaagcatgctaatagggggctaacatcag

SEQ ID NO: 250146 - DNA, 426 bp, Gossypium hirsutum
ggttccggacggaacgcccggccgacccatgcgttcttaaaaccgattatagtagttttctttatgggtgtactcgcgcttacaccgtgttaactttcactagatatgtacatgaggcactatcggttgtaatagaaacgacaatatgtgagggattgatgaatgaagtgagggctaagagcagatgaccagaactgtcataactattggttgcagatcattgctttctattgggggactctaaaaatgaaagggaaagaattctaaaagaaattttgaaggaatatgaacagtgctcaagtcaatgcgtgaattttagcaaatcgactattttctatcgctcaaatacaacaggcatggacaaaaaagagatctcgtgtttactaggtgtgagatgctacacaaatttaggtcaatatctaggac

SEQ ID NO: 250147 - DNA, 382 bp, Gossypium hirsutum
cccacgcgtccgggacaacaagaaatctttatatgggtccatcaccccggaagtgaagtgtcacaaacttgggaacctagaaaagggaagggtagaagcctcgagacacagattcataaagtgcctaatagttcatttggcagcaccatgtcggctgcatctggatcctctaaaagtgatgacagcagtgctgaggaaaaccataatccgaagaatcgagtcaacagagttaagcagggtttacggaagatcggttctgtatttcataggagtcccaaaaacgagggtcactcaggcaacctcggagaagtggttccatctccccaaaaatctcagagcagttaatgacaaggagattttggtaaagtttgtagtcgacgac

SEQ ID NO: 250148 - DNA, 282 bp, Gossypium hirsutum
cccacgcgtccggaaccatgaaaactagcagtaacacggttcggaaccaaagcggagggaagaaggtattggcttcagtctctgcatagtatggaaatcgttaactttcatgtccataatagaaaatagatgaaggtacttaatgatttaagtaagatatggtaaggatcttcaacatatatgattgcataaacaatgtagctgttcaacaacattcatttaatccaaattacttttatcaaaaaaaataaaataaaataaaatataaaataaaaataaaat

SEQ ID NO: 250149 - DNA, 380 bp, Gossypium hirsutum
cccacgcgtccgaagtaatcactcatagggctgtctctcttctaaagctaatatctgaaattaatggagagaatcttcttctccatgttaatcttcctcttccaattcttcttgccttcacagtctgcaacaatcatggtgggtggcgtttcacactgggaaaaccctactgttcatgttggagactcagtaattttcaagcataagtatcagtacaagctctacattttccaaaacaaaaatgccttcattctctgcaatttcacccaagcttcccttcttaccaaccccaactcctcctcctatgagtggcacccttctcgcactggtttcttctactttgctttcaacaatggcactctcaaaacatgccgaggctc

SEQ ID NO: 250150 - DNA, 386 bp, Gossypium hirsutum
  unsure (1)..(386): unsure at all n locations
gggccgaccaacgcgtccgatcactttccatgaagagatcgcttcattggttcctccagaaacgaaagacgcgaatgcaagctacctctccttaccattaatatatagaggtcatcatcaatgcttgaaatttagtggaattgaagcaactgatctatgttttcggctaggaactattaccctttttttttaaattttgttttttgttgtaaatttatgaatgaataattacgctagtacttgaagagtatgatttttttaaccattaatttgttaatttacgtcaattatgcttaattatttatttgttgtattgttcttgtgatggtcttccatttccatcatttacaaccaatatacaaaaattgtaggcttcaaannnnaaa

SEQ ID NO: 250151 - DNA, 381 bp, Gossypium hirsutum
gttttcttcttatttatctatttgttttctctcaagaaagccctaaacaggtcggatcaggtaacttttccccctttttttcttgttaaagttgaactttttatcgtcatccggttgatctaaaacatttgtttctgggttttgtctgtatcgtcaaattttcttttaatttccgttctaattgtttataattacttcagtttgggaattgcttttgtttgaataaaaggaaaaaaaattaggattcaaagttactttctttttggagtgtattatttatttaactgtttttttttctttgaggaagtcgaagattgatagggaattcgaaccttagactttaatcttaatttggagtggtagtgcaccttaagtcgagtc

SEQ ID NO: 250152 - DNA, 386 bp, Gossypium hirsutum
atctggaccagaagcaaaagaatgagtgggtctggtgcagcagttgaagctactgttagacaagtaagttcaagcaactctgagcttgttcagcgagtggaggcatcatttgaggcaatgaacaatgtagattgttctgaagaaaggaagaaatcactccgagccagatacttttatgacatcatcttcttgattactaatcttaccgcctggttcatccgtgattatggccacactattttccctccactgtactatgaaaaagcttgtggaatccgtggaagtgattgttttcaaacattaggagttctccgtgtgagtttagggtgttttatatttttccttctcatgtttcttactacatttagcacaagaaaactgtttga

SEQ ID NO: 250153 - DNA, 355 bp, Gossypium hirsutum
  unsure (1)..(355): unsure at all n locations
tttttcttctacctnnnaaaaagaagggacggtttaatttaaatagttgaacttcccaccaatttaactttggagtttgttcttagattcatttctatttcatgcaaggccgaaaataacccatctcacttctcttatcattttgcttcttcaacttcatcttattccaattcatcactgttattacaacaccagcaacagaaaaagtggcaaaacaacaaggaaagttgttgctatgtgggatttgatcccacatctacaagaagcccgagtccaccaacatatttatcaacacttgccattctcatctacttaatccaaccaatttttgtaccagcaccttttgcaacctttc

SEQ ID NO: 250154 - DNA, 335 bp, Gossypium hirsutum
gtgcaagaatcctttctgtaagatgttttctttcatgtaccaactgagtacgggagttccatatgacccataaagcgcagcaaaatatcagattctgttctttggtacctttttcaagaacccatggcattgtcgaaacacatggaagctgtcttcttcgccgaagccacatcgagggcatctcacgattgtggttattcgcttatttcgtaggttaactagactagagtaggcatatagttccaggatatccgccagactagcagtaggatttttgatggaaaagtgtaaatccatagctttctgtggaaatctttaaagctcgtttgtaataa

SEQ ID NO: 250155 - DNA, 439 bp, Gossypium hirsutum
  unsure (1)..(439): unsure at all n locations
aggaaccgggtcggaccacacgccgtccgcccaacgcgtccgcttaggttatgtttttatcaagnntgcattcattctgctcaattatgtcgtgtttgaatatattgcgagttataccgatattaattgttgcttcaattacantgtaattcctgattattaaattatggtatanttttgcgaacggaaaattcttagggattcttcgagtttattagctttaaaacgatnntagtttaaactttatnctgtaactaaaacttctctttgtttctatcnagatganntcagaaagccaagggaagtggtttnggctccttggccagacgagattgacgatctnctcctccaaggcttgctgattttggttattcaaatgaaatgtttgaaaaagacatggtaatggaggcagcattgtttcatctatgcctttacttat

SEQ ID NO: 250156 - DNA, 301 bp, Gossypium hirsutum
ccgggcggaccaacgcgtccgcctgaccaaacaaatgaggatttttttgttgattggaatccagacattgagaaagttggctacaaccgtaggataggctgttaaaggtataaatgcatctacaatcctccagaatctggtgtaacagagggccttttgcttatatgctacacctaacaatgttcattacagctacatggcgacaccatatgatgatggcaattgtctatcttgcacacatgaaaccactcattgtacccattttgagtgaaggagagtgaaatacattgcacgagatcat

SEQ ID NO: 250157 - DNA, 374 bp, Gossypium hirsutum
cggacgcgtgggtgatcttattaacactgcagaacctaggttctgcaatggcagatgttgtggttgatgcaatgatcgctgaggctgtacaatttgagaaggcctcctttgccggagaccttcagtcattgtcatggttatcgatggcttttggtggagtgtgtgggagtttgctaggaggatatgcattaaccaacttagagatagatattatcttccttcttttctctatacttccagccatacagttgttttcatgtggtttggtcgaagagagttctatggggggtgaagttttatctgatttctgtatttcaagtgattcccatcatttgaatggaaaagaaaagcaataagacacaacttacacgcag

SEQ ID NO: 250158 - DNA, 383 bp, Gossypium hirsutum
cggatactcgaagaaaaaacagtcatagtaagttagtatcctgcagaaatagcagagacttttctagcatattcctccagatatatgtaaaaccttaggaaaatgaacatatccgtgttggacactcagatacaagttcctgtaccaacggccagtttgcattgatatttaaaaccaaagcttttgacacattgttttcacttcttacaggaacaaccaagattaaaaatctagacagcaacattgaatcagtgaaagtaaagctgacaaaagaagatttgaaagaaatttcagatgcgatcccaatccatgaggttgcagggggtacttatcctgaaggtttaaagcaattcacttggaaatatggcaatacaccaccaaag

SEQ ID NO: 250159 - DNA, 240 bp, Gossypium hirsutum
aatctatccaccccccaccatacaaacaatcattaacaccttacaattttaatttcaaatcactaattattatctcccttataaaacccctcaaatcattcatcatcatattaacttcttacatcacttactaacattataatttcatatctccaaatttactcaattccaccattataccttacttttatctcatatcgcaaaatccaactccccctaattcttttttttcaaactctt

SEQ ID NO: 250160 - DNA, 386 bp, Gossypium hirsutum
agttgctgtagctctggcacactttgcctttggacataagcagcacctcaagtgaattgctgctgcatattggaaacctcagcctaattccctgttgaattcattgccttcactggctaatataaagggcacaggaagtggaaatatagtttcttctcagattggtcctttaacagccatggttcgggatggaagggtatccaccagcagtcctcttgctactgctggaatcatgcatggatctccattatccgatgattcatctcaactttctgattctggaatactgaatgatggtgtcagtaatggggaagttaatcattcaaggccaaaacctttggacaatgcaatgtattcacagtgtgtactggccatgtttactttag

SEQ ID NO: 250161 - DNA, 389 bp, Gossypium hirsutum
cccacgcgtccggaaaaacaaaggatctgtcgtcgcttcatcggataaacggattcaggttttagattgttacagtgatccacctggttggaaggatcaattagcaggtagtggaaacttcacagctcttcccaatgaagctttggtttcgagtactgcaaatgtttttacggaagttaaacatatggataagttgtacaattcaattattgaacttggcgaaggactggtaggaggtggaaatatccggttttctattgccatagactcaatcagatttcccgtatcttttggttattacattcagaccttcatgaggctagggttagagctgttctggaatatttgtcatctatggtggcaagtttagaaccatcacatcaacttgc

SEQ ID NO: 250162 - DNA, 203 bp, Gossypium hirsutum
aaagcccccccatttgtttttggaaaccaaaccttgccatcgcgggattacgcggggggagaaggcttatgcccacacaggcgctacgggtagaacgccatgctcgggtatgcgcaagaagctgcacggaggggagcctgtggtggggtggggtgatgtgcggtagagatcaaaccctaggtttggaaaatggccgttggcat

SEQ ID NO: 250163 - DNA, 381 bp, Gossypium hirsutum
atttttcaagaaaaaacaaaacaccctctccccctttgtttctcaactctgtgggggggttatgaaccctagcctttgcgccgttagcccgtcgattgagaggaagaaagtctctcctctcctccttttgggtctgatttcagcaacggagagagtctccggtgacacaatcacagggattccgggcaagccctctccttctcttattatttttgtttaaaagagatttaaaaataaaagataaaaaaatatatataaaaaaataaaaaagaaaagaacacgaaaatggaaatcgaaatcaaccttttttttcttctatttttgctttttgattgcttaatgttcgtaaaaaaaaattacaaatgaaaatcgtggctctta

SEQ ID NO: 250164 - DNA, 376 bp, Gossypium hirsutum
ctccaccacaagatctcgaaaactcatttcttccccaaaaatgatggcttgaaggcaagctttcgcttccgcagttgtcagatctccagtgcttcctagtgggggtacgcagcaaagcatcattccagatatttgttgattcaccatttcctatcctccaacccatgcttttttttagtaaacaacaggaaccccaaatgctgcgccaagtaaaagagggttaagctcctaaacctacattcaaaaattacctcgaggataatattttaatctcataacacacacaaacaaactactagggttggtgattagcctccatcccctgttagccaacaaggctaatagggggtttcgcgcggaccaagatcgagttgtc

SEQ ID NO: 250165 - DNA, 306 bp, Gossypium hirsutum
  unsure (1)..(306): unsure at all n locations
cctttccttcttcactttaanaattttaatatttttccctcataacccatatctcggtggattttttttaacaccacctccccctccaattaatttacaatcctatctataatacttatatttccaaccaatacacattcaataaccaccatttcatctcaatattaataacttaatcttaatattaattcacatttaacaaaaccatactaaacattactcaaatttacaatttttaaaatatctaaattttacccaattaaatatacctccacatacaaatcatcttacttccaacataataat

SEQ ID NO: 250166 - DNA, 327 bp, Gossypium hirsutum
cccactcctactaattatgctaatatttatcttgtacatagtgctctacatcggggcggaattcatgaagaaatccattccataatcaatcccgaattgattgccttcatgctcatcttgcctaccatggctgacaatgaagctatagcaattgttgtagcagacagtacctcttactatacatgatatgcctcttcatttcactattctgacgactatgttgacaaatggagtgtagactttcttgccagactaaaaaccataattgctgctatcgatgctttgttcagaccaagcatgcaacagtacactctgcaataccctatt

SEQ ID NO: 250167 - DNA, 273 bp, Gossypium hirsutum
atcaaaaccataaaccatctttagtttatttacacagaactgggcttagtccgtggttgaagatgattttaacacaaaaaatagagctgctgtttttagactaagatcgtgattgataaaattgatctctgacgatcaaacagattgcgtttatgattaacgagtgattttgctagatctagtcttactatgctgttagcagacatatgttgcgctacttttatcaccgacttatttagcatgcttatcgctctactagaaataaccagtact

SEQ ID NO: 250168 - DNA, 274 bp, Gossypium hirsutum
  unsure (1)..(274): unsure at all n locations
gatggcgtgcatcaactacccaaaagagctgggaaccggtgatgtagatctctttggacaaatatctcaactgaagnctgatactgcagggtattgatnccaatgaggtcgatgcctgatcnaaaacggcaccatctgtacttcgccgagtttcttgaattttgatcgcaccggaaaatgataggatactcgattctcgaggatggaaccttaagtgaagtctttcataagttttctgatataggatcaagaagcggcttttattttcttgcag

SEQ ID NO: 250169 - DNA, 381 bp, Gossypium hirsutum
  unsure (1)..(381): unsure at all n locations
cccgtatccctcaccgagaaagcactttaaaagggtgaatcccaaaagccggatgatacattttttcatctatagattcagagaagagtcaagtatctgaagagggagctttgatcaacgaaattccatcgatggcgggggtttctttgaagtgtggggactgtggggctctgttgaaatcggtggaggaagcccaagaacatgcggaactcacctcccattccaacttctccgagtccactgaagctgttctcaatcttgtttgctcttcttgtggcaaaccgtgccgatccaaaatcgaaagtgatttgcatacaaaaagaacggngcatacagagtttattgataagactttggaggcagcaaaactaatcagtttgg

SEQ ID NO: 250170 - DNA, 311 bp, Gossypium hirsutum
  unsure (1)..(311): unsure at all n locations
attggcttctgccgcgcatgcttttctcctcttgtattatttcctaagccgatcgtnctatggaagacagtatggtgtctaatgcaacagtgatgttgttagaaaggcagtgaatgtgccacggaaaagtggcataaggctctagctttgcatcaactgggttgtcagttgctagtgtggtatgtgttctatatgtgcttaatgtttaacttgtaagcataatagttaggccgtattatattttatttattctacatttttattattaattttatatttttataaataattttatttaaaattttttatct

SEQ ID NO: 250171 - DNA, 346 bp, Gossypium hirsutum
gtctaactcaactccacacatttgttcctctttctttgcttcttattccgggggggttcttctgcttctgctcgtgatcgctgcctgcaccagtccaaggctgcttatttctccaaagcctctgctctttcagcgggagcttgtggatacggttccttggctttaggtttaagtggctgacaccttgccgctggtgattcttttctctacatagatagatccctactttgctccttcttctctgtttttgtgcccgtttttttactttatctcaattatattttatatacttttgtttttccacctcaccttcttcttctatctccattctctctttatcttttcc

SEQ ID NO: 250172 - DNA, 311 bp, Gossypium hirsutum
cgcgttcgctctatctttcgcccagtttttaatcctaaatactcaatccagttgtaacggagtgttgattgtttaatgcattattcttattatttattcgatgtgatcatgcccgcgacggattatcaaggaactgcgtctccgttgacaaatatcggccgctcttttttaccagtgaggagggatcttgtacacgccatggtatcgacaatcggtggttcggctttttcgtggcgtccatctgtgttttttaaacgacccgcttacatcgcattaaggaatgcttttcgtctcgggtcatcgaacctgtt

SEQ ID NO: 250173 - DNA, 281 bp, Gossypium hirsutum
tcccactcgtccggacagagttttttctgaaggagtcaagacagagttgaaggggtgaaaaaggaaaaaagcatttgtaattgtaattgtttcgagatctctgtgtgtatagacagtctcaaatggcagttgctgcagcaccagatcacttgttccatttgtggaacaatttctacttgggttcctttcatgctgccatcaacaacatctttctttccatcctcttcctctactacgccttttagctcgtctgtcttctttttccgtttttacattatttc

SEQ ID NO: 250174 - DNA, 300 bp, Gossypium hirsutum
tttaaaagtgaataatgatgacactacaacaagcaactggaatggggttcaagcatggaatgatttgcatcattacaacacgttgccctaaaaagagaaggatcaaacaaaaggtagaccttaaaagggaaaaaaaaagtaatatattctccaaaaagaaaaaaccatgtagctaattgtctgtttaaaatgttttattgagtacttgaggtatatattgatcaacatgtaaacgtatgaacaaaaaaaaaaaaatagggtttctttctttctttccttccttctctttttctattattt

SEQ ID NO: 250175 - DNA, 370 bp, Gossypium hirsutum
tccacgcgtccgtccacgcgttcgtgttgttatacattttgaagatgatacagaagaggtgcaacaatgggaccaacagattgttggtgtgtgtcaagctctgaatgacatacttgatagcatggcaaagaagggcatggcagttcctgtgtaatccgatgcatctactgagaacaaagaaactcataagaggatcgactttaaccttctcccatatgcgtaaaaggaacatcatcggtcacctctggtttttacgatttcagttactggggtttattttagtaactgccattttgtcttttgggcaggcatgggatttttgatgatcaattaagggtcctaattaggactattggtaatcatttctttt

SEQ ID NO: 250176 - DNA, 374 bp, Gossypium hirsutum
cccaaaggaaaccagtcagcgttgtgtatctagtagccactgctgttcccgggaagacggtaaaccaatgcaagaaaaaatttgcattactgaaggaaaactttagaagcaagaaaagcacagcttagtcacttgattaaataccaagggggccgagaagtgatatatcttaaagagggagttgtcttaacacatcttggaacctgcctgagctacaacatatgtgtaacgaaaccaacctctcttcttagttcctacattctgacttctgctatgccatagaagtttccataacaaatgttttctacagcaattagctttatatattgatataaaatatactatttctcaaaagataaaaattgatgtataaa

SEQ ID NO: 250177 - DNA, 375 bp, Gossypium hirsutum
cattcacagtgctccacatacatcttaacccctaaattaaaggctttttctaaagaattattcatttcaacttgctacaaaatattagattaccatacatttctttttgattgagactacaaacatacacattatttcttcatatgtagattttagtccaatttttgaagcctaaccatgtatatatatatatatacacacatgtattaataatttgctttgcaacttgaagtctttttaagttgatgcatggggtcatcctccatttttatgggtttataaatagagggagagagtgagaaaaagagagagagtttaggagaaatatgggaagaagtccatgttgctccaaggaaggactcaacaaaggagctt

SEQ ID NO: 250178 - DNA, 188 bp, Gossypium hirsutum
  unsure (1)..(188): unsure at all n locations
taaccttctacaaaatattacacttcctacatttcttttgattaaactcaaacatacacattaatcttcatatgcaaattttagtccaatttttaagcctaaccattatatatatnatattacacacatgtattaataatttgctttcaacttgaatcttttaaattgatgcatggggtcatcctccc

SEQ ID NO: 250179 - DNA, 226 bp, Gossypium hirsutum
tttccgggtcggaccacagccttcccgattttatttcctaaaagaataaatatcttcatataaagaacccttgccaatggagaagtttttttgaaagaaaaagttctatataagcactcttgataaccgggaaaggtagcttaagtaggcacataatataacacatatgttgacaaaacaaaaaaaaaaagagaaaagagttctttatttggagttttatattctc

SEQ ID NO: 250180 - DNA, 287 bp, Gossypium hirsutum
caaatattacagagagagggggcgttctttttccgtcacgaaaatcgaaacccaggacgcggaaaaatcttctattcttttgattaaaataagtttaaataccaagcaatctaaaatcgcctttaccatcttcaaccctttcagagtttcagtaggagactacaaaggagggttctttggtcggtgtttgatattgttcgggctgtcaatgttcattctattacatcccgattctttttaaaactcctttattatttacacaaggtgatcctggctcttttttttat

SEQ ID NO: 250181 - DNA, 373 bp, Gossypium hirsutum
ctgacacctgcgtgaagacgacttttgctcggtctaggactgtgcgccgttgcggcatgaatgctctgattagcaggctaccaactgcgccacgttcagatccttgtacgacctgcgacgcgtttcagatgacatgaaatccaatgatgggccttagaacggtaaggcccggcgaaggtgcaagacgacggtttatgaccgctagcgaatgctcgacgatgtcgactgtgtgcaaccctgagaagatggcgaacgtcacttcgtggaaacttgcatatgcctgtgccatcaacggagacgatatttcgggatgaaaggtcgccttcaaagctaagagttcacctgtcatccaccacaccaccattccctaagc

SEQ ID NO: 250182 - DNA, 397 bp, Gossypium hirsutum
  unsure (1)..(397): unsure at all n locations
tccgggttggaccaacgcttccgcccacgcgtccggctgtttctatgtttttggcattgctcctaatggaagcggatgtgcaaaaggctttggcgttgggtcctgaagggccattaatggaggagttttgggagaatgtgaggagatacgcactttatgcgcttacggtcagtactggggctatatacactatcttccagcctatactggagttgttgaagaaccccatctctgcaattcttatattggtgattatgggtggcagtctctatatcgtttcccaaatactttccgccatgtttggagtaaccgattttacttacacttatggatattagttttttgacagttttcggcttatttggtatntgcttctctatactttataaaccttttg

SEQ ID NO: 250183 - DNA, 364 bp, Gossypium hirsutum
tcccattgcatcggaactcgatttttattctgaaagaacatggttatgcattagacgagctaactcacatgcggtgaaggaagattccgtagccataactgaagattcgcagtctcttaaccgtaacaaggaacataccaagtcaactactcaaaccgaagttaactcgaatttcctgccattaaacaatggaaactatgataaaccacgaaagctagctgaggaaatgtacaaaaacatcaccagtatttcgtttgcttctgtctcctccgatcaacacacagttctatcagaaatagaaactgcagagatgcttggcaactgtgtaatcgactttcaaatatgaaacaagtggctttcgtgt

SEQ ID NO: 250184 - DNA, 347 bp, Gossypium hirsutum
cggacacttgggctgacgcatgggttgtatcatagtaggcagctagcgctacagaacgctctctctctagaaagtgtcacaccctagatgacagtcggctaaggatcttattgaggacaacaaggtataaaagagaagacacagccagagaacaaaacaggtgagataacagaaaatgtcggtaccaaaagatccagcgagcaaatagtgtgggaaaatgatccccttgcactgagaaatctcctaaacgctcaacacaggaactatgtgcatctcggggtgatgatgacaccaacaatgatgataccgatccttactgttctaccaattcttcaccagaggaaaac

SEQ ID NO: 250185 - DNA, 364 bp, Gossypium hirsutum
  unsure (1)..(364): unsure at all n locations
attgaagctccccctcccaaacattttttatctcgacttcggcggcacctccggagtcgactactcctatacgccgaactcttgacccggtcgtccggcagcgcacccaacttcagaaaacggcttgcgtttgtcatacatcggcctaatcaaactcctcaattgccctngcttgtgtctcgctcaccgattccatccatgaaaatggcttccatcagctgctagggctctgaaaatcaaacccattagttgccgaacccaatctgtcccacttattgttctactttatccaattcatgaatatggctatccgtttcaccgtcaagttctccggctacgtcgaccaaaacttagccttcaccgg

SEQ ID NO: 250186 - DNA, 372 bp, Gossypium hirsutum
gtaaattaactaggaaaatattatatagattatcctcataatatttgttgaatgaaaatattaataatcataaataggattagtatttattacactgataatttactttttattcttttaaaaaattataatctatgtttttatatatttaatttttaatattttgttatattattataaaaaaaaatgtatcgaatatattccaaataaaataacgggtctcacaaaattttaactattatgcttttttgacacgtgtcttgacagtgtccgattttttttttttttggcgtgtccggtacgtatctgcatgtccgtgtaggacagcggtacgaggaggttgatgcttcatagggctagtgttcttatagg

SEQ ID NO: 250187 - DNA, 206 bp, Gossypium hirsutum
  unsure (1)..(206): unsure at all n locations
ttcttttattatntnntnttattttcctggagggggttttttttnctatggaaaaaaaaccctatctgatttttgccatcatatgaaaaagcctcttgtccttccctcttcctttttttgctgttacattcttcccgtctttttcataacatggaggtgtttcttcccccctgatttccaacaaatattcgtgaattgtgattcca

SEQ ID NO: 250188 - DNA, 375 bp, Gossypium hirsutum
aataattacaagactggatttgcaaattgcttgctgtactattgcaacttttatataggtgaaaaatattggttaaataataaaaatgacatacatcaatagtttgttatgctcatctcttacttccttctgccacattcagccatcattttgttgtttccatatccttttgttttttccacttttattttcttaaccataatttcgttgcatccttctccaatattaagccctatttttatttttctgacaatatcagttacaagtgcctgatgaagccttatctcatgtcatgagcatgggctttaaggaacgtgatgcaaggagggcattacgattgaacaaccaagatatcatgagagctgttgattttct

SEQ ID NO: 250189 - DNA, 375 bp, Gossypium hirsutum
cccactcgtccgtccactcgttcttctcacgcgtccgcttgtatttatttcacttgccgcagctttcttaagaaagttgaagctaggatttcttgtattccttggtagtggaaatggacatattgggttctggagaggtagaaaatctaagtgacataaagcatgctacggtccgtacatgtttcaacgatgttaatgaatctaactatacgaacacgagtaaagtggaagagttgctcgaacagaggcagaaaagcaaacctccttcaaagtgtttagctaagtctgcatcttttccttctgctgtgtctacccccgatgatgatgatgatgatgaaattgtaactgcaatgcagcgaatgttctctgaggatt

SEQ ID NO: 250190 - DNA, 317 bp, Gossypium hirsutum
gttaaatttgatgtgacgggcctgtaggagagtagtatatcaagttctggagtcaatacaactgcccaagctgcattgactgggggtttggagtctccagtcaaggcaaggcctgttagcaacagctcaagggggactttaatgggagtaataagaggctcggcaagaggcgtggtaaagtctgatactacatactccggagcatctgctggaattttcacttcagctgtcggaggtgctgaagtttcttcaaccaattcagatatgcccacagttatgactccctttaggactgatgcttttgcattgggttctta

SEQ ID NO: 250191 - DNA, 203 bp, Gossypium hirsutum
  unsure (1)..(203): unsure at all n locations
ccacgcgtccgcccacgcgttcttttttcttcactccactaagctcttggcttgatcccctcccaaagatggaccgcttctctcttctcttcctcctcctttcctccggcgntgcttcggccgtcgtctccgacgtttattgcgatgacgatcctctcatccgncttgtagtttccgatggaggagtcgatgatgactccgat

SEQ ID NO: 250192 - DNA, 228 bp, Gossypium hirsutum
  unsure (1)..(228): unsure at all n locations
ctttctctctgatctgagtttctgtttttctgtttttttttttttttgcatttggttccttgatttcggatgggctttgatccttgncttgtgggtacttaggttgtctgacttgttcttcctttgatttccgggggtcttttgtgttaggtttgtatgtgatggctggggggagctggagccgatctcttgatgctgggcgtagataggtttccctaggccggcgct

SEQ ID NO: 250193 - DNA, 195 bp, Gossypium hirsutum
  unsure (1)..(195): unsure at all n locations
tctccctttctccttctccttttatttttttcctctttgnagcgaataatctgagatgtttaggtttatcatcacttctctgccctatgctgccttatcttggtaggatctaactacttcctcctctttctctgcttgctcattcctattttgggtttattgaagatggcttcctcctgctcttactattctccc

SEQ ID NO: 250194 - DNA, 143 bp, Gossypium hirsutum
  unsure (1)..(143): unsure at all n locations
tccgctcgcctcccattctccgaactttcttcttcttcgccaccctaatgggttgttttctttgcggcgatatttcctttaccnccctttctccgncgncgatgcctttcatccccgactacttgctcgccttcgttctcttc

SEQ ID NO: 250195 - DNA, 382 bp, Gossypium hirsutum
cccacgcgtccgcccacgcgtccgttagtatttgaatgctgtttatgcattcaaatgccggagctatcaatttctgagtttgatgggttcaagaactttgtcaataggtgcatctctagattctcctgatggtcattttgaaaggaatcacaccgaaaacggaagtatggtttcccttaagtttcatgagccaaatggggtgctagatcagggccatcaagtctctagtccagtaagaagagatgttaacaggtcattatccggagtaaagtttcttgaaaatgatgatttggatttggaggatggtaagttggaaaaggacaggaataaaacagttcgtagtaacaaggccgttaaaatacaaaatcaggcattattatct

SEQ ID NO: 250196 - DNA, 383 bp, Gossypium hirsutum
cccacgcgtccgcctttttttttttttttgtattaagcttactatattatattgtatatgcccttttgcaagcacattgcaaactatttcattgtatataaaaaaagcaaacgatgcttcacctgcagataaactagattatacgtactgtattgtgggggcctcaatgttgggcttaccaatgtaagaaacaatcaaagcttcaatttcaacgcatgtcaatgaatgagcgaagcggatatggtagggaactcgataagtgctaccgaagaggcgaaaggtagatccgttcaactcccactgaaagtttctgctctttgctggtttccatccggaactctccgaggtgaattaacagctcgtggatacagggtttggcagga

SEQ ID NO: 250197 - DNA, 416 bp, Gossypium hirsutum
ccggtaaggaccgggcggaccgacccgtccgtccacgcttccgttttatttgaacattttttgtcatccaagtttgacaaggaactgagcaaaaaatttagggactgcacgacttgtggttgatttcgataggtggtcgactagtgaggaatctgtgaatgttctcttagaagccgcaagccaaggccaccgtattttctttttctatttcccacacttgggtatgataatggtagcagtgaagtagaggttctcacaccgaaaaaggtccaatctatatctgatggagctgattccactctttcaaaccccctgtgcgaggagtttgctcaaaattcttcaaaatactcttaacagacagagcatacatccaccacctgcctttggctcattgcctaatcttgaagcccttgcac

SEQ ID NO: 250198 - DNA, 384 bp, Gossypium hirsutum
cccacgcgtccgtgggattgctctccaagatgcgtctatggaatatggcatgcagaagaatcagtctagaaataaatactctggaggcgctaaagatgcttggtcaccagccttggatgatcttatgctagtaaaggatccaagaaccaagtctgctaaaaagaaacatgttgccaagttgcctcagtcttggcctttactggaacaaaagagcaagaattcccgaaaatttcctggtgaaaagaagaaacatcgcaaggaaatgattgctgtgaagcgccgtgaaagaatgcttcgtcgaggtgttgatcttgagaaaattaattcgaaattagagcagattgttttagatcaggtcgatatgtttgcttttcagccaatgca

SEQ ID NO: 250199 - DNA, 390 bp, Gossypium hirsutum
caaaactcgcttgctcggcagtgatctctcagtctctctctgaagaaaccagaggaatcatcggcgaaatcgagcgatggccggagattctgcgacgaaaatcaaagcctatgcggtgcctgcggttctattctctctttccatgttatatcagctcgttcttctccctcgtgcctttcccccttctcattacgatgttttgggattaaagacatattgttcaatggaagaagtgaaagaggcgtacgagaatcttgaatccaaatggaattcaggactggaaattcctactaccactgaatttatcaagattcggtatgcttatgagcttttgacaaatcccatatggaaaaggaattatgatgtatttggaattaatgagcaagatca

SEQ ID NO: 250200 - DNA, 385 bp, Gossypium hirsutum
gtttatttgagtgttggagtttttggactgctttctcaaaatttttattgactggaagttttctaggaaaatttgacatggtcctgaaattcaatttataatttgttgctaatattcttttatttttagctgaattaacagaccaaattcggtttgttggttaaccataaaaaattcagtttggttaacagaagagattttaagaaaatttgatatttgaatgttattttggttattagttaggattagtcctgttaagtttttataccttcattttatttgttttgaacttttagtatgtgttaattcaacatctgatggtgattaatatcttcattgtattatgcttttagattttgatttgttctgatattttggtcggata

SEQ ID NO: 250201 - DNA, 299 bp, Gossypium hirsutum
aaagaaccataggggagtaaccgtgggagaagttttaattgaaggagatagaggggaatctcggcgatgtttatttctgtttaaaaacatatctaatccatgttcattaccggttagagaaataaaagagcgttaaaggaacaccgatgaattttctttgtggaatatatcgatgatcgatcgataagctctgcatttctcaaatggagattgttttaaatcgatgacatgttcccgatgtgttgtgcatctgagcgccagatcggctcgttgatgcattgagtctgcctgtcatttta

SEQ ID NO: 250202 - DNA, 385 bp, Gossypium hirsutum
attttgggatgttctaaatttttgaggtacatgtgtactgtgctaagtactctgagtgtgtgtgtgtgtgaaaacaacctggttaaataaactggtcttgaagtcgtctgattcagcccaatatatttgccatagtgtcaacttgataatgtcaacatgattgacgcatccaggaatgtaatttttggaaatgttgccctacaggttgcaactcttcagtgttcaacaattcaaggcgatgcaagatatgggaacacatacgaagggcttactagtattgtccgtaatcaaggatggagacaattgtttgcaggcttgagcataaattacattaaggtattttatgtagtactcaacaataatattaaacatagcttctagtttt

SEQ ID NO: 250203 - DNA, 222 bp, Gossypium hirsutum
cacacacctagtgtccgacagtttttcaagaactagcttaagaagggaatggggcgaaaattgctttaccgtgacgcagcggatgacagcatcgctagggaatcatgaaacatcgccgggtacccactgatgagttaaaccttctaggcaatggttcttcctacttctggtaaccgctcaatctgtggcaatatgcatcgggccacatagcaccggacgtcc

SEQ ID NO: 250204 - DNA, 223 bp, Gossypium hirsutum
cggactcgtgggagctaagttcaagtttttttcataatttacagctccaaggtgacaggttactgtaccagagacaaagaagaaagccaatgtagaaatgttttttttttggtttcaatgtcaattacagtgttgaagaaatatagtcaccataggttatgaatgtaatatttaatacaaataacaactagtgatgagtgttgttctttgcttttatgcctgt

SEQ ID NO: 250205 - DNA, 228 bp, Gossypium hirsutum
gattggtgtaccaaagaggagaatggtttttaagcaatataaattagctgaaagttaaacagacctaagtattttatacgaaagggaattatgattatattcataaattatttattatatatataggtgactatttataaaaataaagaaaaaaaggataaattatgttaaggagatatctcctcctactaaagtttaaaattggagtttggaaaaaataacttttag

SEQ ID NO: 250206 - DNA, 385 bp, Gossypium hirsutum
ctttttgcagattacactctctattttcactttgcttttgctaaatttgataggatcctctcttaaatttcaaatttgtaaagaaattaaagaagcccccccgtttttttcctctcaaaacccaattgattttagaaccctaatttcactttttgttcttatttgaagctcaaaagatacaaattttaaagttttcttttggaaaaaaaattggttttttaaagcttgaatagttaatctgctgcttttttcctcttaattttataattttaaagcttttaccttgaaatttcagctatactgtagctgaatttaataacaaaaataaaaaggatttaaaaagttttatatttgaatgtttttcatcagctgggttgatatgaaa

SEQ ID NO: 250207 - DNA, 360 bp, Gossypium hirsutum
cccacgcgtccgtcacttttatttattaaggggatttttttagcgaggacctaaataagggagagagttgcacacaatattaacggcatttttgcgatctatatacatatctccacgaagagcgcacgtgctgttgctctgtctgtagagcacatcaaacacaaactttttgatgtctgagctgctgaggagagatgctgaagctcttttttgcaagatggacctccaagaacgaagcatgcatccaaactgtttggctgcacttcttgctgagtcattgaaatacatatcagtgctaaccaagctgataagtgaaggcattagaatcgcatctgccaattcgtatgcggctgatcgaga

SEQ ID NO: 250208 - DNA, 388 bp, Gossypium hirsutum
gagatcgccaagaaagagaatgagtatccacacgaggaggccacttgcatgcatgaacctgcagcggaagtggaaacaaagcttgaagaggtgagtaaagaaccagaaatggaggaacatcctatagctgacatctcgagttcatcgactggcgatgaaatcatgaaagaaagcacagaggaaaatgaaagcatcccattgaagttaacagaaaatgcaagtccttcattagaaattcaagactcaaaaaaggatactgaagagagaaccttagtagaaggaagtatcgatactgctgacccggaatcggcaccggctgcagcagaatcagaagagacaaagctaaaggaagctcctatatctgacatctcgagctcaatgattagtg

SEQ ID NO: 250209 - DNA, 355 bp, Gossypium hirsutum
caaagggttagattcagccatgctccttttcttccctccgggctccatactttcttctatttcccctctagccctctttttcccctcctctcctacaatcagctcattctccaaatcatgctccatctctatgttattattaccaattagcttccttgaactttctagctctgcgtaaagcccgttaccttccagattaaaacctagaattggatccggaatattctcaaattttcctactttcctccaatctctatcactcctgaattcatctctattatttttgcctactgatcatccctcctcccttaaccaggcactgcgcattgcttgggctctcattgactgtgcccgg

SEQ ID NO: 250210 - DNA, 386 bp, Gossypium hirsutum
cccacgcgtccgcccacgcgtccgttatattcggatggactggagggaagagcttctggtaaaagatgagaacagagctggggatgcctctccaaatcttgagcttgctttgggggctgagatgagaccaccaaataaggggatcctgcctttctttgttggaacagcagacaaaagtgagaacctggataaggtaacaggaaaggaagaggcggatgatgtgtctgcctcgctttccctttccctgtcgttcccattcccagagacagaagggaatgtgaagtctgtatctaaaactgagcagctcttgccggaaagccatggtgtgaatacttccctactactgtttgggggattccctaacaaatagtatgatggtgatccta

SEQ ID NO: 250211 - DNA, 393 bp, Gossypium hirsutum
aagaaatccattcaccctcccactcttaaaaaccagatcaaattcctttgtgtgtttgctttttggaaattttattggccataaaggaactattgatacgttagaaaggaggagaaattttcaaatattttgtgaaaaatttagatttaggagagttatggagaaggagaagaggaaaaggagcgagaaagaaaggaaaggaggagtaacaatggagtcaacgaacaagaagaagaagaaggtgacgaaggtagaggaagaagaaggcagcgttggcgaggaagaagaggaggaagtggaggagttcttcgctatactgaggaaaatgaaagcggtggttaagtatttcaacaaaagcggaggaagcgaatggtggagggcggcggtggagtc

SEQ ID NO: 250212 - DNA, 358 bp, Gossypium hirsutum
agcagtctgtcccgcttcttcttgttgtgatttaaactgaatacttcattccaattaaaattacaaaagccaatacatatgcatcattccaaacactgaactttaataggtaaaactaacaatttgcttcttttttttcattttccaactcaatcacttctcaaactagggaaacaatgtgactccatttatatacatcttcgagttgtttacctctactttttcattattaaatcaaactaagccaactaaattagtcttggcttcaaaatttggaaatcagacaaacttcttgtttccttaaacctggttagccttcatcatcatgagctttgtttgcacccacatgtacaacttt

SEQ ID NO: 250213 - DNA, 383 bp, Gossypium hirsutum
cttccgccacacccttccgcccacgcgtccgttcttgctcggttttttaatccttggtggagaaagaagggatccttgctttgctttgattatttttcaatgatgatggagctttttgtattggggtgtacgggagttgtggagttcctccacggagccaatttcttcttccatgttctttctcaacatctcgctgttcgatctctcagtatcttgggatttgctgggtggtaataccaaaaaggggagaaaacggagatgattcatttatcgttttgcaaatcgagatgtggatcatgatgctgtggtaaatatttgattacaacttagattctgggcaaatatcaaacgttatatgatcattatgtattgctagagcaaaa

SEQ ID NO: 250214 - DNA, 366 bp, Gossypium hirsutum
ctcaagatgagggctctatttcaatcactgaagaggagatcgattctgaccactgaaatccagtaccaacattgactgacaggcggcgacttttgaacctcttcaagattgctggctttgcaggtaaagatgctgactggcagataaaagccaaaaggatagaagctggtttgaagattttgagattgcaagaagaaattattggaggtctacctatggatgacaccaaccaacatggtgaccagaagcttctttattctgaggagctgattgagctgtgttttgaaaggggaagccaagagctacctttgcagggttttgatggtatttgcatggactagctaatcatttcgcaggagccatagg

SEQ ID NO: 250215 - DNA, 364 bp, Gossypium hirsutum
gtcaaaatcaggactctattttttatattttacaagagatcgattctgaccgcggagatttataccaacattgactcacacgcggcgacttttgaacctcttcaatattgctgcctttgcaggtaaagatgctgactgtcatataaaagcgaaaagaatataacctgatttgaacattttgagattgcaggaagaaataatggaagttctacctatggatgacacgaaccaacatgttgacaagaagctccttcatcctgaggagctgatagagctgtatctcgaaagtggaagcaaatagctacctttgcaggtttttgatgtatttgcatggactagttcatcattttctcaagagccatag

SEQ ID NO: 250216 - DNA, 391 bp, Gossypium hirsutum
cggaaacggaaggggccggcccgacgcacgcgtgcgaccacgcgtacgcaaatcgaatatgttgagagtggcaacgaggcggctcagttcttgttcgtctgcgtggaggtcgcaccaggccacctccgctatcgcctctcgtcctttcatcgacggctccgattcttctgattgtctcagatccaatttctcctcctcctcattttccttctctttcgcttctcaattccttcttcccaccagaggttagggtttccttttgcttttcaaattttctccgctttgtttcactttttcgtcctaatatggcggtcatatcaaatactattattggttaggttttcgctgtgacaccgttttcatattcaaattctaattgataatacatgct

SEQ ID NO: 250217 - DNA, 380 bp, Gossypium hirsutum
cggacgcgtgggtgaagggcaaaggtaagcgaagagcgatggacaggagccatagcaaatctcaccgagatggcttcaaatcttgattctctgcagaaattacttctcaaaaaagctgttttcgtcgacgaagataccttcgccaaggcctcacttacctcggaacaagcccgaaccatcaaggtccttgaacaaagggtggagacgcttgaaagagaggtagatgctgcaatcacagcagcagcgcgtgctcgttccgagaagcgacaggctgaggctgcccaaaaggccgccgaattgcgtgcccaagaggttacaaaggagctcgagaacaccacaaaagtatttgaacttcacatggaagagttgcgagcaaagca

SEQ ID NO: 250218 - DNA, 380 bp, Gossypium hirsutum
aggcaatcattctcgccaactcgactattgaggagaaagaaagctccatggacgagatgacgaagaagagatgctcaagaagggagtgcaggagattgcaaatgaggatgggacagttccatggaagagaattttggagtttggtaccaatgtgtttcttatggataggactgcaacagacctcaagaataagtggagaagtatgtgcaagggtagcccgggatgcaaatgatatgatgtcacagccttgtgattttgcatcttatatatctcggttaagtcatctctttttgttttaaaggaagtaggtgagttcaatagctctgttatgatttactgtattcagggctaaagcataagtaatatgaagttggaaatgg

SEQ ID NO: 250219 - DNA, 431 bp, Gossypium hirsutum
  unsure (1)..(431): unsure at all n locations
cggggcgggaccaagcgcgtccgaacaccaacacacacgaaatgcacggtgtgttgtatattcaaagacatggcttccgcgcgtttgcgagtgcggatacacgcacgggcgggatcacacacaggaagagcttgaaaggaggcacttgcattagcttgagagttncggtttgggattggtggaaagcactgtcaaggggatgaaagaagctggattgcaaccatgnatggccaaattgagaacgccaaggagattgagaagctggtgaattatgctcagaaacgcttgcatatgaaaatttatcaaagcgattggtgatttgattttgcaaaccactaaatgcaagtataactatttaacaaatatgtgtctatgtagtattaataatgaatctgtccgcttgctttgtggattttcctacttatttcaat

SEQ ID NO: 250220 - DNA, 375 bp, Gossypium hirsutum
cggacgcgtgggctttttggctattcattatgtgttaatttggcctctttttttgtaaagaaaaatctttagagagattacacttttttttatcccttttcttgtttctatttttctcctcccaaaaaatctctcctccccttttacaatattgttgtttttgtacccaaaaaaatccggaattttaggctttatagccgaaataccatggatttgctattatctatttccttgttctcttgcttcttttctgcccctttttgttttttcttctttgtttcttttttttttttgtttgctactgtttgcgtttgttttggttctctgttgttgttttgcaggtgatgggacgatgggatggggttaggtggtggc

SEQ ID NO: 250221 - DNA, 416 bp, Gossypium hirsutum
atttctgagtacagtacgactttttgctgtaacggttctactggtgatgggtgaaataataacagcgatccagctgtcactcagaataaaaggaacagcaataatttttcagagcacttcaaatggcatgatcatctagtttactatgactattgttgtttgtatttttattttaaatttttctttttttttttttatatattatttttttttttactacttttaatttttttttattttttttaatataatatatttttatttattatattttttttatatttatttatattttatttttattatttttaattatatatttataattttatattatttctatatattatatattttatatagatttttcatactatttttttttatatttatatttttatttttattttatcata

SEQ ID NO: 250222 - DNA, 399 bp, Gossypium hirsutum
cggggcgggccgagccgtccgttcgaggggaaggagttggaaggaattgttaaccagggaaacctgtgctgtgaaacaagaaagctgagataatacactgcagccagagaaaaacaaaaaccaaaaagctcaaatcccaatcagtttaattaagccaaaaatcatcgggaatacagactttgttcatcgattctcctctttgatcttcttttcgtttttttccctttttcatctgaaagctttagctatggatcctttcgatttgtttcgcaaaggttttggttagaatttagtggaactcaagtgtatatcctctgcatcagtttcctttatatacatagaatctactttttccttttaagtaaagaatgagcttgtccaagaaagggacccaaatta

SEQ ID NO: 250223 - DNA, 182 bp, Gossypium hirsutum
cggacgcgtggggtccaacactattggaagctggataaggacaagggtgtggtgcaatatttctaaaaggttgagacttactaacatcaataccagacaagtcactcagcttacaccacctaccccgactcccatacaacctttacccacaccaaaaattcttaaactcctccaaccttaca

SEQ ID NO: 250224 - DNA, 314 bp, Gossypium hirsutum
tccacacgttctcaaacccgttcgtattattaatatcaacacgccatagggtaggaatattaacttgccataccctaaaaacagaggtaaggcctaacattaaaactggtccaaagcctaacaatattcaatgacccaaataaaacaaattatataaaaccaaaatcccaaacgaatccgtcactataaacacaaatgacgtccgcactatctataccaatcacaaccccatcatatattcaaacttcaaccccgccgcttatacacacaagcaacaatctgacatcacacaaaaacagttatttttcaccaca

SEQ ID NO: 250225 - DNA, 285 bp, Gossypium hirsutum
gtatattgccaccctgctgtttacggcgaccgggggagttcatggaaaacaaatcaccctcaagaaggagcgcgagccaagtaatcatcagctgggtcgaaaggccgacatccgagctaaagacgatatacatctaacgggagaagatggttctgctactttcacccttttccttaccctctatccacctcagaacagcttccgaaccacaaccgcataatcctcaccacttcttcttcttcttcttcttcttcacctgcttcttcatccttcttctagagaaga

SEQ ID NO: 250226 - DNA, 322 bp, Gossypium hirsutum
ggggggttctctgatttcgaaaaatttgggtcttggtgggtgactttgaattgttcaaaaaggattgaaagataaaagcttttcgattggtgtcggtcttgcagtccaaaattcttcaactttgggtgtatttgatggattggatttctcttagagttagcaaattttattgttaaagtaggttatttgttgtttaggcgattgtaatttctgtacatatcataacatgggttgtatgagttccacagctgcggctgtcgaagatagtcgtgagaatcacaaagagaagctgaggcgaaaagggtctgtggataagcttgtt

SEQ ID NO: 250227 - DNA, 383 bp, Gossypium hirsutum
cccacgcgtccgaaagaatgaaacatagtattctcattctctgttttctcctgtgttcataatactaataattaccacctttggttttgatacatatatatttattttatatttttgagtgctggaaggaatcagatggccaaaaccggagtgttgagttccaatccaacgctgagagcgagagcggcggaattgaagaaagaattgcagaggctggttaagattattgtcgatgatgaggattgcagcgtccagaccatcgatcaagcgaaacatgctctttgtgctttgagagagcttaagttcaatacacgatcgtcggcgaccactttgacgtcgtccttgaagttacatgaacagctgccatgtcctcaagagtttat

SEQ ID NO: 250228 - DNA, 383 bp, Gossypium hirsutum
ggattatcttcatcagatgtccgttctagtttgctgcagtcgggcctctttccacatgggtttaatcagcttggtcatactatccctcctatgggacactccagtgactatggaaacaataggaatatttcttcctcgcatacaatgggaaatcttacccaaagtttaaaagaaagcaatgaaataaagacaccccatatcttattgtttggtcaactcattttctgtgagcagcacgtttctcagagctgctcagatacaattggaaacagttcatccaacgggaatacagagaagactgtgatttcttccgatgcctctggatctgcattacatcaaaatgctcgtgaaaattcttcagatgaagggtctccttggtacaa

SEQ ID NO: 250229 - DNA, 396 bp, Gossypium hirsutum
  unsure (1)..(396): unsure at all n locations
cgggntttctgatttttcccttcgtttaattctaaaacttttcttttaccctcttcgcgcccgcccccntttctactccaagatggaccctccacgtggagcccgacgtccgccaccgccgactccatcccgccttctccgccgcacgatcctctcgattccgttcccatcgggtcacctgaagacgatattctgtctccgccgtccgatgatgatattgaccacgatcacggtcacgaaaatgaagatgatcacggccaggaggatcaggttcagaatcatgagatctcctcggcggttgatgtacttactgatgatctcaaaaagaagatcattaagcaggcggaatattattttagcgatgaaaatctgcctactgataattacatgatggga

SEQ ID NO: 250230 - DNA, 387 bp, Gossypium hirsutum
aaaaaatatcacatttatcaagacattttcttctctctatcatgaaacccaacccttgcatgtgtcctatacatattcatctccactccctacctcaaacttaacttctctcttaaacccacaaataaaacctccaactaccttcctcaactacctatatttaaactccattcaacttcaaccactcctataatccattaacccaatcttttcactttattcacacttcaaaaatctaatttaaccgcatgatataccccattcaattaactgcatttatataatatatatatcttttgctcacctttactaatatacctcccaacaattttaccttctaattattttaaaacatctatcaattttaatactattactctttttaca

SEQ ID NO: 250231 - DNA, 358 bp, Gossypium hirsutum
gaaatcctattttccctttatccgctctggtgaaaagaatagagaaaaattgccgtaggtttttttgatcgacataaagaaaaagcgccggctcgtgacctgagatcatcaaaacctaaacacgatcctttgatttccgaaatatgtggagaaggctacttacttcacagttcaaatatatggcaacacttgcatgccgatccgtctataaaacggcgccgcgttcatacaaagctcacagtactccttccgatgatgcgtgcgatcttggtcgccagttctccagcgagtcagcggatactgctgagaagaagagagttgatgatgtaatgcctatcgctacaggtcatgcacgaga

SEQ ID NO: 250232 - DNA, 404 bp, Gossypium hirsutum
  unsure (1)..(404): unsure at all n locations
cggggcgggcccaggcgtccggttttcttaatacacttgcaagaaggtttctggtgaggtctatttcgcgctttggccgggggtgtttggaattgtttgggctagtaacagtgagcccttgtttaacctctttggcttcttggtttgcatcggttccactgctggccgtgctttgaaatctgtcgttcaaggaatcttattaaccagtgaagctgaaaagttacattccatgaacttattgttgtacatggcacctatggcagccatgattttgttaccattcactctatacatcgaagggaacgttgcgagaatcacattagagaaagctaggagtgattctttcattgttttcttgttgctcgggaatgctacggtggcctatntggtgaacttggcaaatt

SEQ ID NO: 250233 - DNA, 175 bp, Gossypium hirsutum
gcacttcatcatatgctgcccaagtttgttaagggcctggttgctggctttcgcggaggagcgtgggatactgtggagttcccctccacaattcatggagaattggtgttcccacacaaatacattgatgcgcattgcaaaccagtatcaaccaggtcatagtctcacctgaata

SEQ ID NO: 250234 - DNA, 315 bp, Gossypium hirsutum
accgccgttttatgtttggcctagtccgcctttcccactggtttgctcgtttccctcctcctcctaaagtctctgctgctgctgctgctgctgctgcatgcatcccaagatccatctctgagattgatctgctcatgttctgtaatacccatcatctgtgtttctttctcttttttctcttgatatgtactgtcatggcttgcatatgaccatggagtgctgaaaatgatgcatgcttttttattttcatttttgtcctttgtttgagcaggcaaccttggtgaaaatggagaaaagttaaaagatttaagccta

SEQ ID NO: 250235 - DNA, 164 bp, Gossypium hirsutum
  unsure (1)..(164): unsure at all n locations
gggacctacgcgtccgatnnaatacctaattcnngttctatttaactgacaagaagagggctcgttgggcggtatttttttatagagaggaagaccatacacaacaacattataaatcatattaataattcttatttccatcctcaattctttactttcccatc

SEQ ID NO: 250236 - DNA, 191 bp, Gossypium hirsutum
tccagacttgctctatgaaaaacaatcaatacaggttgctaacagttccgaagtaggggaacctgggtggtgatgctagctgtggggaaaaccagatttttttggatcgcctttcctgtatcgaacttggtcgaactctgaaccttaccaaagtattctgtcctgcatctaccacaggtgaacttgatcag

SEQ ID NO: 250237 - DNA, 181 bp, Gossypium hirsutum
cccacccttccgcccaattcctttttttttcccccccccacaaaaaaaaaacctggaagtttaataagagactttcctttcctccaatccttaattcgtttgggttaatgacctcgaaggaaaaacccactttcggtggtccccggtttaaaacccgcaaacggaatattgctgccccttt

SEQ ID NO: 250238 - DNA, 383 bp, Gossypium hirsutum
cccacgcgtccgcatttagtcagcttccaaactatcttaaagatggtgcaggtggtttcttgaacatgggtggtacgctttcaactggatgtgatggtgccccgctactacctttgctgttcattatcgttaacatgggtttcaacatagcattgctacatcttctcaagatatcttctgctgttgtttcctcacttgcatccactttttcagtgccgatttcagtttacatcttcacattaccgttgccgtatctcggtgttgcttcgtcgcttccagccggtttcgttgcaggagcaatcatcctagttatggggttgcttatctatgcttggtcaccatctgattcctccagtgccataccatcaccatccagctagaat

SEQ ID NO: 250239 - DNA, 377 bp, Gossypium hirsutum
ttttctctcatcttctttaaactttctcaacttatttctgggtttcttttgctgatcttgggtaccattttttaaatgtaattttcacttcaagaatcaagacccatcgatataaaactgcaaaggttttcattagttttccattcattttatagttagatttgatatgaaaaaatgatgaacttagtagggtgtcttctctgtcttcatatttcctcacactgttttaaatcatcgatcttcgccgacctaaaacaagaataaaacatggatcaaacaatctctaattgtcaaattaacaagatgtgggattcaataccaattatttaaatgagttagaaagaatgttagagaatgttttacctcatgctatgctg

SEQ ID NO: 250240 - DNA, 383 bp, Gossypium hirsutum
agttctcataacaatttttcattttccagggtttaaattaaatagaagagtttagagatggcagatattgctatgcttgttgctgaggagtatgaaaggagggtaagggtttcgagaagcaaattagttggttcgcagcttcaaaagcgacatgagattgacttggtttcttttgtagcaaatttgggtcacaaggcgacgactaaacttgggcatccaagggttgagactgtcaagttggctgtagagccaaaaagccagattggtgttgcagctttcaacggagccttctctgcttgataacttgtcactttctttccttaaaatcattgctccaaaaaaagctgtaaattaaaaattcatttcattctgtcttttgattt

SEQ ID NO: 250241 - DNA, 384 bp, Gossypium hirsutum
gtagaaggaagtattgatactgctgaccgggaatcagcaccggctgcagcaaaggcagaagagacaaagctaaaggaagctcctatatctgacatctcgagctcaatgattagtgatgaaactttgaaggaaagcaaaaaggaagatcaaagcaccccattgaaggtaacagaaaaggcaagctcttcatctgagcttgaggactcaaacaaggatgctgaagagaaaaccttagtagaagaaagtatcgatgctgctgacagggaatctgcaccggctgcagtggaaccagaagagacaaagctaaaggcagctgaagcagatgcagaagagaaaaagcaggaaacagaaaatgttgttgccactgaagaaaacagcctagca

SEQ ID NO: 250242 - DNA, 377 bp, Gossypium hirsutum
  unsure (1)..(377): unsure at all n locations
tttcgttatttctacatctggggcaagtcgcagaatctggtacctggcattgaataggattggaaaaagtaagaaggaaattatttagggttttccatactaggattctaattttagccggcaggtttaccttctataattcattatacatgggtttgtaagtaatttaatttttatgtatatttgtttatatttccgtttgtattaagtttttgtaccaactctgcactatataaactctngaagcctcttctcgccatatgancttatccaattctttctcaagtgggaagggaatgtacagaattcttgttgcgtcatcttggtgaaaggtatgttgaaagaattcttgttgcgtcatcttggtgaaaggtatg

SEQ ID NO: 250243 - DNA, 382 bp, Gossypium hirsutum
cccacgcgtccgtagctaagtttatcgcaatatgaagttgttgacaggtaatattaaaaacagctaaaaaattctacctataaggttcatttacaatctcaatggaatgttcatattttttatgtactatctggattatctgctgtagtacatataggcagacagaaaaaaatttcctactaccaagattctaaatttctgttgtatatatcctaataaataaattgctgatcatcattcaaatatcccttgaccgattctgcccattcaatgatttgtacttgctcaaacttgaatcaccaaaactggacgtgacttgaatcagaaagccatctctatggaatcaatcgtcagccttcaaggaggttcaaggaagctgaga

SEQ ID NO: 250244 - DNA, 360 bp, Gossypium hirsutum
ctttaacttccccaaattccaactttgttgtgggtttctttggggtaaccataaaaggccactttcaatttcatttaaggcctaaatttcccaacccggtcccaaggaggaggaaaccccaggctttcctcctcctcctcctcctcctcctccaactacaagaccagttccaactttggttcttcttccaaacttaaagccgccagagccaaagccatttgcaattaggcccgacaggactggggatgttgttggggcttctcttgctttgttctttcggttgggaactggtgtttttgtttctggctattcagcatctttagtttctgagaaggagattccaccaggccaatattcttt

SEQ ID NO: 250245 - DNA, 392 bp, Gossypium hirsutum
  unsure (1)..(392): unsure at all n locations
ngacgggcctgaatagtgacattggttcccttatcccttgggtgctctctagcttatgctggggcaatttccaataaatatacagctcttgaatctgtatttgttcaaactctattaaatctaaaatgatgcacttcgttattcttaccatcttatgtggggcatacttaaatggatgttttgggtgctccaacttggtgatgtttataatttaagatctgttgtttctgctacttctctttaatatgcttgtactttctcttcaaattctgattgttttatgagttgttccctttatgttgcaatgggttgaaattctaatacttgtcatctcttcttgatttttcaactagatcagcttagttgttatgccttaatgttttcaaatgagt

SEQ ID NO: 250246 - DNA, 375 bp, Gossypium hirsutum
gaagaaagggactcaacaaagactcaacaattcccacacaagaagaaggtggaaagggggccactcatccagaaacactcgagcataataagaaaccatgcaggagggcattagattttgacacagaaggacaagaaagagaagaaagctctgcatgcaagccagcctgcaatttaaattctagtccagggacagaaaacctggggaaagaaggaagtcaatcgaagtctatggttcagctttgtggcataattgaagtggacgcagaaaagacacagacagggattgcctttgaactaaaacaatctgtaaaggaaaagctgaaagatgatttatctctgcctgaagatcaagctccaggcacaccagttccaa

SEQ ID NO: 250247 - DNA, 313 bp, Gossypium hirsutum
cccacgcgtccgcccacgcgtccgatgacacgtgggtaaatccaatagcgctgaagataaatgggagcgtcaacagtgatttctctaggttacaaagttaccgtggtggccacgcttatggttgcttgtttgatggctttatgagccagaaaatattaaagggggtttcacaaaacatgggccgacgggcgcggcaaaattgtccacaaagggtaggtgatcactcttttccaagataaagcttgaggttggggtttccataatcaacgaatcaatgatcctatcttgaaagattgttctacagctgacgctt

SEQ ID NO: 250248 - DNA, 377 bp, Gossypium hirsutum
tggacaaattagttctatgcatgaaatttttaatggaaaaatagcaatatgctctttgagccaacgtaaaaggactaatttatttcttcttttttttttgtagaggggtaaaatgtaatttgtctctttatacaagaacctccattatacttttattcattttggactaaagtgattggattaagtggacaatcctttttcatgctgatgtggcaagaatttagtgataaattttatatgtttgaaactaaatactagccacatcaatatgaaaaaggattgcaatctatggtgtaacacattccactgccaagtgtgcatatatattatataaattgcctgactttttgtaatgtatttgttgcaactacaatgca

SEQ ID NO: 250249 - DNA, 326 bp, Gossypium hirsutum
tttaagacaaatctctctctcaattctataatcaaacgttcaattgtgagtattcgcatctagatttaatttccatttttagctttcttttctttgaagtttattattaaattatattcccaattttttcttttatttctctgtttattttttaagattaacagaggttttgtatatacatcttgccatagagtacagaaatttgattcttggatttagtgaaaaggggaaaaaggattagttatgaagtctagcacttggtttggaatatccagcatgaaaccttgttgtttatttcttattagttatagaacctctcctttttt

SEQ ID NO: 250250 - DNA, 193 bp, Gossypium hirsutum
cccacgcgtccgtccacgcgtccgtatgctattggtggtgtttggttggtcaatgacgcgtaggattgctaagctgggaattaaaagctaaaggcaaggtcttttcctagaatccactgcaagtttctcgttttatattccctctttacttctctctcaatcgcccaatctctgtgtcatacacgaaagagaa

SEQ ID NO: 250251 - DNA, 333 bp, Gossypium hirsutum
tccacgcgtacggttgatggtaacctcacttatcaccaatcaccgattcttcactttctgggatttgttggtctgatttggatcactttcgtcttagccgaccactctgaattatcagtgccgtattagccgcgaatttcgcgggcgaatccctcacttgtctcataatgctctaaaatgccactttcttcgacatttaagtttcttaatgcctgagtcgaagaaaattgaagggcagagactagtgatgaaggaaagaattttaggtgacctagaaaagtgattgccttctgtggtgcttatatgatttttgataattctttgattctactg

SEQ ID NO: 250252 - DNA, 220 bp, Gossypium hirsutum
aaatctctgaaaacatggaggaggttgacgaatgcatagtatgtagcggcgggggtttcagtatggatttactcctttgaaagcaacagccatagcagtacctccagatgtacaatttaggcgggtgcaaaggttgtacactattggatttgtcggaaaatggagcatctggctttggaagcgctaaaattacaatatgcaaaggtcacaatgagttaat

SEQ ID NO: 250253 - DNA, 150 bp, Gossypium hirsutum
catatgtgtgcaagaaactatttcctgcttgcaattatcagttgttattgtagttgatattttggtatttagtgtgaagtttgtggtttgaataaattatccttttccagtagtaatttggatggtctgaatccaaatagttccgatgtc

SEQ ID NO: 250254 - DNA, 108 bp, Gossypium hirsutum
aagttatataaacaatatctgtatgaaaatttgggtctgcaactgcctaattaacatgggtaattagtgtaatacagtttgcatgaaataaagataccaagcttacct

SEQ ID NO: 250255 - DNA, 339 bp, Gossypium hirsutum
taaaattactgcctagaatcatgtttttggaaccttcaaaagcacatgggagaaggtctatctgaagattgctcttctacttgtgagagaaggatcatccaatgaatctgttattagtgtagaggtagtccaatctgcttaatccaaagcataagttgttgaaactgatcattatgcagcttcaaatgagactgctgctgaagttgaatctatttggaatatcatgtatgagcttaaatctgaatccttatttcatacaattgaccatcctaaggatccaaaggatgctacttatactgataaacttaactaaactgaatcaagtaatgcagtttaaaa

SEQ ID NO: 250256 - DNA, 367 bp, Gossypium hirsutum
cccacgcgtccgaagcttctaaagctgtatgagaaaaattgggagctaattgaagcaggggattatagagttcttgctgatgctatctttgaggaggaggacagcaaggtgtcataacctaaaaaaagcaatgcacatgatgaggacattgacgaagaaggttccacacctgatgagcttgttcgccccttaaaaagagcacgattaaaaaaccaagaagggctggccacttgttctcatacaattggaagctttaatgatgccgaaacttgtaataaagagcctaaagttgaggagaatgaaataccttctgcttctttgcaacaccatgcactttaatccaatgttggcaatatacggacagaaa

SEQ ID NO: 250257 - DNA, 372 bp, Gossypium hirsutum
tggatattgactcgtcatcttcatctttggtaatagaaattggcatctgtaacaagaacggttattttcaaaactccaagagatatgaactctactcctttgaacaagcatttgtaaaaaagggagataaaaaaatgtggttgcaattgatattttcacttaaaacgttgttgagggtacattagggctctttaaccataagtatttgagtgttggtaacatagagctctttaacatcatgttgttgtattgtgttaaaaattctagagtctactttggtatttagacaggttaggactccagtttttcctggggttcaatattaggatttgagatttttagttcttgtacacaattcgtgctcagtaaggg

SEQ ID NO: 250258 - DNA, 281 bp, Gossypium hirsutum
tttttaaaaagtattaccaatttcatggcattgaatttaaaagtttaggctgaccaaattcaatttcttttaagggccaaatttaattttacattatatttaaataatattctaacaaattccaactgttatgtgggctattaaccattcttatcctctttagcttcccccttgtaaagaggtttactttcaaactttttttttctgtttttgtggcatattaaacttatccaggtgaataacatgatcttttattcatttgacgttctcaaattttttta

SEQ ID NO: 250259 - DNA, 359 bp, Gossypium hirsutum
tccttctgcccccaaaatgtttccttttttgggaaattagtattcaatttccctttacttctgttactatggaatcaacgacgtcgtattggtgttaccgttgcagtcgattcgttcggatttttaaccgagatcccatcgtttgccccgactgcgacggcggattcattgaagagatcggttaccatccttacgccgaattccgttgcctcggcaccaatagatttcaagctgtctccaggtataccagcttctacttctgctttcacaagccgtcgtaaccgtggcgattggtcttctttcaattctcgtattgtcttacgcggcggagccttcacttacttagtctgtggggagaa

SEQ ID NO: 250260 - DNA, 370 bp, Gossypium hirsutum
agaagctaaaaatttctccttttctttagcttgaactgcttttggatgataatggaccaaattaacctgtcttctcccccaaacgttttttcccctctgctggttccccaaacgttcttttccctctgctggtgaaattggagctttatacccaaattttttccccattttcggctttcaaagctatttcctattctttgttcctcttccgcaggtgcgagtttcttttcttcttcttctgtttaattagttcctcttctgtttaatctctgtctgagaacctatgggggttttcgaccttaacattccatacacggattccaagccgcccagcaaggcgaattccaccgttgccaaattcacccgcatt

SEQ ID NO: 250261 - DNA, 371 bp, Gossypium hirsutum
gattgttcaggaaattcacaaggatgaagctgatgatagtggtcgtgcagattgactgggaatttataatcagcttacaccagatgaggctagaagctatgctttatctcaattaccaagggaattatccaaacacacgggctttgcctttgactctcctggttacgagtccttttttgcttcacaactcggtgtatatgcacctcagaaagcatgggatgttgctcgcagagctagcatgaggtcgaagccaaagccaaaaccaaacaaaataaattgatttggaacaacattgttgtacaaattttttccccaaacccctcatttgatagcctagccctagagatctgtaaaattagtgaatttgatgt

SEQ ID NO: 250262 - DNA, 339 bp, Gossypium hirsutum
actacatgtttattactgtatagcttttgaaattcgaagacaaagggcttaaaagtgtttccttgtcatcagctgaaagaatcccaagatagatatgggaactgggttttattcagattggaagactggttgtttgttcgggttagagaatttagaagaggacggagtgcttaaagcaccatcgtctttaccagctatccgtcagccacaaacaccaaaggagcctatggagttcttgtctagatcatggtccttatctgcatcttgaactttccaaagccctttctcataaacagaaacagttctagttcaatctttattcaagttcaattacagacc

SEQ ID NO: 250263 - DNA, 360 bp, Gossypium hirsutum
aaaccatcgacttgtgagttcaaatccctgatatgtattgttcatctgattatttatgcagacaaatgctgttattcccaattgattttattggagcatcatcggtcagtgcagaggcactcaaagaggacaatactttagggatattagtacgaatgtacgatgccctaactgatttaaatataattgcagagagaatagaaattactatacttgtggtatcatgtttcaacccgttaattcaaatttctgatctttatttttcatctgaatcatgcacttgtagttcagttcaagtatttcatgaatcctgctttctagtagatatcagtgctgtacttggtatttggatcaatagct

SEQ ID NO: 250264 - DNA, 371 bp, Gossypium hirsutum
attgctgattcggtcattcttcgagattgagctttttcctggtgaaaaaagagattgtcgaggacctagcttggagtagaatttgctggggaatatgagaattacggttttaaggagaggttaatctacccacaaccaaccaaacccctaaaactccaactttagagagcaaaattttattacccccattaagaaaaaagagaagggggggagtcttgtgcgtttgccaaagctgtaatggtgtaacagtagcccttagcagttcaaagttttttgtcatttgtgtgatttgtacatatgaatgtgtgaaatacaatcaaattctacctctttgcaagaatcccatgaattcatattatattaaaataaaa

SEQ ID NO: 250265 - DNA, 293 bp, Gossypium hirsutum
cccggtccgaactctcgcagggtccgagcccagcagcgtcccgtcacaacgttagctattgctagatccgaaccagacgtagggattgggtcctcggtgggtcgtaattacaagagaaagaggaatctaacacatctcaatccaaggcatgacatggacggccgagataccctgcctcaatcttcccacgtactccaactaaaattaccggccaaatcactttctgagcgtgcaacagatcagactgttgagagtcccagcttgcagacagagtgacaaactttaaatgcatg

SEQ ID NO: 250266 - DNA, 362 bp, Gossypium hirsutum
gtcacagcgttagcttttgcaatggcagaaaaagaggtatcggcggagcctgtggagaccaatccaccaaccgaagacatgaatcccgaaacccaagtcccgccctccccgattttcgatgacagcgtcgacgctgggttggcctacaacggcggctcgaaatcgaagcgccagagagaagaagacggcggagaaagcgacgaggtatccaagaaacagaaggcggagtcgtccgtcgacgatgaaatcatcgagaaaaactcagtgccctcagttacgagtcgggtccggcttggcccgaaagaattcgggtcgtccggggagatgtttgattatttttacaattagcttcattattgggc

SEQ ID NO: 250267 - DNA, 366 bp, Gossypium hirsutum
cccacgcgtccgcccacgcgtccgattttccgatttttccagcgttctgcctggtctacactcttgttctccctctcctctctacactgatctggtttcgttctcccgttcgttctcccttctccctttcgttctcccttgatttggtttcgggctccttttcccccttgatttcttcttctttttataaattgatttggggattttctgcttgtttttgtctgagatcttgcttgggttttctgctagtttggcttgtcttgggcagactttcttcacagacttgctttagaaagccatttcatatctttcaagcctttccctcccaagcatgcccaggtgaggatctttgactggttgtgaaaa

SEQ ID NO: 250268 - DNA, 387 bp, Gossypium hirsutum
ggcagctatggagcttgaacaagaagaggaagtgaaagaagctgaaacaagcaggcagcaagctgagggttatcttgactcagtcatggaagctgcgatggatgagtttaggcggttggaggaggaaatggaacgcatggcaaaggctgaactgaaggacctggaagacacagccgacaaggctagaaaaatgggaaacctgatggaaaaagctgccgctatcgcctccaaaaagtacgttgaggctgcacttaattctgctactgcttctatgaaatctgcttggaaaggactttcttctaaaaaggttcatccttcatgaaatgaagctcttgttgtatcttacatataatataattgaaataccccttgttctgggttttcttt

SEQ ID NO: 250269 - DNA, 386 bp, Gossypium hirsutum
ctttttcctctctaatggctgcagttcctctcagtttgtagcattagtagggacatagcatatgcttgctcttcttttttgatttctaaggcgttgtaagtactttcatgtttgaattgttagtttaatcgtcttatgtactccataaaacagaacttgtaacttcgaaatcgttggatttcagaaatttcgacgattttttagtgaggaggagatcattgaatttgagattgaatctttcctgcaagtttccacttagatccattagaatggaaatcagtgataattgtacccctttgagtgcaaacaatgaatctagaggcacgttggttgttttcgaagggttggatcgtagtgggaaaacttcacaatgtgggaggttggtt

SEQ ID NO: 250270 - DNA, 379 bp, Gossypium hirsutum
cgcaaatcccgctactcagctcactatcactttttttctgtcacttacctccggcggaacttttccaaaacggctgctccgataagtgatcttcatgcttccgatacactccccaaaacccccttcttctccgacgaaagccacaaaaacacctgaattgaactcaatcaaacgcaaaaactcgtcgagttctttccagtcacaaaattctttcgttttccccaacagtaatcgcttatggcttcttctggtcatcgtgtcgttacaaataatcatcctccttatggctcgtggcctccctctttctcaccgccgtacccattttccttcccctttgtcttacgatcataaacccgttcaaaatcgtgctaacttttcg

SEQ ID NO: 250271 - DNA, 352 bp, Gossypium hirsutum
aaatacccgacgtttgctctacgtcgcctctttgtctaatggtgttttaagcggttttctcatttcaatcctcaatttttttgaacctttctcgtatgattaagacatatatatatatttctttttaatcataaaatcatgcatcatccattattagttatcatcatcttatcgataaacaaataatttaacctttctctctcttgtatttgttttcattgagatgaacaaagcttaaggtttttttttttttaacaaaagtcaaagaaaacccagaaatatatataatttttgtagaaaaagaagcaaaaatttcatatatttctagtttgagagttgtaatttttttaat

SEQ ID NO: 250272 - DNA, 394 bp, Gossypium hirsutum
  unsure (1)..(394): unsure at all n locations
attcccgggtgccaccacagccgtccaccacacccnntccgatttaatactattttatcatacgcatatttttttccaagaagaagattttaaataaaaatcaaaaaggaaataaacaaattttttttctctgattgacaagagagttagctaaaacttgactcactcaacaccattaccttaacgtaaataagcacccaaataacttttatattatacaataaatcaaacctatcacattcaaatattctagacagaccgacaaactttaagggcatcttatcaactattcgtagaaacaaaatctcaattcaatactgctgctgtcaatccgcttcactcattgtagctctaaatcacattgctcatcaacatgcctcaaaagtcacaacta

SEQ ID NO: 250273 - DNA, 388 bp, Gossypium hirsutum
cccacgcgtccgtgttttccgctaaatcacatgtctgatactaatgatgatctgagatgttttaataataaccatgaagacaaagaaaacagcgatctcctatgttatgcctggggagatattggaaattttgaggatgttgaccagatgttcagaagttgtgattcaacgtttgggttggggagtctcagtaatgaagatgatttgtgctgggtttcatcttcacatgctactgaaggatctcaagatgtgttgaaggctgatgctaagttgaatggtttaccagagcattgtgcaacttccaggccagacaatgccggtccttcaactattgattcttacaagaaaaatgtacttctaagtgacaaaataagttcccttgatacga

SEQ ID NO: 250274 - DNA, 389 bp, Gossypium hirsutum
aaataattcgaaagagaaaaaaagataagtctgaaatcacctctgctctttgcggtcaatatgtgtatcttcctaaccttacaaccgattcacagcttggcttttatagctgaagagaaaaaagaaaaaggaaaataaattccaaataaaatttccgttcccttctatttgctgctctaccattttttgtttgtatttgccgttgtgtttgtccttcttgtaggtacgggatgcgttggcatcgcacggagactgtgctggcgtacgagggctattgacgtggttgctggaggcgtcgtacgacacctggaggttgcgagggctgccgcggctcaaggggaaagctgctagggtttctcggcttagacattgagcttattgagcctatt

SEQ ID NO: 250275 - DNA, 373 bp, Gossypium hirsutum
atgatacccaaatgtaccacatcacatacattggtacccacacttgcagaggggagtactcatccatggctacaccacgaatcgaccgtctgagtctgatatcaaaactcgaatctgaggaacaaacgacgacaccaagcgatgttacggatttggattcgatgaccatgtggacggatgtaatgatgggtggtgttggttttgaagctgatgtggtgtccaacatgtattcatgcactgaaatcacttgtttggatttagaacctgttgagcttgaaaatggtttgcagtttgatgaccctgattttgcttagtaaaactttggcttctttgtacagttaatattataagccatgttccctatttgtattat

SEQ ID NO: 250276 - DNA, 381 bp, Gossypium hirsutum
cggacgcgtgggtctgaatataaatgagacagttctttctgatcttgggggtggtatcatcctttatgttattcagccacaacagtcaagagtgtctgccagctaacctctttgtttttgtaggagtgattaaacagacttcttttttccctgcatggcaaatgttactcagcgcccatatactttttgtagcttaattttgtggcaaactattagagcatgcattctattctagtcttgccaatagaaagaaattttgatcaaacttggattgtggatattatttgggcttatatcacacacatctatgtttccatttggtatggggtgttactacattctttaactgggtcaagtttgttgtgaagtgtgaattgattt

SEQ ID NO: 250277 - DNA, 383 bp, Gossypium hirsutum
ccacgcgcccgtgagaaaagaatcgtgtaaataacattctaggatgtgctgggaaatggagtggcggtttatataactccatagagcagtcaatattagacatgttccgacaccttcccactcttagcctgcactttccgggatctaactaggtatcgtcattaaagcctgtatatctttcagaattgtcacaagcttgtgtggggaaattatgggttatatgtgtgatccattgctgttggcaagaacttcctccatggtcttgaaaaatataggactggccgactctcgttgtccaaagtgaattaatttgcacaaaagaaaaggttgattcatctcagttgtatttggcgtcgcagttttctgatatatatttctgtata

SEQ ID NO: 250278 - DNA, 364 bp, Gossypium hirsutum
  unsure (1)..(364): unsure at all n locations
cttgtatagagcacgtgatctacaaagggatgaatgtatgcgnccnccaaatagagggctgctccttccttcattcccctttatatagcccagattcttataattgcactcaatcctcttgtatagaagcaaatacataagcttttgataatcattatcaaccttcacccagtgtttgcatttattcgatcatgaaaagcacaaccctgctgtaattgttacgcatcattcccttcaaaataaaacactacaaaaaatcttatctataacatcttactcactgttataaaaaaaaatgcctctatagataacttcaatgttatcaacttaactacaatttttgcttagatacaaactaaaactt

SEQ ID NO: 250279 - DNA, 384 bp, Gossypium hirsutum
aaagggtaaaagtttttgtagctgttttatttacggagggatcttacagaggcgatagatcttgaatgagcacttggatggaggatgaaagaggcgatcacaacagctatcatcttttcttgtaagtttgaagaacactccatgatattccctgttttggttaaaaacatcattggactgggaaatgataaggaaatagaaactggaccgtgaatatctattaacatgttaaaagtaagttgtgtaataatgaatgaggtatttgtttttgtccacaactgctaaagagatagaaagactggtgagtttgtatttaagtggatggagtacatatgaaatttacagctagtccaggagtatttttaggaatattttggtgatata

SEQ ID NO: 250280 - DNA, 387 bp, Gossypium hirsutum
ataaggtaaaagcattcatacctgggttatctaccgagggttctttcaaaggcaggctgtcttgaatgagcacttgcattgacaatcaacaaggccatcacaacacctatcatcccattcttgtaggatgaaaaacactccatgatattccctagttctgagcaaaaacatcatgggactgggaaaggactaggaaatcccaaccgtaccgtgaatatctattaacatgccaaaacaaagttttctgatattaaaagagggatttgtgatagcccacaccctctaattagctaaacagactggctagatgctatctaagttattaatgtacctacaaaatttaccccgctactagcaggatctctaggctcttccaaaggacagata

SEQ ID NO: 250281 - DNA, 375 bp, Gossypium hirsutum
ctaatattaccacaaatcctttagttaaaagaagtctaatgcaaccagtagaggaagctatgcattttctctttctttacataatatataattactgcgtactgatttatcatgcaattggacacagtttttaaggagtgttccctttacaaaggcgattaattaaagtacgtgcatcttttaatgagctccctttacacagagcagaggggtctgaataaatgtgccctgttcaaacgacacaggtgattacaaaaattaagtatacatccttttttctaagatttgatttaaaataataacaaaacataaacatccttataaatatatgagtcattttatattatactattacccccttttaattactcaatt

SEQ ID NO: 250282 - DNA, 378 bp, Gossypium hirsutum
gcctctgcctcgatggccacttttgaaccagttaatgatgaacccagggggaaaaggctatcaagaaaaccgtcgaaaaagtttgtagcaaaaagtttgcttgttattgggggtgtgatctgcctgtctcgcggtcactgtggcctgggtgctaaagttgcaatggcatacatcttaacaaaattgagaaagcgtggtgatagatcaagccaaagcatgcaaacttaaggcacccgaccttatttcatctctgcaactaattttgatggtttttttaaagaggctctttgttacatagacttattgaacttagttgaagtttaactacagagtcggagaaatagcattgttaaagatgtgaaaccccagttttatatt

SEQ ID NO: 250283 - DNA, 335 bp, Gossypium hirsutum
tcgcgcccacgcgtaaggccacgcgtccggaactctcacacaaactcaaaactgttaacgagtccaaggattgtgcagccaaggctacagatgctgcaaagaataaggctaagcagattgaagaagcaaattctggtattcttcccggacccgatggaactaggagccaggactcggaaactgcaagggaacaatacatgattgtaattactgaacttgatgctgctaaacaagaattgaggaaggtccgtcaggactgtgatgcatccttagaagcgaaaattgctgccttcaaccaaacagaagaagctgaacatgcagcttaggttaacatg

SEQ ID NO: 250284 - DNA, 384 bp, Gossypium hirsutum
gacatctgtggctgtacacttaattactgctacattgcccccttttcatcctagttctatatatgccaatcaatgaacttaattaaatatttaactcgccattcacctttctaactgtgggcacaaatatttgaatatctaatgagcacacttgcattgagacccatcccttttctaggctcaatcatacgccttttatacgccaaaatggcagaataaaaatacaccttattgctgacatataccgcattctgtgtctatccttttctcgagtctcctaacgcaaggaaggatccactatcgttcggtacaaaccgctagtacaaactgtaactgcccctccagcttgttctactaaccactactgctgtcatctgctgagat

SEQ ID NO: 250285 - DNA, 362 bp, Gossypium hirsutum
cccacgcgtccgcccacgcgtccgtagttttacccaatgccatgttagagaagaggtagcctttaattcatttttattgagtcataaagaagcagctcaattcagacatcgaagtttcctttattatgaccaacttactgccatctacgcaaaagatcgagccattggaaaagatgctcaaacatctgctgatatttttgaagaaataaatgttgaggatgtagctgctacaaatactcatgaagaaataaacgatttctatggatccgaagctgatgtttctttggatgacatggatctttcagctacacaacagcaatcagaatccaaccagctagaaatcaaggtgattctgtattttc

SEQ ID NO: 250286 - DNA, 383 bp, Gossypium hirsutum
cccacgcgtccgcccacgcgtccgatttagttaatatttttccttgcaggtccaaattcggaagttcataaagcaagcgatttcctaaaatacttggatactaagagcgaatatccttttcttgaaatatactcttttcaagtcaaaagctttgtttaactggaacttaaactgatttactggttgggtttttttataatggatcttttagtggatgccttattgtttggttttttgtttgtttgttatcttatttgttattattttttctattttttttttgtagattggttattttttttttttattatttttgaaatttttttttttttttttttgtatatttttttttttacttatttatttatgtattttttttaatt

SEQ ID NO: 250287 - DNA, 380 bp, Gossypium hirsutum
cccacgcgtccgaaaaaatcaacagagagcattccttccctctctccggggctaattttcccattgggctagggtaatatacccatcctcgccggaccgccgctcctccaccgtagatggtggtcggtgagtcgcaaaacggttcttttagtcccgttcaaaccagatctaaaggtctagtcctttatttgtgacaaaaagacgaataaagaggactttggtccttgtagccagccttaaaaagctgtgaggccctcggcgccggtgaaacaaccacgacgacggaggacgtgaggctactcaggtaagtttatttcttccttctttattttgaaagattttttgttagaaaaaaaaaattaaaatgattgagactgaga

SEQ ID NO: 250288 - DNA, 390 bp, Gossypium hirsutum
cccacgcgtccgcttctttaattctgaagcaaaagcaaaaagctttcaactcagaatttcctattgcctaaactactgattttttttcacgtggaatctcaactggaatgaatattcttgtcgccagattcacattatttcacagatgagaatggaagggaaaagaataagcttagatactccgaggaatggaaaatccaaggttcttgatccagcattttctgcttttttagttcaacttccgagcaaacttcaaaactgccttaagtcacagctcaagagattagccaaagatggtgccagaataaaaccgttgaactcttctcttgagaagaagaacggttcatcttccggattgcagatcaatctagagaaacaattgcaagcttg

SEQ ID NO: 250289 - DNA, 387 bp, Gossypium hirsutum
cccacgcgtccgaatttatcttctgcaggatcaatcttattatggtttgctgagatgacaagtatatcagtgttaattgcactcggtatcggtggctcgagtttcttcaacccttgatatcacgtgatgggctagctaagagttagtccttctgcttgatcaagtaattattctctttcgaatatgattacagttgcccgcagttgcattttcatatatttttacatctcatttgagttgccactggctgctaattcatttaactgtatattggcaggtttaaagccagccatcattttgcaaatccgataatggcttggaaggagacctggagttcacattccggtactatacacttaccagcatgcataatcgtgtttgttagca

SEQ ID NO: 250290 - DNA, 342 bp, Gossypium hirsutum
cccacgcgtccgaagggttgtttatgaatagaaaatcccaagatgctgcgggtggtgcccttgttctgatgctgaataaagcccctccactttggctagacatccctagttcgataaatttttcggaagcctctaggccagaaatggggaatatcatcatccaagagaaaaaccagtacacagtggctgtgcccgttgaacatgatgcttcttcaattattacatcttctaagcttgtcgcatcaatgacaacagcggatgcattataggaacttccgagtttcaaagagatgataatcttgctgcttagtgaagggggttagtgttgcatttctgccaatt

SEQ ID NO: 250291 - DNA, 380 bp, Gossypium hirsutum
cacaagcacaactattgaagttgttgttcctcgttcccttgttcctataatttggggagaagatggcgcatgtttaaaacagatacgtcagatttctgatgcgaaaattacaattaccgaacccaagcctgcagcaactgaaactgcaattacaatatctggaacacccgaacaaacgcatgcagctcagtctttaatacaggcatttgtgatgagtgagactgaatctacttgaactaataataaggtaatcatcttcagttatattcgatggttgattctacttcatcacttactacaagttgtgattactgatttgatatccggtccttgttctaaaagctcattgcataatccgttgatcatgctggttggacatt

SEQ ID NO: 250292 - DNA, 380 bp, Gossypium hirsutum
gcaagtcttcctcaaagcatcccatcgatgatcataaaacttctgattccattggttcgttggaatatgaaaaacctgtgcctggtgcacactattatgattcgagtaaggtaaaatctgaatcagtgagaagcaaatcttccttcaaacatcccattgatgatcataagagttctaactcctttcgttcattgcaatctgaaaaaactgtgcctggtgtacactattatgattcgagcaaggtgaaatccgaatcggtgggaaagatttcaacaatggcaagcaagtcttccttcaaacatcccgttgttgaaaagcttgtgcccagtgccattcagttgaacaaccacattgtatctcaatcagaaccaagcatttgt

SEQ ID NO: 250293 - DNA, 204 bp, Gossypium hirsutum
cccacccttcctccaagctaaactcattttctaaaacccattctcccaaccgggggggaaatacatatttccgtgtccttatacaattcaaatttctacaccaaaattaatacccaataattttcgcaacctcaaaaaaccctattgataaagtatagtccacaccctcaaagctatcctcatcaccttacatgaagatgattg

SEQ ID NO: 250294 - DNA, 379 bp, Gossypium hirsutum
ctgccattaaaatcataggatcaacgacatcaactcttgaacccatgaacaggggagaccaaattctgtcttcaaccccttacgtggcatgctatgataggatcttcaacactcccttttccctccgtgtgattcaactcctcttacaaaattatcactcttccccacactttatttaaagtagctagattatttctgaaatcatgaagcaaaaagatgaaaagaatcagtcccaatctgatagagctttgaagattatccctgtaacgttactggttttcgcgtgatgcgggttatcgcactatcttggtggaatcttctgttctgagaaaagcttattggaagggaagatagtccaagagctttccaaggctgtttc

SEQ ID NO: 250295 - DNA, 389 bp, Gossypium hirsutum
  unsure (1)..(389): unsure at all n locations
cgcgaatggataaagagntggacctatcgactgcacatngaagacaacaatgntcgaaggcggctttcgaagatgttccttctcccgagcatattcctccactagctgcttattcttttttcgacatcaatgttgccatccttgatgctccactctttgagtaatgatttttggggatttagagatgaggataaggttgttgtcgttagatatgcaaatagtatcacttctaggtcatcatccttcgaccccacctttttcttctagtgatgatgattaggatagttactgcacattcacttcatgacatttgcactattttttttgcttgtttcctatgattatggtatattgaaccttaatgcttaattggtattttaagataaaaa

SEQ ID NO: 250296 - DNA, 261 bp, Gossypium hirsutum
gctcaccctgcaaaacgtatcttgtaatgtcaaccttacagctgttgtacggggggcaccttatattgtggggcgtctaagcagcacgggcaatttcctaaaacgatccatgtgaacaagtattgcgtctgaaaacactatatcttaatccatactacaccttgcactgggaacagtgagtggtagcatggaatcaactgcgagggaacgtaagactttgaacgctaacatgaatcgagctacggggacatccattctgac

SEQ ID NO: 250297 - DNA, 378 bp, Gossypium hirsutum
cccacgcgtccgcccacgcgtccgctctatccctagatctcgatttccccttttgtatttcgattttgtatttcgttttgtttgatggcattgaatcgctgattcgtttccaagcttcgattctgtttgtagtgacagtattatacatgagctatctcagctgctttttacttgtttctgctttatttgaccatttctatctcagttttttcccccattttatattatgtttctgataatttttgatctctctcttttactcgtatcaggtctatggggctttacgcatgactgtgaaaatattcttgatgtggaattccaaaatggtaatagatggtggtgaagacacaactgttgcaactttatggcttgaggctc

SEQ ID NO: 250298 - DNA, 166 bp, Gossypium hirsutum
cacttaaatctactcttcctataaatacccattttttcttatttttaaaagctggcttcatataaagggtgtgagcacaatcaaattatgaacatactgagagatgggatacaggatactacattgtcttgtccgttttacttggtttccttaatgatcataaact

SEQ ID NO: 250299 - DNA, 376 bp, Gossypium hirsutum
tcttatttgaagggtacacttcatgctagccctcccactccttcaccgacttgggctccacagccatctatttcactgcatcctaattttgctccaactcacccgccaagattgtcacccaagattcatcgttttccgccttgccctaagtgcaatactgcttctccatctgctcatcgtccccttcattcgccagctcccactcctccaatctctcctgcatcttctagtgtagtggcacatccccctcccccttgtccgtactctcatcccgcagttccaccaagtcctccatccaaatcctattctaacgtaattcctaagcacccaccgttaatgagcccccgatcacagttgtcccccccaaatctaccac

SEQ ID NO: 250300 - DNA, 261 bp, Gossypium hirsutum
cgcacgcatacgtattatataaatgcactacgaggaaaggacgcacctatagggaagcttgccttagaacgagctctttaacagtggctctagagagagacactaaaaacggcaccttacaactactgtctagcgctacgctgctggcggacgcagcaaaatccacatatcaacatagaaagcgacatggttgacaagggtaagggtgctggtgcacgtgctgatcttttgggagctgtccaacactatgggaagctggat

SEQ ID NO: 250301 - DNA, 384 bp, Gossypium hirsutum
attgtcacacagatgggaagctcgtttaagaagtcgatattcgatgagcatgtgcaagtaggtcttgttggttgggcacagaaggtgaagaaaaagaaaggcttaaaagctgctactgggtctgcagctcaagaaaactctgagcaaaacccttcggctgcaattcagatggggagagtgttgcgcaatgcatctgctcctgaggagattcatccttcacacggtacatactgagcggtgctgagaggcagtggagccatacttcagaaattatttattaggtaatagcatttgttatgtttatatcggatgtacctagattcgcaccagtggtttgctttgcgttgcttggttttttagtatattgtgggtatcagatttaga

SEQ ID NO: 250302 - DNA, 378 bp, Gossypium hirsutum
cggacgcgtggggggcggcctagttgtttgtcctaagcctcggcgaattggggttctcgccaataaccctaacaggtccttgagattgcatttgagtcatcaagccgaggtcagtgatttaagagccggtgctgagcttttagatatcatcctcaagaaggaggatttcggaatagaacaatctgcgacacatgtagcatcgtcacctccatttttttgtgggtcacctcctagtagggtttcgaatccgcttgtgcaagatgctcaattccgtgatgaaagacttgcagccttttcaacattccaaatcccaactccatcgtctccatcatcatcatcatcacgcaaaggagggtgtgttaggatgaagtttggcct

SEQ ID NO: 250303 - DNA, 343 bp, Gossypium hirsutum
tccacgcgttcgcccacgcgtccgtccacgcgtccgaaaaaagccattttcgccggcctcatttgacttggtgggggcttttccttcccccttcttactatctctttctctgtcaatcctaagcctaagcctaccctaccccatatcatagcaaaaaatctaggggaaaaaaattatacaaggaggcttcaccatttttatcttaatgttgtaatttgtatgatgaggccctcaaagtctctttatttcctaccgggaagttagccatccttttttataatttttttcaaaaaaatcttgatctttttcctttggcttaaggggtacaagatcaaagtctatt

SEQ ID NO: 250304 - DNA, 284 bp, Gossypium hirsutum
gcctctctaaaagactcttcaaatgtctaacccaaggaaggaaggtaacgggggtgttatcactgacggagccagcggtatctccgaagacaccgccaggttctttttacaaaatgatgctttgtgtgtaactgcttatgtacactatgaactggtgaatcaaatgtctgcatcaatcggccttaaaacagctaacgtaccggcactgtgatgtacgacaggagaagcacttgagaagaaccaggacctttcacactggagaaatatggcgaagctatatatct

SEQ ID NO: 250305 - DNA, 277 bp, Gossypium hirsutum
ggccgaccacgcgtccgccacgctttcgtaggaacttgactattttttttcttcccttcctaccctttcgtcggagacatataacaatgcctcgcaaacccccatcaatgaacaaattaatgtggagtacaacgtttcctatgtgtaccactaatctactgctgactttgcagaaacaacgttgaacttaaaggctttgccaagttcgattataacaacaagaagctctccaaagttatttttttaatatatatatccgaatgatttactgacttac

SEQ ID NO: 250306 - DNA, 305 bp, Gossypium hirsutum
gttgtacataatgttttacgtgccacaaacattctttcgatatgtacgaagctcaagcgggtgcaaaacgggtttatgcagttgatgccactgctattgcactgcaggccaataaagtggtgtaagcaaatacatttatgctcaaacgcgcattggatagcacggtcgagtcgaggctgtttaaatcgatgaacacgtcgagattatattttcataaagtacggactacaacctgatttattatagcgttctaggaagtgatatctactgctgctgatctaatgctggatcatggtggccaaatc

SEQ ID NO: 250307 - DNA, 324 bp, Gossypium hirsutum
atccctatagatccaacacagccacactttcaggtaactggaaagcaacatggaatgggggaaacagaatcgtgacaagggcaaccccaccccccccctgatgggtactgaacgaaaacctctggatctttttgaggtggaaaagatccccaagtggatgaccggactgactggattatgcacgaatatcatgttgttagcaccgagacagctgggcgcaatgccccacccaaaaagaaccaaactcacggcaattgccattttacattgctgcttccattatgcctgactcttttggggaaagcaacatccctgactttggat

SEQ ID NO: 250308 - DNA, 319 bp, Gossypium hirsutum
gtcgatccggggccagctccgcccacatgtatttcacttttgtatgtaccccaaaggacaggagaggggagcagaaaaacacctttacaaattattacaaattttaatgcatgctgacctgaagatcttgtttgttttttcataaaaaaaaactgttactcacagctcccttactaacaccccctaatgtgtaacaaccaagggaaatgcacttttgtgatgatttttactggaaagctgtaaactatattgtgggttatgccacataatattaatcatgtaatcggattgtttttttattaaataaattatttacata

SEQ ID NO: 250309 - DNA, 382 bp, Gossypium hirsutum
  unsure (1)..(382): unsure at all n locations
acacatttgattttcactatttgttatgtaaccccaaaggacaaggaggaagggggagcgataaaaacaacctttacnataaatatcattacaaatattttaatgcatgcatgacctggaagattctttgtttttgttttttttttctattaaaaaaaaaaactagttcactacacagctacccttcactaacaccccctcaatgtgttcaacaaccaaagtgtgaaatatgcacttttttgttagtatgattttctactgggaaaagcttgatgaaactaatcatatgttgaggttattgtccacataatcattcaatcatgtaatcgggatttgatttttttattaaaataaaatatattttacaatcaacaatttattt

SEQ ID NO: 250310 - DNA, 385 bp, Gossypium hirsutum
tgattttagaaccctaatttcactttttgttcttatttgaagctcaaaagaggcagattttaaagttttcttttggaaaaaaatttggtttttatagaactttcaagaatagactaaattattaaggcttgaataggtaatccgctgcctttttcctcttaattttataattttaaagcttttacctagaaatttcagctatactctagctgagtttagtaaaaaattaaaaaagatttaaaaagttttatatttgaatgttttttattagctgggttgataagaaagtttaattttcgaaggaatccttggatttagtttaacacattcaaaggctaccaatttctttaagcttcaagattaaagtttcaatatttcttaactt

SEQ ID NO: 250311 - DNA, 390 bp, Gossypium hirsutum
cggacgcgtgggaaaaagttgaagctatccatatccattactcacccgagtccgtgtaacatatgccattaatgcatcaatgaaattccaatctcaaagcaaattgaattcaaaacattaatcttatggattcccctattaccattttttatttcttttgcagattattagctgtaaacaagaaaagggtatctttgtttctaatactttttgcaggagagcatgttttcctcctagaataagatataggattctaaagtttcatggaaggaaaagacatgaatatcttcgtccagcacttgctatatcatcagatgtggaagatgttggagtttctttccagtttgaagacttcactgttaccccttctagtactgaagagagccgaaa

SEQ ID NO: 250312 - DNA, 386 bp, Gossypium hirsutum
tgaaaacattggtaatgttgagccaatgggtaagctagataaaggagatagaactgatgatgacgagttgcctgaaaatcaaaatcgcaatactgcagggagaagaagttcttttctggcaaaattagccatcgcattaggcgtggcagcagctcttactgtcatatcatttggcataaaaggagctagttttggatcattgcttggagttcaacgcctggctgaagtttcaccctcttcaactatggataccactgttggtttcactttcaaagcttttggttatagatttatgcttcctgaatatgcaccaggatggatatacttctggttgcttatggctgctggttgtggactcttcattagtgaagaggctttaaatattt

SEQ ID NO: 250313 - DNA, 321 bp, Gossypium hirsutum
ggcaccctgaagatttaggctgcgttttttgaggccaacgacaagcctgagggccgggctgtatctctattgaccactgctaataccaatggtcaagctgatgcggtcgcacagacggactaccaagactattgcaacaacactctaggcaagtggaaaccagacacgtgcactggtggctgtcatgagaagtgaaccattactgaggacgtgccgaacacttcgctgtggcgcataacacttgggaacattgagaacatgtctggctctaattgcatggacacgcacgagtgtgcagttgagcactggatccatgttttt

SEQ ID NO: 250314 - DNA, 352 bp, Gossypium hirsutum
gagaaaacaaagaaaagactctcccttttttcctttcttttctgtccaagttttcgagttttaagccaagacgaacgctaccatgtttaaggttttgatgatgttgagtcttttggccaccgcttgtatggcttaagcaccaacagaaccacccacatgtccaccatcgacagctgatacttcaacccccaccctattctcaaccccaaccccaaccccaaccacaaacccaaccccgacctctttttttaccccaagcccatccccctatgcatcttcagctgcaacggtatctcctaccacttcctcatctcctatcgttgcatcttcttaacgttcttgtttaaacgct

SEQ ID NO: 250315 - DNA, 277 bp, Gossypium hirsutum
tcgatcactcgttctaaagaagaggtttgtatctcacatctctttggacaagaggggaggcctttaatatcttgtccgtatgttcatcttcagcccttttaacaaaaggaataatggttgcttagaagcatgttatatttgcagttttttctacgcttatggtgactgacaagtttcagagtaacttttaattcagttcaacttattctatttgagtattacagtttattttttttaatattatattatttatttattatatatattaatttttttt

SEQ ID NO: 250316 - DNA, 239 bp, Gossypium hirsutum
cccacgcgtccggtaactgtgttatattctataacacgagtaacgcctcgggagcgatgacgttcttgcctcccgcacaccaatgaacttcttagaacgctcttaatggacttctaacaacgttctgatcccggataacggatccaactcgtctgtcgtaagcattttccaaataaaccccgattctattaatggtctaacccatatgaaaaaaaggttttagaggttctttacacttt

SEQ ID NO: 250317 - DNA, 352 bp, Gossypium hirsutum
  unsure (1)..(352): unsure at all n locations
aaagacaaaagggagggggaacaaccaagaaagaccccgacagagacacaagaaaacacaccgaccggggagcaggaggaacacccagaacaaaagcggcaggagacagaaaaagagaagagaaagcccggggaaagcaggacgcaagcggagaacgaaccgcangagagaaagaggcccaaagaggaccaggaagagacaaaaaagaaaaacagaaagaaacgcggaaacggaaaaggagaggaacgagaacagcgcaaagacgaagcaagccaaccaagaggcacagaagaaacaacaggggcaaaggacaaggccgaggcgggagaagaggaaaagggagcagaaacca

SEQ ID NO: 250318 - DNA, 339 bp, Gossypium hirsutum
  unsure (1)..(339): unsure at all n locations
anacacnncacaaaaacccaaccaccaaannnanccaaccgaaaaaaaggggcgcgcggggacnacccaaacagagagggcacgcaagggcccncagccgaggagcagcggaacaaagagagaacacgnnnccccaaaacncaccacggaaggggaanaacaaggancgaaacccgacgcacnaacaaaaggcncggnccagcaagaaaaagccgccacngangagacggnaagccccaaaaccgaagnagaagaaaagggcacggaccnaggagaggcaagcaaccggnanggnagaagaacagggaccaaaaagacggggcccgaagagaggaagcc

SEQ ID NO: 250319 - DNA, 378 bp, Gossypium hirsutum
ccactgttaaagaactttggattatttttttcatcaaattcaaaacccctcaatgccaatgctgagcttcttgttgatttcatttcaaacaagatgaataatgcttgggttggtttggaaaaggcccctgagggtagtttcaagaacaagcttcatgggtttggattgcagcttttagctcgagttaagccatctgagattttgttgaaatctataagtaaagaggtcactaatgttaggattacatacccccccagtttaaattctaggcttgtgcggcgaagattacgacatatagccatgaggggtactgttatacacaggaaatacttttatggttcagttacgttgctttcactgactactgcacttgctgtt

SEQ ID NO: 250320 - DNA, 192 bp, Gossypium hirsutum
atcagattattttccttttcttgctccacttgactttcagggatatagaagaagggttaagaggacaagcaatgggcttcacgcaattattgacaaaatgattgatgaacatttacaagggactaacgccaaggaacaaaaaccttacacagatttctttcatgtaatggtttcattgttgaatacgcccat

SEQ ID NO: 250321 - DNA, 394 bp, Gossypium hirsutum
cggacgcgtgggcaaaatctcattccatttcttcatcttctctctctctctacacaagtagagatatttcactataactattcgtatctaggaagctgtatattgtagcttgtaaggttgaatggaggtgggggacttcttcgtcggaggtttttatggcggtgctgcaggcaatgacttctctccgctgaagatgatgtccacagagcgaaagctcccagagaatttcaccgtcgacgatctcctcgacttttctaatgaagacgccattataaatgacggctttttagaaaatgtcgccggcaattccaccgattcctccactgtcacctgcaatttctccgtttccggatgcgataaccacctctctcccgttaatctccctcacttcttc

SEQ ID NO: 250322 - DNA, 217 bp, Gossypium hirsutum
tgagcgcgttatctttattggacatcatttagatgaggaatttagcaaccagaggggagtcaacgtatgttattccttgatagttttgattataataaaaggttttatattctacattaatggccctggtgggggtcacaccccaagctgggctatctatgataccatgaaaatgcagaagagacctgtttgtacccactgtgtaggctattcctac

SEQ ID NO: 250323 - DNA, 314 bp, Gossypium hirsutum
  unsure (1)..(314): unsure at all n locations
gaaaacanggagcaaaanaggaaccnananacgaaagaagagaagacggcagaagaggagggaagaacaccggcacaacgggcacnngccngggnacaaaaccaaggggaggacggnacaccaaaacccgggaagacccagacaaccacnancaacacggaagccgaggggaaacaagaaaagagaacacgnaaagaacaagaagcanaacagagaaaaggaggagagggaaaanacacaagacaaaaaaagaagggaagaagacacggaaacgcgaagaaaaaacagacagagcaaagaaggaaccngcagaa

SEQ ID NO: 250324 - DNA, 313 bp, Gossypium hirsutum
tcgtggactcgtgggcggacgcgtgttctgaaactcagaggaaaaagaaaacctgagggagcgaatccaaatccttaaaggacaaatctcagttcaagttcctacaaagcttatgcagatgcccatgaaaagacagagacttaccctagtaccgtcgccatcggatcattgtctgtttcctgaatacgaaatctccattatggtcgtcgccttaaaaaacgtcttcgttggttttacacccaccttcacctccgcagttttttgtctttgccgttgttattacttccgattttgtttccttggtgacttccac

SEQ ID NO: 250325 - DNA, 183 bp, Gossypium hirsutum
acggctagtcttctattcaatgctatatttgatgggacagagcaacggctacagggggggttgatttatggtctggtaccttctcacggagagggtgataaaatgctattggcagcaagaaagagtagaagggcaacatgcactgactttgttatatgtttggctgccgaagattctgctagg

SEQ ID NO: 250326 - DNA, 268 bp, Gossypium hirsutum
cggacgcgtggggccggggccttggtctcggcgggttttaaagctcccaccttgggaaacctattaaatcttaacctttttttttcgaatcttcgtttagttagtctcagattcattgtagggatgccggccctggcttgctgcgtagatgctgctgccgtagcgcttcctggttacgcggctttcattgttggggacagctcccttccctcggcggtcccttttttcgtctccacagtcgactgccgatgtttccaacttaacccat

SEQ ID NO: 250327 - DNA, 386 bp, Gossypium hirsutum
gaagaaacggcacctgcacaggtggatctacttggagaagctttgtttcaattttgtgatccaatgatggagccattggattggaagctcttttcaccattgcattcgcagatcgaagccgagggggcaccttggatgtttgaccatgtcgggaacagttttggtggggtgaagttcgagcatggcacaaacgaaaatgatgctgaattcatgaactctatcctgaataattcggatgactattacagtgacgactcaagcagtcgaaggaattcagttattgaaaccgagaccccaaagtcaatggcctttggtacaaatggtggattgtattgcaaacctgatgctgaaccggctcgagtattgcctgggacaggaactgccaa

SEQ ID NO: 250328 - DNA, 205 bp, Gossypium hirsutum
ggccggggtccagccgacctttttttgcgtgcacgtcagcgctccgtgcagagcggtcgccctgccgccggggacggactggaacggtccctgtggttccccggtcgacacatctcttaactggtctgacagggtaccgctgttaataaaacaacattggaggccttgcggagctacgcatgtgattttgccagtgcttgatgta

SEQ ID NO: 250329 - DNA, 238 bp, Gossypium hirsutum
aaaaaaataaaaaaaattaagtccttttagagctcactagagatcttttttggggaccattgcggctaacggatttgttggatatgaactcattgtttaaaagaattactggattgaacactgggttgatctgactgtggaagctatgatgctcgacttcaaagccgttgatattgtcaaagaataacgttccgtagtgttttttttacctctttcatttgaagggaaatccattttt

SEQ ID NO: 250330 - DNA, 362 bp, Gossypium hirsutum
tccacgcgttcgaatttatcccacgcttaagctcctaaaagtcttgaagagctattgttacttgtaagatttgtaaagatgcttctgactgattcatcatcacaaaaagatagcatagattctggagaaaatttttcggaaaagcttaaagctgatgatgaatcatggagtcatgtcatagaggctcttttaattggcagtgggacttcctttgttactattgattggcttctgctagagcttctaaaagacaaactgcaacaatgtgtatcttctatatccatggtttcaggagatcattcattgcattaccatgttcaagaaagagcatggattattacacatggctgctggatatggct

SEQ ID NO: 250331 - DNA, 390 bp, Gossypium hirsutum
catcaatcctggttgctacttatgaaggagagcacaaccatgcacaacactctacaccagcattatcatcattaagccccaacagtggtaccagtaaccctcgttcagctcctgtttcttcttcttcttctgcccccaccaaatcttcacctcccactgtaactctggagctgatgaaaccaactgggttgggtaatgataccaaaaacccaacccaacaagttgatgaaccagctatccaacagattttagttcaacaaatggcagcttctttgactagagacccgacttttacagcagctctagctgcagccatatctggaaaagttctagatcacaagtggtaaaattcaacatacttagggagaaatccatagttatgtaattctt

SEQ ID NO: 250332 - DNA, 332 bp, Gossypium hirsutum
gacgcagttaatctgactcattacttttggtcgagatgcattcggagttgaaacaaaggtagtatgaaggacctttaagtttggatgaatcgacattgacctcatcttttttttttttaagctgtgaattataaatatttttcaatatttactagatcaactacatcttatataaatacaaaaggagtatagtgtaatatataaaaaatgggtcgggttgtattctgatattatttatatatcttgaatataaaggtttatgatttattttttaatataaaaaatagggcggccgttttattggatccaagttttacttacgttttcatgcg

SEQ ID NO: 250333 - DNA, 391 bp, Gossypium hirsutum
cccacgcgtccgctccctcccctcagttatccaaacatgaaaggaatggatcttttttgcgcttctcaagcttcaacagccatctgctctagcgtggaccatcgctccatggtccgccatggtcataggcgtattgatcgccaaaattcaaagccttatgcaccttgttcatcacaattgcctataatccctaggccataccatgaaaagagtagcaagaacggtgttaagccaagtgacgtacgtcgaaaaagctcagcagatattcatgatctaaaaagctctcctgcttcatctacatatcttctaagtgatagaccctttattgattggttatcagagtctgatcctactgtctcagcattggttccttctcagccttcaaaaccta

SEQ ID NO: 250334 - DNA, 265 bp, Gossypium hirsutum
atttacagaaaggaaaaaaaaacctaggttgctttctcaacccttcaccgactaacaggcttttgaaggtctgttctactgcctatagttatccaacctccacaaacaaagatcagggtggaccggaccaataaaattggagagtgttactcacaagccgcacatacctacttagtttcaactgtggcgaaacaagcggggattctgaggcatcaaacgcaggtgagtttcttttgtttttattcgatcaaaagaaggtaagtat

SEQ ID NO: 250335 - DNA, 373 bp, Gossypium hirsutum
cccacgcgtccgggagacaatatatgctcggagaaggaagaaaaaaaggagctaaaatctgttgtggaggaaaaatctatagttatccaacctccacaaacaaagatcaatgaggacctggtttctcattttgaagatggcagcaaagaagatgaacatactggagacaaaacaaaagaaaccttcgaagtcccaacatatgaaattcaaaacgaaaagccgaccttggaaactccaaaggatgctgcaagcgacaatatcgagaaagagactgttgctaaagatgaaactgtgaaggatgacatgaaagaagccactatagtagaggagattccaggagagaaagatcctactgagtgcaaaaagacaacaa

SEQ ID NO: 250336 - DNA, 370 bp, Gossypium hirsutum
ctttaatttggtctctctgatctggttcaagtcttgttacagttgttaggttatttatggagaagggatggggccttacccttggtaattctgatcctgtgtctagtttcttccacaacaaaactaattccaccgctggaccagtcttccggttaaaacagcacccagacatgttacagttccctgttagccttgctggctccagggaggaccgccctggaacctcctcttcctcctcacctgcctccgatgacaaccgggtggcggttgatgaggtcgactttttctccgataagaaacacggggttgttgatgaaaagaaaaccggtactgtcaccgtcaagacggagactactttttatggtagaga

SEQ ID NO: 250337 - DNA, 128 bp, Gossypium hirsutum
cggacactaggtacatattacctttattctgcataaaacatcctaagcgtggggggggtacttattctccttggcctgaaacgctatcaaattacatgaaaagggttattcaacctctggttctttgg

SEQ ID NO: 250338 - DNA, 295 bp, Gossypium hirsutum
tcggtaaaaatcaaacgaattacaacttaaataatattaaaagatattggttttgatcatcaaattttctgtttctgatccaccaatccaatcagagtgtcgaagtattgaagctgtcttggttctgtttttttttgaaatttgatggctctcgcgttttttggcgtggtggaagggggttagaactaatgtggcttttacctgtgctctttctggcttcttttgtattgttgtggtttccagaatattattgcctgtatttttaattggatcctctatattttcctttgggctt

SEQ ID NO: 250339 - DNA, 287 bp, Gossypium hirsutum
cccacgcgtccggattggagagtttttattatagtgaaaaactgatcgtagtccatcccctgctacttgcttgattgacttgccctttcaacgcccaagaaaaatggcttgtgcttccgctactcccttaaggcttcacctattatcgacacgttcgtgtggattaagggccaaatccttgctcaccctgtcgtttgttttgttcggccacaccctttattggccgcctttgctgtccgtgcatgttcatatgccgttcggctttgttagaccgctaaaactgttgc

SEQ ID NO: 250340 - DNA, 377 bp, Gossypium hirsutum
cccacgcgtccgcccacgcgtccgcggacgcttttgttccagaatcaaaacctgcaacgccagacgttttatttgagtctcggtgataccgataatagtatttttgagccacatgaccaaaccgactgcagatctggcattgaacacgagatctgatgaaccgaccacgaccactaacagacgcacgacctccatgaccggccccttccaccgatggctcattttcaacaagattcacgttcaaactgaccttctgcaacactcgatcttgacgactctcacaatcgactaacacatccaccagacgttgcaacggcagaactacaggcgacaaacgagcagaggagataaccgcctcaaactccgacggcaaacct

SEQ ID NO: 250341 - DNA, 221 bp, Gossypium hirsutum
accacgcgttcggtcatgaacaatttgaaacccaatctctttcaagaaaaaggccatagggggcgtctggcctagtgtcagtctcaggcttcatttacctgtggcgtttatagtgcctaccttgctgagtttatcttaactctggtggttgatttttgctgcctatgtattttcattggtaattactaaaatacaactgatgcagccctagatcccgatgg

SEQ ID NO: 250342 - DNA, 298 bp, Gossypium hirsutum
tttggctgctcatcctcacatgttaagacaactatatttgtctatgggcagcgaacgatgttttattttctattaaaaaataaatactctgttcgctgattaaacacctagatgaccatttagtggagattggctctaatggttttaccaagcctaaggtggttagaaagttcataggatgtggattgctcttgtattttatcatcaagaaaggagtccttctttgcatccttgaggtattgttttccacataacctctattttttcttcaagactccttcgtttattccttcaattc

SEQ ID NO: 250343 - DNA, 244 bp, Gossypium hirsutum
ccagcttccgcgcaatatttttttttcttctcattcacctccaccgggacaaatgtcaaggataataaatctggcgaaatcttaaggaatgacggactatgaacaagcacccaccatggaatgtttggacccactattatgcatctgttttggaagtttttatagactcttgattataatactatatggtcacttccacaaattctttctttcacttacacatccggttgttgctgctgttggt

SEQ ID NO: 250344 - DNA, 156 bp, Gossypium hirsutum
tcgcggacgcgtgggcggacttcgtgttcggacgcgtgggacactgatcaggctatctttgaattttttaggaagatctgttaaattatcgttggccaagtataagataatgtcctagattatgacgtatataatatttctcctacttcttctact

SEQ ID NO: 250345 - DNA, 145 bp, Gossypium hirsutum
cccggttttactgcaaactccatttttgagagcttattttgtagagaaagagattcagttcgagcgatctatgttagtagaaaatccactcatgagattttttttcttgctctgtttttacttattaagaggggttaacaattta

SEQ ID NO: 250346 - DNA, 322 bp, Gossypium hirsutum
aacattttgcagtgcatataacagcatatgaacaggctgccgagaggaaacacttgaaagaggaaaatgaacagttccttctccacagctctttgagaactgcagcgggacctctaaaacagagccaacgatcttagcatgcttctgaaaggaagcgacttgatgatcccttcaagattcggtagagaaacttcacttcattgagagatgcgttattgaaggtgtctcttaggattcaatcttattgagccggaaaagccaagacttagcccatcttcatttgttttgtcttggtgtacactatcattctagtgtgttgtca

SEQ ID NO: 250347 - DNA, 189 bp, Gossypium hirsutum
ggaccggccggaatcccgggcgccacgcgtcggtccttaggcttacgatctaatccgaaaggactctcccaacgccgggcaagtgacgaactcattgatcggaccgccatggcccgacccgataatctaactgatgcctataacttggatccgcaaaaaccgtgcttacttcatagaggattatattac

SEQ ID NO: 250348 - DNA, 329 bp, Gossypium hirsutum
cccacgcgtccgcaaaactgctatgagatgcaacaatcccttgtatcaccctcataataggaggcaacttgataggaggattacgatcgtccaaaataaaaccattggtaatcgtaggagtggtgtgtgctcgatacattatactgccggttattggtatttgggttgttaaagctgctgccaagcttgggttcctaccctccgaccctttgttcagctacgtcttgatgcttcagtttactgtcccaccagcctccaatattggtaccatgacccagttgtttgatgtgggtcaagaggagtgttcatgtctttttctgtggacatac

SEQ ID NO: 250349 - DNA, 129 bp, Gossypium hirsutum
gtaactcttgcggaaacgtaggcaccggcgttaccattccaacattggttcgggtgaacgcgacggagaatttgttttaatgaatcggttcttcattttattgagggcttaaaacctcaacaatccatc

SEQ ID NO: 250350 - DNA, 376 bp, Gossypium hirsutum
cccacgcgtgcggcgatcaattcattggacctaagcgatgcttataagctagctgcccgtagtaaaggccgacagatatctgctccgcttgttgaacaatggattgcaagagattcttctagacttagagaagatttaaaggactgatctgtcgaattatcttctcgagggatggtgccattgatgagcgatgtaagtcctatgatcgctccacgcacgaggattgctgcaagcacatggatatctataaacagtgatgatttaaaagcctgagatccttcttgatttattggaaacgagatacttgaaaggacggtccttattgcatgagaaatgagtctgggttatcattacattgaagcattgttagctaaat

SEQ ID NO: 250351 - DNA, 377 bp, Gossypium hirsutum
ttacactttgtggtatcgcaaggttcatgatatggaatatcctgaaagaccgggttgtaccatgttagtgccaaatatgaggtatgttgccacagggttgactccagctacagagtatcgtttcaaaattgtctcctttaatgggacaagatgggaaattccgatttcaacatcctgtatcggagatgaagtcccaagctgccctgttatgggaataagtcaaagcccaacaaccaactgtagtagcctttctaatccatcttctgtggaggatgaaactaataatgttactctgtatagtgatcagaatgatgaccgggcagacaattatctgacatattgcaaggacactgataaaattgtttccacaaatctat

SEQ ID NO: 250352 - DNA, 155 bp, Gossypium hirsutum
ttttcgatcactagcggcctcctcaattttcattaaataaatttttaccttgctgcgggtctttttcccggaacccaaacactttaatttctcataaaaactccgtctcaatccttcaaacaacattctccttatcctttagggtatcaattatt

SEQ ID NO: 250353 - DNA, 246 bp, Gossypium hirsutum
  unsure (1)..(246): unsure at all n locations
nnaaaagcncaccgngcagcnggcagcangacaacccaaggcaccgcaaaagggggacgcgggacagccgnccgacgacgggacgcaaccggacgaaccgacgccgacagaacnnccnccaacgaaaacaaaaccgggaaaacaaggagngaaaaccgcaacaaagagcgcccgnggaaaacanagaagaaaccgggcagcgagaaagccgcgaacaacaaaggcaggcaaaaagaggccccaaag

SEQ ID NO: 250354 - DNA, 391 bp, Gossypium hirsutum
ggaatcgccccacgcgtccgctctctcttaatctatttgatatattatcttttatatacatatatatatgtgtgtgtgttgtcatgctgatctattttcgttgctctctccttgttgaaatccaaaggctctctttatcgttccttcaatggcagttgaagctcggcatctgaatattatctcttctcagttcatcaccaatagtcacagggtttttattaaatcaaatcaagggattggggaaatatacaatacccagatgtgattcttgtgttcctttaattgattcaaattcaatgcatgaagtttcagctccaagataaaggtctagagattcattcaccaatggctttgattcgtattcgctccctcaaaacaacaatctttttgg

SEQ ID NO: 250355 - DNA, 187 bp, Gossypium hirsutum
tcggtcaagaaagattttcaagcaaacaaaaatccccaagctaaatccaggaggacggacgattccgtcttacatgaaaaccatttacaggctccctaaaacgtatcttagagaacacgaagtttgcaacccattagggtcagcaaaaccagtttgcaaatgtacaggatggggaattacaaaggga

SEQ ID NO: 250356 - DNA, 332 bp, Gossypium hirsutum
cccacgcgtccgcccacgcgtccgcccacgcgtccgcccacgcgtccgggctgctactctttccctttcctctgtttcgctctcacgtcttcaatcatctatttgcagcaaatttggcagaatatttccaagtaagggtgtttggtggatcactgaaatttagacataaattcaggttcttgccagtttgaacacaattcctaggaaagctatttccaaatgctaaattttgccagaggaagaagccagacaaggtcaaccagatctatgccttttgctggcatggaataccatgatcccaaaaggaagagcatttttgtaggaaaaatcct

SEQ ID NO: 250357 - DNA, 360 bp, Gossypium hirsutum
ctgaattgagagataatgcatgaaatctcgatcccaaaaaatcctccctgggggcagtcttttccatgaatgttttgctcacgtgagttacgcttggacctcctctccaccagcatccaaggaccatattcatcgcttccgaccaccgaatcaacaactattcgtgaggttccaatcgccggagcatttcctcccaaattattccctgttgcttgtatatgcggacagcatccttggagtgaccataccgtcaacacgagaagcagaaaaccggtaagctttcgtactcgattccttgaaggtttccattgatgagaaggaatcagtggtttctccaaattgatatatactgtcatacgt

SEQ ID NO: 250358 - DNA, 359 bp, Gossypium hirsutum
aacacgttcatctatctcattttttagccgagaataaatcttcgaaaaaggcaaaagctagttttaacatctcctctattgtatgagtccttgtgccattcatcctttctaattcattaattcgaccgcgattctaccgttgaacagccattttatgaaaaaaactggtatttttatctccatttttcagccagttgaatcgagcttgttgctctcaaaataattcttcttgatcagcctgaagattaagtcctacctgtacatctgtaatttcagcaagaacttcattagttggctcctgatcataaaggtaatttaatttttcctcccgttccaaacgacttctctttgattctcta

SEQ ID NO: 250359 - DNA, 325 bp, Gossypium hirsutum
gaagcccaaatttcggggaacgaaccggcgaccagaaaaggggggccaccgaggttagcgatgacccaggccgggagacgccctgagcaggcggcgagggccgacacccgcgccgggacaggaagcagaaggaacaacgcggcgccgacgagggcaagtacaccagacagtacgaggaccgcggaaacgacttccgggacacacaaggcgcacacaaaaccgaagtgcaagaggcataaaggacccactggacaaagcaaggacacgcaagcgcaacggagatccaacaacagggagataacaagagacagccagggaaagagca

SEQ ID NO: 250360 - DNA, 375 bp, Gossypium hirsutum
cgcttgcaacggcggcggccgtctttttctcctccctagccacctacaaaaaaagaagagaaaacatcaaaataaaaagggtttttcaacccctaaaaatgagcagccaagaaaggagaagcaaaaaaaaaagattttttgagagaaaaatttaaaaaaaacagcaaccccaccgtcggctgtcgcaccatcaccacgacaccaccgtcaccgccatcccaacgcttagcaaaacaaaccaagaagcaaagaaacaacaaaaaagaaaaaaagagaaaagaaagaaaaagagcaaagaagaaaaaagaaaagggggaaaggggagaccaccgtgctcgccgtcgtcagccgccgctggacagcaggtcatcgtcg

SEQ ID NO: 250361 - DNA, 367 bp, Gossypium hirsutum
ggaacgcacataaaggcggtgtagtgcctctccttccagggaaagtctaagattaatcgcatgaagacctgcataagcttctgctgtaaaagaagttgaaacatttgaatttaagaccgtcttcgtaacaagaattactcccatctgatcctgaaccaccaggcctgccatcgatttgaaatcccttcggttaaaagtagcatcaaagtgaatcgtcatcccagaactcgtatctctctgaatggccctcgtagtcgtacacaaggacccatatgccacagcaaagcaatcgaccttttgagagttctcttttggaacatccaagtaagccagccccagaacctctgaaccaaaaagttattaaccc

SEQ ID NO: 250362 - DNA, 204 bp, Gossypium hirsutum
gccgctgacagaacattggataagacttgaggcatgagctcaaaggacaaacgggcgcttgaggaagcacggatcaagactctgagacgggatatcgctgcacccctggacccttgaagatttgctgatgcactagagcagatctatttgtatcatgactgacacctgtgacttgtttcccacagcagggaatttcaagagctt

SEQ ID NO: 250363 - DNA, 323 bp, Gossypium hirsutum
attattatggtggataatagcatcttaataataaaattgaaaaataattttggaggtattgagaaatatttattgagaatacatttgacgtaatacatatgacgtaaaaattatttaaaaaataaaattttaaaaataaatatggaatatctaagatgtattttagtagagcttcgttaatacctatacggctatacctattatgatgaaccaacccatgaacatcaacccacttgccctgacttactttgactgcctgttcttgaaaatttaacccgaaataagttacccattttgacctaataaattagaccgtactatat

SEQ ID NO: 250364 - DNA, 365 bp, Gossypium hirsutum
caaaactaaaatccttaacccaattcctattgacccaataggcccaagagactaaaccaattcagaagccctagggtttctaaaccatcctagcgccgcacccctacgtgcctcgtcgacacgtccaacgcccgaagctcagcttctcttgtcccgttgcaccaaaatgaaagccctccatcattgaccttccttcttaacctgcaaacacactaaaaaagaatggaaacaacaacacacaaagacagacagaaaagaaacgaacaaaaaagaactaccatgtaatcggctataaaaagccccaagtattatcaatgtaatttttttatagacatccgaattcaaaaaatatcaattgaaacaga

SEQ ID NO: 250365 - DNA, 363 bp, Gossypium hirsutum
cttcggttcgtttacagtttcgccccaattctttaggtggggccccggcctgaaaccggggggccaaccttaaccggcgattccacaccattcccacaccatccaggctatccaacgagattgcactgccagccgtttctcgagccgtgttagagcccaaggtagaatccctgctgtggttttctctcaaggcttgcttgagaaaaacccaagcaaccgttccccgtccaggaaacaaattctaactaccgaaagaaagcagattcgatccattatcaagtccgttcaactccctttcttttgttccactaggttccagcttcagatccgggccggatctggctcttctgtcttacttgaatc

SEQ ID NO: 250366 - DNA, 357 bp, Gossypium hirsutum
cccacgcgtccgttcctccccttcatccaaagtcagcgtgctgagtgggggtattaaggtggcttgggacgagagagaatcaaacaaccaatcggcttgggaaggggctgagtgggcccttactggttcagcgtgtgagaaggaggtatgccgaaatagtgcagtacaataacatcaaatttcaagtgtgggatttaggtggacagacaagtatcaggaagaggagctgtgaggagcagcagttcttatttttcttatttttgcaagtaagcagattggttgaaggtagcatcatgaaggggaaaaatatcactcaagggtgtgctaaggtaacaacacccttccaatgtctttgtt

SEQ ID NO: 250367 - DNA, 348 bp, Gossypium hirsutum
gttttcccaaatatttcttttttaattgctgttttagtagtgtatggttgagggcatggaaatctatgcctaattttggcctatgggtaaaatatgatatgatgcctcagcctttgataggtgccgcttggtttcactagcacggtggatgtgggtggcacatgatgacttttgcaactcctagaagcaagaccaattcatggtgtttgcttcaactttatttcttttggtcaaaattgtcagttttcctttggttcttttggtcgaagaggattccttcacgtaattcaatggtcttcaagttcttgaataccattggaatgttcttaggtgtttttaaaaacaact

SEQ ID NO: 250368 - DNA, 261 bp, Gossypium hirsutum
ggccggcccacgcgtccgaatgtactcaactgtctggaaatatcattttaatctttaaagtggttataaaaggtcggtgcatgtttttagagtaaaaaaaccattggaatttcagttaaaaaattcaggtgaaaagtgaggtgtaaaacgggcgaaagctatctactaatgataagatagtgtctgattttgtggccacagcttgtatcttctacccaaccatttttctgtaaatttcttttttggttacttcgttacttg

SEQ ID NO: 250369 - DNA, 357 bp, Gossypium hirsutum
ctcttcacttctaagttccttctctttccatctctcattttctccccaaagctgcaaaatgaaggttagattttcatgtctttaatttgttattaattttatttatctagataaaataatacgtactcctttcattttcttaaatgtcgacttaaaggttttgtttttcgacagaaaattgtgttgaagttggatttgcatcacgacaaaagcagacagaaaggcatgaagatagcctctggtctttcaggtattatatctattaacacattctacaaaccctaaatcttgaaccttgcaaaaaaaaaaaccaactgtttttttttttttgtgtgtaggggtcgagtcgtttgcaat

SEQ ID NO: 250370 - DNA, 364 bp, Gossypium hirsutum
cccacgcgtccgattaaaatgtcaaaaaaatacttcaaataaatctaagaagcgggcaaggataccgaataaaatccatagacctgtgagtaatgctgctaaagataaggccttgaaggtacgacagtacatggactcgcgggcttttgttagacaggaaccggtttccttttgtggctgaggctgcacgtagagctgcagttgctccatttcgcaatagagcatttaatagtaggagggtggctaatttgaacaaaccaaggtaaattatggatcttctacaatattgatgacctctggaatgtgttcctggtttacttatttcaagttgcatgttatgtggaacacctaatatttgatcaca

SEQ ID NO: 250371 - DNA, 268 bp, Gossypium hirsutum
acctttccctatcttacactatttctctctgttacaagataaatagctctggtggctttatatgtttcgggcgatcctaaccttatccaattcctaaaaaacaactctactctgtcttgatactcgtctcggtttaattccaaagtggttggacctttctcagtgacactacgtttatagtaccgaattattttttaacacagatcattggaaggtaactgtatgatattttcctacaacttcttctgatctctaagaaatttttatt

SEQ ID NO: 250372 - DNA, 381 bp, Gossypium hirsutum
gaaatcccggggcgagccacagccgtcgcaccatatatcctggtttaaggttttcttttaaataatgttaacaggcatgtctaaggggcgcatatatatgtgtgtatttatgtatatatgaaaagtaagctctgatatatataattattattttggatgccaaaaattttaaaaattgtttgtttcaaaaaataaacatataattaattaacggatatcaaaaataaaaaaaaaaaatatggggcggccgttctagaggaaccaagtttactaacgcgggcatgcaacgtcatagccttttattggggtaacataaatgtaatggattgtactttttttaacaacttaatccagtgtaaaaaccctgtcttaccccaattt

SEQ ID NO: 250373 - DNA, 366 bp, Gossypium hirsutum
tccgcccacgcgtccgttttttgcaaattttagcttttcttttttcatttttagtttgctgggttttgttctttgagagcaaaatcttctctccttttccctgttttttcgtctcagtaaatgagaaaggtttatgattgttaagttggtttttctttgcccatcaagctttgattaggttttctttttcttttcactttatcattctgtttgaacgaaatatatctgtagagttgcttcatgggtgtaatggatctgagagcaaagaaatcatggagtgaagatatgatgagtgagagcagcaagaagttttgtactgattgcaaaaccacaaaaacccctctttggagaggtggccctgctggc

SEQ ID NO: 250374 - DNA, 281 bp, Gossypium hirsutum
  unsure (1)..(281): unsure at all n locations
gggggggggaaggcgacggaaaacncnggcgcaaacagggagcgngaacgcgggggaaggggaagaacccgggggggggnaanccgaagggcgaggggaagaaccagaaaggaccccaggacagagcaaaagcaagnacgaggaggagaacaaggacggcggcagcagccaagagggggaaaaagggcacaagaaccancgccgaggagagcgagaagacacgggagaagacgagcacgggaaagaggnagggaaacagaccaaggggagggggggaagga

SEQ ID NO: 250375 - DNA, 217 bp, Gossypium hirsutum
  unsure (1)..(217): unsure at all n locations
gaaaccgcggggggacccacgcgaacgcggacgcgaggacggacgcgaggggaccaaagcggaagangggaagccaggggggggcaanaaacacggggggaggccggacccgggagaccggccaggccaaagagcgccaaggaagccgccgacaaggcaacaagaagagccaggagcaacaaaaaaggcaacggacacggaagaacggaagagaaaa

SEQ ID NO: 250376 - DNA, 368 bp, Gossypium hirsutum
cgccattggaagagggaaaagaaaacgaaacccaaagaaaggacataatgagcgggtctttgcgtaggttcgctgccatcacccgcctgtcacagaagcaaccgttcgccgacttggctgacccgatcaacagaatccacccgtttctaaagaaccgaaccaagacccaagccagggagtatgttcggttcccaaatgttgtacggaaagtaagagaatatgagatctccccctcccttttcagttcttcgttctcttcttcctcttcgtcttcaacggcgtcgtttgggacgaagaggaagaagaaaacgaaacccaaagaaaggacataatgagcggttctttgcgtaggttcgctgccatcaccc

SEQ ID NO: 250377 - DNA, 259 bp, Gossypium hirsutum
ccttaacctttcttatcttccaaactaaaaccaaacaaccagctcaaagggggggaccatggccttgcgtcttagcaacaattttgttggaatcctcatcttcataaccttcctgctctcgatccccattcttcggagccggcttctggcttattcgagatggcgttgacggaatgcgaacggtttgtggacaagcccgctatcgtaattggagtcttccttatgcgcgagtcacttgttgtacaaatttgttcgtgct

SEQ ID NO: 250378 - DNA, 365 bp, Gossypium hirsutum
gccacgcggtcggatgctgtggtgcatatcgaattactgtataatgctcctatttattttacactttgggacatacatgctcaaaaggacatatacatgtcccatgtaaaagtggagactctgcaaggtcgttcttgcttaaggcgaggcctattgagagtattatttactatgtgggttaaaagatgcaatcataactgcaaaggctggcggaacgggttgcgccaatggtgcataagcaggtctcaacatacttcgcggcaaggatggtgtcaggtggcacttaacccatcaagtgagacgataaggctcccatgtagcgtaactgatgccactgagtgtcacacttacagacactggggagc

SEQ ID NO: 250379 - DNA, 243 bp, Gossypium hirsutum
aacaaacgtccggctctatgcctttgacttggaacatgaccttcaaaacctagagaaccttatatggtggggctttggacatatacaacgaaataataggaccaaaggaagatgaagacaccaacatgggaaatgcaaagcaggctgcaacaaattcaatgcttaccacattaatacgaggagagtcgacgtgcttacaattgcttgacagcatatgcatgtgaaacaggacaatggtgtgca

SEQ ID NO: 250380 - DNA, 319 bp, Gossypium hirsutum
cggacgcgtgggcggacgcgtttgtttggagaggaccaaaaaggaggagaggggggaaggtattatgaaaagatacaccttaaactctgtaggagctactagtttgaatactaaagtattccctattaactagtttttggacaattgtaatttttctacaatcaccttttatgacctggttttgttttacgggatattggttccaaactcctttctttttctttattcacctttgttgccatcatttttttttgtggcttgtttatttttgcaaatctttttctgttaatactactatttatttttgtcacaattctat

SEQ ID NO: 250381 - DNA, 278 bp, Gossypium hirsutum
cccacgcgtccgctggcttttttatttgaactgaggattgaataaaagggcgatgcattctggggaatgtgtgcccaatatttgtagtgcaagcaggcttatggaagcattatgtttttgtagagaaaatctgtttccccttcggtttaaatttggtgcatatctagttatagaaaggatctgaagcattttgttaggactcatttgtttgcataaaacattggagagtattattctacttaaattctttgtcatttcttctagcagtgcctttgttt

SEQ ID NO: 250382 - DNA, 367 bp, Gossypium hirsutum
gtttccatcaacaatgggagaaacaaatgagaacataagaattaacagcagcaaagataggaacaatctttctttgcagatggagaaatacccaagggacctgttacaaagattcatgtcaactgaaacccaagcttcaataacaagtgaaagagaagaagatgaagcagaagaagaagcagagctgaatcttgggttatcattaggaggcagatttggggttgataagaatgcaaagaagttgataaggtcatcatccattgctagttcaatgccaacatttagagaagaaggtgccaacaacactccaccaacgattccttacccaacactaattagaacctcttctttgcccaccgagactgaa

SEQ ID NO: 250383 - DNA, 366 bp, Gossypium hirsutum
gccgaggtcaacttttatggataaaaccatggacgcaactgaaacccagttttcggtgaggcctatccaattggaagcaattagaacttgcacggaagctgaattctgtccctcaagcaggttcctgacaaatgaagaattggaggcagcagctgttgctctgcaaaagtgaagcagtttgcaggtctgcatgatttttctcaagattatcatgattaatgaggtaaatccgaacgaaagctgtataagtttaatcaaaatatttcattgcttggaaactggaattttatcaattaacgcctatgttcatcattagccatggcagtgaatggcattgaaagaaatgttgtttccagttgaaaatga

SEQ ID NO: 250384 - DNA, 301 bp, Gossypium hirsutum
gtctgcctctcgaggaccaactcctataccatccaattatgaggaggatggtacaggcttttgtaaaccaaggttccattaccacgcacaaggtggcgcaggtgcagcccattatccggctcctaatccgggtatgttctctcccaatgggtctaaagctaatacaaagaagcctaacgatcaggctcagcaaaaggctgaagatggtggtagggatctccatatgtttgtttggagttcaagtgcttcttcttgtttccgaccgtctttggtgtgtggtgggtggccattgaaattatgg

SEQ ID NO: 250385 - DNA, 143 bp, Gossypium hirsutum
aagcccttaaactattgcgatactttaaatcgggaggacgaggcttaaaagggggggatggtagcctgggctgtcgctgttcatggtgtcactggtgtcttccctaattcatcctaaggttagacaagacgaggtttatagac

SEQ ID NO: 250386 - DNA, 149 bp, Gossypium hirsutum
ttcttcttcttctactagtacgactacgcgttctttagcatattattctcatccgctgcccaaaccgccagctgggtttgtggttgacgacactggtagggttctcatggcctcaaaccaagagaaattgccacccatcggttggattt

SEQ ID NO: 250387 - DNA, 160 bp, Gossypium hirsutum
cggacgcgtgggtgaagatggaggcagctaaagtccattggtcctcaatcttgaatgggcttatggtgatcactttcctcgccgggatagtcctcgtgatcttcttaaggactgccaagcggtatctgactccgtctgaggagcttgataaggaggcgca

SEQ ID NO: 250388 - DNA, 143 bp, Gossypium hirsutum
acgtccacttggtggattgcaatttttggcacggcttacaatggccatgggggagacaagcccgtgcatgacggcccgaaagaaccgctccactacggcttttcgacgttggaccgctatggccagacagacgttgctcgctg

SEQ ID NO: 250389 - DNA, 280 bp, Gossypium hirsutum
tgccaatatcagtacaaccatcctttttgataaaatctcacctataatctgtgggggatgttcatattttggtccctctgataattttgctaaacctaaaaaggttcaaactgctgcactttttggactgtgtgccttaggtcttgcctctatctaggaacaaggatttgtggtgcttatcaattcatctttgttgttgtgaaccccatattattttaatactctatttattttgattttacagaatttgttaattccaatacactactacatgtcattt

SEQ ID NO: 250390 - DNA, 191 bp, Gossypium hirsutum
cttttcttacactcaaagccctttattttctaaggagggataaaaaatgagctggacaggaggtgattggatgtgtgcatcattcctacaccataatttcaaaaagagaagaagcttgtcaactcatcggttattctaagcttggtggtcctgacttatctacttacttgtacaataggaccgaattcttt

SEQ ID NO: 250391 - DNA, 388 bp, Gossypium hirsutum
  unsure (1)..(388): unsure at all n locations
caaaaccaaaatatgaagatactattcctttatgggtttagaaccatttntaagttcctgcatgaatttaaatcatcagatggcatccttctctttttcttcatcactttcaaatgtatttttctgacagtttatttatttcctgatgaaagtcacacatattatgcatattccctcctccatacttttaattgttccaattcaacaaggaattcacagattacacaaaccttttggaatgcttctctcacttgtttcaatatatcacccacaaatgcccttttcatgtattgcttcgcttttcccaatgtgcaactcttgttgcttcttttactggtctacaagtctcattttaatgtgttaaattagcatccacctttcataattt

SEQ ID NO: 250392 - DNA, 367 bp, Gossypium hirsutum
tttcgtcacatccgtttcttccttcgtttttttccaacacccttcttcttctatcaagttagttttcaaaattgcttgccacaacaatcccaactctttttttcatcatttcaacaacacccaaaattcctcttccattgctgattcttactataatcttttttattgctccgattcttataagcttaaatcttgctactttaccaaattctctaaatcccattcttcttacttacttaactactctttcttaatcatctccttttattcacaatcacaattttttcaccctttctttttaaatctaattttgtttcctcaatctcaaatcacttattcatttctagcatattttttcaaaattcat

SEQ ID NO: 250393 - DNA, 174 bp, Gossypium hirsutum
ccgggagtcgaccggtcgccccacgcgttgcgtcacgcgtccggccacgcgtccgttttacgcgttcgggctacttcagtggcttcggtgaaagcttttccctgtttttgtgtggttattaaacattgtttactttcactttagctctgatttctccttcaccaacaacaaaaa

SEQ ID NO: 250394 - DNA, 247 bp, Gossypium hirsutum
cccacgcgtccggtcggcgtgtatgtgtctgtggtacgaacagattctacagggtggggcatttaattcagtgtgtggtgggagaatttgttgactcggattactttccgtggatgtggtggctgaatcagatgtatggcacggaaacttgagtagaaaagatcttctatttacttgacatgtagtactatctatctatttcctctcatttttctccgacatgaactaattctattcattaagacat

SEQ ID NO: 250395 - DNA, 387 bp, Gossypium hirsutum
cgtccggcattttttaattgtggcaagtgaatctcttccaataatgactgattgccatccccgggggcctttattcggactgctctccaacaagccactgcttcaatggctaatgaatgcatagtatctttgccattactaactttttcttcgtgtattcttttgttacggactccccatatggcccataaagcgcagcaaaataaacgacttctgcatggattgagttgtccaaaaacccattgcactctctgaaaatatgttcaatgtttcggcttgtgcttcacatcgagggcattgtgtgatgtttaaaagctttcctgtgcttcatattcacttttgtaggcaagttattccattataatctccatattggaattgcaattt

SEQ ID NO: 250396 - DNA, 234 bp, Gossypium hirsutum
cttccaaaactttctagcgtatcccactttatttttatcatgttatcctcataacaatgtttttcgtgattttataacttaggtgtttcgactcatgtctatgtcttctgctgtattgtaagagagaactactagcttacatcatatattgtccatattttgtagtgttcttcaatttgtcatgttaaaaaatggggtgcttgatggtcaagcatttctatttatataataaaa

SEQ ID NO: 250397 - DNA, 369 bp, Gossypium hirsutum
acgttcgctgatgctactttcttcttttcttttattgccatctccatggttcaaacgctggttttataatcacatggacatccatatcaccattattataacaaactttattgacctgaaagtctcaatccttaccaatgtccatctcagtgcacaattatttttatccatacacattaccttaaaccatacatgttcttttttcacaaattattcataacattccttttttttcctccatattattatgttaacaatcaattattccctatttacaactactttaaaaccaataaattactccctaaattcctttaaattactcaaaataaaacctcttttttatttttttaacatttttatccctta

SEQ ID NO: 250398 - DNA, 216 bp, Gossypium hirsutum
  unsure (1)..(216): unsure at all n locations
tggacgcgtgtgcgcaanttttgttgttaattaatcgcgatagattttgctctaggtaggtacgctgatatggagtggagatcttaagtttttttgaatttgagatgatttgagccgtaagaggccttaggtttttaatttttcagtcatcaatttttggggaaattcttgcactttactgattctaatgaattttatagatcggtggtttgttct

SEQ ID NO: 250399 - DNA, 363 bp, Gossypium hirsutum
cccacgctttcttccactctttttttgcattgataagcctttaaaaaaggggggttcatatatttggcgggggagcttgaaacattcaaattgtttaatttattatataattaaatcccttatcccaatggaaaaatgcaatgtataaatgattattgatgtgtgtacccatatggtatatacgatagaaaagtttctttcatttttttatttgcagatttttttattataaaataatcattttaaattttatgttattgttttttagatgatcacctatatttatttttatttatttttttttttactcttactttaaatttttttcatattctttttctctttaatattttttatttttta

SEQ ID NO: 250400 - DNA, 285 bp, Gossypium hirsutum
ccagattgtaaactttatttttgcttgtagatttagtagccagattttggttgggaaaaattgctataaggggggcagcaaagcataagctctagtaattctatcaaaaacttataatagtttgtaggcgctacgtaccgaggattcgcccgaagcttcggccctcacgtgaggaaattattgtgaggtgctagtgctaagggaatacgaaggatttttgcagcatcttctactgggaagctcaagagcaaagatggtccaagtttgatatgggaaaagagaaag

SEQ ID NO: 250401 - DNA, 256 bp, Gossypium hirsutum
cggacgcgtgggtttttttactgatagttgtttcccctccttatatctatagaggaggtgtttccataatggatggtgtaggaatcatttgttgcatttttttcgttatttattgcatcacgttaatggcttgcttgagtttttccaaggttcttattagttatatcaatttttggttattatttcttgtttgaagctggttatttattattgtatcatgttgatcattatatgtatgctttctcttatcaaatct

SEQ ID NO: 250402 - DNA, 130 bp, Gossypium hirsutum
gtgacctatactattcaggcttgttttcttatgcgcttaactaaaacattgtatgacggaggtaacaatcgacgcggcgaactgttaccatgccagacactgagccgatcgagcattgaacccaaccatc

SEQ ID NO: 250403 - DNA, 377 bp, Gossypium hirsutum
cttgaggaaaaattgagagatgtcctaccgggaatgctgaggtaccaatggggggatgctgttagattctggaattcaaagaaaggagaggaccgtgagcgagttggaacaagcagcagacaaaaacaaaaattcacgcatacggcagggtcgagaaattttgcttctgtagctgaggccgaggaaatctcttccggtaaaaaagttggatgccttcagctttttgagattacacataagaagaaagatagatcttctatgacatccgaagcttgagaaattattgagaagaaggctgagtatgaagcgattgctttgactgattagttctgttaatcttgagaacatttgatatcagaattatcaatgtagttttg

SEQ ID NO: 250404 - DNA, 196 bp, Gossypium hirsutum
tttttaaaatataataaatattttctttcgcaatgagcactgctgctcaggggtttctttgcaaagcgtgcggaggcatcacacgtctttaatccactattcttagaataagtggtagtggcaccaccccaaaagcttgaagaccgtattaagattctctctcactgctttattcctcactgacttatacttctgt

SEQ ID NO: 250405 - DNA, 387 bp, Gossypium hirsutum
agtagagataggcagaagcaaagtgtaagattgaaaccatgttggactctgtggaagcaaacaactttgaggcattgccacttctgtcattgaatcatgtctcattgttgtgtagatcagtctgggattcagtgcggttctatgaagatgttttgggctttgtttccatcaaacgcccttcttctttcaagttcaatggagcttggtaaccttactgctctacccttgtttagtaaaatccagtgttgaatgaaacaggatactaactgaacaactgatgcaggttgtataattatggcattgggatacacttaattgagaatccatcaatcgatgatttcgacactatcgttgaaccttgaccgatttatccaaaggataatcaca

SEQ ID NO: 250406 - DNA, 378 bp, Gossypium hirsutum
gtttttgagaattttcaaagtttataaattttaccaaaaggaggtctgtatccttgggggctccttttaaattgtgccgagacttttacccttaaccataccacgaagttttaaacttcatccatcataaacacataaacaaaggcctcacgtcaacttaaaagaccatcatcttcatcaacaagtgatcgactaacaaaatccaggttcaggacacagccgtatacactgacgagggaatggcagcaacaataaaagcaataaaagctattttggtccaaaagttgaaagaaagccaactaattgagaatcaaatcaaaggactagaggaagcgctgaaagatcttggaggatcagcagtagacctaccaagcccag

SEQ ID NO: 250407 - DNA, 185 bp, Gossypium hirsutum
tcgcccacgcttccgcccactcgtccgttcacttgtattgttcaacacaattggttgggggggctatgcttccttgatgtccgcaatgatcaccgtttttgttaacgtaggtgcatcattggtttcaatctatggtgtttgattagtggtgaaggaagttccttttactagatggttggtttata

SEQ ID NO: 250408 - DNA, 197 bp, Gossypium hirsutum
aaaacaaaaaaacaaaacctttgtttgctatggcttgtcttccagaaaccttccaatctccaaacttagggggagtctggatggccgattgaatgcggatcggcgcgtttagatgactttttgcctcacgctattaaatcggttcagtaggtattatcactaccaccgatgttttacactaaccgtatgtaaacgct

SEQ ID NO: 250409 - DNA, 357 bp, Gossypium hirsutum
cccacgcgtccgcccacgcgtccgcccacgcgtccgttcttctctggtgtactagttgatttctggagtaccataacatccatagagcatggcagaaaagtagacactgaccgttgtcgcttcccttgaagacccagagggcattcgcgaaaaacatggacactttcttcaaccgccgaacaacatcgaggacatctatcattgacagtaaccctcctgtatctaagattagcaaaattaggaataaaatcccatgaaattcgccagattgtaaatgtaatttttgagggcaactgtaagctccaaagtttcttgtaaaattcttttaattcggtctgtaataaataatcattgggg

SEQ ID NO: 250410 - DNA, 318 bp, Gossypium hirsutum
ctagatcgcgaggtatgtctctttcctttttgttttattctttcaaaggcggtggggttgataaaaaataaaagaaaagaaagaaagaaaaaactgcgaatgaaaaaagagatccggaaatcaccttttggtgattttgtattccgattgcgaaaaaaatccagggtgtagcctattctcagtcttttatagtgtctattttacaaaatattattacaaaatcaaaaattaatcaccccgctctgtcccttttcattttttctctctgttcctttttgtgtgctgttggagtctgctgtgtagctggtttgtgcgtct

SEQ ID NO: 250411 - DNA, 249 bp, Gossypium hirsutum
ggcattgaagatgtggtttgcctaatcaagaattccgctaccttatctagggggtgttatacctgggatggctctcaaatcctcattgatattcctactttgactgataatgataaagaggttataaacatttggggcgttcaaaacaatatatacatcctttctttgtcatatacctaacattcaaaagatattctttaagcactttcttatctttccaaactgggtaagctcaaccagactcaaatt

SEQ ID NO: 250412 - DNA, 185 bp, Gossypium hirsutum
cagcagccagactcattgttatcgatttcagttagcctcgaccccaccatggatgccatttttagattcacaaccggtctttccaccaggtcaaccgccagacaacgcgaaaacaagcacctacgcgacgtcgtcttcgttgacggatccgatcgcatcaaattcgcaggaagtagcccccatcc

SEQ ID NO: 250413 - DNA, 260 bp, Gossypium hirsutum
acgcttaccttctcttggccaattataatctttgaaacctcacttcaattattgactgtagttttaatattcggggatgactactaccgtaatgtcaaatctacaactaatctatctcaatctccttgaaatgctaaatttttgagaaatattacaagatgtgtatcgaactggtaatgtctcaatttattacaccttttccatacttctacacattaactaacccatataaataattgtccaaaactttattatcctta

SEQ ID NO: 250414 - DNA, 383 bp, Gossypium hirsutum
  unsure (1)..(383): unsure at all n locations
gggcgaccgacgcgtccaagaaaactggggagagaaacaactataaacatcaccaaatgccaacaaacgagtagcgattaatcttcttaataggggatcccaaacaccnattatgatcccacttccattttctattcccacccaaaggtcacctatcgaacagcactcggtcaggtctctcctccgcatatccacctccgatgttccttgcttagggacccttccggtcacgtatgctcacgattcttctcttatcgcctcccttttccataccataaaagtcacataaggttctattgctaaaggacttcgcacaattctgtctgcctcttcttagagaaggtagaatatattaagtcaaatttaaataaatttttaaaact

SEQ ID NO: 250415 - DNA, 263 bp, Gossypium hirsutum
attaaaccctgattctccccatccccactaatatctccttgatggctttaatgacgacgtgcacgttagcaatcttgcgctgccacaactccccagggattcatgcgcatgtgttcaacagctacggctaatacctttatgccgccgacaattactgcgatggtcaacggctagggaacccctggtagagagcaagcgccttcaagtaccaacctctttggctactggcttaacaagcgcactcagtcatgtgacactccaag

SEQ ID NO: 250416 - DNA, 257 bp, Gossypium hirsutum
caaacgggccgtgtgtaaaatcctcatggatattcatgtcatccgagcatgcatcagcagcaccatggcacggtggttggccaataatcaaccactcttgttcctgcaatcatcacctcaggtgactctcgtggagatgatggcaaataatgactatctcccctaccatctttcaaggctaactatccctccttaagggacgggacttttgccaacaaaaaaagccctactggggagggtttttgcaaatggaaaaa

SEQ ID NO: 250417 - DNA, 380 bp, Gossypium hirsutum
cggacgcgtgggcggacgcgtgggtttttctttctccgtctctgcgaatgggaagaaagaaattcctaaaattttctctttgtttttcagtgaagataatgcggtctttttgagtattttgttttacaatatctctttctgctccttttttttcccaattgagagttattaatttcacgctgtaaagctgctgttagaagggaggtttctagatttggattttcgagttgactgagatacttgaatgacatttctataaaatttgttttcctctatagtgcttggtaatgggaaacaacgatgaatgtatgtttaagtctgacaagttatctttcaccattgccattcgtatcaggccaatattcatgtctttcctgatt

SEQ ID NO: 250418 - DNA, 360 bp, Gossypium hirsutum
cccactcgtccggcacctccacctccacctcaccattcgacctccctctttcaagtgcactataggaacttacagcatcatggatttgtgccagagttattgacttacaatattcttgttagtggattatgcaagatcggtagattaaggtcagcaaggagggttcttaaagaaatgcttctttaggaagaagaagtttgaagagagaattgagctattgttggaaatgaagagtaaaaggtatacatttgttggttttgcttattgcacagttattggtgctctaattaagataggtaaggcgaaacaagtgaccgcattcatggtggacatgactgaaattggtatcgagcttgatat

SEQ ID NO: 250419 - DNA, 313 bp, Gossypium hirsutum
cccttcccatctctctctcattcttctctaacctgactgtccctttccctaaagacgattttaaaacatatttcaccccccccacatcgttctaatacctaatctaccctctctgtaacatcaatcccacagttttgctatacttaacctctatccttatctacactcttactaccaccaaacacacaatgatttcaaagccttttccaaaatataaacatctaccccttcatttattatatctactcacaataatcaaactcaaacattaaactaaatccaattcaagtaaataaactttactcaaattcac

SEQ ID NO: 250420 - DNA, 227 bp, Gossypium hirsutum
  unsure (1)..(227): unsure at all n locations
ggctnnnaagcgattcttgttcgtatatatatatattttttattgtcttacatgggtgcaaatttggggagatgtgtataannnnnaactatttttctctggatccttatatattttgccttacattaatttcttatacgttttgagtattggactctggaaagaatctaataaatgttaattgcccttgaaatcttatgcctttctaataaaaaaaaaaagggctg

SEQ ID NO: 250421 - DNA, 335 bp, Gossypium hirsutum
cccacgcgtccgcccacgcgtccgcgaaaaccaaaaggaaactaaaaaacaaaatgcccggaaagctttcgccaattgacaagcgggagggcgtgagattcatccatcttctaaagcaaaaataatctttacatttaatacaaaacaggggttagggttttttattttattctttgattttaccctcacgttagctagaattggaagacctctagaaggccaatctttcctagtgtttcggttccttttattttctcgtgatttgcaaagataaagtgttagggttaggggtttttaattagcttacaaagtaggacgcctgttcggggggagga

SEQ ID NO: 250422 - DNA, 358 bp, Gossypium hirsutum
ggcactgaaaggcatataacctagtgtttgcatcaatctgaataaagaaacagaaggttgtttcatcaaccgaagtgaaaacagctcggctgtgaagctggataacgacaggccgtcgcagccgccggctacgattagcagaccagcaaaaaccctatttccaacaggactgttccaagcggcgtcgtcaaattcaagccacgatgatcatcatcaaccttctcaaatggttaaagaagagagccttatcaccaacatgttctgcaccatcgaggaacaaaccggtttttgggcattggttgaacagcaacaacatttcaattgattcatcatttttcaagttcccgagggagagaga

SEQ ID NO: 250423 - DNA, 269 bp, Gossypium hirsutum
  unsure (1)..(269): unsure at all n locations
ggaccattaaaaagcaaaaagaaaagagggagagagagaggttaaggcttaagaagtnaaatttcgtggtttgtctgcctttctttttaatggcggaagtagagaagcaagacaaacttgctgtaaatggaggcaaaagggaagaagaagagacgctgttagaaggaatggcggtgttggatttcgacatgctatgttccacgttgtgcttttctaacactatggtatttggtattaactcttaatcttcttgttccttttttactctt

SEQ ID NO: 250424 - DNA, 207 bp, Gossypium hirsutum
aaatttttatttatatatttaagtcatttggggaagaagttatagaaaattttgctaaatattatcatacgacttgtaaaagtacatgaactcttttatacaagtctgagaaattgtatagatacttggagcaagttttaccgatattcgggaacttttacccatataagtctttttctaccgataaaatatatttttacttataca

SEQ ID NO: 250425 - DNA, 374 bp, Gossypium hirsutum
cccacgcgtccgcccatttgtctgttctccttcatatttactttttctaaagagtgatagcttaacaataatcaccacggtatactctaatactgctgttttcattcactcctctctctatagaattgcctcctgaggttactattagctcttattgtttagtgcctacaagtacaactatctttaatcatggatggatgtagtccacttgaagcagacgttgcaccttttcttctgtcgttaaatgcatgatccttaattaaccgtacgttcaaatgcttcaggatggtcctctggttatggccttcaatcattgtaacattataaagtaaaacatattcctcttcttccactggcatgttaaatgtttcaat

SEQ ID NO: 250426 - DNA, 380 bp, Gossypium hirsutum
ccacgcgtccgtattgacaaattcctttttccgagagcctgtgaacatcggaagtgatgagatggtgagcatgaacgagatggcggagattgtgcttagctttgaagataaaaagcttccgatccaccatatccctggtccagagggtgtccgtggtcgtaattcaaacaatacattgatcaaagaaaaacttggttgggcccctacaatgaggttgaaggtaactgaattatattatccccacacgattttcccagtttaaaaagatttgtatgacctctggttttggaaaatggttttcctccattgcctgtagagtaaaaaagtctgaagtcattgcttttggccggttattacctagtttcattcagttcctgatt

SEQ ID NO: 250427 - DNA, 136 bp, Gossypium hirsutum
ccaacacctcttgcctccgagcataggctctttccagagggataggaacgcgtgattgaaaggccccttctccaatgtcacgagcaccggcggcgcttccctttccggcaacgctggctatataaagctacgccct

SEQ ID NO: 250428 - DNA, 372 bp, Gossypium hirsutum
ctttggttccagttgttgcaacaagttagaaagagtggtttacgggctaatttgggcgggaacatgataagaaagtgtgctgcttgggccttacctcacttcttgcacttcctggtgaccagattggcggggaggctcttgggcgtgtattcagggctgcccttgatctcctggttgcttacaaggatcaagttgcagaagctgcaaaggaggaagaggctgaagatgatgatgatatggatggtttccagactgatgatgacgaggatgatggttctgacaaggaaatgggagtcgatgcggaggacgaagatgaagctgatagcatgatgcttcaaaaattagctgcccaggctaaagctttccgcacaa

SEQ ID NO: 250429 - DNA, 367 bp, Gossypium hirsutum
ctgatttgcattccccatcccacttcctattcggactgctctccaacaagccactgcttcaatggcgaatgaatgcaaaccccaccaaattaaccaactctgccagggtttgtttgttcaaaaacccaaggcactctcggaaaatattggcaatggtttcggttctgccttacaatcgagggcaagttgggatgtttaaaagctttctgtgctgcatattcacttttgtagcgcaagaaatcacaagaatatccatattgtgattgcacttttagctggtagatttaggctccaaagttttttgttgaatatcctataaataaatagttacgcataagcgctaggaacttcattccaactctgtaat

SEQ ID NO: 250430 - DNA, 224 bp, Gossypium hirsutum
aagcttgttaggctcttccggttcaccatcagagggtgcactatcttcatgtgagtgtccatgggtctcaaccttacattcagatacaagatggcaacttcactttaatatttgtaatgagagcccaaagctttatggttataagatttatcagttgtctggtgtggaccatgcaagtttatggaacctgttttgaatgtaatggttgctaaattcactgatgt

SEQ ID NO: 250431 - DNA, 367 bp, Gossypium hirsutum
cccacgcgtccgccctagcaatctctccaaactcagtttcattaattccaacagtgcaaagctattcaaaaccagaaatcctaacactgtatcatccctgaaaagcttcgcgaagatgggaaaataaacagcactgtaaagatcgaatgttcatgacgaagacggaccggggcgacggcgcttaatctaaagaaaatgggacaattttcaaacgccgtttgtaggaattttatgattcaaggtggtgattcaactgttgctggcagaggaagtgaatccatgtggttaaagtcttttgaaaatggactttaagttgttcactcaggaaaagtgttgttagtatgtaaacagtgaccttcacacaaat

SEQ ID NO: 250432 - DNA, 379 bp, Gossypium hirsutum
aatcaagaaggggggcaagctcaaaattttggggaggaaatgcactcattctcgggtacacacaaattattgtaaataaagaagaagaaaaaaatcgaggctgcctgccatcaatccatcccctaaacaacaactcagtggcacttgatttctatgcaattcttcaagcaagttgtccaaggttttaattgctgcggtgattttagtttacggttcgcggggttgagacgacgctctcttgtttcttttgagtttcgttgattccaactctagggttttgattcgttatggaatttcggctttgtttagtggggtttctatcaactactaaagtggagtttgatctttagggttttggttctgcaaaaatgagatttgg

SEQ ID NO: 250433 - DNA, 383 bp, Gossypium hirsutum
cccacgcgtgcgctgacgcctgttttgcttcctcctgaaataggcaacctgacgctggcttcactcaacttgtcatccaatcaacttgttggaaggattcccaagcagctaaataaccttgtatatgaaagcagttctcctgaaaaatgctgatttatgtgcagatcatccaattctgatgcttccagactgctattccgaactccatcagcccaagagactgtcgtctaaataccttgccatgattgtagcacttgccatcattgcttccacagttatccttatattgaccttcttcctagttcaagactataagatgagtaagcgtcaagagtttctagcaacatggaaagtgtcctcattccatatattggactccacaa

SEQ ID NO: 250434 - DNA, 179 bp, Gossypium hirsutum
ggattgtcgggctttccaataatcacaccccatcccatgctccaatgagtattgaggaccactcacccacacctgtgctgattcattaaaggctccataaatcatccctgattctgaatcttggtaatttcatatgggatcccatttccaaatgccaaccaaccattatcatttgaacc

SEQ ID NO: 250435 - DNA, 385 bp, Gossypium hirsutum
ttcccggggcggccaattcatcctttattaactgagcatctttcaccttttctttcaatctcttacaactaaatagaggacttttttaatagaaagaaacacacctctattaacgcttctttctcatttaagaattatctcaacctttcatccaccaatctccgcatagttctaccaatatcctccgacacgttatataaaaaccaaactccatcttactcttataacaacaacatattaaccttacccgaaaaatctatttttactaatgccacagcttccaaaaactgttaccaactatctgtttcactgctcaatgcacaattttataagagcttccacctatcacattttacataaaaaaactactttcatcctaacaaaa

SEQ ID NO: 250436 - DNA, 367 bp, Gossypium hirsutum
cccacgcgtccgctattctccatatttgccaaaggcttctctcaaagaaatttgtctatcaactcttgctaaagttagcatctcccagttggagtggaaaacatgtttttattccactgactgtagtgagattgggcttgtacttctaagagacacagaaaatatgcttagtttgaagaggttttcaaagcagaagatcaaaaaactaggaaaagaagcacaagttttaaaggagaaggatctgatcaagagtatgagttctgcagcttgtgtgcctgatgtgctatgcacttgtgctgatcaaatgcatgctgcaattctattgaatacatgccttgcttgccctttggctttaatacttcacact

SEQ ID NO: 250437 - DNA, 335 bp, Gossypium hirsutum
cccacccgtccgtttttctaaggtaagaaaccttgttttttaaaagttaagggggaggaaggttctgagaatcgactcaactggaaattcgaatctaagtctgtactctgcctctcaactctatccaccgagaactaggtgccttgtttgaagttcattggtcgagtttctcctatacataccaaaagccgaattaaaaagcccagtttttttcttacatatcactttgcttcccttaagtcaagctctctctcgcccttttcagatctcaaagccatttgcattgtccttcaacaaccaccttatggatcgaccaccccacaattatgcagctg

SEQ ID NO: 250438 - DNA, 360 bp, Gossypium hirsutum
tatgtagttcacttttacatgccccaaaaatttcaaaggaaccctcccctatcggctgaagcacagccagtggagttgcctcaacacaaatatgcagctgtgaggagatttggaggtttcatggatgactccaacatctctgttcaattatcagccttgaagaaaagcctcaaaggcactggtagggataaatcatcagccttcaattaacacagtggccgctctctgttgtacagagctgctggatacaactctccctttgaacattgaaatcgtgtaaatgaagtgatgttatggttcgattagctttcattaaattttaagacagcaaaaatattttgtaaatgatgataaaaggaa

SEQ ID NO: 250439 - DNA, 317 bp, Gossypium hirsutum
agccaactttgtacgtacaagtgaagtgatccacaatcttgatacaataatacggctgctagttttcaacatacttgttttgagtttaaaggttgtagataaacaaaaaatggctgacgagcataccaaggttggtggtcaggaatcaggagagagcaaggatcgactgaatctatacttattcgcgaagaaagaaaattagaaaccacaacctcaataagaggtggaccccacccagtttgagaatgtcaagatagaagaggactcatagggaatattataagaaacacagtctcctggacaagctttacctattc

SEQ ID NO: 250440 - DNA, 297 bp, Gossypium hirsutum
  unsure (1)..(297): unsure at all n locations
cgtcctattaagaaactataacatttttatctactctaaaacctaattctagagcggtgaattttaaaacacttgatccacctacacatncaattcctgctccataatcaaatgcttatcatcataaccaacctttatatactacctccaataacacattcaaattccaaaatcaatatttataaatttccaccttcacaccaacattgaactcttagttattctatcattactccacattctatttattcctgtttattatccaccccttaataccttttaatacatatattttta

SEQ ID NO: 250441 - DNA, 200 bp, Gossypium hirsutum
cccacgcgtccggtaaactcgagcaaatccgaagacaaagctatgctgttgatgtttggaacaggcaaagcaaggatgttagagttgaagaaggtagcattgttcatcatattatatcagattgttgtattttttgcaatatttcaacatcaagtttgtaagtatagatttttatataataaggttcaatttgtctcatt

SEQ ID NO: 250442 - DNA, 194 bp, Gossypium hirsutum
cgaacccgtgggcggactcttggtataatgtctaccacacacttgctaatattgctagttggattggtggctctacccactacctctattggtacctattaatttcctaacttttataagccctttactaccgttaattaaccttttaacggataaaccttcaccttatgaacatccttcatataaaccttcta

SEQ ID NO: 250443 - DNA, 285 bp, Gossypium hirsutum
cctaaaggttccttggaagaggactgtgtgacatactgttctacatatggaggaggagatgtaacaagggtggatacaccacttaaaaatcctaggctcactgatcatatctcggcccatacttagttatatataaattattgagagccaatcggagaggctgtcattgcagaattagatgctagatctggggatcaagcacatctacatgctcattaacaccacgattcacacgaaccattacgcgagccagttctcgaagttgatcaagattcagctaaatga

SEQ ID NO: 250444 - DNA, 437 bp, Gossypium hirsutum
  unsure (1)..(437): unsure at all n locations
gaaatccccgggcggaccaacccttccgccacaccctccggcaattaacttgatttttaaccaataaaaaccttcccaaanccgtagttttcttgttgaggaaagtaatactaattcatcaagggaaacaagtagtgatggtagtaatagtgattatggagaaccaagaaaagctaacaacattgtcccaggttcttggaatcagttggatattgcatatccaaatatttagaaattgaatacactgtcacttaaaaataaacccttttgggggtttatcatattgattaaaagttattattttttactcctttgtgttaagattgatttttagaatactttttataatttatctaactcattttttttttttattcctatgttctcacaatattctcttgattttttaaatatcaattttcttattactttattta

SEQ ID NO: 250445 - DNA, 179 bp, Gossypium hirsutum
gaccctgacagaaacattagattcctcgcaatcatcatcttgttcagaggggcggctgttttaggacttgtgatccaaaataattaatgtccatgctccggagttagtgcctactatctcatcgcctcattatcaacaacaacatcagcaaagtatgaggaagatgattcattttcctt

SEQ ID NO: 250446 - DNA, 251 bp, Gossypium hirsutum
gccatttccaagttcttctattgctgccctgataatgcttttcaggttgcgggggcggggacctcatattcacttttgcaaagattaggtgccgtaatgcgcaacggggccaagctttttgcagtaggcacaacttcttcactggttgggacagcggtcacaaatgttttgattaatgcaagaaaggctgttgataagttttccggagcagaagttgaaaatgttcctatactatccaccagtgttgtcta

SEQ ID NO: 250447 - DNA, 388 bp, Gossypium hirsutum
cggacgcgtgggcggacgcgtgggcagttctcactttccagacccaaagggagagggagagctgctgttctatgttctttacttaacaccagatttgttatgttgaagttgggataaatttatgctgctctcaatgcaatatgggtgtttgaaaagtagccaagccttgcagtttcggtgacaaaggtacgagtgatgtcgttttacgcttgagaaacagcgaaggaaggcctgaatggttctactcccactcatctgttctcgtaagtaaaagcaggttctttgcggatcagctctttaatcctggctcgggctcctgcatcgagattcattgctcggactccacttatgatcatcatgttaaccttttgagattactgtatctccc

SEQ ID NO: 250448 - DNA, 351 bp, Gossypium hirsutum
  unsure (1)..(351): unsure at all n locations
ggaaatncccgggcggaccaacccttccgccaacccttccgcccacccttccgttaaatctgaatctaataaatacgtataatggtttggttggattaagatattataattaattaattccattcaatatagattatttgctggtttttttttgggggagaaatattatatttgatgttaatgaatgttaggtaatcttagtgctgcatgttttctggagcttcttttcatggggaaaaacatgagattcaaagaagaaaaaggagttacaaacaagaagaattagtagtaaaagtgaaaaatagagccacaaacgaaggaaaaacagtaaaacagagcatgctcttttca

SEQ ID NO: 250449 - DNA, 131 bp, Gossypium hirsutum
tgtactttgatctgcttacaagttttttttatgatcattgttatttattgaactgcgttggtactcaccgcaattagacgtggccttgctcatcaacttactttgtattactacaacttaaatccttatac

SEQ ID NO: 250450 - DNA, 272 bp, Gossypium hirsutum
cccacgcgttcggttgaaggtttttatgcgaaagcaagccagcatccggggggggaataagcatatgcgagggggtggaatgaatagcttcagtttccattccagtccgtggatgattcctcacattttcaaaccagaagttcaatttgttgagctttcaattgaacaatttgttctcttcgtggaagaaaatgtaagatgatcatgttatggtgacacctccttttagataaaaacttattgttgcagagactgattttattgccaagtat

SEQ ID NO: 250451 - DNA, 191 bp, Gossypium hirsutum
gggaaccatttagaaattcatctttttttgggctggaaaaggtactacgttgatggcaactaccggttctgacggtccagccatttcagctattagtgttggtccaagtaagagaccttaaacttatgaattctcatgttatatatgtttcacatgtctatctttggtattctatttctaatacatctatt

SEQ ID NO: 250452 - DNA, 261 bp, Gossypium hirsutum
ctccgtcttatggtggaatcaactttaattttttatggctggattatttttcggcttttcaaagaaattttactccaaatcattaactagtatctcattataacaaatctcattctaccatctattcttttgcttttataaatatatcaatttattgtttgctttcttaaaatatatttttatttttattttttatatttttttatattttatctttattttattttatttttttttttttaacatatttttattattttt

SEQ ID NO: 250453 - DNA, 371 bp, Gossypium hirsutum
cggacgcgtgggcggacgcgtgggtccgatcaaagctgaccttgagggagacggataactgctgcaaagctccacacttccataagagattatcagaatcctccgggatttctttacagagagggcaagccacatctgctgaaagacgcctgtggaaaaggttaacaaaatgtggtacatagttattaaggagtctccaggcatggattttaattttagtcgggatctgtgactcccaaagaagtttctagaaatctttgtatttgctatcattgtaaccaatatagctaatggtctttagttgatctgtaatcaaaaccctgtacccgctcttcactgagtaaatcccagaggcttcaaatttccagacc

SEQ ID NO: 250454 - DNA, 369 bp, Gossypium hirsutum
cccacgcgtccgtccacgcgttcttaaatggtacaggctatttatcaaagttgcagaacatttcggtcattagatatgtcttttctcaaggaaagcttctagatgtactatttggcatattcaatatttcctattcttctctgatatgttagtaaaaagttggcaggtacttgaacttgaatatcttgactaaaattttggcaccgaagtatgcttttaattgcctttaagaaccagctacgtttcatgtctgaatgctggtgtttttctcaattcgtgcattaccattgaaccattaggtttttggttagaaaatccttttttagttggcatgtacatttaaaatataatctgcccaaacatgcatta

SEQ ID NO: 250455 - DNA, 201 bp, Gossypium hirsutum
aaaaaactttactctcggtttgtaaattaataggattttgagtaccctccggtgatagtttgtaggcgctccgaaccgaaaatttgccagagggttcttctctccagacttggaaatcttcatttgctgtcgtttccaatggaatttgtaagatctttttaacaacttccgcattgaaggtaaaagaaattatatcagctt

SEQ ID NO: 250456 - DNA, 371 bp, Gossypium hirsutum
cccacgcgtccggcctaacctaaacataattccaactaatctttttcaggtccggggaattgggaaccgcgttcatattcatggtttttgactcagtatcggtggtgcagcaaagcataggcccccatttctgaaccttctttctttcttccttccaaatctccatttatttagcactccctttaacaacaccaaagcttgtattttctcttctcctatttaagtaattaccaccactacttttttgttcttaatttcaggaaacccaaattaatattctgtcttcaatacagattgcattctttttgctgttttgctctgtgagaatataaaaaatgaagggggtgttgctgtggtactgttcgtgggta

SEQ ID NO: 250457 - DNA, 222 bp, Gossypium hirsutum
cccacgcgtccgcccacgcgtccggcaggatctcaactctataaaccccatatgcatggaacagccaaagggtccaagttttgttattcgaagatgaacatttggtgaaatgggcaaaactgggaattccatttgaaacccgatccgagagcaggtgtggtggtttctcgggctaaggtccgggaccttgagagtggggtgttgagggatgtgatgtacaaa

SEQ ID NO: 250458 - DNA, 360 bp, Gossypium hirsutum
aaaaaataaaaagataaataaataatatgagagccaaataaaaagagggatttgatagagttttcgttttcatttttattttataatttctattattatttctgtttgtttggcgcaaagatttctattcacgcatcagctctcaagttggtcgtcgttttctctcgatctgttcttcacgttcgtcgagttatagctttctctcacgatttcctcgcccttgattattgttttctctcggttaaatttggaggggggaagatttcgtgagttcgaaaaatgggaggagttattttgaattattatcttttatttttccctgtaaggggtgagagcctttttttgtgaaaatttttttaa

SEQ ID NO: 250459 - DNA, 302 bp, Gossypium hirsutum
gattatgactggacatcaagataattctgaattttccacatcattcaatggtcgtggactaaaatgtcagtaagttttttatcacaaattatgatttgactccttatgattatatgataccattgcatgattttcaagcatttgcttagctgcctgaaattgtaagaggtctttttcactctgtataaaaaccaaggttgcctgcttaagatcatgcttttttatccatttttgaatattatcattttgttgatcaagctaaccaatttaatttttctaaaattcctatgttcccaccattt

SEQ ID NO: 250460 - DNA, 351 bp, Gossypium hirsutum
aatgcaaggaacacggaccaaggacgactcattttgtcgaagatcacatgcaaggttaggtgggaactaagcgtcagacgacaacaaatatcgtccccaaacaaagatcacatgcaagctaaacaattctcagtcgacacttcccttaatttcaactgctatatctctgttccttcaccgctaaattacaccttggttagttatttgcattaacatatatattcttcatctgcaatggaaaatttcgttgtaattttagaggcagtagtacgcataatctttattttgaacaccaaatgccgttctaaccttggtttaaagattccttttgcctttctttctagttttttt

SEQ ID NO: 250461 - DNA, 197 bp, Gossypium hirsutum
ctttcttgttctttttaagtatcagagcaaaattgaggaacttcgggttagcagggacacagagctttgacagtcttttcaccatggaagatactgaggtcgccaatatcctgttagagctttcccgtctcatataacgcccttctcgcttttcttgtactttggggctgccggaggaagagttctgttttcacatt

SEQ ID NO: 250462 - DNA, 200 bp, Gossypium hirsutum
acgacacttcccttaaaaggaatgcttttgacaggaatgattttcatttagaatggcacgggtatcctggctgagtgtcttactcgtcaactatccatcaacactaaacggaaactgaacatggctgggggcgccggattctgggagggtggctgctgacctgaaagcaatgtgtgcattgttatactgcacgcgccatg

SEQ ID NO: 250463 - DNA, 169 bp, Gossypium hirsutum
  unsure (1)..(169): unsure at all n locations
ccggggcgacccactcgtcctcccactcgtgctataacttgttttttttcaagaactgcttatnactgaccgcgattatttatcttcacattgcgaatataattttctgcttgttttcttttaagcttaccatctccacataattgtttatatttctaatatacacttc

SEQ ID NO: 250464 - DNA, 184 bp, Gossypium hirsutum
gggggtgggatccctaaaaagatgggattctattaaagaattaatgttgccaaataaagtgaacaagctaaattcaaagaaagacaactttaaaaaagttttagaaacatattatgcaatacaccacatttttgagtccaatgttcttccgcaatacaccattaaaaccgaaacattgaaacat

SEQ ID NO: 250465 - DNA, 250 bp, Gossypium hirsutum
ggcgatttctttgtacagagggaacctccacagagcaccggaggtatcttggcgcgggctaatgccgactcccaaaatctctctcaaagacttcaaatctctcttgcaccgccgcgacagagctctctctcgtctccgttcctcttcttcttctaaccctaaccctaactctgttttaaagcatcaaattcaatctcccgtgtcctgtgagcctcctattgagccgaaattgaaagccaaactggaacct

SEQ ID NO: 250466 - DNA, 293 bp, Gossypium hirsutum
cccacgcgtccgcccacgcgtccgattttcccaaaatctgtctacttccataaagagtttccctttcaaaaatgaaggtgtggattgctgtgttgattgtatcatgggcttattggatatccatagttgaaccatcgtgttgcattgctgtaacagaaaatgagcacaagctcaagatttacacagtgagattcaccactgaaagagccaccaggaactcttatctgatgtttatgaaggatctgtacaatgcattgacagagcgtgcagatagaagcggagacataccgata

SEQ ID NO: 250467 - DNA, 207 bp, Gossypium hirsutum
  unsure (1)..(207): unsure at all n locations
attacatctttaatggtctntgagattttaatgtttagtgtagtaatcctacagggggtgtgactagataccaattgtagtggactgttgatattgtctatgaacatttttggaacctgtaaaagaatggagaggatagctttgaggaattacaggaattgtttgaagacatgtttcaagttgacatttattcattctggtattaat

SEQ ID NO: 250468 - DNA, 332 bp, Gossypium hirsutum
  unsure (1)..(332): unsure at all n locations
gcgtgcggccaccggaagaacttatcgattttttggaagattggggccaacaataactagcngttttaccggtgtaggaggcgcgataaggttgggaaacctaaaaaaaggttggttaagaaaggaggttctacgggaaaagagagtatggttgcccctgtgttgtaagatgaagacgaagggtccaaatttgggagggaaggatcggaatctgatgcgaataatagcaagaagaatgtttggtggctcaaggagatattttttggtggatgtttcattataaagataattgtttaaaaagttgtgggtattttcttattttattttaattt

SEQ ID NO: 250469 - DNA, 371 bp, Gossypium hirsutum
cccacgcatccgtggacgcgtgggataaatctgtgaccaacacgtgaggttctgtactatcactgaaagtgtatgtaaaaccctcaaagcttgtctcttatcttatccattcaagcaaatatgatttaaaaaaaaaaccccttttttctggcagaagaacgccctggtctaccttgtcacaaatgggcccactttatgatacaggcctaaagggattgatatcaataaccgcttcttgtgatgtgattgcttcaagactacgggcttactcgaatatcttattgacgaactgctatttgaggactcgtcaccgttgaggagggatagcctcgccatttgctccaatggaagctgcctagctacaggtggtc

SEQ ID NO: 250470 - DNA, 393 bp, Gossypium hirsutum
  unsure (1)..(393): unsure at all n locations
aggagatcagagagataaatcaactgaagaggaagttattatcagggaagtgggggcggatcaaccgtccacgtgtcccgagaatgaactggatgaccgtgaactcgacggtagcgaatcgaagccgccattgaacacaagcgacatcttgaaagcagtggaggtagttgaaagagactctcgggctatcgccgatagcttctcttctctcttcgcttcgcttcgtttggctctctctgaggtcactagcggctcagttgatcatatgcngtgtttggagatacagcttggcgtcttaaagaatctggtaatgaataataaaacatggtcctcacttgggccgaatttgttggttaaatcaatatggggaatttttttttaatgtaacctttt

SEQ ID NO: 250471 - DNA, 361 bp, Gossypium hirsutum
cccacgcgtccgattgtttaccaaaaatcacaaccttgaaatcaaatttctaggggttgttttgctagcagtcgagccaccattgttttggtgatcaacaatatgcaaacagtacccatcctccccgttgaaggcgctcgatcatgcctagaaaaatttagaacggccgtacggaggagcgaccctggtgacgtggaggccgagtgtggggatttctcgtgagaagctgaccctttagtgccattcttgcttaatacagaagctttttgctgcttagaatttttttgggtgtattgggcctttggttttggtttattaaaattagattttagatttatttaattggggtcaatttttatta

SEQ ID NO: 250472 - DNA, 201 bp, Gossypium hirsutum
aaagttccatcttagcggcacttacacatttgttactcgatcctaatatacgggggtgtccctttttacagcgcgtccacctctagcttctaaaggtaatctttttaaaattcctgaacctctactcagcagttgactgcaactttagtgattccttaaactctctcttcctcctcattaagatgtatctttttcttttta

SEQ ID NO: 250473 - DNA, 299 bp, Gossypium hirsutum
tcccacccgttcaattattttttttatttgtaatctaaacaatctacattcccgtgaatttactaaacaagtgctactactaatatatccaaattctttatcttaactaaatctttattttacgtactttctttaaatcccccatcagtctgatctttttatcttttttaccatctgtatctattatcttatcttttcccactcctaattaatttatttaatattttcctttcaaacattataacattttacacaaacttcattatcaatattctttacaatatctcatcttacttttt

SEQ ID NO: 250474 - DNA, 375 bp, Gossypium hirsutum
caggcggccatggcagcttgttccctcattctatcgtcctccttgcctcaacctaagggctcattttttggatcgaaaccctctcatctatccctacacagcacttcgtttgcgctcaaatcccagtgtttcagggtttcctcaagttccgtttccatctctagtcgccccgccgatgatctagttgcatctcttctctccaaggtcttctttctttcacctccatttagttccatcaatttgttttttttttaatgcaactgaacaccaagtgagaattaggtgatacaaacggatggtggagtttcactcaccacaaaacagcactcaagaggtagcttaagtggctaatgagttgaacaaatattgcgttga

SEQ ID NO: 250475 - DNA, 407 bp, Gossypium hirsutum
gcgctttctctcttgtttgtccacaagacctgttacttcattcattctcgcataggtcaaccatgtcttcaacgtcgtcgtattggtgttacagctgctcccttctgtttcgcatctcggcttcagataacgcaaccaacgaagccattgtatgcccctactgtgacggaggtttcatcgaggagattgagtcatccgatgatcatagccctcggtttccacctacctacatcatccccagcaaccgtcgagattcggatcggaaccggaaccccgtttctcgtcgaaatcgttggattcctattggccacttaaacatcaatccaataatcgtcctacgtggtacaaccggcgacgagagcaccaccggcaccgatggaaacaacaacaacagcagcgaatttgac

SEQ ID NO: 250476 - DNA, 248 bp, Gossypium hirsutum
gcaggtccttgattcaattaaattaagttttattgtggacccccaacctgagccaagcgtggagcatgtttcctcacaatttcatggcacattgacattaggcactcgtgaacagagctgtgaatcccaggaactgattattctgaacatgaataaccatgtgctcgaggaccaagttctatcagcagaagaagcaagtactgctgcgagcccttctccttctgatttttctgagcactctggtaatt

SEQ ID NO: 250477 - DNA, 309 bp, Gossypium hirsutum
cgcactcgtggcttcaacttactacttattcttacatattctattcatgctggggggcaaacacatgaggctgatcagtttcccctcattggctctgactacttcatttctacagtacctaattaattatctacctaccgttcaatctacacaacttcattaatggctgactctcaacattcctattgtgtggaaactttatgtcaaccctcaagactatagttcattggacgaaacaagtgcttaattaaagcttctattctctgtacatgatgaaacacttattagtagcactgtttatctggttgg

SEQ ID NO: 250478 - DNA, 317 bp, Gossypium hirsutum
gtgttgccaaaaaagcgaaaccgagagagacggagagatgttgaagttttcttagtggggggcgacggaccttaatcaagccttggttcaatgtagattcgcggggtcatttggtccactctcttctcgccggcgtagcccacgcgccgtcgtctcctgctctcgctccaacctgacgcctattcaagctgttctgtcgtgtcagcaacaggtcgggtcagatccggtggaatctgagttggggagtttggctgaccggctccggttaggtgggttgactgcagaagggttgtcttataaagagacgtttattattt

SEQ ID NO: 250479 - DNA, 286 bp, Gossypium hirsutum
cggacgcctgggtgagtattgctgtctgacatctcaaagaatttgagggcaaaaagctggtgtcagctaccaaggaagggcttaaacttgatgagagtgaggatgagaagaagaagaaggaagctttgaaggaaaagtttgagggtctttgcaagcacatccttgatgaccttgcaaagaccctcaaggatgtgctgggtgacaaggttgaaaaggttgtggtttctgatcgcgtggttgactcaccttgctggttaatgactggcgagtttggttggacttgaaa

SEQ ID NO: 250480 - DNA, 158 bp, Gossypium hirsutum
ccctaattacccatggattttctctctttttttatatccatatcataaaattagcctgtcaatatttaaaagttgtgcgccatacccaaaatgtaaacaaattttcacaccctacacttttgcactgtttattatatcacactcataaaaattgcttt

SEQ ID NO: 250481 - DNA, 312 bp, Gossypium hirsutum
cccacgcgtccgcccacgcgtccggttgaagcaaggtccattagatttcagtaggttagcacatttgaaagtgttggatttgagtggaaacagattgtattcacacttaccaacaattccaaaaggtttgattatggtttccctcaatagaaactccttcaatggtgaaatcccaacacaatatacccttttaacacaccttcaacaccttgatatctcattcaatagcctcatccgtatacctccagcttcacttttctcattttcaaacatcagttccttgaatttgcattcaaatatgtgagtgggatc

SEQ ID NO: 250482 - DNA, 348 bp, Gossypium hirsutum
tccacgcgtccggcttggtgtgaatattgttagtgtacaatttctggagatggactcacccaaaattgttagtgaaaacaggcataatggttttctggagaatgatggtgagaggacttccaagtcaattcctctggagaaagatttgcaaaatggatataatggtctggagaactatggctctgattatgctagtgcaactgagtgtcttgcacaagttgcaaatagttgtgatggtccaggagtttcaattgcaatggctcattctccttttggcccctgattgtattaaaacagtattcggaactgattttgctgcaccttcctgcaaaaacaagggaaaatagc

SEQ ID NO: 250483 - DNA, 351 bp, Gossypium hirsutum
ggtaaatctcttcgcagaaagagaaccattgctcctttgtatcacatactcgggggcgttccccaggttccctattgactgagctcatcggagattcaaatcaagtcacctctttctccggactcagaaattccgatacaactacctctgtcccctcagccaattctcatttgatccctctgagtgactggttcgaccgctgtcgaggtttcttccacctagaaagtcgacgattcacatcttcttccccatgctgccatcgcatgtgccgcttcatttgctccccgagctttttaacgatcgttagtgaatctccttcaataatggccgtttcaaaccccaagtcttttg

SEQ ID NO: 250484 - DNA, 331 bp, Gossypium hirsutum
gtttccaactcctctctacagacatatatagaaagagagttcaaaattaacaacggctggtctctttctccaacatgaaatttattaactagtgggttggcctcacacttgcatggaatatggaggaaccctttcattttctctctgcttagcttcataattcgcttcctctcaatcttccaagtctcaaaagaaagaatcatggagagtaagggatacagaaaactaaacctcacccacaaatctcacttgcttttctgtttctcagtttgggtattgggtagcatcatcaccactgcaaccacatgccaacgaggtaatgctcttttcc

SEQ ID NO: 250485 - DNA, 372 bp, Gossypium hirsutum
  unsure (1)..(372): unsure at all n locations
cgctgatcccattgtcttcctcttcacgttccaacttctattagggtttttctggctaaatctcgatcgatccaagacgaaaagaaaaaaaaatagggtcttttttctcacacaattaggggggtttcggagagcataggaagagaatatgccttcgttaccctttgaatcgattttgctccctttgatcccttcttccactcattctcatgttggtttatgtttatgttcccatcgtttgaaacatcttcgaaagagcgatcgtcgtggtaatcttagttaacatnttcccatcaattttagtttttcccccccttttctttatttccatttcctctctattttctggcttcttctcgattcttctgtttt

SEQ ID NO: 250486 - DNA, 313 bp, Gossypium hirsutum
cccagatttatttttcattcgtgcacttggggaaattctccattttatattttcgcggcgtccaaacagaaaatcaatagcaaagtcagaaacccttggttgataaatggaagaaaatcccacggtaagtcctacaacaacaccaacaaacagcagcaacaaaacgacgcaggaacttgcatcagagggtctaaaacatctagaagaaaccattgaagctgcttttcaaatcctctctttcatgaacgacgagctttgcaaccctgccttatggtccaccaatcctactactaataacactactactaatact

SEQ ID NO: 250487 - DNA, 404 bp, Gossypium hirsutum
caacagtccctcctcatggctgctgctggaaatatgcaacaacctccatccgcgcagcactagtgtacccactcaagcttggcccaacattggttatcaaatacctggaatgatgatgccagttggtgcacaggctgatctgcagaaactcatgcagacaatgcaaataggacagactcaacaagcaggaaacaatgttgcatcatccagcttttatgcattggggcaagctaccccagcaagcagtgttgcaactaatggagcaagcaagcctcaatcggcttctccagtttcaataacgaattctttacaagcaggaaaggattatgatttttcatcaatgacacaagggatgttcacgaaacgcttagttgcaaccaggggatgattttggctttttgttt

SEQ ID NO: 250488 - DNA, 315 bp, Gossypium hirsutum
  unsure (1)..(315): unsure at all n locations
cccacgcgtncgaaagcacctcttttccgtccacgcggtttttgcctattttttccggggaaattatcaggaaaaaagattaaaaatttaatctttgtcttccgcccaggccgctccttagattgtcttactcttgggatctattttcgtctgcttcaatatagaagtaggaacgtccccccttatctatctctccctttttctctttctttgtttcttttacaggaaccctaactttcctgattctttttttttctaagaaaacttacggtcgagaaaaatggtggtcttaatgnccgatgatggattactttt

SEQ ID NO: 250489 - DNA, 179 bp, Gossypium hirsutum
gccaaaacccaagacctgtggagtacagctaatattcaggctacagatcaccgggtagagaacactaaacccaccgacagaagtcatacccatgagctaaaaccttgtcgaaacttatgtctacgactaaggcacacagggagctccactgatgcaacatgtagaagttacttagatct

SEQ ID NO: 250490 - DNA, 335 bp, Gossypium hirsutum
  unsure (1)..(335): unsure at all n locations
atttgaaggagagcttccggtattttgtttgggggtttcaaaagagaaatggaaggagagcggtgaggagtccataattatnagctacaagtttctttctcaactccacaacctatcaacgaaatggggtttgtacagtttgaagaaaaccaggttttgagtttattggctcttgcacactcttctcatcatcatcaaatatctcagcctcttaatactaccaccaccaccaccaattccactgccatgggcttcaccacgcataacaacaaccaggtagtaaatactgaagatccccaagctgcaaacgatgagaacaactgttctaagtaagc

SEQ ID NO: 250491 - DNA, 292 bp, Gossypium hirsutum
gggaaaatcaacttcaatcaatggtttcaatggtcagtggctcagcggagcctctctgtgcatcgggtcggagctcagagaagctgagcctcccatccctccaatccaaaatgaaaactgatccggaaggctatgaaacggagctccatctcatccgcaatcaattctattccgctcttgagctatttcaacagcaagcggctctgaatttctcctccatcagtggcgtcggtgctgacccaactgtggctaaggacctcagtgaccgtgccatgttcttggcccatgtcac

SEQ ID NO: 250492 - DNA, 215 bp, Gossypium hirsutum
agaaagctgcatgacactaaagctgttaaagtccctgagagcgctgctattaaggaggacttgataaaagctgcggtcaaatccatgcctgctcaaaaacaaaaaactgttgagtataaagagactgctactataactatcaagaacacgaacatggaaaatactaaagagactgtatttcaacgtttatatcctaacaccgacacgatcgttat

SEQ ID NO: 250493 - DNA, 408 bp, Gossypium hirsutum
ctttgaagttgaacatttatatcattacgccaagctagacacagcccacctctagtgccctctgaactaacatcaataccgttaaaaaacccataacttactctaattttttcaatctgtctgctgtttatttttgtctccataaagaagaccatttggggattatacgaacggtatgtaaccagttttccttgctctttgttcccaatatttacaaatatatttactttaaatacctttaatttgacataatttggtacatgtcattagtctaaatactttaatccaattaaaatggggatgtgaatttttaaaaattattaaccccaaaattttttatttaaatccaagtcttttttaatgtcaattttttggtacatgtataccaagtgattttttttttaattt

SEQ ID NO: 250494 - DNA, 235 bp, Gossypium hirsutum
tctacactttcataacacacccactttttttctaaattcccaacaccacagtgaggtttttttaaatccatatccccatctcaaatcaccatttctgcactttttctacccttttaattaaaacctatacatcctcaccttttaatctccccatctattaattacttctatccttattaaccccaatttctcttctatgctattatttttactttcctcaatatttttttcaaac

SEQ ID NO: 250495 - DNA, 204 bp, Gossypium hirsutum
  unsure (1)..(204): unsure at all n locations
cgctttttcaacctttctctttcttctcttttgttttaaaagaaggggcttcggagttttagcgcgagagagaaacatctcatggctaaaccttgtttgctaccctttcttcttgggcttctcaattgccanntctccatggttcaaaaccttttggnnntatggcatcactattggacattggttggttcaccattattgata

SEQ ID NO: 250496 - DNA, 393 bp, Gossypium hirsutum
ctaatactttgtgttatggcaacagattttggttgtttgaaccacgttgtggaatgcatgacattggtggttggtacatcgaaacttttggcagagataagaaaggcaggacagtcccgtcacaaagatattgggatgggtttgatacaaccaaacaatttgaggagagattgcatccagctatgtatttgctcgcccttgcatataggacactcgatattgaagatacaaagataaggaagcaaaccatctggaaatttgttgaaggaaagctatttagtatcctcagtttgtacaagaagtttgtttaggatgattacctctttgggctagtgaaggctagatgtgctttatctttcacgaaggtaccgatgttttcgttgttttttggct

SEQ ID NO: 250497 - DNA, 284 bp, Gossypium hirsutum
gacctcacgcggtgagagaatctaaactcggattcattcatacgggtgagagaatttaaactgcaacttggcgtattacggtggttatttaaatagctgtatattgctcctgctacaggagttccttttaaatgtacataatacacataagatcaagatatataggctctgagttgtatttctgaggccatatgacattttgcagctaaacctgtaattttatgaaagatgtaccctttatacagagagagagattcagttcaaaaaaaaaaaaagaatataaa

SEQ ID NO: 250498 - DNA, 397 bp, Gossypium hirsutum
aagaaaatcaaattgttcaatttcctgaaatgcttcaagaacaccaccaccaccaggaccgccaccaccatcaacaactcctttctatccaatttcgatcgatagggagaaacaaaaagaaatcttaatcttctaaaattattttcattccttttctttttaagattcgagatcgatcgattgaatcggagttctttttagtttttttgttttcagatttgaatttgtatataaatttaaaaggtaggaggggattggagaggggagaacaaaaattaaaaagaagggccgaaagagcaggcaatttggctgaaacatgtctgcaatagtttcagggaagagatctttctttgaggaattgagttcgacacctcctgcttctaagagaatccgttgc

SEQ ID NO: 250499 - DNA, 387 bp, Gossypium hirsutum
gccaaaacaagccgtttataattccgttagttgtcaagtggaagtccaacgatgggtgggggtgaggcatcctaacagaccggcagactttcataacggctgagtgttcgtgcgggaattctagaaacgattcaaagagaagtgaaaacactgagatggagaaagggttttatttggacgaagaagcgttgtttgggacacaaagattttgggcaaatatggctgccggtatgatgatgtcacctcctcgttccggtcatgacggaggatgggaagaacatgaagtagatgattatgtacctttttggagtttattctatctaaaagtaattttttcagacattttcaagcatttcattggaatttttagttcgtataaatcgccac

SEQ ID NO: 250500 - DNA, 389 bp, Gossypium hirsutum
cttttatgctttgaatgtctctaataattgcttcaatggttgatttgtcaatctcgaaacgttggcatttctttataatagtttttgagtcacctattacctttattttgtttaatcccgtgaagtttcctaatttcattacttgtagccctacttgagcctctgccatgaacggagtagctatatcagaatgagtgaccattttcgatgctaagatcttcccctcttcatttcgtacaagcaagcccgaagccgatctggaatgttgttggtcataaactgcgttaaaataaactgtaacccttgctctgcgaacatgctgtgaaagcttctattggactgattaaccagagtccacaatagaaaaaatctgatcttgtcactagtcc

SEQ ID NO: 250501 - DNA, 263 bp, Gossypium hirsutum
accagcaacaactgaatccaactatttttcagtgtcagcgttccacatgggcatctttgatttcggccaaaatgtgcagacttcggaatctgaacttacagaaataatctctgcaccagcttcagttactaattcacccattgtcgacctcgatatttcatcactcgagaagctggagttagatcaaagctctccatatgataatcctgagttcttcactaattttttacagcaagctctcagtctgcattagaaaatagatt

SEQ ID NO: 250502 - DNA, 277 bp, Gossypium hirsutum
  unsure (1)..(277): unsure at all n locations
atagctctctcatccaatggctcaatttcactttacatttgctttaactgtaatggttgctttaatatcaaattcagcatctcanatcccatcggcatcacccacaatgccaccgtcaagcggcggagcttcaccacccaccaccactatgacaccagctatgactccaacttcttcaccctccccaaccgtggttccaactcccccaaccccataattggccccaccccaataaataacctaataacttccttaacaattgcttcttcacccaccc

SEQ ID NO: 250503 - DNA, 382 bp, Gossypium hirsutum
gatgctccttctccattgctttctcttacggaacttgggatgtctccttccaaggggtgaccttcacccctttttaatgcttcattggctatgaaatgggcaaaatagtttcctgtctttggaataaaacgaaatcgaagatcttgaaaatggtttttcgtactctgaatatctcttatgattgcctcgatcatcgatcagtcttgttctgcactctgacattttataatcaccaatcttgaatctattactatttctagaacctgtaaacccaagtcgatccttaactttgttgtaatcacggagacgccacatcgtaatgaagcaccgacttgtatgccaaaatgttgcccaccacatctcgtactactagccttgatgc

SEQ ID NO: 250504 - DNA, 378 bp, Gossypium hirsutum
  unsure (1)..(378): unsure at all n locations
gcccacccttccaatttaagcaaaggcttgttcccgagcaactgaagacgaattcaccaggatatttggctgctgtgatactagaaacttgattgtgttgcagcttgacttgtgtggatcatgtataccggattatgttctacaagataccttagctcattcatcgaaaagtcttnctgttttagttaccttgtcttgaatggtgcatatcgcttgacggacccaaggctaaatgcactcgcattgtctgcacctgctctgcagtcattaaatctgagccagtgctcccttctcacatcatctggcatcaaatgattagctaactgctttgaatccaccttaagagagctttatttagatgaatgtcataatatagaa

SEQ ID NO: 250505 - DNA, 197 bp, Gossypium hirsutum
tagccatcaatttctgggctttggagtaaaactgctttgaagaaaagctgggacaggcaggtcacacttgttcaggcttccatggctgaactaggcaatctggtagacagggtgagataatcagactaatgggtgggtttaacaggagatggtgcgatgagccaagcaagctgtgctggacgcaggaagatgaacac

SEQ ID NO: 250506 - DNA, 278 bp, Gossypium hirsutum
cagccttccgaaataccatgtggattgcagatgttcatcctttcgcgaaggctaacctaaacttcgcctgtcaaatttcattaatgtggggcctgccttgtgtttaaagatcgtctttatcttattgggggccagtatgtctattctatggctaaacctgtatctcctattatcaaatgctactgaatgaacgaacctgtcttaccggttggccacatgtttgatgactgagcgtatatttattacatatcctcctattctcaagccagtttcacatc

SEQ ID NO: 250507 - DNA, 388 bp, Gossypium hirsutum
aaacccaacacgcatttacatgtcaattacgccagactcgctcatcaatggcaatgatgacatgaacatcattctcgggtccttccaagctaataactactctgtctgtattaatccttactgtattttcactgctttttcatttctcttaccctaaacactaccataccctattgcgtaacttcctaacttttcccccgaaaacacttattacctaataatattattttcgctaaaccatgtaccttcacgatctcatcttctactggtcaagctatcactggtggcaaagcggtgattgacgcttacttcttccggtttcatatccatcaagaaactcatgacctttgtgaggaaacatcttgccctattactgttggcaactttg

SEQ ID NO: 250508 - DNA, 346 bp, Gossypium hirsutum
aagaaaatctaaggcaaatcagtattgtcagttttattttgctcgcctcttctatgagcatgaagttcaaagtttgaatccaatatcggttttgttattgctttctctgagctctatttttggataataatggcgagcgaagtggagaagaaggcggttttcgatatacattccgcgaaggaagcggttcaggagttgagagctagcttcgtagcgggaaagacgaaagactactaatggagaagaactcagttgaaagccatgttgaaaatgatggacgagaacgagccgcaaattgtcgccgctcttcgcgacgatcttttcaagcccggactcgaatccttca

SEQ ID NO: 250509 - DNA, 388 bp, Gossypium hirsutum
caaagcttgcttcacatgcctccgccacaacaatggcattctctcccggcggacgccacccccacccccacctcctcttcttcactctcctctctctcttcctcatctcccatgcaaggctaactctccaccattcagacttgaaagctctttccaccattgttaaaaaccttggcatcaacgctcaaccattcccttccactaatccttgtaccgcggccggagttttctgtgagcgaaggctcacccacaacgaaacttacgttcttaaaatcaccaggcttgtgttcaaatccaaagggttggatgggtttctgtcgcctgaaatcgggaagcttactgagctcaaagagctaactgtttctcacaacaatattgtttatcaaat

SEQ ID NO: 250510 - DNA, 387 bp, Gossypium hirsutum
ggtcaatcccatgttctttcagcggctttagagattgctgaacaggaaactgtagagattgattcaagattccgagctttagttgccattggatcactgatgcttgagggtctggtgaaaaaactagcaatggactttgatgttgggaacattgccaaagcagcaaaggcttctaaggaagccaagattgcagaaattggagctgacattgaactgttaacaaaacagagttgaaagctggtgattcctagatgagagagaatggtcgagagtttggacagatcttctgtgtagggattaaattggagattgcggagaaagttgggtcggaaaaatccattttaaccaatcatatattccggggaacttggggcatcatctcataaa

SEQ ID NO: 250511 - DNA, 242 bp, Gossypium hirsutum
tcgaaatctctgccgtcaagtattttcattttctggatggagaatatggaggagaggggtgaggagtacaaccaaaataactgttatccaaactatgtgtttgaaaacgaataatatttgtaggtcggtaatgttgttgtccagctgaatttggttctggtctattaatccttacttagcaattatttatatgtcgaatttaaatgaacctacttgtcattggatgaattgtctgataatga

SEQ ID NO: 250512 - DNA, 173 bp, Gossypium hirsutum
  unsure (1)..(173): unsure at all n locations
ctgagacgaacggccagacgaacatcaactgttggaaagacagggacacatgtgggcggggtgatactatcaatccctctnactgatataattatgcatatagagattaagaacactggaacatcattgatggagcagcaagaaagaatatctgatacgctggatgctaactc

SEQ ID NO: 250513 - DNA, 393 bp, Gossypium hirsutum
atctccataagaaggccaagatgagcattttggtattgttggtttcttatattatgagctgaaaatggagaattgttacccttttagcttgcttgaacctccaaaatgtgatggttgcaatgctgctgctataagcaatgagcctcctttcatagttccatggccaatggaacctcttttctcagcttctagctctgttcgttgccacgggtttacttcgccagagatacctgataaagctacggtggcttccaagagccatagtgaagccgagaagcgtcggagggatcggattaactcgcagcttacagctttgaggaaattgattcccaagtctaacaagatggacaaggcagccttattaggaagtgcaatagagcaagtcaaggatct

SEQ ID NO: 250514 - DNA, 206 bp, Gossypium hirsutum
ccggaacgccagtgtcgaccaacccttccgtgaccccttgggctttgacaaaaaaaacaggcttccggcattataatgtcactgcgtaggtgctagtcatacacgtaccaacctctcacggacagccccattggatgcactgcacaataatttacattcagcttaatcacttccacagctttcttaaagacatttttttctcgttc

SEQ ID NO: 250515 - DNA, 104 bp, Gossypium hirsutum
tgcacacaaaggagtttacgtgtccctttaggaaggtacacccaacttgtgaggggtgctccgatctgttggcaaatacctcccatccaatatttcctttgacc

SEQ ID NO: 250516 - DNA, 319 bp, Gossypium hirsutum
ctgaaaactttctctcttccaaactccatctctcgatgcttccctaatgtggttcgctcagctaatcatgccgggcttgggtctctgcataatcaggaccgcccatttccaggtaaaattcctttccttttttaagcatttttgttgcagggttatgtccagggttgttggcaaacctgggggtgtgaagaaatctgatattttaaacttctagaatttccgtgggtataacataaatatatgcccctaccatggatctgacaagaccctttttgtcgcatttctagattatggcgaggaaatctctttaaaaaatgag

SEQ ID NO: 250517 - DNA, 300 bp, Gossypium hirsutum
gctgccagatggttcttatcaaaataaaatagttacttatttttttaaaagatggtagttaggttttgagatagtattgccaatggaatactatttatttatgtgtgtgttttttgtaggcaaagaaaactcaggaacagatgaagaggaaagtcttggccaatacttatgggacagcaatgccactcaaaatggatctcgataggcaaattttgttagctatggcagtgaggttttaaaagctccagagggatttttcagcaagtacacacctgcatatatagcttgtgtcattgccat

SEQ ID NO: 250518 - DNA, 367 bp, Gossypium hirsutum
cccacgcttccgaagttctatccattttcattcgcattactcgatgatgaggatgatttagtcgatgcaccgaatcgaatacaaaagaatgtatgttgaatggacttgagcgtggataggtaagaagttatgttgattttttcatttaaacatgactaaaattgggaatatatatgtaccctatatagtttgagttgaggaggcttttattaaagtcgtctaaggacacactgcttctttacccctccaatttataaatagtttgttattggaagcaataaatggcctagtgctggggctggtattatatgaggtattatactttgttgaaatgatctttgttaaattcattttttatttaaaattt

SEQ ID NO: 250519 - DNA, 371 bp, Gossypium hirsutum
cccacgcgtccgcccacgcgtccgcggaggcagcggaagttttccgacctgttgattcctgcggagatagctcaaagacagctgaaaacacggcggtggagggaactaaagagtcggaagaagtgttttttttggacgaagaagcagtgtttgggagagaaaagtttttggcaaacatggcggcggggatgatgatgttttcgcctcacagtggatatgtaaaagatgaacaagaacttgagtttgtctattattgcgagcagttgtggtgctattctatttataggttaaatgtgttggactcaatagaaatttattaatccttttttttgtcgttattgtggagatctgtactaagatatctatttttt

SEQ ID NO: 250520 - DNA, 230 bp, Gossypium hirsutum
ccgggtcgacccacctcgggctgaagcagtggatgctattgttcatatctaccaattgatcgtttcaagtgcatttcgtcatttcttctaattgaaccttcattgatttgtgattgtatgacaaacactgtttagatttgacttgtgtattttattttccctttaacttgatgagaggggtacatagacgaagcttcttgctgtccaaatggcagccggcgttgattatt

SEQ ID NO: 250521 - DNA, 208 bp, Gossypium hirsutum
gagggacttcagataacatctatgtataacataatccatccagactcaaggtgcagtgggggctccttgtctatgattctttccagacactccctcctactgtgttccctatacaaacttgctcggctagtcccttacaaataaaacgctttatacaatgctatcatattggcagttctgccttgccataactaaattcaatggatga

SEQ ID NO: 250522 - DNA, 393 bp, Gossypium hirsutum
ggtagctgcattttatgttgaggtatcaacaatggtggattttgtgggaaaacgggttattggggaagaaaagaagggctttgtttattctcgtagggagcttattggtgttaaaaaaacagctcagcatgatcttatcatccctccaccggcgacctttccgacaccgaatatcatcaccgtgcctgctacgaatcctgttgaaacaccggcggcgatcccggctacgacgccggtcacggtgccctctacgaatcctaacaacgcgacaactgtaccggtcacgaatccagtcacgacgcctgcgcctatcacggtgccgggtgcaggggcacagcagccggtgacgaatccggtaacgacttatccggccccgacgggtggtgtcccggt

SEQ ID NO: 250523 - DNA, 253 bp, Gossypium hirsutum
  unsure (1)..(253): unsure at all n locations
ctccattttttnctcaacctagtactgtggcaccgatccacttccagnccnncaccgatccaccttnggncctccacagctccacccatttcccccatttcctgtttcccttcttccacaaatccctaaccccttacccgactgccctcctcccttttttctcaacctccacctncgatcctccacagctccactcatttccagaattagagatacaagctattgactattgaggcaaaaaaaacagcaagcc

SEQ ID NO: 250524 - DNA, 339 bp, Gossypium hirsutum
  unsure (1)..(339): unsure at all n locations
gctgcttcatacataaacatacttagagacagtttttacaactagggcctgtaccactcaatgtttccatcgccttatggcttcccccaagtctacgacaatgtcatttgatatctcttgtagtcactcaaaagggtttttgagaattttcatggaaatgaaatcgntgcattttgatcttccattacatggagatggagtgttaggatcaattaaaggagcttctttccttcaaaggaatgcagattttggaagcaacttgatgactngcattatcgntggggctacatcttttcaaaaaagcaatacgttttcatcatcggctatttgctctctacg

SEQ ID NO: 250525 - DNA, 246 bp, Gossypium hirsutum
  unsure (1)..(246): unsure at all n locations
ttcttttgattgnattttcctctgctggttgtcttttttttcctgatgttttcctttnctgnaagtcttttgattggntattcgagcagaggaggagccttttctgtttgtacttctgntacatgtgcggcaactttatctattgagttcgctgntttttgactttttcccttttctgctcggctcttttattcctttctctgtttccccttacccttattttctgctctctctttcctcttattt

SEQ ID NO: 250526 - DNA, 290 bp, Gossypium hirsutum
  unsure (1)..(290): unsure at all n locations
cccacgcagtccgctcaagctatgccgaccaaacaagnncaggncctctcagcgcaagcaaaggggcgccagacaccagccacgaccaccacaaccgnaggaggnccgaggaacaaccagagncaaggagggggaaggnccaaaggacacgaggctaaccttagccaaccaaccagcaacatcaacactgccgaggaatacttaaaggaagctgntaaaccacctgctcccaggtaagaaggatatcctaacaccattgacagcaaggaagctgaaagaaaatatggcga

SEQ ID NO: 250527 - DNA, 328 bp, Gossypium hirsutum
  unsure (1)..(328): unsure at all n locations
cggtcgcgtggggttgtttttgttttccttttttggtggtttggggcaaatgttgttgtttgggttagagtagnaggagnnaagnacgncagnagtagatctttttgtggggtttgggtatgtgttgccgctcttctgaggcctcctagtttgtgctccatacactctttttctttgcctgcctgtattcgtgttttgatgnntttgtttatgtgcgtagccggcttcttcccccatctcctctccctcctactcatttgctgnttctataggctncttttttctctttgctttcatccggggcaactttgttgctgctgtgtttttg

SEQ ID NO: 250528 - DNA, 254 bp, Gossypium hirsutum
cccacgcgtccgctgagacacacttgtttataaactaagaaacgtaaactatggctccttgtttacgattggtttggaacttgctgggatatcaagccccaataaaatatatatattttttttagagttggttgaaggaggaaggagatgaagtgtagagagctctgtaagttagcggcgacaacgtcttgagaatcggaccaagccagttagagctgggattgagacgctgtagtccacggggcttacttcct

SEQ ID NO: 250529 - DNA, 185 bp, Gossypium hirsutum
  unsure (1)..(185): unsure at all n locations
cgtccgaggtcgcgaggccccgcggttttttccctttggcacctggaaggttggctgcaggttagcttggttcggncttggcgtggaccangaaagggnccggcgtaacgcacgtgttcttgcacgacgaggatcggagggaggttttggtcttcgccgaggagtttttatgtagaaaatacttg

SEQ ID NO: 250530 - DNA, 250 bp, Gossypium hirsutum
  unsure (1)..(250): unsure at all n locations
ccaaatttagctagaagggaaaaaaggaactgagctgagataactnagaggggctgaatgttgcttggaccggcaaagatgctgggttcgntgagtcttctcgcagcaacgccttttgcttttcgttctttctcaccttcacctaacaacaatcgctttttgagttcagcaattaatcatcaaatagctaaacaactagccactgaatccggacgaggatcccaaaaattgcttcggcgacatgtatttc

SEQ ID NO: 250531 - DNA, 273 bp, Gossypium hirsutum
tgcgtcctgttctctctatcctcgaacgtcttcctccataagcaagataggacacggtttttcccgtttttcttcttcttcttcttattgttcttgttcatataatttaatattaaagattaaaaggtaaagacttcgaaacttggattctgttggatatctgatctccatatactgatagtctgatacgaaaaatggtttttaataggcggctaagtcggtatctatctttgaatttgccgagaaattgcttcttgaactttggaatctgcc

SEQ ID NO: 250532 - DNA, 111 bp, Gossypium hirsutum
  unsure (1)..(111): unsure at all n locations
gcagaatttataggattttttnntttgtttccaggctactaggcatgctcgttgggtctttgtaggagggctttctcctacagccaaagaactgnctgttgcgatattctt

SEQ ID NO: 250533 - DNA, 319 bp, Gossypium hirsutum
  unsure (1)..(319): unsure at all n locations
cccacgcgtccgcccacgcgtcctgttggtagtgtcggnctgagagaataggagaggatattttaaaggtagagataggatgtaaggatctgcctttttcctcgtgataagggggctgagtgtcactgggttggagactcccagggagctcagctgatcagaagtcggttatgctgcagtaaattatataaattatcaccagtatttttactttgttcattcaattttaaaatatttttcatttatattatcagaaatttaatattttagtcattcattataatattaaattttggcttcattatcaaataaataataa

SEQ ID NO: 250534 - DNA, 283 bp, Gossypium hirsutum
  unsure (1)..(283): unsure at all n locations
cccacgcgtccgaacaaatcaaaaggaaaaggcgtagcagaggatgatgctaacctacgaggtcgcagcagaggctgccctggctcttctcttgaccttcccctctcccaagttattgaagaaccgtttcgtctctctcatctccctcattcttcagcccaccctctttattatcccctttgccggattcctgctcttagatatctactggatgaacgaacatcgattgaagagcacctctgagatctgcactgctgccgagagagatcgntatgagaaatcc

SEQ ID NO: 250535 - DNA, 244 bp, Gossypium hirsutum
  unsure (1)..(244): unsure at all n locations
ccctcgcgtccgggcttcccggactatcccgcgtggttaaagtncaagaaaatgtgtcctggattcgtcccctgattagggtttccaaaagctcccctcccccagttctatttctacatcatcggctactactctaatatcaaggagggttcatttcttttttggcttttgatgccaaaaccttcgacccgtctaccttagacaggtctttggtgctccattagtctgcaaaagtcgcttggga

SEQ ID NO: 250536 - DNA, 188 bp, Gossypium hirsutum
  unsure (1)..(188): unsure at all n locations
gcgattcactttgcacatccagtcgtcggttattcttccgcttcgcgaagattagctccctttcgcaagcccctagcttcagccacaaacgcatcagcatcttcagaaaagtgttaagtttctgccccttatatctcaccctgagaatttctggctatatctgctggaacagcatgcatctnctcctt

SEQ ID NO: 250537 - DNA, 321 bp, Gossypium hirsutum
  unsure (1)..(321): unsure at all n locations
tccatccttttttcctcccgcagcaccttctcccaagttgtttggtcctgtaactccagggccggcgcactccccctttcaccatggncctgttgcaatgccaccctctggttcatctccggttcctgctctggctcctgagcctttagcaatgcctccctctggatcatctccggntcctgctctggctcctaggccttttgcatagtctccttcagcattaactccaggtccagcacagnctccttatcaccatggccccatatctaatccccccactgcatcatcacctgcaccttattcaagcccagagctctctcc

SEQ ID NO: 250538 - DNA, 235 bp, Gossypium hirsutum
  unsure (1)..(235): unsure at all n locations
cttctttagtccaccttcttctatctgtgattgttttgaaccctgaagaagctatctcatctttacctactagagcttcatcttcaatcacaaatatggatatcaacaacacaagttgtagaagactttcattggttagaggatctatttctgccgattctttttctcaaaaccgagctccactggctggcatttccgaggaggaagatctatataaatagccagncccctcttt

SEQ ID NO: 250539 - DNA, 362 bp, Gossypium hirsutum
taataacccataatgacaatgtcagtaaaaataaaccgacttgctaaatggacatgtcatcttctaatccccaattctatgcaatcttcccatttaatctgtgtcccccgcaatctttccaactccaaaaagtcttacatctaacctgttccttgatcatattaatatctgtcgccgtgaagtccactatatctctcaatctagataaagttaggcactctaggctagtggaagaattactgcaagtagagccttcttgatgaacctattgagttcagcaatagatattaatgggaagatatttctttagtaggacaaaaagggaacaattctaaaaagatctccttaatatgatcttctca

SEQ ID NO: 250540 - DNA, 364 bp, Gossypium hirsutum
aagaaagcttatagctttgcaaccatttcaccaccttcatttacattcagtcacgagcatttgctaaatcttccattgaatctagacacctttacgtccgcttcttcatctgcaaaaaaagaagaagaaaaagggtttttcaatctgagccatctttttttttgctatatcagctaaggagcttcaatggattcatgttgtgtagcttttaaacccaattctcctttattgaatacaagaaatggctatggctatggctatggcaatggagatattaaaaatacatttttaggggaaagaacaagagggagtgtttggttcaatcagctctcaaacacattgagaggtgatgataagaaggaaa

SEQ ID NO: 250541 - DNA, 186 bp, Gossypium hirsutum
gaccggcaattcccgtcgacccactcgtgatccctaatgctttttcatttgatgagcaagatgggggataacatactacgttgttcctaaatcctaactctgttacatttgctgtgcttgtttgtgaccctgtataaacctgcctgatcacttaaaggcataaacttattggggcctggaactgtt

SEQ ID NO: 250542 - DNA, 352 bp, Gossypium hirsutum
gtcagttagatgaatattaatgttatgttcctttatttcgtgatcttgaaggtggggtttttttttatttgcctatcaagttatattctttgtgagatttgtccttagtgatagaaatctgtttgtttagtttgatgagctgggtatttcgggattttgtcactggtttgtttggtagctggaaatgttttgcaagtgaaaaacaaataaatgtttctttttttatggcggcgaggggttgagcgtttgcatcccatataggaacaagtaacagtagggttaaaagtaaataagttgattgaatgacatataattgacagcttaatacaagtaatggacggcaatttatcac

SEQ ID NO: 250543 - DNA, 358 bp, Gossypium hirsutum
gcgagttcgagttcggtcattctgttattcgtgtacttaaccgaccttctgcaggaagcgtatcaaaaagcaagcaagtaagttaagtggagagtaaaatgccaacgttagacttgaaatagtacttacagcggatctgtggtcacttattggctcagctcagtcaagtacgtaccggctcgtatttgataagtaggtttttgattgattcgtggggggtcgtggaagaattgggttcgaatcccatagcccgcgaaaaatactttttcaacgaaggcacagatttcattgaaaaggtacggtgacgtatcaagagcagtgcagaaggaccaacgacgatgaaggttacgaaggagaa

SEQ ID NO: 250544 - DNA, 357 bp, Gossypium hirsutum
aaaaattattcttattcttgataattatatgctatataaagtcgaatctgatggggtttggcttaagatattcgggttattgctaggcctctttgatcgttcatgttttgctttggttgccaaatggttttttggctgcctgattagtgtttcttcgattttacgtgaatgaattcttattcttgatgataatatgttacataaagtcaaattcgatgtcgcttttgcttaacatgtttgggctgttttcaggcctctttgataaacaaagtttcatgtctgatctcgacgtccaggttcctactgcctttgatccctttgctgatgcaaatgctgaggactcgggtgctggtgcaa

SEQ ID NO: 250545 - DNA, 361 bp, Gossypium hirsutum
cccacgcgtccgcggacgcgtgggtttgtattcttcaatccggatctctgctggaccgtccttccggaagatcgtctctccctcgcaccagggaatcccccataactgtcacagaggggaactccatttcactccctagtttaactgcctgtaaatccgtaagggcttcagcagcaaatggagactgaacattccggtgtaaaaccgttttcattgccatgagtcgtccgcccctgccccagaccaccaggctggatgccgacttaaaattcctactatcaaatgctgcgtcgaactgaatcgtcacgctggttcttccctcttgatacctgtgactactactcggttttaaggtatttcc

SEQ ID NO: 250546 - DNA, 358 bp, Gossypium hirsutum
cccacgcgtccggtggatatttcattgggaatgctagttagccctccaggctggataaactcaccaccttctgatgattcaccagataattcagatgtagatacactatggacttacacttaaaatagaaaaattcactgtaaaagtgatgaatgagagagagtataaagtacaatgaaatgtagaagaagaagcatggtttgaaaactagggtctagatgctactgatgattcagtaatatgaaatgcagaaggtactgtcatttgtccttttttttccctctgtcccttctggtttttatctcttttaggggttgttccattgctggaaaaacatatgaacaaatcagaagccaat

SEQ ID NO: 250547 - DNA, 397 bp, Gossypium hirsutum
  unsure (1)..(397): unsure at all n locations
ccgggtccgacccacgccgtctcggaccggggtnattgtaaggtggcagaagttgctctttgctgcnncacgatccactgagattgagcggcctttgtcgctttcgattcgtccaganaaaggcttatgagagaggttatccaaacctgatcggaccgtactggttcatcgtcatcattccggtgccagctccaaaatgcatgagttgaattcactatcttgagctcgccagaccatggatggtaacacaaggcaaccatgaaaaggagaagataccattttttacagatgcatttgagtcctataatgcaagatggaaaatgccgtttgaggaaagtgaatcgacctcaaatctttattattctttcgaagttgcaggggtccatgttatcatgct

SEQ ID NO: 250548 - DNA, 360 bp, Gossypium hirsutum
cccacgcgtccgcccacgcgtccgtatggtatggtggattttgcagtgaatctggttctgaagtgacccaagtgctgcttgggacagacactgtcaacggggttcctcctctagggaccgcacaagattgtggaattccaatttgcatgcaggacgtttacttttctggcacagtgccattctataatgttccaaatagtgatggagaattatttagcaatcatatgaatacatcttgtgatgttgatggtgctatcactggaatcaggaccaggtctcgcccttctcgaagtcaactggactctgagaaccccttggcacagggtaatgcatcaagaagactacggctgcagtgtaaac

SEQ ID NO: 250549 - DNA, 358 bp, Gossypium hirsutum
cgaaaaagggtctcttttcttttctgcttaaaaagttcagatcacgtcaccgggttggaaacaatcttggacggcggtgtcggattttgggttttgggtgtttttttgacgagagatgtctgatgctctggggattgatgaatctgttctcgctctgctggaagccattcgggcctgacggggaaaatcacgagacaaacggcgttcttggcggcggcggcggtactactggtggttcaagagaaggtaaagacggcttgctttggtttcgggatataggaaaatatggttccggggaattttccatggcagtggtccaagcaaatcaggtgcttgaggatcaaagccagatcgagtc

SEQ ID NO: 250550 - DNA, 354 bp, Gossypium hirsutum
ggcatctactgacccaaacctttttgtgtggcccataatggaatatggtggtcctatgcagagtcctggtggaagtgtgttgtggaatgggataagtacaggggctagagtaaaaaatacaagttcagattggtggtatgaggatgcatcaactttaagttttcctcgctataagagattgattgcagtcatggaatctcgtggtatcagacaggagatcattgctgggtctcttactttttatgcaaaaaagtatctacctggtttgaacaggtgcctgggtgctactgatactaattctagtacctgtgtggcacccgtggccttagaggctcctccgtcagaagaagatca

SEQ ID NO: 250551 - DNA, 361 bp, Gossypium hirsutum
ttctttccttccttttcttttttttacacacactttcctcccccacaactgggggaattaaaagggaaaagggtaaataatgccgggctttggtggtgtaggacttcaactagaaactcccaatagggacggtccaactcgagatttgcgtgaccacctcccttctttaatgtcttcttcttatcctatcactctcaagttcatcgacgtgtgttacaaggtgaagatacagcaaaccaacactcgaggtcggagcattaaacgcatgctcacccatggatccacaccttctgatcagatatcaaccatccaagagaaaactatcttgaaaaatatcacgggcgtggtttcaccaggggaa

SEQ ID NO: 250552 - DNA, 360 bp, Gossypium hirsutum
gaccagaaacacaaccaacatgcatacatttatggagtcattagcagctcaagtggcggcgaggaaagcattgtgcctatatcctaaagtctgtgctacaaacgcttctgagagacggactcactctgatggctcttgtaacggcgacatttatgtctttggatgacgtcgcggaggctctcattctctctatagcctcgatgcttgtcgaaacagaaacagattggcagactctagaacacacaagatcacctccggagtctacttgcatgatctttattgattttagtttgcttgtggtactaaaaaacgtaactcgcttttcttgaaaagaaagtgaacaacctccctttagtacaa

SEQ ID NO: 250553 - DNA, 440 bp, Gossypium hirsutum
  unsure (1)..(440): unsure at all n locations
tctgtctcannatctcgacccaatttctttctttatttttatatagctgttganngtttctttttcttgttttggttttctttttttgggaagatcgagtctctaccaatnngttcaagggttttacactgatctctgggtcttttttgcgccanncctcttgcantggctttcaagctctcannacttctcctcccaacccagcttnncaccttcagactcactccnnaacctcctcacacacacgcgcggctgggcgactttccaacacncnnttccccagacactcgtctacaagaccgtccatccccatgcttccttcannactgttcctacccccatcancccaccactttgcccatncgcgtttcaccaacaacttcttcaccttctccttcaatctgctgctctcctgctctcaccccagaaggcgcatctac

SEQ ID NO: 250554 - DNA, 249 bp, Gossypium hirsutum
tgacaatcttactgtgaaggctaatgctcatctcacaaatgagcctcatatgtcgcatggcatgttcaactttgattacaagggtaaagactacaggtctcagtttcagattggaaatggcgcattatttggagctagttatttccagagtgtcacaccacatttatccatgggtggtgaagtattttgggctggtcagcaccgaaagtcaggcataggttatgctggccgttatgaaacatataaaat

SEQ ID NO: 250555 - DNA, 505 bp, Gossypium hirsutum
  unsure (1)..(505): unsure at all n locations
ttcccggggtcgaccccacgcccgtccgctccaccgccgtnnccgcccaccgccgtcccgttggtacgtctgtgggaannaaatgcnntttgagtgtacgcgtctggggagaatcaatcacncnntttcccanntcgctgcccatntnnctcttnnttcttacananntttaatangnntgatcantnnctccctnnntgcaaannatatgctnnnttgaaaccccanannaatagagnnngattgtntnnttattggttnnngttcganntttggcaaggttnnnttctctttcacannnttgaatnggtgtgtcnnaccaccacnnctattgttnnngaggagccccaagtagtcaccgaaccaccnnncattcacaagnngtggttaagagccatctnnncattcaattgtgatgcccatgtggcactttagggaaactatgntttcttatatttttgcttttcacatgtaannnctaatggtcccataagggannatgtat

SEQ ID NO: 250556 - DNA, 274 bp, Gossypium hirsutum
aataaacatgcaaatcttgatgcatatcttttccgagacgaccatcaccctgacggtggcgagttaagacacgagctacaacactaacgacaacattcaggacaaggtacggatcccggcaggcctacaaccagtcatacaacgcgtaatacagctcggaaatcacctgacatatggccattccatcatcgataacgagatcaacatggatttcaccctccatctacttcttggcatacatatcttcatgcaaatcttgaccgaaacgatcatc

SEQ ID NO: 250557 - DNA, 362 bp, Gossypium hirsutum
tgaaagtttatctgcattgaacttcaacgcttttccgaactcaatgacagtggcgttctggaaaaaatgctgaagtttgtgaaaccaaagaatcttcttcggaacagaagatgaatgccccggatgtacaaataagtagtcagcaagtgggcataatcgactcatctcagagagaagaaagagagtcaagaaaaagacctgaatttgatctcaactgttctcttcaagaaaaacaagaatattttgcagatcatgtggaggctgatgatgctaatgacggcaagagattaaagagttgttttggtggaatggctgtagataggaataggataaaagatataataaatgatagatgttcccta

SEQ ID NO: 250558 - DNA, 412 bp, Gossypium hirsutum
  unsure (1)..(412): unsure at all n locations
cttcaatacccaatgtgtttcttactccaatgacccccgaaatcatacgtgctgtgtttcatctctactcgctgacttnnagtcaaaaaccggtnnacctctctccattataaaccccgttcttcaaaggttaccagcnnaaacaagaannataaaccaaatganngggagaaaggtnngattcaatacannttcccaaatnntagtttatgnncaaaacccgaaaaggggtttaaaacaatacaaagggatgcanttcgatatcgcncattgatggagtntttgaagagggaattaaagaaccaggagcanngcctggattcaaatggaaatgattataaacatacgtacgtagattctttctttttcatttttatttttttaagaacagagcaggggaagacatgattgt

SEQ ID NO: 250559 - DNA, 256 bp, Gossypium hirsutum
tccttgcaaactttgcttaacaactttaaaaaccacaaaccaaatactaacacctttaaatctattgcaaaaactagcattaattttatacacagttcaaaactaatgaaaacaaagttgagggcttaattactaaaaacaaacctctctctattttaacagatagtccggaaggcctatccaagaagatttgagggtatctacttattttgcatacctttttgggcttcaacacagcttgacaccttcaaggaat

SEQ ID NO: 250560 - DNA, 379 bp, Gossypium hirsutum
aacggaacggccgggccacgcgtccgcgaaaaacacgatcgaattagtgcttttatttagtttatgcttttggttttaggcgctggtcagaaaagtgaaatcataggacgtgtgttagaatggctggagggtcggcttttgatgctcttgctgatgatgatgatcggatggaagtgaatgatgaggatgtggtcgctaaagctttgaaaggcaaaaagaagaagtctaaagggggaaagaagggtggaaataggtttgcagcggctgcacttgatgaatttgatgaggatttcagtgagaaagtcgatgagatgaaagccaaggaagaagatgttccttcaatttctttctcggataagaaaaagaaatccaaatcgac

SEQ ID NO: 250561 - DNA, 228 bp, Gossypium hirsutum
aaccaaaaccacccgggcggggttaatttatatcttacctaccacccacaaagggtcttcaacccttaatacatcacgacggtggtcattgaagtctaaatcctctaaggagtgtgcaacaacttacctgccaaatcaactagtcccatacattgatggcgcttaaacgcgcgacctatgccaagccgtcggggcaagggccaggcacccctcagtaggagggctcgg

SEQ ID NO: 250562 - DNA, 358 bp, Gossypium hirsutum
acgcgtccgcggacgcgtgggctctctctttccttttcattccctgtcactcgactcaggggggtaaaaatcaaagaccacccttctcttttcttccttcgttattctcctcttcttttctctttctgctgctgtttcctcccctttccagctccattccctacttctccgccctctcccgtcggcgccagttctatcatggcaagattccggccttcctttcaactctctcgttgaaacttccgatttgcacacagttaattccaacacttcgctggggttgcagttggagttgcaccatttagacgctttgtcatcggaagaaacaccggagagactcttcgacctccgcctccaa

SEQ ID NO: 250563 - DNA, 355 bp, Gossypium hirsutum
  unsure (1)..(355): unsure at all n locations
gtgcccccccctccgagccgaggttttgttcgtctagcccccccatgggggtcgggtggttccgtaacgactcaccacgggggtgagtcngtcgccggcggtggtggtcggggtgacaattttccggccggtcaagcccgcccatagaaatgtagccaacgactccaggaccaagttccctattcgggcaaagatctcttggggtggcttatgcattgctatgggctcgagcttggcttgccgttttgcccccgtcacgtttagggatgccttgtgcatcccaagtcggcgaccacacggtgccttggccttgccaagcccttgcccgcattcgaaactgcccgcgaccccagta

SEQ ID NO: 250564 - DNA, 310 bp, Gossypium hirsutum
  unsure (1)..(310): unsure at all n locations
aatggnaccacctttgtttcccaatggtcccnnccaagcattggtggctttaacatttncactaacccccaaatanggcntcagggtcaggtatattgctcttctggacgttgcggtggtggttggaacaatataattggttgttggaatacgagagaaagggaagtaaatccatttgattataattatgaagctgatgttaatgaccaagcatttgatgaacaagaaaattccgtgatcaaatttctatgcttactaagacattctctgtggaaatgtagtggttaaaaatttttcccaccacctttta

SEQ ID NO: 250565 - DNA, 294 bp, Gossypium hirsutum
  unsure (1)..(294): unsure at all n locations
cccgggcgacccacacgtccccnacccatnctttctacttttaatgctacctggccacaacggtctccgcgacgtctttatcaacatcactccacacctcctaaaaccaccaaatattgtgcacccattctccctcttcctaatgataaatattaacatcaaatactacacacatcctaactattaattcgattcttagactccaaacaaacatctctcccaccataaatccattcataataaccaacacaacccacttatcataaccaccactctacttttctataaactaat

SEQ ID NO: 250566 - DNA, 360 bp, Gossypium hirsutum
  unsure (1)..(360): unsure at all n locations
gtacttatggatcgtaaagctgaatttttgtcttaggtgttatgtgaccataccgtggggtataattctnaaattgattatctactcctcccatcaaattatgtgggccagagtcctctgattgattggttgtcagttacttctgtcacattttcttatgaaaaggcctgcaagaatcatgtgaactgcaatgctgatatgatacagatcaaaagcggtctggtgtgcacttgcatgatccaaaattctttggtctctactcctcataatggtcatgcttatattatcagtggtcttttaactaatataaatgcaaattcacttttgaggttgagtgatggacgcttaatgacttacaag

SEQ ID NO: 250567 - DNA, 355 bp, Gossypium hirsutum
ccgggccggccacgcgtccggcccacttccaaaaaacaaaaacttttttatccaaagaagaccggatgggagctcggggtatatccttcgtacaccacccgccttcacacgcgcctgcctatgggccactggatcttacaaactcctcaaatacaaatatcaatctgtcaagatccaaaccaagaaaccatacatcatctcaaacacattaacattttactgaaactgccatatctactggcataaaagataaactcaacgtcgctaacttatcaccatgggaactgattgcattcaaacccaataaaggtgactgcaaactcgaaataaaagatacaaaacctgaccaacataa

SEQ ID NO: 250568 - DNA, 362 bp, Gossypium hirsutum
  unsure (1)..(362): unsure at all n locations
gcgtccgttttttttctctgctagggtttcaaaatttcctcttagcgtcgtcgtcatgccgtgttgaagccaccgtggcttccaccgtcnaccgtggtcggggccacgaagatctgggtaagtttccctttctcctctttttttattcaccctttcttatgttttagagtaagttaaaaataaaaataaaaagaagatgaaatagaacaaaactgaaataaacaagaaaatttagatcggaaagaaaatattgaaatcaaccttctaaagtttctttttttttctctggtgcatatgaaaataaaatgttttttttgtattcaaaatccccccttgaatccccccatttttaaggctcttat

SEQ ID NO: 250569 - DNA, 209 bp, Gossypium hirsutum
gggtatggtttctggttgggtatcttaaactgcacattaaaggttctatggttgttgtttatgtcatgtcatgtaatgtaatagggaaaaaaaaattctacattgttattacatctgtgtatcatgtcttattgttgtttgaactttgcagaagtttatttgagggttgtaaatgaacctagtttgaatgaatggattttgttcgtgta

SEQ ID NO: 250570 - DNA, 274 bp, Gossypium hirsutum
ttagaaaaattcttattttttaggccaggcaacttgtaggttcaactttattggcagaggaagaagatagaccacatttggaaaaaggtgaattctatactcgtgatcttgttggaatgagagccattctcaaggtaatgtacttatttgctcatcagcccttaatattccatatacaggtgtaactgagttgagctgagcctgaatactagcaagcttgactcaaaattcgaagctcaatacttagctttagcttgattaagctagtttatca

SEQ ID NO: 250571 - DNA, 139 bp, Gossypium hirsutum
  unsure (1)..(139): unsure at all n locations
gggccggccgacgcgntccgaaagaaatagtttacatgagtagaaatgttaaattttatagggggaatcataaagatgttatttcttctcaacgattgaactataccaaaatttataaaacaaactgggaccttgtttt

SEQ ID NO: 250572 - DNA, 357 bp, Gossypium hirsutum
cgatttgatatattaatatgatgttattgaattaaatagtagcatgtaattgaaggtaatttatttagattttcttttaggaatttttaataatgtgtttaattcaataacaaggtaatatacataatccgtgtatatatcttttttttatttataaaactattaacaacaaagtatttaaattttgaaatatggaagcatgcaaggaaaatgacacattaagtatttctaacaggtattctcaaaaagaaattccataattaattgacttaaacgtattttaagtataaaaatgcataaacggttaattttcaaatttaattttatacatttttctcaataatatttcagtcgagg

SEQ ID NO: 250573 - DNA, 355 bp, Gossypium hirsutum
aagagactcatgttggaaggaaaatctgcggaggcagataacctcatgctacgagttgttgagcgtggacacctttcacctcaatgtgaatgacattttgaagccatattccaaattttccgacactggagctttcccttttaagttcaatggcttgaaaatgttaattctggacataacatgattaagagatttggagatagatccttggaaacaatactatggatctgcaatcaatagtttgtatatggagcgtatttcctgatactgcaataacctctgctacttgaggtgccatctcacactacaaattttctgcattgctgctgctgtggactgtggacttaaatgacat

SEQ ID NO: 250574 - DNA, 358 bp, Gossypium hirsutum
gggacagccacaaagcaaaccaagttaaccaaggtttcctcagccaggggatcagatctactgtgaaagaaagggaggtctctatgatcaccatggaatatatgtgggggacgacatggtgattcatctccggggagcagccaagaaacttggggagctacctgcatgccataaatgtggagacaagcgagtcgaaaatggtgaaatagcaaaagtatgcatagattgtttccttgatggtgcaacgctccagatctttgactatggagttccccttttagagttcattgcaagaaaacgtggtacttgctgccaacgcgattccaagcctccccatgaagttattagcaccgcaact

SEQ ID NO: 250575 - DNA, 356 bp, Gossypium hirsutum
gacccctctctctgctatagtgactgattccacttctctgttgagagttccaaggaaggatttttgcactttggagtcatcctctgcaaatggcagttatactgcctacaactctacatcacttgtcggtttctcaccaaatggaagcccaatgtcacagcaagattctcagtcgtatccatccgacttgcatcactctcctgacaataatggtggctctcctattagtggttcctgcgtgaccgatgatgtaagtgatttgagggataagctgaaagagctggaaactgtgatgttgggccctgattctgatgttattgacagtaagacctcactagagatgggcacctggagac

SEQ ID NO: 250576 - DNA, 325 bp, Gossypium hirsutum
accctcctacgaaatttttaagcctaaaaggccactccaaaaaaaatcaaaagtggggtagtattttcgagaggtaggcctgatatcaaaaagggcgatggatgtatcaatcaacgcgaacagggtagaagctaagcatatcgaggctgcacatttatgccatggctaagaaaggaggtcagagagggcataggtgtctcatttccaaagaaatagagagacgtactggcatccactatactcatgaacccataccaaccatcatgttcttgggttcttgcacccacacctagctagcctccctactataagccttatgataatc

SEQ ID NO: 250577 - DNA, 350 bp, Gossypium hirsutum
  unsure (1)..(350): unsure at all n locations
gcnnaatttgccggtctgcttttatgattaaagaggttcatcggcggtgtccggagggtgataatgctctgtggagccctactttctaatctgccgctttcatgtgcttcctaactcaggaagacaatatggtggagcgttgagcatgcgcaagcagactttcaaaatctttctttttcgtagtctaatgagtacataaaatgttatatctagagagagcgcattgaaacggggcctttgctattttagtgtggaaggttattgtcactgttactgtcaccgtagcagccctaaatgaaagctgctgtcatcactcaccacccactcattctttcggacatgaaagccta

SEQ ID NO: 250578 - DNA, 353 bp, Gossypium hirsutum
cggacgcgtgggtcaggagccattgtagctcttgtcagcacctccattttgtgcgcacttgatacttgtaaaaccaagtatcaagctgaagttagagctcaccatcaacaaaaatacaggaacactgctgatgttttgtgggaagctatagctaacggtcaagttctttcattgtaccaaggtcttgggaccaaaaatttgcagtcttttatttcacagttcatctatttttatggatatagcttctttaaaaggctgtacttgaagaaaactggaaacaatactattgggactaaagcaaatttgattgttggtgttgctgctggggcatgtactgttataattacacagcc

SEQ ID NO: 250579 - DNA, 356 bp, Gossypium hirsutum
cggacgcgtgggctagaacttagctcatttagtttatgcagttatttataggagtgaggatttagctggttttgggtttgaatcttatcatgtgccacccatccatggcttcaaattatagacttgtaaccctgagactagcttaattgattcaagtaggcattttaagaaacgatgtttaaaaacaattttgatattcgaatgccagcatctgcaatcctttttatcccaaaccacaacttctttggtaccaaagaaacaaaaatggtaaaacataagagactacgactactttcaatccattagagctagagatttggaatctgagattgtcaaatgcccgagtgaatttgtgt

SEQ ID NO: 250580 - DNA, 315 bp, Gossypium hirsutum
gcggatttacagcagaaattaacataacgaaacaattcaataaatattctgaaggctcctattaagggaagtcgagttgtgttgctcttcgacaccccagtgccttaaccaccaaaagtggttaatggatctctgagcatgctaagagaaccttgccttcactatttctgaccataatccctagtgctgaatgacaaaatctcccatcatatgctgcatcaaagttgatcttcacaaactaatcgatcctcttacccttcttggccctctaacggtcctatcttcccatattggccattaaacgccaccaaaaat

SEQ ID NO: 250581 - DNA, 323 bp, Gossypium hirsutum
gctttctttataatttgttttaatttcttaagatttcgcctcaaaatttgatagtttttctttttctcttgtttctttttcttagaaaatcaaacccctaaatccgttacatttccagttaaaagaaaatcaaaaaattttcaatggctgatcggagtaggttttttccattgaccatctaccgccgcatcttattttggaaattttaacgtccggtaaacggttaagtgccggtgacctagtgtcgcttgagctgacttcgagaacattcggagggtgtcacgatgtttgtcccaccaaatgcaagtcgcttgttgatttaa

SEQ ID NO: 250582 - DNA, 328 bp, Gossypium hirsutum
cggggcctcattttaggtcagtgacggtgtttttgtcgtaagcttctttttctcgtgacagtatttgtcctacgttcgcaaattaattttccagttccttattaacttttccagtcaagttcaatttgtttcagtttcccaacatgtttcctttatctcttgttttacttttttttttacaagtcttgaaacttttttcgtcatggatcagttacctttctatacttgcatatgtttacacactcctttttatttcctttgaagtcaagctgtaatgctcaaaactaggtgaagcagccatctgtaaagtgtcatggatgtcatcatg

SEQ ID NO: 250583 - DNA, 353 bp, Gossypium hirsutum
cccacgcgtccgaaagctccttcctgttctttgttcctcttccgcaggtaatttgtagtaaaggtgaaaacggtgtcctccagaatatgaaccaaacaacagccacaatgaagcttccagatgaagcaccaaactttaattttctttgttagatattttatagctttagcaagcttaaattatacaggaaattctttgatggatttgatgtgatctgttttttgtttcatcttgttttttttttttaatttatatgaaaagcattcaagtatatcagctttagtttttgctttagtttttgaggtatagaggtaaacattgaaacatcaagagttagtgtaagttttatcctc

SEQ ID NO: 250584 - DNA, 221 bp, Gossypium hirsutum
cccacgcgttcggctttattgccctgtatcttggtgtctcttataactcaaatgaatttcccagtggttatcatcgccaagatgccaaggagctatttaatcaacgacactttttgctgcgaaatgctactgatcgtatttttggggcctagaaggaaaggttccctattttgatgtcggcttcttcctacccattgcaaacacatgtgaaattgggttgt

SEQ ID NO: 250585 - DNA, 199 bp, Gossypium hirsutum
tctcccactctttcggattgtactagcttttgcctccggtatgatttgtggggacggtatatggactttgccaaggtcattacttgctctagcctgggtttaaccaccaatctgcatgatatatttttcgagggctacaaactttagggtttttaatttttataactcaaaaagtttaatgctttctttcataatctta

SEQ ID NO: 250586 - DNA, 313 bp, Gossypium hirsutum
  unsure (1)..(313): unsure at all n locations
atcctgactgaagagaatgttactatattcgagaaaaaagtcacagaattgtgtttagctgaatttctttgttatggaccccagaaagaaacagggaaagaagggaaatgtttatataggaaaacaaaggatgggaaattcgttaaatggaatgttgaaactgatgattcactttgtacattacaagatgctttccagaaagtggaaccttctntaggtttcaatattgagttgaaatttgatgactctgctgtttatcagcaagaccatctccttcatattcttcaagttatcttacaggtggtgtttgagt

SEQ ID NO: 250587 - DNA, 173 bp, Gossypium hirsutum
tgatatctcttcctcctactcgcaatttttctagcaaatacactatcaagagagagagataaagagagatattatgtgacgtataaaaaaacaaggcaatggacttaggttggatgttatgtagggatttgtacgtataatttcatgtataatcatcattatgactatcattt

SEQ ID NO: 250588 - DNA, 286 bp, Gossypium hirsutum
ggccgctcccctagaaatacgcctaaccggaaacagggcggatttccggatcctaccaagaagtagaatctaacaagcagtaaggtaagtgagtctaggagcaggcgccggaattccaaccatggaagttagtaacgctctaaaacgaatgcgatacgactgctacaatctcatggaggcggaggtggacctttccctcctggaagctcgctagaaattccaaaacaccgtctaattacttgaccttcgtaccctcaagaagcttagtctttttttttagtgccgt

SEQ ID NO: 250589 - DNA, 357 bp, Gossypium hirsutum
cggacgcgtgggcttttcttctgcctatctgaggtgaaaaacataccgctcttcctcccaaccaagtctatctttcctgaccgtgcgcagagcttgagctttaaattgtaaaaatggaagatcttataacagaaatccccccaccatctagattctttcaggaagatcttaacaactttatacctccatcaccatctcttgcgtcgccattccttgtgttttctattcctaagcctgaaaagccccttcgcccatctctcctcattgttgcattatcttcaccatctttgtacatcttccaccatttgtcacctaagacattagtttggaagtcttatcctacctgaggtccctttc

SEQ ID NO: 250590 - DNA, 276 bp, Gossypium hirsutum
taaatatggaagtttctggattactgatacaaatttatgtaggtgtttaaggttaagagtggttccaagaaagccatgctaactagggtgaaattcaaaagaataatatgggataaacaagtataaaaacatagataacttatagaaagcatacactaatttaaatataagataagatctgaaatagaaacaaggacaacaggcagagagagtagccaaatataaatacaaccacacattatttagtgtctgtcagaaatttatgccaattccttt

SEQ ID NO: 250591 - DNA, 395 bp, Gossypium hirsutum
tcggagcctggcagaagaaacaatctttctctgacttatgtccccttcccctttcgctgtttttctttttgtagttgtcatggcggttatttctgggtgtaatggaaaccatgaagtatttttgaatgttaatggtgtaaccagtcattatcatcctcctactttattagcttcaataagaaaagattctgacctgggtatttttgtaccctttattcaaaagcttatggcagtggtgtttaggcacgttctttcttaatatattgtggtttggctttttgtgtgtgttgaattgtaatacaatgttgataagttgttattattttcccatgggtatttttattattattatggtttttattttgttaaaaggttatttggttgttatttctttt

SEQ ID NO: 250592 - DNA, 295 bp, Gossypium hirsutum
  unsure (1)..(295): unsure at all n locations
tcgaagtccaaagattggaagatgttcttcaaatgtatgagatcacttatattggcacctacacctgtacggattcattcagggctccccaaatcattcctgagtcttaatcttgggaatctcaaatgttatcccttttccaaatcctaactcnnncattatcttattgaacccagctgcatttccatccttaaagcaagtggccaaggaagcatctgcttgttatattacatacatggtattgtattgttttgaaagagataatgggttgtggttgttgttttttatttctttt

SEQ ID NO: 250593 - DNA, 397 bp, Gossypium hirsutum
aaaggtaccattccaatacctgtgtgttaaaacagtgaaacaagcagaggaaagatctgggtgctctcggatggcgcctaagttcaaatgagctgcttcagttagattatgcggctcaggaatcaccacgaagaatgatccaaaacattttccagacaaattaaacagtttagaatcgcaacattttcacttggatatcatatggaattttgatccaatgccatagcgttcttgaggaaacagaacgattatgggggcacaaactaaagcaatcagagatcatgggggcagaatttctatcaactaaaagagcctggggattccttaaatccggcatatgctaacagagagaaaaaaagggagggttggagcaaatatgtagccaaatttgaagctg

SEQ ID NO: 250594 - DNA, 341 bp, Gossypium hirsutum
gaaagaattagggggtaaagttaatttagcttattgttaattgtacaagcccaaatttacccgggctcataccagtaaaacaaaaaaagaggcccaattacaatgttgactcaacaggctcaaagtctttagcccaaactgctaaggcccattacaaaccagatcagcccaacaagcccattacaaacccaatcctgaacaaaacctaaacggcccaaatggcccaacacaaagaagaaacagaaaactccaacccgcaccttagggccttctgcccttctgccaccgttcctttgcttcttttatgaaataaaaaaaatattttattctttttttttttt

SEQ ID NO: 250595 - DNA, 345 bp, Gossypium hirsutum
  unsure (1)..(345): unsure at all n locations
gagaaggtgggcttacagggaagggtttccccaatagtatctcgatataaagctctttgccattggcaggctttccatggcaggaaagtatcgatttatgggaatataataggttttccttttttttctttttgggtgtgtaaacttcaaccaaaaggtaagttagagatgtcaaagaataaattagattcattgcttgtgcagaattagataaataaataaaggcagtttctgaatatgatcggagaatatagggaagagtggtccaagtggagaggatgacttagggatgccaactttatttggatntaatccgataattctagcattttttttttcgatttt

SEQ ID NO: 250596 - DNA, 407 bp, Gossypium hirsutum
  unsure (1)..(407): unsure at all n locations
acccttccgttgatgcttaatgaaaatgcaaagaatttacttacgagacaactgtataaagacgcacgtggaagtacttaccatgggcggagggaggctttctctttttgtgatcccaaggtccttgagtttattgacaatgtaccgatactgcanatagacatggtgtggtgctatttcttgcttcgagacatcagttggctttcagttgcaggaatacgccttgaaaaagccagagaaggacttgagcgttgtcacgggaaggatttttcacgtgttagactccttcaagctggttgccagccagagcttgcactgtggacatatgaggttggagttgttggaagggggtggggcatatcataatggtcagttggataaatctaaaaaggcactgacatctgcac

SEQ ID NO: 250597 - DNA, 133 bp, Gossypium hirsutum
acaacaaacggaacttttcaaaactctttgttcagatttctgctatattccagcgtgggctttcaagttgtaacgacgcttaaaaatcccccaatgtgcctgttcgtacacttgttaaattatgtcttaaaca

SEQ ID NO: 250598 - DNA, 392 bp, Gossypium hirsutum
tcggccaacccttccgccaacccgtccggcttttggttaagcagttgaaggttcattcttccaatccttttttaatgggctggttaaagaaggcaaggtttttggtccatttgggccaggaattaattggcctccaactgtttcggttatggttcaaaaggggggggtggatctttttttttaccaaaccttttttatagctattacacttttcataaactggaaatttccagcctattaagtacttgcagccagatttcctgaagcatcccactgttacagcattgttcacccttaatgattgagatgttggatgctgctattgaggatgcaattgaacgtggtagctggcttgaatctctttctttattggccacatcttttggagccca

SEQ ID NO: 250599 - DNA, 359 bp, Gossypium hirsutum
caagaaaaacaaaccggggtatcaccatttccttgatgtaaacataaatggcactctgtttcaaagaacaagatgcatgatacaactataataattaacatataccatatatgtatatcaaaagaaaggctcgtatacgtaaaagagttcttgaaggaagaactatcaacaacacctttaacagattttaggacaaaaagttcagtttttcccctactttttgctccctcaacgagaagaaaaaacaacatatacgtagataaaaaagcatattttgcatcaaggttccagcttcaaggaaacaacacgtgactgtctgttgcgctttgctaccttaacaaagaatattgaaaggcacg

SEQ ID NO: 250600 - DNA, 162 bp, Gossypium hirsutum
agccttccgccaacccttccggaaaccaaaaaataatgaccaggaaaatttctgagcttccttttggttattttgtagatctttgtggtaattcttttaaggtttcctacacttctgtaaatttaaattaaaactgaatttatctaaagggttcaaaaggaa

SEQ ID NO: 250601 - DNA, 367 bp, Gossypium hirsutum
gatatacatgccagaaacctacactttttttttttgtaagtatgaacaaaaacaaactgggaaacttcaaaaggctcaggcaatcaattatttaccggaagctagcatttaatgcttgtacacccatatgaacaatcgctctaaaactttcagcaaaacgttgaaaaactcaacgtttacaccaattatattaatcaacttaaatagcttaaaccataaatcatcatgtgcttaatgcctcgccaagaatttactgctgatttgccggcccgctattactcaaaataaaccctgtatccctactccaacagatgtttggtagctatcatcttgtgaacgatcacctcaatgaatcataagcattcct

SEQ ID NO: 250602 - DNA, 349 bp, Gossypium hirsutum
attgaagctcgttggagaaaaagataatagaaaaaaaatcagtttttcaagctgggtgcatcagtgatcaactggtcgatcgaaggtccatccgtggttcgattgagctgatttttggacagcagctaggtgataaggtgttcttgactttgtacggtcggatttttcatccgagacttgtagcgtcggaaatacccatttttcagcagctacgtttttggtgatgttctctcatttttctctcttttgcttaagattacatatttgtaaccttgtctgagttgtatgcttgttgtaggtttgatattgtgatcttgtagtctttcattcttttatttgtatatctttt

SEQ ID NO: 250603 - DNA, 399 bp, Gossypium hirsutum
cgccaatctcccttttacggccgccgatttcttctgtcctcttctcgttccctgggcggccaccacttcccctgcgctatggatgacgacaattcgaacgcgttgcggagaatgtcgacccgtactcggaaagttgctcctaaaatggctgcagcactcggcagttctgataatcgatcccaggcagctttggcccgtcttgaagcattggagaatgataacgctgggattgaagcagttgaaatgaacgatgatgatgaagcttctcttgatgaagatgatcaagcatacatgcaaaagagatcgaagggcacaaaacgtaaaacccgacaggcaaaagcacttgaaaatgctaggaaggctcccagatcatttcttgagctcttacatgaggcaaac

SEQ ID NO: 250604 - DNA, 211 bp, Gossypium hirsutum
aaaaaaaaaactacatttaccccaatcttattttttatgaacctccaaagaagcctagcggcttactcaaatacaccagtgtatacacctccaaagaaagaggatcctaaacctaaaccaccaatatatgaacctccaaagaatgagaaaccttagccaaaaccaccgatttatacacctccaaagaaagagaaacctgaacccaaaccac

SEQ ID NO: 250605 - DNA, 166 bp, Gossypium hirsutum
  unsure (1)..(166): unsure at all n locations
ccgggcgacccacacgtcctctttcacatacatttccatctttcttgtttcacactttttttatataatgtccgttttataatatagtggcttgctatacacccaacnnnacttaactctcctcccttcttctaataaataacatcacttcacacttccctaacct

SEQ ID NO: 250606 - DNA, 255 bp, Gossypium hirsutum
ctcacgcgatcgtatatatgttcatttttccgtcactgactcataccatttgggtgtatagctttgctacggggatcagtctttcaacttcccaccgttctaaaaccttagacttcctcatgttccatcgaattcagaattttttggcctcaagctatctcattcttgcttttccacaaaaaccttttcttctttttcacgtcgggcgcttcattttttccaaggtgactaaaggttcaaagccacctaatatta

SEQ ID NO: 250607 - DNA, 346 bp, Gossypium hirsutum
tcgtaaaaataaattataaaaaataacattttttcaaacacaaacataaaaaaaaaatagaaaatttaaataaaaaaaaacgagatggaatatttcctcccctttttaaaaccccattttacctccccctatctccaacttcacactttttatatattttcccctaaattcaatttactgcccctcgttcttacaacgtactaacttgaaaaaccctacctttcccccatttaaatccctttaattacattcccctttctccctctttcttaatattaaaaattccctaacctatctcccttcccaacatttcctcatcctttatctccaatttaccccccctttt

SEQ ID NO: 250608 - DNA, 331 bp, Gossypium hirsutum
cccacgcgtccgcccacgcgtccgaactcctttttttacctcttcacattctccatttcacagggttctgatcatgttggggaagaggccccggccaatgatcggaaagttgtcggagttgttggtctcgagaggccttacggtggcatatttggacaccaccggaagccctagaggcccattagacatgaagatgatgcattcatcaccaagaggcttaaaaaactatgatcttggtggtgttggtcttggaattgtattggctcttgataaattcaacgaggttgttgtacgtgaagttttcccaaacacaccgtttgtaccctcaatt

SEQ ID NO: 250609 - DNA, 245 bp, Gossypium hirsutum
gagtaatatcatattaataaataatgaaaaaaggaaaatgtatgggagaggtgggcttgtttgattcaaagcaggtcaatccttggaacccttctctgtatacctgaattctttttcccccaaaacctcacccaaagctgttcaagttcaacaacattcacatattcaaaatgcaattgctcatcctcatcacgctgcggatgtttaatccaatccatccacttaatgtagagcccttcaatcca

SEQ ID NO: 250610 - DNA, 370 bp, Gossypium hirsutum
caccactctataaaactgaagtcgttcttttcataaccaattcaaaccagataaagtcattttagttttgttatttttctctacttaaaacatttttccctgttcgtttgtctatttcttccttttccattttcaggtctatcggtcttccttccttgtctttcaagattctccttcttattatttataaaatacttttgtttttgaagatccgattcttgtttaaagaaaaattagataatggcgaggattagatcatcgtcgtcttcgagtaaatttagatactgtaatccatcgtattatttgaaaagaccgaagcgtttggctttgcttttgattggttttgtttcagctacttttttcgtttggg

SEQ ID NO: 250611 - DNA, 161 bp, Gossypium hirsutum
gagggttgtactttgatcttgtatgtaatccatttcccacatcaacccgacctggagttggcttttcgtggcgggtgtcaagagaactcaaggtcgtgttgatgtgggaaatggattatttcaagatcaaagtacatccctctggacgcgttagtcgaccc

SEQ ID NO: 250612 - DNA, 267 bp, Gossypium hirsutum
  unsure (1)..(267): unsure at all n locations
aaatncccgggccgcccacacccttccgaaaaaaaaaaaaaaaaaaaaaaaatttatatcaaacaaaaaaaacactaaaataggaagtaatactaaattttactgggagaaaaacatctattatctttgacaagaaactttaatcatccaaaaatagcaaatacttcaagaatctgaactaaaaatacattttcattgccggtgccctttttatagattccactttttcatcacccatcttgccatatatcattttttattattctc

SEQ ID NO: 250613 - DNA, 374 bp, Gossypium hirsutum
  unsure (1)..(374): unsure at all n locations
cttctccccaattctcaaaccttacctagtattttcgtttctgaacccaattaatgaagcacacaaggaccataacatacctatacctcaatatcacaagtcttatggaggcagagcgagacaagtacaagatgatcaactntgaagaaaccgagttacgactcggcctgccactcagtggaaacgagacgctcaaaaacacttgcagcactgggaagagggttttttcggatactgccgtggatttgaagcttaacctttcctcaacctcaaacagtgcttcttctgacctggctaaagagaagaacatcactgctgctgcacctnctgctaacgacccagcaaagccacctgcaaaggcacaagtggtgggg

SEQ ID NO: 250614 - DNA, 267 bp, Gossypium hirsutum
gtggattttttaacgtgaaaaaaatggggctgctttcaccaactattgagcgctatttgccaaagggagatccatactgatggtgggcttgatgctgctggtaaaaccaccattctttacagctgagtggagagatgtactctttccaccatggttaatgtggaccgtgatcaaacatacttactgtggagtggcgcagcagaccgaccatggggcctttccaacaccggctatttcgggtgtgcatgacggccggggtgagctaga

SEQ ID NO: 250615 - DNA, 107 bp, Gossypium hirsutum
agaacagagaacttaaaactgattttttcattgggaatcctactgtttaattaagacttctaccccggatggggcctgcggatgctcacacaatgtgatttctgccc

SEQ ID NO: 250616 - DNA, 382 bp, Gossypium hirsutum
ctgtgaagaaactcaagttgtggtccaaatagaaaaggaagaaaaagacccatggccatgagcatcctcctcactattgctgcagctgctattgttcctcatccatccaaccatcagctccacccttaccttcatcctcatgccttgattttgaatacagcaactatggaacattcttaccaaccccggagccggagccggagccggaaccgcaaccacaagagattgccagcctaaactcatcgtatcagcaatatatggtatcagtttcggaacctgtttatggcattccagtcccggtaattcatgcatctcgaacagaaagatcagctggtcaatttggatgtctttttagctttggttcttatttgttccgctgctt

SEQ ID NO: 250617 - DNA, 375 bp, Gossypium hirsutum
aatccataaacactttgcccccaattaccatagaagaggtgtttagacacattggaccactttattcagggtgtggaaataataatacactattttgtctcctttcagcactgtttttcaactatccaattattcagctttacttgagctcacacccaaagaagataacttgcttcttccctacagtgaggaatgaaataaagctaaagctatgaagatcgtttgtaaagattgttgttttatggagagaccagttagggttcttgggttcttgtttttgttactgcaaatcgaaaggtcttcatcagctttcaattatttgattggccttggaacctatgacataactggacctgctgctgatgttaatatgat

SEQ ID NO: 250618 - DNA, 339 bp, Gossypium hirsutum
cacgattctatcacaaatctgcgtgagtttcctttcttttttatttgaatttctctgcttctgatttccattggtaaaactagcacattgcaagttgttgcttttttcttactcgcaaaaccgtactaaagaaatcgcctaagatttgagatagggctttgaaaagaaacccgctaatgtacaaccagaatcatactgtccacctctagaggatctggcaccattggttacattcagagctacaaattttctgttgagcccaagacgaactgtttcaccgtttccaccaatccttttgatgcagcattcaagctccccatgtctcaccaccatgaaacc

SEQ ID NO: 250619 - DNA, 298 bp, Gossypium hirsutum
aaaaaaaaagaagagcctgcaattgccggtgaatatttgtagacacctccaccgactcgtgacagcttccttttcatctcctcagatgagatcgaatcaggttcttatgattgcgaaataactgcagttggtcaatttttatcattgaacgtgccagttttgaagcctgagctacttttattatccgaaaattgttattattacctgtgattagtgatgattatttagctctaatgaaaatttggaagttcgttgttgttggaaaatttgtgttttttaccgatggctgtgagcttct

SEQ ID NO: 250620 - DNA, 188 bp, Gossypium hirsutum
cttcctgagaagcggttatatttgggttttggatatttggacctggatttggaaaagcacatgggttcatgggcagaattccgggaagatcccagaataattaaaacattcccttattaaattctccgtggcattgcttattggcactctcatagggttctttcaccgagaacttaaacccccaaaat

SEQ ID NO: 250621 - DNA, 191 bp, Gossypium hirsutum
cccacgcgtccgcttactatagccccacattttcttcctatagcctcacttctcctgggggcaggctaacctcaccaagttgcagtcccacatcaccaagctatagccctacctcttcatagtacaaccctctgtcagccatggtctgtcctgtctttggcatacacaccaagtagtccatagggtggctt

SEQ ID NO: 250622 - DNA, 248 bp, Gossypium hirsutum
cccaaatcaaaattccaacccatctctacattgccgaacccgaccatctgctgcatcgccgtcgacttgaccatctgctatgttgccgtcgcacttctctgccgcaaccaatcggtacgcaagacacagcgagattaacccaaaaccctcactcagctctttttgccatcttcttctcagttttcattcgccttttttggtggaatatcttattggttcgaggggttgttgttcagtttcaaggtttc

SEQ ID NO: 250623 - DNA, 145 bp, Gossypium hirsutum
  unsure (1)..(145): unsure at all n locations
aaaaggaaaaatgccgatcgctcaggtgtttatttcctatggcttncggtacagctctaagaaaatagcccaatgtcacatacaatcggtatcatcagttgataccattattgcatcatattttttatcacgtatactcgtgaac

SEQ ID NO: 250624 - DNA, 184 bp, Gossypium hirsutum
gcggtaagtttctggatttcatacctcggtttgtttaccctccgcaaaaggagtcgctgagggaggggcatcggaaccgatcacgcagagctcatatatattgaacactggtcggtgtttgtgtattttcagtcccgatatcaaaactgtgacttggtgtatgagtacacatcactgctgatca

SEQ ID NO: 250625 - DNA, 330 bp, Gossypium hirsutum
gaaaaaaagaaaagggagggggaggatgtctctctgggcaatccattttcgacgttcggaccaccatgcatgcgtcaccagtgacagacaggcacagctttctgaggtgcaaaaaatggcccattttaatactttctctttccccacctcatatatgagtctcaaacactcgaaaaatcccacgaccgttgaaagaaatcgagaaaaccattcagtttccttttttccgatcgcccaataaggcaaaaataataggtatctttatataactatactttgtttgtatattatatccggtgtatagacgtgaaaatcagtggaaatggtccg

SEQ ID NO: 250626 - DNA, 189 bp, Gossypium hirsutum
ttatcttcaacaactattctttaatagcagccgggaatcactctcatctactgtttgacaaagatatgaaccctacattcgcactgaatttaatagaatcattcattcattttagtaacacaaatttttctgtagaaccccatatatgggctagtgacataaagttaatgccttgtttgattttcttgc

SEQ ID NO: 250627 - DNA, 353 bp, Gossypium hirsutum
cccacgcgtccggacggagcgtaaatgtatcgaacggtggtgaatcgcatccttctaaccaaaaacaccggcggaggccgtcgctgcctcctccgattccctgatcttcgaactgccgttacctcttctcgtttctccactacaacggaacctcaaacgttccctaatcgtccccttaatccagctgattcttccacgtgatcttcgtcgacgagtttccaaacatcatctggggctggcgatatttcgcgtcaggagagaaagaatccggcaggtgagtaccagggggagcaagctcgggttctttaagcctcactacgacacgtggtaagattgggatggagtgaaaaagc

SEQ ID NO: 250628 - DNA, 220 bp, Gossypium hirsutum
gggagagagaattttcttgcattttctcttcttttcccttttttttgtaattttctctgaaaattgctcattttattcaattaaatggacggccgtttgatcgactgatcttcgtgtgtcgtgatttaaaggttgcaagagaagaggctatttgtctagcatcttccaacttttagacaagtggaagttcaaaggctttgggacaatgagctttgttttt

SEQ ID NO: 250629 - DNA, 459 bp, Gossypium hirsutum
caaaatccaatccattctgacgatagcagtttccgaggataagactttactttctatcttcttttgaaatcatttccctcaaacgctccatcagtctggatttattggccatcttctcttcgaagcgaaaatatggcgattcaactcttctcccatcaagtaaaaggtttctcctctatcaagagcgtcttttgctagtctatgtgcttgcaagttccctgatgtgtgaatatgctgaaagataatatctcgaaaacaaggtttcttattctgaatgtctctgataatagctccaatcactaatttatttgttaaagtcatttggcatttttattatttttgagtccctcataagtgagatccctaactttgtgccttctaaatatgcatacgcttctgctgcaaatggggaggaaatattgttgtgaatgatcatctttaaaaccaagtgttcccccc

SEQ ID NO: 250630 - DNA, 243 bp, Gossypium hirsutum
  unsure (1)..(243): unsure at all n locations
acnacaacagccgnngcngcnggnccgaggccaagaggaaggccaaaaggcacngacanggcggcagcaggcccagcggacccgggaaaggagagagagcccaccacccaagagaaggggaggcggagagaagcccaacaaacccaaaaaagcaaccgaaaagccngaaggccaccccaagaagacaacagaagggagcagcaggcaaaggagaacaaaagagaaaaccagaagagaagcaaa

SEQ ID NO: 250631 - DNA, 455 bp, Gossypium hirsutum
gaaaccagtgcttcaatgccagcttcttcttcaaggtcttcttcagctgggagaagctcaaagagatgggtttttttgaaagattttttaaggagcaaaagtgaaggaagaagcaacaatcataagttctggtcaaccatttcattctctccggcaaaagagaagaaacctgggagaaaagagaagctaagcaataatgtgtcaaatgggggatcagagaatcaatgaagcaacaagaacaataataataagcctatgaacgggatatctaagaggagggttccaccatctccacatgatttgcattacactgcaaatagagcactagcttaataatattagtgagaagactttttttccttcaagcagacttgcttggttgcttggtagtttatttaaatgtatttgttcctttatgttttttgtttacttttttccattattttatttatatt

SEQ ID NO: 250632 - DNA, 248 bp, Gossypium hirsutum
gtttgacaataaatatttcataacttcttctaaatcgttgcactctctttagatctgaagcttggggccttccttttctcatctcctggcattcccttgtctgggacgcgcaaccaatcaaatcttctttgatctttggcatacttaagacctacatttgtaggtaaaccttttcttaccttcttaagggtattttatacaagaatatgtcggatatgtttgagtgcattcattggggttagtacaaa

SEQ ID NO: 250633 - DNA, 257 bp, Gossypium hirsutum
aacagagatgtcatcgacgaagcgaacatcgataagtatttcccggacagattgttcagaactgtcagtgatttaagtttatctatgttagagaccgaagacactagccggttagaactacaacatgtccagctctttgaacacatattaccgatctatttaatgagttaatgcttttcttgctttaatcaagaataggacttgcttgtatgttatagcttgactcacatttttagggtaagtttttagtgatttat

SEQ ID NO: 250634 - DNA, 243 bp, Gossypium hirsutum
ttttgtttcactttctttagttctgaagctttgtttcttggctttcctcatcttgtggcatatccttgtcaggggcgcgcaacccatcatatcttcttttatctttggcatactcaagacccccacgcctaggggaaccccctctttccccctaagggcctctattgctagaatatgtctgcaacaatttgccgatctctggatagggaccaaaactggcgtaagctgaacacaaaaattggg

SEQ ID NO: 250635 - DNA, 326 bp, Gossypium hirsutum
cggacgcgtgggcggacgcgtggggtgtgtccacaatacgctccattagaacggatactcacattcaaacgtaatacttcttatccgcgtcatacccttgtatttcaaatgctttatcattagtatcttttatttctgacactctttattaatatctaattcacaaactttttaatataattaattaataacaatttatttttatttttaattttaaattttcttttttttttttttttttcttttatttaatttttttatttttattattgataattaattatttatgaatttaatttttaatattcaatttcttaatcttttta

SEQ ID NO: 250636 - DNA, 411 bp, Gossypium hirsutum
  unsure (1)..(411): unsure at all n locations
cccacgcgtccgctgatatgtaaatgtattggttgtaaagtttgatgagtatttataaatacatttgattatatgcatgtcatatatatatatgtactctttgatatgaatgctatgagttcatatatttggttataaataagatgtttatgaataacaatattcaaatggtaatatatgtagtattcgcgatttcattaagtatacgtaggaaattatataaattattttatatttagttatgctgtaaacttacaaggctataaaaagttactttgtttgtttatgtctttctgttttatagatttaaagatcaagcttcaagcttgaggatcgtcagcaagatcatcactctatctactctctcggnattaaaatgttttaaattttaactatgacatgtttagacta

SEQ ID NO: 250637 - DNA, 109 bp, Gossypium hirsutum
ccacgcgtccggtttattgttatttctatcatatatgtgctgctatagtggtttctcaaaaaccgcgaacacagatgcggatcgcaagaggaagctatttttcgatctc

SEQ ID NO: 250638 - DNA, 300 bp, Gossypium hirsutum
agataatatcatcaatgttttttagcgcttcatatttagaacactttttggtagaattcttttgggaaggtttcccataaattagttggcaatcaatgctgtggcgcatctatgcacatggactatattagaacgattgcattccgggccttagttatagcgccgcttagcacaaatgagctgtccttcacccaagcggccttggctatcgcaccgcttccgccgccgttctacctcacggtcacggcgagcaccataaggatgggtctatggattcgatcactgactagatccacggcc

SEQ ID NO: 250639 - DNA, 263 bp, Gossypium hirsutum
gatttccggttgaacacgccttccgaggcggccgttgcgaaccataaacttgggggctcttaattctttcaattttgggctctctttcagaactcaaaagtgttttccttaagggaggagatccaccaagattagggttcctgacccaccaaattttaaggggctttttggccaggcatcctttgttttggggaatcccaagcaaagtctgaaaagggcccttaaaatttcttttttaataaccattccaatttgttgttttt

SEQ ID NO: 250640 - DNA, 433 bp, Gossypium hirsutum
gttggagcaagcgtctactgagaaaatagatggagggggtatagatggaattcagaccatggatgattctgctcaacccactgaaatgatggcagctcgtgaaatggaggtttcagatgctgattctgaaagcaaaagatcagtagccatggcagtagaagaatctcatttaccaaagtctgttgaacaaaatagttttgaaggtgaaatgcaagaggagcaccatcagaatgaaggtgctgaaattggaggctcagatactgacggagaggctgaaagcatgttctttgagaatgctgatgctgctgagcaattcttgaaggagctagaacgaggagctgccattggttctcactcgggtgctgatacttctcatgatcattcgcagacaattgatggtcagattgtcattgattccggttgaagaagggga

SEQ ID NO: 250641 - DNA, 364 bp, Gossypium hirsutum
cctgcgaaaacaccaaggtcccatgtgtgataactggccccacaatccttagggttcgttctctcggcaaagtcattaatcgatttattggggaatgttggaatggtatgaatcttcgttatgttaaagaagcaaagcaccactgttcgcttcttcttcaacaaagacttttaccataacgacagttttcggctacggcgttttcagcccgtaatgatccattttccatgcaactccacgcttttcccggcgaccaacgccgttgctttcagtccatcgggaaattagacgcgctcggaaactacaatgccggcgtcggtgccgccttaaactgtaaagaaccctcttccggcttaaattttga

SEQ ID NO: 250642 - DNA, 219 bp, Gossypium hirsutum
aatgaaccttgcctttgttattttccttcacattctttaatatttttcccgagaaagtgacactcggatcacataaaaaaaattcattaaatgtggtggagatccgcttcttttattcctcgctgactgctagagccattctccagctatcccccatatcctgatttgcttttgctcttttttccacctgctttcttggccaatttctttcataaccct

SEQ ID NO: 250643 - DNA, 455 bp, Gossypium hirsutum
caaaaattgatttttggttacccgctcattactcttcttctcatctcagtcgtgcgccctaaatccccaaagaaaagtttgtttttcttcagctgaaatcccccaaatttctcatttccagcaacaccagtcaatacacctacaccaatcacacttctttttccttttcatttcactgcactgaattcagtcaccatagctactccttttctttcgatctgttagggtttcttttaattttaggctttcaatagagtttccttttaattttactggtgatttctatggtgacagaaaccttagatgagaagaaatcggaggaagaggagttgaaagataaaggaaacgaagagggggagtaaggctgttcgctgaaataaagagataaaaaaaaggttgaagatggtacaagaagctcctaagctcagtggatcttacaaaggacctctttttca

SEQ ID NO: 250644 - DNA, 420 bp, Gossypium hirsutum
ggacccgtggcgccttcctgaaccatacatggttccgtatagatagtatccataccatggatgattcttctcaaccaagaccaacaatcttttcataaatccaaagaaatgctcccaaaaatagacaaaagtggccgcttttgcagtcccaaatacaagaatctgatttaccaaagtatggtgaacaaaatagttttgcaggtgtaatgcaagaggagcaccatcagaatgaaggtgctgaaattggaggctcagatactgacggagaggctgaaagcatgttctttgagaatgctgatgctgctgagcaattcttgaaggagctagaacgaggagctgccattggttctcactcgggtgctgatacttctcatgatcattcgcagacaattgatggtcagattgtcattgattctgatg

SEQ ID NO: 250645 - DNA, 454 bp, Gossypium hirsutum
  unsure (1)..(454): unsure at all n locations
gcgaaaacaacaaggtctcatgtgtggtaactggcagaacaatcggggatggagaaacgcgaggggtagacagaggtcaaattttgcatatgaacgaccacctgtggagccgagacagttgaataccgtggattattgtggttgggccatttaaccatatgatgaatttggaggcaagttttgtaagtacaaagttattagcatatatatagagagtagtatataatgctttgtagattttagggctcaatattattttatttgttctgtgttggagtggatagtacaaaaaaattaggatcacagcagcttggcaaagggccctattgtgttctgtttatgtctacagttttgtagtntggttttttataaggtttctgtcgtaagttttgaatattatatttctagtcttcttgagagtgattgttgctttaatatattttatgagattttt

SEQ ID NO: 250646 - DNA, 286 bp, Gossypium hirsutum
cccacgcgtccgcccacgcgtccgttcaaagtagcatctcatcgaagtcctagcccgagacagaggcaactgtcaaagtctttgttttcacgaccacgctgttagcccagacatttgaataccatggattattgtgggtgggccatttaaccatatgattaatctggaggcatgttttgtaagtacaaagttattatcatatatatagagagtagtatataattctttggagattttagggctcaatattattttatttgttcttggttgaaatgtttatttcaaa

SEQ ID NO: 250647 - DNA, 400 bp, Gossypium hirsutum
cgcacgcgtggattaagatgactcataaaggatttctcttcaaggggcataaacagcagaggggagtccctcccaatctgccatggaaaaattcctcacattcgcaaaggtaagagagtgttcaaaccatcgaatatgacataagagatggtcgctgatcaattgtttgaccaacttcatatttcactgcaatttgatataagctttctccgtcgctaacatggatggaggccatctaaatattgtgattccacccccattatctctcagttattgtaaggaatagttttgttgctgtgtcttatatggctcctttttctaacgcaatatccttcatcattttttttaagagatttttttccccaaatttttctacctaatctctatgttataatttctt

SEQ ID NO: 250648 - DNA, 357 bp, Gossypium hirsutum
gccgaattcccgttcgaccacgcgtcctcgtactcgtgggcggacgcgtggtctgacgcgtggtcggagctcgtagcatgcaccatagcaacagtgatcctcaatggtgcatgataacaaaccatacccagcacagctaaccacatctgtcattatatctatgctttatttagtgacaagggcggttagtgaaatcaagcacgataacacatgtacttatccaaacctgccaccaccaacatcctctaatatcggatgctgatttgacacattgtcacaaacaccttcagcttgtttcttaccacccttctaaacagaatcatacttttgacctacagggaactttctatattacta

SEQ ID NO: 250649 - DNA, 253 bp, Gossypium hirsutum
agttctagatcgcgagcggccgctcgcagatcggacccgtggtctccggtatccttcttggatctggggtccacagattcttcaagcaacggaaacccccatggaggaagacgtggcctgcgtgtgggcgcacattaaagcctatgcacgccggggacgccgagtaggagccagatctagctcgctacctgtactacacaatcctatataactcctttctttagcgctccctcgacttccacctttgctacaa

SEQ ID NO: 250650 - DNA, 201 bp, Gossypium hirsutum
cccacgcgtccgcccacgcgtccggtttacgagtctactgagctgaatggcaagaacgtcggggggtatacgacttcttgcccaacctaatttcgcttccacatcttctcggacatcatttatcagaaagccatttttattggaacagtttgttgagcataacatttgactctgttttatgctttgctttcctttaccacc

SEQ ID NO: 250651 - DNA, 183 bp, Gossypium hirsutum
gcaaggagagctaggcttccccatcaagctcacacaacctctcaagggtgggtcgctaatgcatatagtggaggatgcgagtgggctgagtttggatgcagctactgttccttcacgtatggttcttgcaaaatgtatctacatacactatggtttgaggttttatgctgttgaattttataa

SEQ ID NO: 250652 - DNA, 268 bp, Gossypium hirsutum
gccggccctgcttcttcttcttccggtgttagagccgctatccgtagaccttcagattcaggttctggacttgatggttaccaatctttatcttcaagaaccaatgctgagctcaaaaagaagaacaaatctaaagataaattcgaattcgatgaaaacaatgcacagatctttacgctaaaacctgatttgggtcaactgaatacaaggctttcatacagagaggattgcaaaccttggatgggtggcttcatgggtcaaccttatt

SEQ ID NO: 250653 - DNA, 308 bp, Gossypium hirsutum
cccacgcgtccggatctactcaagtagtgaggttgcttatcaaccctgatgacactcagaagatgttgactggttgcaaggcaagagggattaagttatgtggagcattaggagctgccgggctgatttctgcacacagttctaaaagccgttcagatcatcaaaagaagaaatatggcgttgtaacactcacagattgccgctcaattcttgaacctccgctctccaatcaccatttcggttttttctactctattattttgtacacgctcgccatcaaaggagtattgaagctttttttgcttgct

SEQ ID NO: 250654 - DNA, 472 bp, Gossypium hirsutum
ataaccttaaaatttttcaagtttctttaacatagcagcttaaaaaaccgaaaaaagaaaagtaactagaagaaggtattctggaatttgggtttttaatgggttttaagaaaagaagcactaaatctgaggaagaagttcttgagggtcaaactgatttagctgcggataatacggtttcagctccttccagtaagaaaattaagatggatggcaaaaaagatgcagacatgggagatggggttgcttcctcttcttctgttgcaaattccgttaaaccattggagagaataatgaagagaaaacatgttgactaggtgaggctgctttcgttttttgaaaatgaggtatcttagctgaaacatctgatttttgaaccttaaggaatagatgcctcagagcctgtggcagcttagtcttgtattatgttgccttggtttcatatcattgttttttaggactttggctttcg

SEQ ID NO: 250655 - DNA, 392 bp, Gossypium hirsutum
gcgtggccttgcttgtgagaaagagatatctgctgcctttgagaagtcccttaaatgcacattttcaacccttgaggagtacctcgatttgttcctcacccgagtagatggcttgagacgtagaatttcatcagctagtggagatggtgtgttgaactattcaatgattagggaatcttttcagcaagcagcggattacttatcaccacacatgaagaacactgatggtttactgcatttgcatgcctattgggcccgtttagagctgaaattgggcaacgatttaattgcagctcgtggtgtttgggagagcttgcttaaaacttgtggttcaatgttggaagcatggaaaagttatatagcaatggaaattgaattagatcatataaatg

SEQ ID NO: 250656 - DNA, 360 bp, Gossypium hirsutum
gttcaatagagactgctttgacttatgttatgaatcagtataggttgacctcttctactttcttcgaccctgctcttcaatagagtcttgaggctaagtcagctctcttcttctttttctttctctgacattctgagagaaagattgatccacctggaaacccctcttggcctacttaacctactcttcatttaggcaataatagcagactttgctattacatcctccgattcggcaaaataaacttctctcgtggtcaagcatccggctttccttcctacaagcatataaacctcgagcttcaaacacttccatttgtgaccatccaactctccaatgagcctgcactctcaaaatcat

SEQ ID NO: 250657 - DNA, 449 bp, Gossypium hirsutum
ccggtcgaccacacgcgtccgccattttcttttcagcattgcgtttcttgcttctcacttgttgctttcaagaatggccattgctatgttgcaacaaacagttggaggaactcttcagcttctcagcaattctggaactcactgcaatgtcgggaaccgtcggtacggttgcttcccaaagggtttaagttggaagttgagttcccaaagagagcgattatagttcggaaagaggaaattaaacgttattaagcgtaacatctaaacctttgttgtggtcctctttagcttcctcaagtgtgacacccttgatttcacatgtaaccaattaggtagctttgattctgtttcgccatgtttaatccttatggtttgtgaaagaaccttttttcaggttgtgtttattttccaattatttttttatagatttttttgtggtattttttttt

SEQ ID NO: 250658 - DNA, 459 bp, Gossypium hirsutum
  unsure (1)..(459): unsure at all n locations
accaaaaagacggtggagatcaacccaaagcaaggatcagcattgaccgcaatcctgctcctattttggtacacccacctaggtcgtcttgttctttcccggctcctccaccaatggctacggcagctaagggaggtggcggctgtgggcctatggctaaagggtatgagtcgtttgttctcacgcgctgtaagtcggagccgaggaggtcatcgactaagcttgcacccgatgcttgcttttggaagaataggaagctcgagccggctgcacttgaagttggcgcggctggagttggtttttaagccaggttcgctagaaagcagntaaaagtaaaagaaaagaaaagaaaagaaagatatttgtgggaaaaccttgaagttttttatgagtaaaaaaatcaggaaatggtggaagttttagtccttttgaatagtgaaaaaaaaaaactttgggggt

SEQ ID NO: 250659 - DNA, 311 bp, Gossypium hirsutum
tgttactaaaagagttgtcttgttatctttactttgttttaatgtgtttttagtgaatgcgattgttaaaaatgtggtgaatatgaaagcggaggaagagaagaaattaatatagggaaatggctttggagcttgggacaagggtaggttctatggtgggcatggtgtagctagagatggtattggtggaactggaaatggagttggttttggtggaactataccttcatccaaacctgtatcaagagcagtcacgccaactcgtcgtccatcaagtgctgttaatgtattccgctcctacaatcatatca

SEQ ID NO: 250660 - DNA, 306 bp, Gossypium hirsutum
gtttggttcatttttttattaccgaatcattatttcatgtaagcctctattatgggtgagcactgaataaccattctgtaaatagggctctgaattggctattctttgttgtccgtaatagccttctacttttgaagataaaagtctcttttcatctaccttcttcattttctctagatgcgcctgttacagtgagtaacaaagttagaggcataatctactttcattatcggatttagtactttccaacaagctgggtttgtatgatttggaaaatcaatccattggattggagcacaattagca

SEQ ID NO: 250661 - DNA, 229 bp, Gossypium hirsutum
gttcggttctagatcgcagagcagccgcccttattattatctttttacgcaactaaaaacctgaaatttgcgaactttattcaaggaaatcgctaaactgaatatataaaaaaaatagtaactgcatatcaagaacttacattcttctctgccgccgttatcatttgccaacacagaagtgtatttattcttcttattatctgaagttaaaaaaaaaaaatttgtcttc

SEQ ID NO: 250662 - DNA, 309 bp, Gossypium hirsutum
aaggacaagaaatcacattttcattacagagaaattaaaatgtcatgaaagctacattaagcaaattcccaaattacatttacatccacaatacgtagattgttaccaattaccctttttttaaagggccacataaacatggataaccaaaagatctatgtgcaagtcccacattgaagcttttttgattccaacacacttcttgcagctttctatcactacttgcccgtccacatattgtctgcggcataccggcatgtaaacttttggtccaccgatcaactcccgttttgttttatcggtctttct

SEQ ID NO: 250663 - DNA, 347 bp, Gossypium hirsutum
attggattatggatacagataattctattgtaatatcaaccggaccagagcatagatattggaagcaaggggttaagcttttgagcaagccagttgcagttgggattaatggatgtaatagcaatagtgaatatggttcaaccatagtggaagccttattagagccatcaagtagtgaactcatccttaagcatgcttttctgtgacacttgtatcatttggtttgttggtttttgggttaaattctgccattagtctatgtatcttacgtgagttgggaatttaattatgtataatttggtttttggatataggatttttaaagtgttaaaattgtaagataattt

SEQ ID NO: 250664 - DNA, 466 bp, Gossypium hirsutum
cccacgcgtccggtcttcctcaataattaagggccattttcttcctcgttctctcaaataattgttttttacattggccctttgatttttcttgtttaactaatttatctcttgaatttttcatatagctttcaatctaacatagttggttgcttgttttccgagattcatccatgtctcggggtaaccagagagatcgagatcgagatagggcacatgccagagctgcccacatagccaaaggttccaaagacgatgggttaacccctgagcatcggcgtgaaagagatgcattggcattgtttgataagttggccttttatgcggctcatgcgacggttgttatctatcggcgaagtgtgtttaaaaacttgttattacagttggtagtttgtatagttttttttccctaagagtgtgtgtataatatttttctttctgctttattttttacacattttttttt

SEQ ID NO: 250665 - DNA, 474 bp, Gossypium hirsutum
gtgaaaaaagaaacacaaaaggaaacctttaaattctctcgtttcctctcagaatattcttctttttcttcttcttcttcttcttcttcttcttcatcattgtctgctagggtttctttaaactcttttcatttgaccaaaatggcggatttgcctgaggcgactcgtcggaacactaacgttgtttcccgcgatatttccattgatgtttcctgcgatgattccaattgtgctgattcttcaggttgttcaagtgatatgcctgatgttgaaattgtcagtgaagatgataagagttcttcagcatcagattcaggatctaatcagctatcaaaatctcggagactaacacacagcaaactggttaaatatgcgtccaaatttttggatgatacagttccatttagaaagaagatcaagtggttgcctcgacttgctattgtgaaacatgatggaaccgtacaatgtgatttt

SEQ ID NO: 250666 - DNA, 259 bp, Gossypium hirsutum
ttcctttcttgtggcaaatctgctaacaggcctggtaaatttatctgtggataccatatttgtgtcaccattatcagctgttttgatcttggtttcttattctttgacattgtgttttgtcatggtactcgtagatttttctggggtgaaatataaattttggtcggtttagggatttgttttttacattactgacacatgtacctaataacttttggcattttaattttatttctttatgaactttggctccttttcg

SEQ ID NO: 250667 - DNA, 291 bp, Gossypium hirsutum
aatggtcgatcgacgcgtgcgtccgaaaccgttacccaaaaggaaacctcactaaccagtaaccaacctttggatttttatccgcttttgtgtttagagcatgcagagacaatccttatgttcgccaagctccaaacttccaatccattgtggataagccaaaatggccgatttgctcagaaacgccaaggaatcatcgatgatgatgacagctaagacatcatgactcgttgattgtccttctcttcaacctgctcgttgacatcgcctgctaagcctgagaaggccatt

SEQ ID NO: 250668 - DNA, 154 bp, Gossypium hirsutum
gcggacgcgtgggcctaagggagtgcacgtcttcaccgagctaatgtgaacctggggcattttacttggtgggcatgcccgtgcggtcggactcggattctatgtcggagtcgattttctgggttggtggcctacttcgccggtgtgagcctgg

SEQ ID NO: 250669 - DNA, 312 bp, Gossypium hirsutum
  unsure (1)..(312): unsure at all n locations
aacaaanccganncnncacncnccaccccaaacaaanggcnganccngaaacccccacggcgagggacncagccgcaccaaccacggagccccaccacacccaaacccaaggagacgacacggccgccaaacacagcaaccgcaccggaaaaagaaggccccacacccaacgaacccgagacgcagaccgcaaccgacacgaagagacgcgagacngcgaagacgaccaaaacaaacgcaaaggaaccagcccgaaagaggaggcaaacggcgcggccaaagagaacgaggaggaggcaacaaaggacgcca

SEQ ID NO: 250670 - DNA, 329 bp, Gossypium hirsutum
cattaccattcacggtaccgttctgaactatattttgcataggagaaaaaggcatgcaaagtgtgagaaactagaaaaaaaatagtggttaattttagttcatggtgctgaaagtgtgaagggtttgttgccagcatttcagctccttaatttcgtttcaatgttgggaattaggacccccaatttgaggagaggataaattttgtgcggcgaccccttagaaaaaagaaaaaaaagatggctactgagggctttttctttttaaaccattattggtgaaaaaagagaaagaggttattgatgtattacaaaattcaattctttctagt

SEQ ID NO: 250671 - DNA, 429 bp, Gossypium hirsutum
cccacgcgtccgcggacgcgtggggggaagtcggttgaagactgattttattttcactgccagctacagaagcactagcagtgttgcaaatgttggcaacgatgatgatggtaccgatgcacggcgttttcttgcatgttccatgcggaaggccctgaattctgtcctggagaaggcttctatttcaccggaacactccccattcttgacatttccgaacaagaggcgaaggatctcctacattgattccccaagctcatcttgatttttcaaaaaaagattagccttttcaacgtttggggtaaatggacgacacatccatttatctctgtatggatgtttgtctgatatgcccaaaaattggtttgaaatcaatactattaatagcatgtaattgattccagaagaccagaacgttttcaaactgct

SEQ ID NO: 250672 - DNA, 431 bp, Gossypium hirsutum
cccacgcgtccgcgacgagttctctctcatcgacgaccacgaaactaaccctagccaccaccacgttctccaccaccaccattcttacgcgcaggtccacgcgccgccacccgataaccacaacggcgatgatgactctgattctgctttccgcggagccaacttcgttaacaacaacagtagtaacgcgacgtcctccgatgtacggatcgagaagaggagggaccaagaagagataaacgatggagttttgaagagatcgaagcaatcggcggcgactgagtaccggaaagacagagaagaatggagcgatgccgcgatcgggtgtttgttggaggcgtatatggagaagttaacgcagcttgaacagggggaatcttagaggaagggattgcgaagaggtggctgtggtggttattgagcggtgcgag

SEQ ID NO: 250673 - DNA, 193 bp, Gossypium hirsutum
gagacctgaaattgttcagagcaaaacttacacatgttttattagtaattattgttacaacagttacattattactaatgttatattgtgacaaagaattgaaatacaatgaatgaaaattttgatcttaatgggtttattgtttcggaaaagtccaatattaagaaaaacaattttcttgacaataggatca

SEQ ID NO: 250674 - DNA, 448 bp, Gossypium hirsutum
aaatggaagctatcaaagaaagaaactacatcatcatcatcatcgaagggacgttctttatcatcatcttcaacttcaaattcgtcatcattcatgatcaaaaccaccccgtcatcatcatcaacatcaccaccctcatcatcaaaaacaaaaagatgtgctttcactaggaaatgtgctaggctattcaaagaacaaagggctcgtttttacatcatgaggcgttgtgttatcatgctcatttgctggcgcgaatacactgattcttaagtatttttaatggaggatttaatggcatccaaccaagcaagcaagcaagaagaacaagaagaggaggatattatcaagctctatatataaatatatacacatgtgtataaaggattgggttttttagggttttagaacttattagaacttagattattacgattgttttttcgaattt

SEQ ID NO: 250675 - DNA, 109 bp, Gossypium hirsutum
cgggtgcgacaccgacgtcgtccgacccacgacgtaccgtcggacgcccagtgggtctaccccgtccgcttcggtagtgagacattacgcgtccagaggaggcggcccg

SEQ ID NO: 250676 - DNA, 392 bp, Gossypium hirsutum
ctaatctacctctcagttgaaacaccaccgcccatcatcttttgttttctttcgaaggaaatttttttttttctttctttctaacttattaaacaaacatgggatctgagacaaatgcatcagtgaagacatctgttggcaggtcttgtgttccgaagacgaagggaaaggttcctaaaagagttcacaaagctgagagggagaagctcaagcgtgagcatttgaatgagctcttccttgacctggcaaatgctctcgatcccaattagcccaacaatgggaaggcctctattctttgggaagcaacttgactattaaaggaattgttcggtcaaatcgagtccctcaaaaaggaaaacgcttctttggtatctgaatctcactatgtgaac

SEQ ID NO: 250677 - DNA, 383 bp, Gossypium hirsutum
ctttgttttgctttgaaacaacccaaagatcagaccttctctaaaaccaaaaaaccgaaccaaaacgctaaaaatggaatcatctggacgttcaaggaggccttgtttcattgaagaagataatgggttggcttctcttgcagttatggagtctgggtatgcaggaattcattgccaaactcataagcaaaatggatttttttcaagacctctttgttactcaaggagaagtagtttgaggaatctgccatcatcatcatcttcatctttttattgttcttcggcttcttctccaaggtctggtaggttttgtgatgccagatttgaagaccatcagccccatttcttggatgcttggtttctttgcaagaagcctattgggg

SEQ ID NO: 250678 - DNA, 298 bp, Gossypium hirsutum
agaagtaaaactttttctaaagccttgcatatgaaagtaactataatcacatacaaattttctgatacaacatagtttcctttaaaaaaggaaaaagacttgtgatcataaaattcaaaccaaaaggtgataaactaaacatagcaatcagatttttacaaatcaaattctcataaaaaccaactattattcttcatcccaaatgcacaggctgggttatcaacatacgtatctgcttctggcattgtacagcaaatatctggtctacattcagacttgatggctcttcaatttgacc

SEQ ID NO: 250679 - DNA, 285 bp, Gossypium hirsutum
agtacctctaattctcttgctctttctttcatttccatcccaaggaaaaccatgcccttcttctgggctgcattaacggtcacttgtttttctttttttatattactggctatcagctacatagggacatatgtgaattatattaaccaggtcatggatccgaaattacaatggcttttattttatctagaagacaccttttttcctttgacttatggtatattaagtgaaggtactcaagtcattttagaatttatgatttagaagcttggaaacaagggcaat

SEQ ID NO: 250680 - DNA, 308 bp, Gossypium hirsutum
cagaagttgagttaatttccacgatggctgaaaagagattttggatgagaccaccaattcagatggaatttgaggtgcctaaatagattgctatcttactgctcaatcatgttgaatcaattttgctttggttttaatttctcttgaaaaatatagaaaaaatgttgttcttgaaactattctcctagttttttgatgtacttattaaccttattatctgtaatctttatcattgatgctgtagattcctttttacccttcacaaaaaaaaaaaataaaaaaaaaaaaaattaaaaaaaaaagggcag

SEQ ID NO: 250681 - DNA, 415 bp, Gossypium hirsutum
caagaaactcaccttcaaagcagaagttgaggttcaagcttgtgggagctcagaaggatagatggaagctcaatgacattgacaccaatactgtgcaagaaagaataaattcatggctgacaaagacccagcattttttaagtgagataactttgccactagtgaaaactggtcaaactggtcaaagtggacctggaaagcttgatcctcgaaatgaagatgaagttgataatcaagaaatggaagacattttcatggcagaagggattattcctagtgttttgcctaatggaaatctttttatagctgctattgtatctattgagcagtttatcaggatgaatggattgagtggaaagaatttgtatattatatttagatctcttattccctaaatcgagttcgattatgcttt

SEQ ID NO: 250682 - DNA, 453 bp, Gossypium hirsutum
caaattcctggtgcaactggttacattggctgcattgggaaggacaagtttggggaggaaatgaagaagaactcaaaagctgctggtgttaatgtgagccttctttctaaaccacttaccaaacctctaaaacaattgaaaacttgaagtgggaaaaaaaattatatatataaatggagcgagagagagagagatttgtttcagttccacacagctttagccgaatggttatgcacttctgctatgtccattgaccttcctctttctggatgcatatttattttgagttgtaattttgtatttcttaagatagatctggagctgagaataatggtattattgatgttgtatgatcatgttaaatcaggttcaatatctcgaggatgaaactgcaccaacaggaacttgtgctgtttgtgttgttggtggtgaaaggtaagtttgagaatgacc

SEQ ID NO: 250683 - DNA, 222 bp, Gossypium hirsutum
acaatctagcttctaacttcgcctctttttttttcttttcatgtgcaaaattggtccttgatgtctgatgctagagagtgggggtattatatttaaattagctagaaggggtttcgtgttttgggatttccatttcgggggaacacccaggaaaggaaaattgtggacatcacggctatacacaaactttactcgcctattcttattcattctcgatctgtt

SEQ ID NO: 250684 - DNA, 463 bp, Gossypium hirsutum
caggttcctttcttttctgtcgatccatctccaaagttttattgcttaaggatcctttcaatcaggggcggatgtaaagcctttaggcttggcacttggtgcccatgtgtgttccagagggatgttagcctacaagctaggcagttgatgcccaatttttgtagattaaggtttgtggaaatggacgatcgaatcaactcaaagaatcattctatccagatatcttttggttattttttatatgtttatctttgggttatatggcatgtaataggtgtgttttgttaatgttttgaatatttactacatgtgttacatatgagattgatccaaagatgattaagcttagtattagcttgcttgtgtatgtgcctttaatcatgggtgaatatggtcatataaaattgttttggtcattggatataaacgttatgtaaggatttgaattatggtatgaatgaat

SEQ ID NO: 250685 - DNA, 246 bp, Gossypium hirsutum
aacctggaactgttaattattcaatgactgcctccaacgtcggcatgggcttttcattgcttttagatggcaaatgcaaaggtggcgattatcttcctgatagaggcagttccaatggtgtgagacatatattgacggtagcaacctgtcaagttttatgaatgaaatggattattcatctgatgctgttccgaccacagaaccaagccagacctcattatgaataggcaatcgtaattttgggaa

SEQ ID NO: 250686 - DNA, 197 bp, Gossypium hirsutum
gacaggcctttttacagtacgtgcaccatactgaatcccaggtaatcggcctagcacgtgggcggtgtattttccacactagttggatgcttcagggcagatgtactttaactctcagagtgtggagaccagtcggaactatcctcttgtactgttctgaactctaacttctctttttacatcctgatctcgaacaa

SEQ ID NO: 250687 - DNA, 218 bp, Gossypium hirsutum
gttacctacaagtgtgagagctgcactgagggcatggctaaaaccatatgcaaagagcttaacttcatcagttttagatacagagcttgctgaagactggactgaggcaatggctgctaaaatagagtggtttgcagccactagctcatttcaagattagatggccatctgttcggagtacttaacatcagcacgttgtttatgagactaattctctt

SEQ ID NO: 250688 - DNA, 444 bp, Gossypium hirsutum
attttctgattcccccctcccctaccaaatttccaattttcctccccaaaccctaaccctaatccttcctcgtttttgattcctctctctaattaaaccttaagtcccttcaaaaattgattagtcgtttcaatttcttgttgtgaattccccaaactttcttttttaaattattgaatttttacatggctggtgttgttgaagaaattatacaatgattgggttattggggtttggtttcaattttatggggtttacgaaatgcctctggttggaaaaggagttagtagacgtcgcgccacgttagctcaaccgcaacaagggggaaaacagacgaggcggagcatccgaggtcggaaacgtgcggctgatggagaggtaggttggccgaggactagattggctgcttaaaggactaaggtggaggattaagttcaggtgggg

SEQ ID NO: 250689 - DNA, 245 bp, Gossypium hirsutum
tgtcaaactgaatggttcgaatttggtgaagactgatggttatagtccttcagtcttactaaagatttgtgctgagaccgtgatctaattaaaccataagtccctccaaatattgattagtcgtttctatttctggttgtgtattccccaaacttttttttttaaattattgaactcagtacttttttggggctgatgatactagatatacattgattgggttattggggtttggtttcaatttt

SEQ ID NO: 250690 - DNA, 407 bp, Gossypium hirsutum
gtgaaagctctcaaaatggccctactcttgaaattcaaatccctgctgagcatgttactgccacaaatcgtcaggtcaggggtggccagctatgggggactgatatatacacagatgactctgaccttgttgctgttcttatgcatactggttactgccgtccaactgcttctccacctccaccagctatccaagagctacgtgctactatccgtgtgctgccaccacaagattgctacacctctaaacttaggaacaatgttcgttcccgtgcttggggagctggaatcagttgtagttatcgtgttgaacgatgctgcattggtaagaaaggtggcggaaccattgatttggaagccatccttacacattcatcaacagtggagcccaccccttgctccagttgc

SEQ ID NO: 250691 - DNA, 183 bp, Gossypium hirsutum
cgcgttcgaaaaaacaagtgttgactatcttcataagaatcaatgtatggatgggtcggatcagcttgaggggacttctcagcgaagggcaagttctctatagtcatattgttgcctagatggagacaattctcctacagtgagactgtgttctacattataagttctattttgtttttttat

SEQ ID NO: 250692 - DNA, 321 bp, Gossypium hirsutum
atcgacttgtgatctcgaatatgtccaacatgtttgtgcctaaagggtagaccgcacttcaaagatgcggaaatctgtggacactgtggacacgtcatatactaacataatcttgttcgagcttgtgaaatatgcacatgctgtaatattcaggcatcatctgtcaggaaaacatgtgaatggcatagatttttctcacataatgtgttattaaagcagtaatgctacagaaaatatctatcactgggcttgtgggaggccaacatctctacacgaccgaaccagagacagtgttgttgatgatttccatgaaaggtatta

SEQ ID NO: 250693 - DNA, 124 bp, Gossypium hirsutum
ctcactggcaaattctattggtaatgccaatttcaacattgtctctcgaagactttagatggggggtgtatcaaaacagcagtgattccacacccatagtcaaacatattttgtctttcgcgaa

SEQ ID NO: 250694 - DNA, 233 bp, Gossypium hirsutum
gcttttgatcaatactatttttttgtgcgtctttttgcttctctggctcatattttctcgagattttccttcttagattgcttgaattatggcttcaaccttgctactggttctggattttgtgattgaacttattgctttcgcccttgctgttgctactgagcattgttgaagtactgccactgttggcatttttgggaaagaatgtctttagagttatgttgaggatattg

SEQ ID NO: 250695 - DNA, 179 bp, Gossypium hirsutum
cggacgcgtgggcgagatgttatatagccctttcattcttcatctctactggcgcactaagggtggctactagactaacgccctacaagcacaatccatccctcatcaaattacggatcccagtagctatatttgagggaatgggcatgcagcactgcttcatcattgtgagcgcatgt

SEQ ID NO: 250696 - DNA, 232 bp, Gossypium hirsutum
gccgcttcactcggcggtagcattgttttatgccgccgcttctcttttcgccattgctggcgccgaagatccttatatgttctacagtgtaggttgcctagcgcttgctgtggtggtaagccatgctgctctctcacctgagcaatattggagctataagctgccaaatactccaatgccaaaggctgtctttgaaattctacatccagaactgatggaggagaaaagcacc

SEQ ID NO: 250697 - DNA, 210 bp, Gossypium hirsutum
cacttggtactcgaaaactgaatgatgcaattccgaacttcggtgttcaaacgccattctttaaaaaaggagcttatggtttgatcgaattttagtgtaataaaaggggtgataaatactatgcttgctttacaatattacaggtatgggggaggtgtctgttgttttgtagtatgatgtagttgctgttgctcatatctatttaaaagt

SEQ ID NO: 250698 - DNA, 265 bp, Gossypium hirsutum
  unsure (1)..(265): unsure at all n locations
ctaaaagccatcaaaggagtagggaaggtactttgcgaaaatactctcttttcaatccctcgtgtccactgttttcatcgattcagtataaaatttcccaaaagttttcgattcatagaaggaaaacccaaaaaaccagaaacatcaaccacaaagcgaaacgatgaaggtcatccctttaattttgatgggttgaggaggagnntnacnccaactacttcatctcatttgtttctgcaaatcattttactccaagcttggtttt

SEQ ID NO: 250699 - DNA, 198 bp, Gossypium hirsutum
cggacgcgtgggttaaactatttgttgtttttctttgttgggaacatatatattaaatcttccactatttgtcttttgttctactagtactagtaggaggaagcatgtctacctactacgttcttgaatggttggcctgtattttatttgttgagcatgcttagctactactctagctcttgaatggtttataaatat

SEQ ID NO: 250700 - DNA, 230 bp, Gossypium hirsutum
  unsure (1)..(230): unsure at all n locations
gcggtggcacacgcggtcagtccactgtcacagcttgttcatagcgtgtatgctattagggcatcattggtgaggcttgaaaaacagatcggagtgtaagtaactttgaccccataacgtacagccctggacgtatgacatatgtgtattcttttcgctttaggcctttttggtacagttttggtaatctcgacacatacatctatttanaatattaatattttatatat

SEQ ID NO: 250701 - DNA, 507 bp, Gossypium hirsutum
  unsure (1)..(507): unsure at all n locations
cgcctgcagcaccgctccagtattcgggtggcgacccacgcgtgcgcacacgcgggcggtctactgttactctgaaattatagctggacatagaggaagagcagctcagctagtctataaagggtcactagtaatgtcaggaactcagaccccaaaacctagcacactggctgtaacggccagtcgggagtgcgggaacccacacctcatcataaggaaatattgactgatctgttgcaggcagtgctttcgtagcaatgccaaggaaattggattcattaagtaccgctgaagaatttatgttgggaagaactttgttagagtatgagcctttggtaatgtgattattgaattagaaggataatgtttattgttttcagtctggacatctaaagtggttgttgaactaaggatactttggtgtttctcaatcaagtaatcatactggtttttttattnnannatataaatattatttttatttttatttttttttttattattata

SEQ ID NO: 250702 - DNA, 357 bp, Gossypium hirsutum
ggtaaaaaacatgaaacatgaggggattctctaatgaaaattacaagacaagtaacagttgttcataatcttcaaactctgaataaataaataaatacctatattattcaaatcaccacaaatggttaacacttaatgactggccgattgatcagtcagcaatttaagtgatttctttaaactctcaactgtctttctcacttttttttattctaatgccctaatcctatttcctaacatctttgtctccacatctttttttttcatttcattcacttttttttattcaattatatatttttaataatttttttttactatctttctattatttttatctattttactttctttatt

SEQ ID NO: 250703 - DNA, 252 bp, Gossypium hirsutum
ctgagggaagatgtgagtgtggaagtggaacttttgtcagtgaagaaaattcctctattttttgtgacgcctttaagttctggaagggggactaatgaccatgaaaatgacacagaaaaaagtagcattgcatcgaatttatcgtcagatgaaaatgatgatcaccaccaaagtaaccttgaagatttacctctgtcagttttctttccttcttctgaaggtgtacctttaatatctccttatgagaatgaa

SEQ ID NO: 250704 - DNA, 421 bp, Gossypium hirsutum
cccacgcgtccgcttaaattttgttcgtcaatggcgaattcccagttgcagaaatacgggacattatcaagggagcaattgtcatatctatttgatcgattctctcttcttattgcccagccagattttaagaagaggattctagacgctgtgaatgacaagcaggaaccggttgctgttaccacggcagttcaggaagagatatttttggagatgggtgttgatccaagtttcggtcttgcatgcctggggaaagtaaatatgacttacgagaatgatcaagatttgatgattcgttattatagatttgttgccaatgaggagttagcctgtgatgaagctgagcttggacctgagggatttgctgaaaagcttcatagtcaacaaaaacttcatgagcaagatctgtggatgctaaatt

SEQ ID NO: 250705 - DNA, 186 bp, Gossypium hirsutum
aacttccctccaccccccagtttcgctgttcatttacaatggcgattgtgaatatggagatggctgtggttatcatggcagcgacgctcctacggaaattggcagcatcacaagtacaccatgtggacgtaggtgaccgtgtgaggaaccttacgtctgacctgtcatgttcagtccttccgtagg

SEQ ID NO: 250706 - DNA, 338 bp, Gossypium hirsutum
caacccccatcccttcattcattcatatctgcttttctttacgtttgttcattcgattttttctttgggttttctttctttttgatccttttgctattttgggtggtgaaagattgaagaattttgatcatgtcgatcgcgttggaacggatagaatcggcggggtacgggcgggtaatgaattgcgcttgcgatagctctaaattcgaatcgccgacgacggtttaggaagcgaagcatttgttactagtggccaattgctttttgtgaagacaagttctataatctattagagactcttttctctacctaatgaggctctcctatataatcttgtt

SEQ ID NO: 250707 - DNA, 362 bp, Gossypium hirsutum
accgtccgattcccgtcgacccacctccgatcctgatgatgatggagctggaatgcattatttaatgattcaaactatgagggtgatcaaatgtctgtgataggacatgactgcagctatagaaagtcgccaagagatcaaggcaaactaaaacttcagcacagaatgtggctttggtatgtgtttgacgtgttgcaagacatgaggtgctcgaattcctaatagtttaagtatatagcatggattatagaaatcataatgatatttggtaatctttgcggagtgctcttttctaagtgggtttggtttttgttgaggatgtctttccagttcggttgaataagattgaattttttgtcttt

SEQ ID NO: 250708 - DNA, 417 bp, Gossypium hirsutum
cggacgcgtggggtaggtagtagaatcaatctgaaatcaaatctttcagttttagaactctttgtctctgaaaagctatgtagtatggagtctagtctagataggcacataactcaaatacacctttctttctcgattcattcattgggcgggcggccgaataaaccaaaacccaatcaggaaaacataataaaagaaaggggctgttgagatttgagaaagcgaagcagtcaacaaagctaaaaagaaaaagaaaaactcagaggaagaagaagttaaaaggaaggggtaggtcgggcatcttgatttggtttcctccacctcaagccttccatgctcccctcagccaacaacagccctaccggaatccaccactttggcggcggcggaggaggattctggtccgctgtacccatg

SEQ ID NO: 250709 - DNA, 311 bp, Gossypium hirsutum
agacaagagaggtatggcgatttcaaccacagagtcgaagaacccatcacattcgatccgtgagaggggactcccaagaaaagtaaggctgctaaaatactataacatgcacataatacttcttaaatagaaacctctttaatatccataagccacaatataaaaacactaaaaagtcagatcctctaatttggtttctcagcttcattctccaatggcagagcacaaaatgtatattattcaaacagagcttgtaaaccacaaaataccacgagaactatggatctctatacagggaaagatctacaatg

SEQ ID NO: 250710 - DNA, 387 bp, Gossypium hirsutum
  unsure (1)..(387): unsure at all n locations
cgtccgcatgatcacagagagtcctacactgcgtctgagatacaactcttttcagcgttaaacaaataatggaggtttctctgtatatgcacgagcctagaagaagagtgtgagaagtaaggggaaaaggttnnctctctgcaggaatttggctcgaaggggggcactggttaggtatacccgagnnntttgggtcttaattacctgcaagggatctctcaaagcaannatggttggtctaactnnnaagctcttgatctaaagatcttgaaccaaatctgcttggaaaggaggaaatctggagagcataatntgaggggaacctcctatgctctttacaaagagaaaaaccttcttatagctttcggggtgtgggagatgatctac

SEQ ID NO: 250711 - DNA, 352 bp, Gossypium hirsutum
cccacgcgtccgatggttttggaagtagcaaacatttataccatatttgcctgaaactctcaggctttagataggtactacttggggtgcagtaaaagaagggggaaaaaacaaatggcggagcagtttttcgtgcctgctcttgatcatgtgctttgcatgcgagttattatgatgggtatcgagtcttgttcttgttgtggcagtttttcgaatgtaaaatatctttgtatttatgattactttatttatgttattttttgattatatttgatatttatttttaattttttttataatattaattttttatgtttatttttattatttgtttattttattttttttttta

SEQ ID NO: 250712 - DNA, 272 bp, Gossypium hirsutum
cgtccgattcccggtcgacccacctccgatcattaaagatgcaacagtagtaatacatttgaggggaacgatttggatagaatcttgcaggccactagcagagacgggcgtgctatatgtcatctggcagggagccctcagtcgttcactttacctatcatccaagtttacatttccataattctactgctacaagaattaacaaagctgccaaagtctaccacccactttgcacctgggactgttgctatggccatttctaatgtaaaatt

SEQ ID NO: 250713 - DNA, 265 bp, Gossypium hirsutum
gttgcattttatcaacaacaagaaggccgccggtcagcgttgaacccatcgcctgtagattcagaaatgaattgaattcgattcgattaggtcagatcggatctcccaacacaagcatagacttgatccgctgctacgtttctctttctctacgtagaagctggtttctggttaaggggatcgaatttataaactatgggagattgggtcattggagcattcatcaacctctttggcaggattggcaataactttgggacaaacc

SEQ ID NO: 250714 - DNA, 274 bp, Gossypium hirsutum
tccaaacaaattttcgcgagaaaatgattcaatctctgtgatttttttttacaaaactctaacggggcaagacacagtacgatgaggtcgacctacgacctcctcttgaacttacaaaatcgaaagctttcctcatttctttcatggaaaatccagaacaacgagaccaagacaaaaccctaatttgcgacccgacgcaaatcaatgcaacacatgaaaatgagaaaataatctaatgggaagatttcgggcttgagcttgctagattgtggag

SEQ ID NO: 250715 - DNA, 299 bp, Gossypium hirsutum
  unsure (1)..(299): unsure at all n locations
gcatgcatgattngtagatatgcacatgagcatagtgtgccagcgggaaatagagttacgaaacaatgatggcaaggggacagcatatggagaagccttccggacattacctgtactcttatgttagcgagctgcgatgcataaaggtgtcctttaaactattattgcttggagagtttttcgtttcacttctctgatactcgccctttttgtaatctgtctactattagctatcttatacatattaagtttctctatttgtacttctcttggtcatgccatctttgttgagttttatt

SEQ ID NO: 250716 - DNA, 411 bp, Gossypium hirsutum
aaagacctgggatacctccttcacaccccaacatccctactgcttcattgccttattcgcaacgagatgattggttctcgtcccagtgctcaacatggagcacccagtcattctaagtctttatctcagcccaccttcttctcccttgatagattgccgccatggtgccctcccccttatcgagatcctcctgtctcgtctgcctcagatcctgcttcaaatgatgtttctatggaagaaaggtttgccaattctaatgctaggtcctcacttccttcacctgttgctggaggatgtaatgaatttcgcattggcgagagttcaagtctacctccgcgtaaaggacataggcggtctatcaacgatgttccattaggattcttactatgattcaatctttgcctaatctat

SEQ ID NO: 250717 - DNA, 426 bp, Gossypium hirsutum
  unsure (1)..(426): unsure at all n locations
ggtcgaccacgcgtccgattgctgtgcattgctattgcaggagttttgggtttatgctcctagtaatcctcctacgtctacgccggcgccacccacaccaccggctgctactcctcctccgacgactcaaccaccgcctacaccaaccgccactccgccaccggtttctactcctcctcccacttcatcaccgcccccagtgacagcttctccacccccagtttcaactcctccacccagttctcctcctcccgcaactccaccacctgcttctccacctncagcttctccacctcctgcaactccacctncagcttctccacctnccgccactccttcaccagcttcttcacctnccgccactccaccaccagcaacccccccacctgcaactcctcctgctaccccaccaccagctccattggc

SEQ ID NO: 250718 - DNA, 397 bp, Gossypium hirsutum
gcccaccgtcgcgttttggccccgtttatctttctggacccatggaactctggatccaagtctcaaaatatgcgaatgggggtgcccatgatgtgatctggtgtcttgaaaaaggtaatgatgcagatgcgctgttgtactgttaaggtcaagttcattttttttttctatttatttatctattttttcttttatctatctcttatttatatgtatctttctttttttttttccatctttatttttttattttactattttatcatccttaattttatttttttatgttttttatattattttttattatctttattatgtaaattataattaatttttatatatttttttatttcatttattttaattttatttttttttttattattttttatta

SEQ ID NO: 250719 - DNA, 199 bp, Gossypium hirsutum
ttccactcgaaattcctcagattcagaaatcagaactatcttcctctctctctctaaaattcgttgtgtttctctctctagaaagaagtttccatcgtcaattccgccatggacgcagcaacgccgccgtggctcgtctactgcggtgtcgatcccctccgcttctctttcccgcgctctaacagagtatctattcgta

SEQ ID NO: 250720 - DNA, 161 bp, Gossypium hirsutum
gtctcgtgaagctcgagcacaagcagatataaagtttacttatgttgtttcatgtcaaaatttatgggtcaaacaaaaacaagaatagaaaccctgaggctgttgatattgcacttttgctacagagggaatgaaagcccttcgagttgcattcatacatg

SEQ ID NO: 250721 - DNA, 452 bp, Gossypium hirsutum
gaaaattcaagttgcagacgtaaatcgggaatccatgttgaatagactgaaattgcagccacctgatttcagcgccactttcatcaatggcgcgtccccaactaacatcagcccaaaccgtcgtgtccgtaatctccgccttccgctcctccgctacggttctccttccgtccgatcggagtatggttcagcttcgcctccgccgccttcatcattatctgagccgtcggtttctactcattatgtctcctccgtcggatctccctctctccagctctctcaatggtcccttaccaatcgccacatcctcgtgcttaacgtcgtcgcctgcgctgtggcagtttcagcaacttggctttttctctctgcaatccccgcgcttctggctttcaagagagcagccgagtcactagagaagctgatggatgtcaccagggaagagcttcctgata

SEQ ID NO: 250722 - DNA, 229 bp, Gossypium hirsutum
gtggcacttcacgtgattaccttgcaaagctgcttttctggtgtatgctattaggtcatcatttgagaggcttggaaaacagatggcatctaatttgtgttgttggattactgtaaagtaagttacgtatgacatatgtgtattcttttcgattttggtcctttttgctacagctttggttaatccgatgacatacatttgtttggattaacgagattcccactgtccc

SEQ ID NO: 250723 - DNA, 473 bp, Gossypium hirsutum
cgaggaaaaaaagagaaagaaatcgagtttccgagaaaccaaacggagcctgaagggttttcttttttgttgctaggaagatgcaaagcttaggacctttacgacctcgaagcacagtgctggtgaagcgtccttggcttactaaaccatttaactggagagcactctcgtctattcctcctcctgattactccaaccagtctcgcggtggcctgcctcgcttcttctctgaaactcttccttcttccaaggcaaaatcttctctttattcaggtattcatctcttaaccaccactcgaaatcttttttccaattgtttgcaaatttataaatgcagggcggtgttattcgcgttcaaggagatgaattttgcatatgactaaagtttaagattgaaactgacgaaggtgctgcttgcaatattccatgaacaatttaattttcatccaatttgaactgtgttttttttttat

SEQ ID NO: 250724 - DNA, 358 bp, Gossypium hirsutum
attaatattactctaaccatacaatgtgggaaatactttgtattatggatctttctattttttggatatatcaacaaaaaccttttattggtaaaatggtttatggtataaactaatatatttattggtaaaaatggtactattaaaccttattcaaataaaatattaaaaaatataatttaattattaaaataatatttgaaatattaaaatattttttattaaaatagtatattagtattaaattatattaaataaatttattattaattattgaagtttttgtttaaatatattgaaaattgttatattaaaagtaattttacattaatgttttaatatttcaaatgttttaaac

SEQ ID NO: 250725 - DNA, 124 bp, Gossypium hirsutum
agctctgcattcatttaatttcttctgctgttcaaagatgtcgtttatccgaaagtctttgccgattatcagtcggtctcaaaagctctcctccaatcattcgaggttcaatatcaaatacggg

SEQ ID NO: 250726 - DNA, 406 bp, Gossypium hirsutum
attttcttcttaagtgaaacaagttttttattcaaaagatccaactgatgagggttggtacgttgtactccgaaacacccctagagacttgtttgacatgggcaatggaagtaaagatgacatcgtcgaaagatcagaaacttttccttttccagaacaaaacttaaatgaaaatatctctagtactagtacacaatttcaatgggttcgccaggatgtggatgaagatatttacgaattatgatgtaaaaaaatgcctagaagaagattacgagatccaaatattgttcagaatactccaaattcaaaagaaacaaatagtgaacaatagactgctattggatctttgaatgttctggaaacacctgatatgcctgtagaaattcaaactgaaaggtgtgggatg

SEQ ID NO: 250727 - DNA, 210 bp, Gossypium hirsutum
ctggaggcaatgcgccatcctctgaagaagcattcaatgatacatctactagaattaagcaatgatgctttcctgcggcagtggaagctgcagttaagcctggaccttacattcataacccatacagtgagatagagcatgctggtatcggccacctagtcaggcaccagtgcaccggttactcaggttgcctctagcgacgatgattct

SEQ ID NO: 250728 - DNA, 344 bp, Gossypium hirsutum
attttattttttatttagtttttattaattttctattcttcctgcttttctcaacctcattgagagcctatacgaaccccaagagctcctcatctcgttgtttttaccttccatttgaactcaagttcgtcgtagttttctactctctatccatcaaagatgtccaccatggaaagctgtaatccgtttagcaaacaggatccaacgagcacgtacggcgctcggtgattacgggggccgggacagcaacttgtccgcttattgaaaggctgtaagatcacatgccttgagcaaatgttccttctttctttccctatcaaggaggtcccaattcatttgaccaa

SEQ ID NO: 250729 - DNA, 229 bp, Gossypium hirsutum
gtactgactgggaacgggtggcttttaggccttgggggggcgacgaacattttattcataactgttacagacaatgggaattctactgtttaatttaaacaaatcattgtgattggtccctgttgattctcacgcattttgatttctgtccagagctctaaatgttaaagggaatgatagacaaccaaactttggtaaactgtttttttatactattattttctaaagg

SEQ ID NO: 250730 - DNA, 145 bp, Gossypium hirsutum
gaataaccgttcacccaccgtcgcggaccgtgggctttaaagaaccaaatatctcttcttaatgccagaggacctacaatagactggttttttagaccgagcagacgcgctttgaaaagactggcacagtctccaaccaattctt

SEQ ID NO: 250731 - DNA, 417 bp, Gossypium hirsutum
gagttatcagtgaacttcatatcggcagtttctgaagaagtttcttctgatctgcatgctcgagttatgaaagcagctcgtggaggtatgctagatgaaataatcagcactatgatctcagagtttgttgctgcaaaaaaatctcagagacctctaatggttgaatcatacaaccaggatgctaaaagttctgatgggaaactgattaaaaataccacggaaagaagtatacattgtacttccaagtttggcacagcgacctccgatggtgtatctaatatttctatcctagaatctacaaattttgatgcaagtctaaaatctgttggaagccttgaaaacttttggggttcttatacagttgttcttaaaatgctttttgagtattgcttcaagtttacgtggaatgctgtcttt

SEQ ID NO: 250732 - DNA, 431 bp, Gossypium hirsutum
caaaaaagcaaagaaaagatgctccctctcccactaaagttggtacgacaagccattacacatcaccctctccttctctcccaaaatactcaccaccgtcgccgccgcagtcgccgtcacgatcaccaccaccgtgatcttgatgaagaagaagatgatgatagtgaaaatgatgcttgcaattccaaacccagctcttacaatttttatcatcattcctcaaaaccaacgaaacccaaatccaaaaccccatttcttttttttcttcctactagagaactcatcggtgatacatacaggttggccaacatagctagagaaatgggtatggatttgtaccctactccttccctttctcacatcattttctctttctcttcttcccttccttctccttcctcttcttcctctatttcttctgcttcttcttc

SEQ ID NO: 250733 - DNA, 307 bp, Gossypium hirsutum
acgtagttctagatcgcgggcggctcgctcgcgatctattttttccaaaagaaaccccgtttcacatgcaatggctttgttgcacttatggttagggtacatcacctctacctttctattcactgtagaccaatcctattcgccggtttctcaatcaaatcctaccattaacattctctatttctatttccgaccatatgctatctaatcgccactgttgcataccccatctacgcttttgaatcaaggaagcttgacgagagcacggttccaggtgatcaaggcatcaagtgtaccccttcatgcg

SEQ ID NO: 250734 - DNA, 466 bp, Gossypium hirsutum
cttgcatgttgagtgctatttggatcacttttctacaagtgagtgcttcggctgcgaaggcggagagaactctatggtgaatctctgtgcatgacaggaggacgaaaccttttctgtttctgactactatcccagaagccgattgttggttgcgctcattatatgctccgtcaaagtttattttcactatttgaccaggtgggcgtttccatttagtattctccttagaaactatagaaatagtgctctctaaaccatccatttcttctaagtagctatgaacaaagcatgcaatttcctgactagatctgtttgttttatcatgtattcgagcatttctgtccccccatatggcccataatgtacaacaaaatagtctataaaaggaggttggctggtcaacgaggaccctggtaagccactgttcgaactctaaatttgtttcctgtaaaatgttaacagccga

SEQ ID NO: 250735 - DNA, 417 bp, Gossypium hirsutum
ccccaacgagaaaccggtcctcttctctcacgttaaacctacatttgccaacccgaaagccttcccttttggctttttcttcttatataaaccacattgcaattccctcacctctttgcttcactcagataaactcgggtcttcttaaacgaaggaggaggatgcatgtggtttcttatgctctgtttttagttgctctgtttcaatgtagattcttggcttttgcaattttagacccaattgattttttggctttacaatctattagaaagggtttcccatgatttggctggctctaattttttggcttgcttgggatttatcttccgattcttggtacttttttcgacgtatctctgtgctttctgatatatgtatatgttcttaatctttctacgcccctttttctcgtttttt

SEQ ID NO: 250736 - DNA, 194 bp, Gossypium hirsutum
ttttatctacatttgccatcccttaaggcgggcctttttgttttggggggtggtaaaccacattgctgcatttttacccacatgcttactcagataaactcgggtcttctcaaacgaaggaggaggatgcatgtggttccttatgcactgcttttagccgctctgtttttttgaaatttttggataatgcatta

SEQ ID NO: 250737 - DNA, 420 bp, Gossypium hirsutum
cccacgcgtacgcccacgcgtccgattttccttcactcttctcgcgcattttagcaaaaatggccggggagccgatagccgaagccaacgaggagagccccttcggcaccttaactccggacgaattctatgcccgacactcaatgagtcactcatccgagttcatcactaacgctgggggtctgaaactcttcacccagtcttggaccccactcgatactccggtcactggaattgtctccgatccccaaagggttacagtctagtcgagctctgatcatcaatttactttttctcttttttatatatcacattttttccaccgtttaatcgattatattttatttagttcttgtttgttccaaatttttttatccttaatttgttgtaaattatttttcattcatttttattttaata

SEQ ID NO: 250738 - DNA, 497 bp, Gossypium hirsutum
atcaatcctgattgacacttttcaagaatcttttgtatgtgcgagtgcaagatatccacattagtatctttcctaccaagagtggttgccttttttaccactattcctatcaaaatctaatttttcttctttctttcttactaattttttttcacatccctttttttatatttttttttttagcattatttttaataattttttttatcctatattttatgtaacttctttttttttattttttttcatcttttttatattctataattttctattttatacctttccccttttttcatttacatttatccttcactatctttttcaatttatttcattagttttttctctaataacctttttttacttttatattttttttttatatatttttctatccctcttttatttatttatttatttatttatttttactattataaaaattttatatttatataatttttttttcaaaattttttttatttaataatttt

SEQ ID NO: 250739 - DNA, 384 bp, Gossypium hirsutum
taaccgttctcctgagttcatttccttgtttgatgatgacaagcttcgtaaaggtttgaaatgagtcagttaggaggatgtggagatctttctcgacaaaattcttatactgatcctatttctcattgattttgatctcttttttatgcaaaacaaattttacttaatattttccacctttcttatttccatattttttttacattattttttttttccatttttatttacctgttttatttaagaacttttttccatacaattttttcctttttttttctatccatgcttttttctaaaattttttctcactttttttttctcttaaattttttttcccctttattttttttcttcctatctttttttctccgattatttttt

SEQ ID NO: 250740 - DNA, 337 bp, Gossypium hirsutum
gccaccaatggcatcccccccccccttttagctagcattagcaatgcccccattactagaactgtctttggctgctcgaaatgcgatccccatttttatcttcttcctcaaactctgcggcagcagattcttgtttttttgggtttcatgtcattctaaaccaaatggtcttataactactaactcatcttttccttttcttcttaaaactttctcttcacaatctgtacgagattggtgggttcttccttgggattttcaagttgcattttttttattctattcaaatttcccatttaatggccgcccgggccgcttgtaaacgggtgggtcaaat

SEQ ID NO: 250741 - DNA, 386 bp, Gossypium hirsutum
  unsure (1)..(386): unsure at all n locations
anggacttattctcatatatttgatattatgaagagccgaacaagtgtgatatagctagaggcatatctgtaattgggatagatgggagaggaccctcattttccctggaagctcagagtgcctcaggaccttccgttgagcctctttttcccttcctttatatcacaccgcccaattcncttcgccagaccgcttctcaaatggacccttccacttcctgtcgctccagttgttccccccatttcgagctcagcagnccggggaccgattatccccgaaagaaggaagatgagcgaagatgcttttgaaagtaaaaggaatgggaagttggaatgttccaatacgaagtcgcagctagtcaaggtttaagaatacggccacggcc

SEQ ID NO: 250742 - DNA, 289 bp, Gossypium hirsutum
ccttcaccgcatttaggagggggtctatttccacgacagggagtgtatccgtccaagattattttttggaacttttccaacccctgtcgaaccaccacacagtttccaagatttttttccagaaacatttgaagttcaatgttttcaatcataattttttacaattttacaacacctacttcaatgacaaaccttatataaggtaaataccaaaagtttctttttatgtctccaacccccaaatttatttatgctctacccttatttttcatggattaaatcattcact

SEQ ID NO: 250743 - DNA, 294 bp, Gossypium hirsutum
gtttacttttgcttaaattatagagagaaaattcgattcctaaagatcgaaccctgttttgagtttcttatggggttgggaagcctacacaaattttctgggaaatgaaagataagataggaaaaatagtcacaaatgtgcagctttatccatatgaccttgctagaggccaaactactgatctgaataccatagacaatattaaattagtcccttgaggcaatgctgactttcttggagactaacacgattgggagaatggagaagttgaatgctacttaaattctatacata

SEQ ID NO: 250744 - DNA, 174 bp, Gossypium hirsutum
gcgtccgcccacgcgtccgaaaatggatggttattgtagcagaagggtaatcatgtaatcggagacagcattggcatcaataaacagaggggatggtcacgaatcaaccactcttgttcctgcaatcatcacctttggcgactcttgaggagatgtaggcaataatgactatct

SEQ ID NO: 250745 - DNA, 205 bp, Gossypium hirsutum
  unsure (1)..(205): unsure at all n locations
gtagtctctcaaggacatcaccacctccactcaccttcccatttttctgtaacaccccccaaagagcttgtgcttggatatggctgaaaacgcagtaaaatggctgtttctcattctagcaagctgcctgtgtttcgctntcgttctgtcagcggttgatagagcggtgggtgatggagtgaatgtgttgtcgttacctttgggt

SEQ ID NO: 250746 - DNA, 395 bp, Gossypium hirsutum
ctctacgatgatgttctgtcgtcttctcaccagttttttccatttccgttttctgcctcttctttgctccaaattcctgccatgttcttccttctctcaaccccatgcactttacctcgtccgtttcctctcaaccaacaacaatgacaataggaaagatcagtcattttccaatccctggaatttttccgaagaagctaacggcaaattcgggaatcttttccccgatgaatcgcaaaagaagagcggggaaggggattggttcgttggagaggaagacaaagcgtggagctttggagaagaagacaaagatgatggcgtgtttgattttaaagaagaagctgtacaagatgttggtctaaccattgatggtaccggtattgctttgggtgctg

SEQ ID NO: 250747 - DNA, 454 bp, Gossypium hirsutum
  unsure (1)..(454): unsure at all n locations
cccgtaatgtcccgggtcggacccacnngcgtccggctattactnttaaaagaaattcggtcactttactttaaagaatgagtattgnnnagctttctggagaaatcaaaaaggagaaaccgagaggatagagcatcttaatggctatatatnggntcaaccagatagtgtgcannatcagcagtatggaaggggaatatatganngatcaagctccatgcctataccaaatagaaaccagggtttcatagacatggacacagaaaaaagcctggaaaatatcgtaagcaaagtgggtgtggcaaggagcacttggcttcttgatgacctcagttttgccgactacaacaataccaacaagtcatgtgcagctcgtctaaagtaacagattctgatcaggccataggtttactctatggattatgtgggatatcactatcgtatatgacatata

SEQ ID NO: 250748 - DNA, 461 bp, Gossypium hirsutum
  unsure (1)..(461): unsure at all n locations
taatccccgaaattctctgttttctaatccctggcttcttctcagtttacatccgttttatttttgacgccctaatttgccctctgtttcctgggtctgtctctctttatctccttcaatgcttgcttcgccttcggccagtagccccaatttcttgtcgagcatgccatagagaaaggcaagaagagagctgcttctggttttctttctttggtttctggaacagacccagaagttttaacccagaagccccaaattcttctcctttctttctttggtttctgtaacagacccagagactttagattgacgaggttgncggaagctgtagatgcaacaactccctctcaagcttttaaccgaagatggcagagagttacctctttctcttctcttctatctgatgagggcatttttcccgtcaatgcaatcccgccacaccatgctctctgcccaatctt

SEQ ID NO: 250749 - DNA, 106 bp, Gossypium hirsutum
  unsure (1)..(106): unsure at all n locations
attttgttccccttccttgcagaaaacaaaggggagtttttccctcccgactcagncacttgctcactgggccacttacctcgggctttcaacggggttattcgga

SEQ ID NO: 250750 - DNA, 174 bp, Gossypium hirsutum
cacccaggcgtccgttaccattttatcaaaaaccaaatcagtaccccaatttcattttctcaaactcgaaaacaccgatgatcgcttgttgttatacaaggcaatttcctccccaacagccccactgaggtttgatggagcctagaaagacaatgaaactgaacacaaaacaca

SEQ ID NO: 250751 - DNA, 425 bp, Gossypium hirsutum
ctcttttcttcttcttctacttcttctctctctctttctttttctctctctctcttttaattttgcgaacgaccaaaccctaaattaatccctctgttaattcgttttcgcgatggtttagttcgaggtttttcttcagatccgatccgcctcagatagataaaatgtctgctccttcatctagggagcgcgcacagcgtctttatgagaagaatatcgaattggaaaaaaatcgtaggagatctgctcaggcacgagtgccttcagattccaatgcctggcagcagatgcgtgagaattacgaggctataatttttgaggaccatgcttttttcgatcagaccttttttgtttttcatttgtggatgtttcattatttgcggtttgatgaactgaatggtctttttcgagctttagtatcgtct

SEQ ID NO: 250752 - DNA, 403 bp, Gossypium hirsutum
aaaaaaccacagaccagagtagagaaaaaaagaaaatatatctagggagggagaaaaatataaaggcaaaaggcccaaactattaaatctaaaaaaaaaaattcaatttttttctttgtttcttccttgaatctctatgtatgcatgtcagctcggtaatggttctcgagtctgaaagtccatgagcttctgctttttgtttttgtaaacagaaaaaaatatatgaaaaaatattcggattggaaaatgtgcgcaaagtatgtacagcatgctcaggagttgatatccaagcttgactttccttctttttacaaagacgctattgttatgctcttaaagcatgctgctacatgtattattgagcttgatcaatctgctccatcaacaacagtggaatcaatgc

SEQ ID NO: 250753 - DNA, 220 bp, Gossypium hirsutum
tcctttttttttttttcggttaacaaaccgaaaattaagaacccttttcttttacattctgggggaatttaactaaaagctggatcttatgggggcttctttgggttttccgtgcccaacttttttctttatcagggacaagaaagaattggggggctctggttttcctttaacatctcaaatcggcattcaaaaatggaagaaacaagcctcgaagaaa

SEQ ID NO: 250754 - DNA, 469 bp, Gossypium hirsutum
gtttcagaccccaaaacacctttggaacaaccaagacccatccctacgaaacaacaactacaatgttacccgaaagacaaggcggaggtgcaccccatggaataatactagctgtggtggtgggcatcgtggtcttagccccattcttgttcggcgatcaaggcgaagccataactgaagccatttccgagctcttgactcccctcggtctcctcctcttgcccatcatcctactcctcacaatccagttcctttcctcagatcgcggctccttcgtcttcgccgtcttttccaccggcgaacccgacaccatccaccgcgtcagcggctctccctttggggtcgccttgttccttctcctcatcttgttcttgctttacaatcgtgtttccattttcggcggcgatgacgatttcgacgattgactgcttcgatctacggaggacttttttccctttcctttttcttt

SEQ ID NO: 250755 - DNA, 258 bp, Gossypium hirsutum
ggagagtgagctcaataacttaattaagttatggttcttaacaacattttcattgtcttattcttatcatatttcagcaaagatatcaaagggcttcccaaggcttgtttcaatcttccctgtcatctttctattgtcaattctcccctttaacattcatggtttccatcttggagcagcccatgtgtttgtcttttcatggatggccaatttcaagctccttttatttgcctttgatcgaggtcccctttcaccccc

SEQ ID NO: 250756 - DNA, 130 bp, Gossypium hirsutum
cttcaaagctcctgtccgggtgagaaggctcttcttccttagcgttgcgcccttcgcaggccaatcgccaaaggttcaaagcggattttgaaggaactcaaggaacagcagaaagatccacccacttctt

SEQ ID NO: 250757 - DNA, 456 bp, Gossypium hirsutum
gaaaaacctaatgctccccaacccccccatctcttccttttctcttcagccgaaaaggccatcgtctgctcactcaatcgtcgccatggccagtggccggcgctgcggagaatgagcttttaagctccatcttgaaagaccctctcgaaggctaaaccttcagcaaccaaagagtgaggagaaagggagttctctgtccctttgtcgaacccgattacaacgacggagaaatcactccgacggcgagatcgaaagggattcaggtgagagatttttttcttcctttttagttagttttttgtttagacagatttacaaagagaaagaaaaaaagaaaatacagtaaacaaaaagaaaaaatggaaagaacccagaacaccttttttaaatctctgttttttgctttgtatttgtatttcaatgtgcgtagtatcgcgtaaaaattacatggatccc

SEQ ID NO: 250758 - DNA, 465 bp, Gossypium hirsutum
gacccacgcgtccgcggacgcgtgggcccacgcgttttctgacgcgtgggggcctctcattttctcgcaagccttctcagtccggcgtaactctggggaaggctccggtcgccgggctaccgtgacagacgctgattacccgcaatagcgccgcggcccatggcggctggaaaataaaaagttttcttttttgggttttttcggcttccctagtttaaaggcatctttcatcggagatgacagacctaggccaactcacggcggcagaatacgagaagtcaggtgagttttcggcccccttttttcttattttatgtttattttttaaaaaaacgcaagttaaaaaaataaagaagaagaatgaaagaataaaaagacccacctttttttatttccgattatttttctctatatttgtattcgattctctttttttcgtatttgatttctctctgtgtctcagaa

SEQ ID NO: 250759 - DNA, 383 bp, Gossypium hirsutum
  unsure (1)..(383): unsure at all n locations
gacccacgcgtccgaagactcttgggcccacacttctgctgactcttgagagccncccataaactggtagggtttctaagaccaccctaaccctcgagaaggctcccaccaccgggctaccgagacagacgctgattacccgcaatagcgccgacgcccacggcggctggaaaataaaaagggaacactgttgggtgacgtcggctcccctagcgtaaaggcatcttacatcggagatgacagacctaggccactcacggtggcagaagacgagaagacaggtgagattaccgcccccttatgtaccataacatgcgtattcttgaaaaaaacgcaagttaaaaaaataaagaatcaagaatgaaggaatgataggacccacc

SEQ ID NO: 250760 - DNA, 221 bp, Gossypium hirsutum
gttattgctcatgtggaccacggtaaagcaatcctgagctctattcgtctagaagctgctgataggatgtacgtgttcatgtaagcatgcataggtgatgcgtccccacgacaacataccgcgtgctagatgaggcgtgaactggtgtattacaagtcaagttctactggtgatctctactttattatgaacatgcctgaggactgctttgcaagagctac

SEQ ID NO: 250761 - DNA, 178 bp, Gossypium hirsutum
cttcaacgaatcgatctcccgagagtgaagaagatacttattgtctgactagatcgaggacttccgagcacgcgcttctaaaagaatgttgatgtgagatggggatgatgaggctacccaagacgggtgttcttgggggtaaaattgcgagcgtgttataattagggatatgactgaa

SEQ ID NO: 250762 - DNA, 387 bp, Gossypium hirsutum
gggaggttagtagggctgggacagaggtcatctctatctcgaatttgaaggtagagttgctgaggttgagaactttttgaaaactactgctaaaatgatacaggttcaggtagaggttgttgatcggaaacttgaaaatgaaattggtgggttaaggagggaattgaatgagagaatagacgatcaaagtgtggcattggggaattcattgaaaatattggaagaaaagagcgagggattggataagtccttgcgtgaattgaagagcgcgaatttgttgaccaaggatgaatttgagaatatgtatgaacaaatgtttaaagagaagggtggaattggctagattgaaactgctgtgagtttgagtgatatatgttcctattcaag

SEQ ID NO: 250763 - DNA, 237 bp, Gossypium hirsutum
gcaaaatccaaaaagaaatacacaattttctttgttttctgttttgtcttcctcttcccagtaatagatggtaaggggagggaaggttggtccaagaagcaattttaaaagaagggtcagatcaaaagatgaggcttcggatgattcaaatgaagattatgtcgtttcactggagggaaatgatgaatctgaggacgatgtgaaacattattgttcttccttagatgagcgcccatc

SEQ ID NO: 250764 - DNA, 242 bp, Gossypium hirsutum
aaaaaaaaaagaaaatctttagctgatactcgatttcgacctgccaattgtcacttgatctcatcgtttttccgtctattctcctggcgatttagattaattaaatcgtaacagcatgaatttcctgcttggagctttcaagccggcatgcaatatcttgatcacattttcccatgctaaaactcgcaagcaggtatgcttctagatcactgtgattggtcaatttatttttcacgagtcat

SEQ ID NO: 250765 - DNA, 322 bp, Gossypium hirsutum
cccacgcgtccgcccacgcgtccgcccacgcgtctcttttggtccgtttcctctctctctgtctgtgacgagtttgcttgattgctttcaagaaacatctgcttttccttacaagactttttttaaaaatcctcgctgagtaatttctttttcctatgaaccgaacagaggatgattactaggcgttgcttttgtagctctgccccgcggccatggctggttgcgggtctaggcaaccctggtgataaatataaaggaacaagacacaatgtgggttttgagatgattcgacgcttttgctaaagctcaagggatagaaatg

SEQ ID NO: 250766 - DNA, 330 bp, Gossypium hirsutum
ctgcatcaacctatgttttgggtctgaggtatctttattgccggatcttcgttgtcaatcatattgggattgtcaagagcagatgctgatgtgggagtcatggtttctttcagaacatcatttggtttccgatttaacccgaattcgaataccatagaatatgcaaaccgagattccgtgttcttagccattctttgacatctattgttaccatgctaggaatattcataacatatgtatctattacaaccaatatgttatgccaaggtcctgctcacctattaccctgatgatacccactctactagaatcatcaatggaggtggaaag

SEQ ID NO: 250767 - DNA, 454 bp, Gossypium hirsutum
gtgcattacatcttgttgtgttcattactcagatccctatcgcttttatttctgttccatttttcctctttattttctaattttgggtattatttactcagatcccctttctttttattattggtttttctcttatatttagctagaaatcgacgatgccagaagaagctagaaatcgacgatgcaagttactgctggtctcattgctgctggtaacaagttattgcttaaaattcatggtaacaaatctacttccaaggaagttattcatattctttcgtatcgaagaaaagttatttacggtggaacttgattctccagctctcgtaagtttgttcccagttttgtatttgccatctataccaggtttacctctcttgcttctcttcgtcttcatctccctttcatttattctaccaaaaacgccttttaggtgtcattttttttctcacat

SEQ ID NO: 250768 - DNA, 163 bp, Gossypium hirsutum
tgcctccgtccgatcccgtcgacccacctccgctagatctcagtaaacctgctaagggtgttgttatacttccttttatctccgcggggatctcctatctaaggggagtatatctactaagcatctttcttctggatcattcgttgaacctccctttcttgga

SEQ ID NO: 250769 - DNA, 279 bp, Gossypium hirsutum
  unsure (1)..(279): unsure at all n locations
gtccggtttggaggattttaatcttactgagtgttcttgttgcagataggtgcagggaaaagagcgatggcggcagtgcccggacagtagattttnnangtatnaaataacaacaattgccttttgaaagacaaggagtaagtactaaagtgttccatactttgatgactacacctttggaacatgacaacatacgctcgtaataagacttcttgaatggaaagaagctatcagaagatatctaatgtggggtcctatacaattcctctccatttttga

SEQ ID NO: 250770 - DNA, 346 bp, Gossypium hirsutum
tggttccggtgctcatgatccgtttgacatcttttcctccttctttggtggtagcccgtttagaggtgttttcattcgaggtagaatacatataatgggagaggatttttatattttatttatgttttaatttataaccttatcatattttttctatatactcttttttttttattatctttacttttttaatatattattatttttatttaaaatatattatttttttatttattttttattattttttatgttatttattttttataattttatttatttatttttattttttaaattttttattaattttttatactttctaatgatatcatttatttattat

SEQ ID NO: 250771 - DNA, 207 bp, Gossypium hirsutum
gcttttgttgcctgtgctttctccccatttcaaactctgtttctctttgggaattttgggttctgctcattttatccactttcaaggccttcttcttttgattgctattctaattactttcatctgaaaaaaaaaagaaaaataaatttcttcctcaactgcccaaattcatgttcttggtgatatctggtttccctacctcaataa

SEQ ID NO: 250772 - DNA, 421 bp, Gossypium hirsutum
atctcatgtttgtatatttctgggtttttttttcttttgcggttgggttcatatgattttgcgtgttaattatcttgttggatgaaggcttgatcttttgttgtagcatgagctaatgtacttataatttagtttttgatctggattttatctgattattggttttttccgttatagttgatcatttatttagaatatatacatatatttttgcaattctactgtttgttcactcttttgatctgatcaatgagaatactagctaaaggaatggctttagattgcaccatttcaaattgtattggttacacttttctttaaatattatttatttttaatatatattggattatacatgtctatcaggtgtctgggtttaaaatttttattttatgaatgtaatattattttatcttaattt

SEQ ID NO: 250773 - DNA, 457 bp, Gossypium hirsutum
gtctccttcctggagagcagattgacatgcctataagtctttttattgttgaaaaggaaaaacgtggtggtgatcgtcaactaacctgtactttcttgcaggttttcttctacatagatcctgagtttgaaacagatgcccgaatggatggtataaacaacctgattttatcatatacttttttcaaggtttccgaagaatagaagggggatatttaaattcatagtgaaaatagaatatcattcacatgagaataaaaactattggttaggatcccattttcatataccgggagaagagggagaagaaacattcttttatcggaattattttattattacagtctcctttcacctctttatggtggaaacagtctatttttgtaccaggctcctccctcttcataccaaggaagtgcagaacttgtgtaaaatctgtggctgttctagtatggagt

SEQ ID NO: 250774 - DNA, 405 bp, Gossypium hirsutum
ggcaatggcatcaaatgtgagagcaaatatgggtatcctttccaaagccctaacgagactgcggcgcactggggccttgtattcccgtcccaaccaatccctccccccgccaaagcattgggtaccatcttcttccttctccaccgctgctgctgttgcttcatcccaatctcttcatgataaagagaaaggatcaaaatggtcaagatggtttcttttccttcctggagctatcactttcggccttggaacttggcagattttcagaaggcaagacaagatagagatgctggattacagacagaagaggttgcaaatggaacctttgaaactaaatgacatgcctccttcaagtgaaatattggacactttagagtttaggcgagtcgggtgcaaaggaagttt

SEQ ID NO: 250775 - DNA, 367 bp, Gossypium hirsutum
ggtcctagctggagtacaacttctagtctagtgggtaattcacaaattgctgaaatatttgttgaatggggtggacattcttccactccagcaaaaccatctgcataggggtgacactcaaatcttgagcccgtatactcatttaaaccatctatcatggcaagcgatcatgctgctgctccaacttcacgaagcgaccaattgactcattcgtactgcccggatcctgctcataatgcatttgcttgtgatccaattgttcccgaacctaatgagggtgatgaatcagtttcagatctcttggctgaagttgaagcaatggagtctcttaatggcttgacttcacctacataaattatgcattgtg

SEQ ID NO: 250776 - DNA, 133 bp, Gossypium hirsutum
ccacgcggtccgggttggagttggactaatgcgattccctacttgccctcaatttgcattgctgctgcagaaggacgttggtgaggccaaggattttcgtgaaacagaagggggttgatgttgggtccgattg

SEQ ID NO: 250777 - DNA, 268 bp, Gossypium hirsutum
gattttcaacaaatatgttcatcggatcttttttgaatgatgagcggaagaaacaggtgcgctggtgactgcatattagcatgaagagctcaaacatcaaactctaatattcaagtacatgatctgagacatccctataccacctgatctactgttgaccatcaacagaagctgctcggatacctgactttcttcaaggctctgctgttaccaaaccaaacatatcggatggatctgcatcaagctgagatcgccaagatacataaac

SEQ ID NO: 250778 - DNA, 227 bp, Gossypium hirsutum
cccaacattcggattctatggatttgttctaacaatatgaaaaatttgccaaaataatatatcacaaacaaataacaaaaggtccattacaacatatacacactattctcactcttatccaatgaagtccatttcaaaaagctcaaacaattcaatacacccattttatgtagaaaccccacctgttaagactccaacaccaatcatttacatataaatcaagcatt

SEQ ID NO: 250779 - DNA, 116 bp, Gossypium hirsutum
  unsure (1)..(116): unsure at all n locations
aactatgggggaggtttatacagaaatagggacggcccaatacccaanaagagaacattcaataatcttaacttccaaggtgaataattaaatactctcatttatatatccattta

SEQ ID NO: 250780 - DNA, 236 bp, Gossypium hirsutum
gcagcttgcattttgattacccttttttttcttcaaccttatttaaacccattcgctagaaaggcactgtttcttccagtgtgcttccgattcgagttactgcactgctcgtgaactccctaagtgggtaccgccatggcgacgtataccaacaggtacacttaatgttcagcgctctaaatattggagggctcatcggagtgtatccgtggacaatatcataagagtccaggctt

SEQ ID NO: 250781 - DNA, 250 bp, Gossypium hirsutum
gcacagaacctctccaatctatttacgagttctaccgtttgtttccctggaaaatatatgagacgtaatatttttattttgttagtttatttgtgtgtgtatttcatcttgttgtgttcattactcagatccctatcgcttttatttctgttccatttttcctctttattttctaattctgggtattatttactcagatcccctttctttttattatttttttttctctcatatgttagctagaaatctc

SEQ ID NO: 250782 - DNA, 132 bp, Gossypium hirsutum
gccccactctgttccaccgccgtcgcaacttttactcctcctaaatcaccggaagatccactgtcgaatgatcaacccaatctttccaccccttctgagttcaactctacccccacctgcgacgattactgc

SEQ ID NO: 250783 - DNA, 322 bp, Gossypium hirsutum
  unsure (1)..(322): unsure at all n locations
cgccccttgcaggtttttttgttcttaaatccaactattgctaccaaaatggctgcttaaaacaatgtgtaggaaggctctcaagtggtgggaaagtactaantgaggaggaaaaagctgctgaaaatgtctacatcaagaaaactgagaaagagaaattggagaaacttgcacgcatggtaccgaaaccagatgagaaaccagctgttggttcaaggggttctgtgactgatgcttaccctagtatttgtacattaacatcaagagctttatttaccgagaaagtattgaccgataagtactaaaaactatgcaattttta

SEQ ID NO: 250784 - DNA, 344 bp, Gossypium hirsutum
gcgagcggcctctcacgatctatagtgttacagtctataccgaatctgctctgactttggaaaggtgttctttaactccagaggaggctacaagtaaatagatacctgtgacactctcaaataagtctgataaaccaccacagttcacaaaacaaagcaaggcaaaatccattcttccgccacttcataaccgtggtaagagaaggatgcatcatttgatgttggtccttgttacatccctgatagattcggccttgcactttgactcgaaaactattacttatattttaacttatgtcttgctcaaaattttaactattatacacacacatatttatatacat

SEQ ID NO: 250785 - DNA, 456 bp, Gossypium hirsutum
gcgaccctggtttttattttttgagttttgaatttcctttttttggggggcttcgcttttattggagaattttgaaatagaaaagaggaaatggggattgatttgaggcaagtagtggccggtattctcactctcaccatgtttgtgatgcttggtcaaatgatcaaaagagaccattttgattctctccaagataaacttcctggagaagctcaggatgttcaagttgataatgccaatgttattgagaaggatggccttgtaaagccttcgaaggggagcaaagggccttggatgaaggacagtcaagagctaaaaccatgttggagcaggaccacttttgatggaatagagcagtcaagagggtatgttactttctcattgactaatggtccagaataccatgtctctcagatggctgatgccgtagtagtagcaaggttcctagaggcagca

SEQ ID NO: 250786 - DNA, 135 bp, Gossypium hirsutum
  unsure (1)..(135): unsure at all n locations
gcgtccgatcggatgtgatgaggttttcacagatggtgatgtgctgagaataccgncagcatccacccattgtgggggtctaccacaaggacgggggggataaggctcggcgctcggtaatacaaggctaagcaa

SEQ ID NO: 250787 - DNA, 131 bp, Gossypium hirsutum
gctgatttggaatctgctctctctgggttgaatgctcggatcgagacctacttcgctgatcttacgcactaaggcatacatgaccctggtgggattgaagggtgttaccgcttacggtttggatttggttc

SEQ ID NO: 250788 - DNA, 334 bp, Gossypium hirsutum
acaccctcttctcttctgtttttaatataatttcgtcgttaattctaaaaattatattcacgttcggccgtggatttctatggtagaaaaacagtaaagctaagagaaaatataaaagttcttagtatcatcacctccgtctcactgtcccttgtctccctgggtgctgccgtcagcttctttggataaagaaagaggaggagaagtgaaagggagttagagggagtgtgctctctgtgcacgaaggtacttgtttattttaatctgaacttattttttttctacctttatattattggcttcgtttatccctattcattatatcttttttaat

SEQ ID NO: 250789 - DNA, 282 bp, Gossypium hirsutum
tcggacgcgtgggtttactccgtctttcttggaggctcgttcagcagagatccacccaacacatctgcgctttttaaaaagccaagggtggacctctttgtttttatacttttaacgactcccccaattcttcaccatcccccctcttaatttcttccactgcttttcatcgcttcccctctttactccttaaaggcactgtcatcttttaactctttagatccaacccgatttcaatggcagctcttcagccaacttctctttcaaaccatcctttatcaa

SEQ ID NO: 250790 - DNA, 189 bp, Gossypium hirsutum
  unsure (1)..(189): unsure at all n locations
cccacgcgtccgttgactcgtgggaccnactctaatttttttttnncccaaataccataatcttgtgcggattattgtacaaagaagaggaaatggccgatcatcttaccgaccaacagatctctgagttcaaggaggcttttagcctcttctacaaggatggcttaagggtgcattactaccatagta

SEQ ID NO: 250791 - DNA, 287 bp, Gossypium hirsutum
ggccctgcttcgtgagaaactatatgtgggaactgttgtagggtcactgctgatagttggtgggctgtatgctgtcctgtggggaaaagataaagagatgaaacagatgaaaggcaatgaaaaaggaggagaagagcaagtagtagtagaagaaggggcagtggaagtcaccaaagctggtgacagagatcatgacttggagatgcagttgcatcaaggctgctccgtctgttgttaactagggcgtactgaatccaaaaaaaggaatgttaacatatatggatgaa

SEQ ID NO: 250792 - DNA, 384 bp, Gossypium hirsutum
ctcgccgaccctgcttgggtccttgctttaaggtcttccgatttcagcccttacacctcatcccgacttcgattaaagtgaaggagacgaggattccggcggttcatgcgtataggtaacccctttgctcccttttacccctttttatgctcgaaatgacagtatgtgcaaccaaacaataagaaaagaagatgaaaacaaacagaaaagaagggccaaagccgaataatcaccttttcaaggttttgatttcttttctttgtattcaatatgcaaaaatgtgcgtgtattcctctgaaaaaaactttacaatcaaagatagtaggcttttatagccgtatgttccaaaaaaaagttaaaaatacaatttttccttttagtatt

SEQ ID NO: 250793 - DNA, 268 bp, Gossypium hirsutum
aatcgacttaattattttgttatcgagttttcgatatgcttgcaattttttactttttactgaaccagtctgatgtaagaacgtcagtgatttttagttagatctctgctaatgcttttattttcagaatcggggagaagaatctatggattcgaaggaaaatccagagagatataaggtgggagacgacgcccgatcttcttatcgatcaatctgtttggaccctactttctcttcttgtttgatttttttcaggtcttacttcatt

SEQ ID NO: 250794 - DNA, 460 bp, Gossypium hirsutum
  unsure (1)..(460): unsure at all n locations
cgccgtccgctttttttaccatttcattagcattatgcagcttagntccatcnctcactnacccaccatccatttggctgtttgtgagatcatccgaaaaaggaatgggggagcgcgtcggaagatagttcgttaagggctcaaacccgtgcccaatggcgcctgctcacncgttgtttggccaatcgggcaccatcaaacncccgccctanatttggtgttgatcatgagcgacatatccctgacgtactatttttccgtatcacaaaatatgtgaggcacaataaccccgagttgataagagtaagtttcaaggcgcgatgtgtggaaaatatcgatgattcaagaaggcgatacattgtacccttacatgaagaagatttttgaaaagagaatatcccaatgtttgttgtaatacatgggctcctttcaactgtgacgctaaggcaaagatattggt

SEQ ID NO: 250795 - DNA, 283 bp, Gossypium hirsutum
  unsure (1)..(283): unsure at all n locations
acnaaanaacaaanaaattgttgctttatttgcaagaaggggggtgctttaaccaaattatatccaatttttggtaaatgatcttcatcatgcactatttttatcctacctaaaagtacattttaattggttcatccctttttcaattttagtctaatcatcatttttttcatctttattgtactataacaagttctttactattataattacatatatattattaatatagttatttcaattttattattattatctattttttattatttaattcatattt

SEQ ID NO: 250796 - DNA, 363 bp, Gossypium hirsutum
  unsure (1)..(363): unsure at all n locations
gttttattggtttcctttttttctgcaaaacaaacagtagtagagcagccccttcttccccatttgcgtttgtgctctactagggttgcaaaagaaacccatcatcgccatcatcgtacaaagccatcgagggcggtggccggagccacgcgaagaccaggttttcaacccttttcaagagagcccgaaagcaaagcacctcctaaactcagaaaatgcgaaagaaaaggtccctctcttttccctttaagtcagattctgacgacggagaatagatccgtcgaggtgacacgggnattcggtgagatgccttcttttattatatttttaaaaatagatttctaatagaatcataagaataat

SEQ ID NO: 250797 - DNA, 473 bp, Gossypium hirsutum
cttgaccatcttccctccaagtcggaaggatgcctattcaactcctctcccactaggtaagagatctctcctctatctagagtattctttgcgaatctgtgtgcttgcgagttccctgatctatgaatatgctgaaaggtaatctcttgaaaataaaatttcttgttctgaatgtcttttatgatcctcgaatctctgatttatctattgaagatgtttgacattttttgattattgttctagaatcccccatgattttaaccgattgtatacccattgatatccctaactttatgccttccaaacatgcaaacgcttctgctgcgaacggggaagaaacattattgtgaagggtcgttttttaaaccagtatctcgcccgttaggccctaaaccaccaagcctgttgcttattaaagtttcgattgtctaacgctgcatcaaactttatcgttttctcgtcttgtgctcctg

SEQ ID NO: 250798 - DNA, 271 bp, Gossypium hirsutum
atttccatggagtttactatcatcaaatctagtctctatgtccattcttttgcttctccttgtgtgactttccatacactattgtgggaacaggtagcttcgatgtttcggaaaaagaagtttatgagattgattatagaggtccagaaacacacactttgatccctccacctggtcacggtcaccgcagttcgggtcaccaacttactgatttaccaactcatgaattaagaaggggaaattaaattgatgggtgaaataagacagattt

SEQ ID NO: 250799 - DNA, 300 bp, Gossypium hirsutum
cccacgcgtccgcaagaacctgcttctcaagcggtacaatggcaggaagaagatcaggaaactgagagatgcagactggcaagaagctagtctggaccataacgagttgatggatggtcgtaatgaagaagcctctgacatgaatcatgaggacggtgagagtgaaaatggaggttatgatgatatgcaagaagcccctgatgcacaacgtgaggatggtggcttgcacgacactagacaaaattgtgtggaaggatctttcaatctacaatctggcactcattgtaagaactgactcat

SEQ ID NO: 250800 - DNA, 345 bp, Gossypium hirsutum
tgatggtttggtttacttggttcagagtaaccgaatgccacaggtctcatgttcgagggccgtgagagagagcagagtgagatcaggaagcaatgcaatcttgcaaacaagcttcactaaaatgcctcgccaaagagaaagccgagtgtggccgaataaaatgtttgtttactcagtttcttttccaagagacgagtttgttaatgtgcaggtgagtaatggtgcaatggtactggtttgtaacgatcgatccattgcatttttcttttagcataagccaggttgccttctcttgatgttggtcatgggcttggtggatgtagggatggatgttatatatgtatg

SEQ ID NO: 250801 - DNA, 464 bp, Gossypium hirsutum
acattgtttaaatttataaatgaaactgaaaatgtttatatatgttgcttaaattcaaaatgctagtcgtcattttcattgtaagagaagcttcctgatttagttgtcagcattctttcttttgcaattaaatggattgtccttgtttttccaattattgcttctttcttttgtctgattgtttttcttttctttctgatgagttggctaatttcataatctacagcgcatggagaagttcttcaaattctccactatgaatttggacataaatatgaaccacatcatgattacttctgcttatctgttctgctcttacaaattacactaaatactttctatcatctttacacacttatccatgattggaatgatatgtcatcaattcttaatacttatcgtagttcctttaaatctctttttttatgtgtctcttttatatcttcatatctatattttatttc

SEQ ID NO: 250802 - DNA, 319 bp, Gossypium hirsutum
  unsure (1)..(319): unsure at all n locations
cgcgtccggtctttcgctctttccttcttttaagttcttttgttctttaatttgacctgngtttacagtaaacaaaagggaagaaaaatgtcgagcagcgatgaattcatggatgacatgaatgggaatggggattcatatgggacggtgaaccggaggttcaaagatcgagccgagcaagtggcgaaaacgaaagagtttttgtccaaacaagcggttccaacgaaaggaaagttttttaaacaggctggtaagatcgcttatcatagctgagaacactagcgcttattaatatagggactcaacttttgggggttct

SEQ ID NO: 250803 - DNA, 189 bp, Gossypium hirsutum
cgtttgcttccatcactctctatttcggtcttcacctccatctgctgcaaggagcagaaggaaaaaggataaaagcatcggtggggtggggcgtctttttcaaccttggctcttcgtccttgaaccttcctattttgttccttttttatacaagattgtaaaatattgccgattctgatgattttcatc

SEQ ID NO: 250804 - DNA, 450 bp, Gossypium hirsutum
gttaggaaaggttatctgctcaaaatgcggaccaaacttttatgtatgcccaatgaggggagaatgcagacattttgtcagtgcgtgtgcctgtacatggcttgccttgacagggccagaggagaaaagcattgtcagcgcatctgataacacaaaacccggtcataaccatgctgtcattattgatcaaaaggccctgcccctactccagccaattgaacaatcagatacgaactgtcagcctgaagcaaaccagcaattacaagcaaagtcctgggtcaataactgtagtcataaccatgctgtcattattgatcaggccctgcccttactccagccaatggaacaatcagataggtactgtcagtctgaagcaaaccggcaattacaagcaaaattcagggtcaataactgtgaccctattattggagagccagcgagcccagaacc

SEQ ID NO: 250805 - DNA, 248 bp, Gossypium hirsutum
  unsure (1)..(248): unsure at all n locations
tctttttcgtaaatttaacgactatcatttttcattaggggaaaaaaaaaaaaagtttganacttagtactgggattaagatttttttttctgagaacaaaaaaatgttgtgtcgtaaaaattcaagctgcgaggaaacaggatctgtaccagtgtatctcaatgtgtatgatctaacaccaattaatggatttgctcattgattttgtctgactgaaaattaaatattttattatgatcattatttt

SEQ ID NO: 250806 - DNA, 383 bp, Gossypium hirsutum
agggccaacttaagagttgctatgcttctttcatataaactacaaaagaaaggaaaggagacaagcaacggaacaacaaatatgacacacctacaaaactcaaatcgaccacaccaggcctaatactagcaacatatatatattccacactcctcaaagctctgctaacacaagaataaatccaatgaatgtattgagtttacaggaaaactgacctcacagaacctaaacttgagagccatctatatatttctttttctttgttcatttttgttcctctttagtccgaagagcaaaacaaattaataatgaaaagcccatcagaaaaagctcaccagcaaaaacagttaacctaatattttcaagctgtgctgaattgatct

SEQ ID NO: 250807 - DNA, 296 bp, Gossypium hirsutum
  unsure (1)..(296): unsure at all n locations
gtaaaaagaaaattttatttcttacaaaggatagtggttaatcgaaattaaaaaaaaaaaagataganaatttaaagagaaagggaggtgaaagtcgccgttgatgttcgatgccgaaaatgaagcatctgttgaggaaactccacatcggcagtggattaaatgagcagcaactattggcggaggcacagcccgtgatcagctcgatcccgagcccgagtcccattcctaactttaactttaccagcgttacgggaatggaaacgactactttttcttcatcttcttggggtagt

SEQ ID NO: 250808 - DNA, 197 bp, Gossypium hirsutum
  unsure (1)..(197): unsure at all n locations
actcccggaatctgaaaatgtcggtgggacgatttctaagtgggttagaggggggacctatcaaaaccaacgtcggttttcgggttaaagctatgggtagtgatcggaatccttttcggtactttcatagttctaactatgctncttatctattaaaccattgtcactctctttctcatttggacgtgcccttcaac

SEQ ID NO: 250809 - DNA, 275 bp, Gossypium hirsutum
  unsure (1)..(275): unsure at all n locations
agatctactttctattcantagtatatacaatcttaattagcttggcttctctccaacagaaagtncttctttttccttccatcagtagaaaattttcctctataactccttcattctccttgtctctaccctgtattatctctttatcttaataggctactctttccattctttttntnaattccatattaattatttttttacttcttattttttatacttattacttatttttttttttttcttttttttttattttattttttttatctta

SEQ ID NO: 250810 - DNA, 211 bp, Gossypium hirsutum
cgtcccttattccctttttctaacgcgacaaaacaggttttaggagaacatttgtatagctgcatggcttatctagcagcgggctgcacttgacccttgcaaacaggtcaatgttacaagaagctgaagagaggtcggtcagtttgtctggaggactcgtgaactgcaaaagcaggagacaatcggggagcaatttggtttgataacgttt

SEQ ID NO: 250811 - DNA, 175 bp, Gossypium hirsutum
  unsure (1)..(175): unsure at all n locations
tttcgcgttnctttcttaaactagagtcttgtaaaataaaacccaaagccttaaaaactgtcaaattttgttcaaaagctcgcttaccntactccccatanctattctaccaaatccaatcaacaccctttccttaaaaccccccgttggaaatttatctatcaaactacttaga

SEQ ID NO: 250812 - DNA, 230 bp, Gossypium hirsutum
attttgcatatatgtttttaagttagtacttggtctttcttttgttcggaactctgttttttttagtgaattaacatctggttgttgattaagaaagaaaataaggttgtgttctttctttgaagtttgaatatttcatgtgagtgcattgttattgtggaattttttttcattgactatatgctattttacttaatttaataattttatgatattcattttttttgttg

SEQ ID NO: 250813 - DNA, 317 bp, Gossypium hirsutum
gcgtccgttttgaatcatttcctctcaatttcatcttcatattgtgcttcttgaccatctcctttcctaatgtagtgcatggcgggtcaactagtctctcgtcagagatgagacaatgtgaagggtcatctttgaagccaaaagttcacccatcaactctgaaccaccaaacctgatgctgatttggagtttcttttgtcgaacattgcatgaaattgaatcgtcatccttggactttacatgactactccctttggctcaacaagctttatgcttgatcccatcaatttacctaaaggacccttaactttagcttg

SEQ ID NO: 250814 - DNA, 436 bp, Gossypium hirsutum
  unsure (1)..(436): unsure at all n locations
gccaatgaagtcccaccagccgcttcttcctcttaagaagaagatgaggaagactccaaaacggagatctactccgttgaaccaacagagcccgccacccagaaagcctgctaaacggcctggggagtcggagttggatgccaatgaagcgaaacgacccaagaagaaggttggggaagaagggatggcgactgcacctgttgtggaggaggtgaaaaaggcgaaacgccacaaatcccatcttttccccaaatcttttaaagtccatgaacaacatgtttgtgttgtctaaaaagatttggggcaaagacgggattagtgggaaagtctagtcttcaactgcaccgacaaaaaaaattgacgatgcggtgccaatagaggtttattaggtggnntcttaagatgtttccgttggtcgtttgattagaaatttttt

SEQ ID NO: 250815 - DNA, 368 bp, Gossypium hirsutum
  unsure (1)..(368): unsure at all n locations
ataacaacggnaaacgaaaatagnattgttggaatttaaggtgattactgcaaaactacacattattaacaaacttaactaccttaactaatcattcattaacacccatcctaccaaaacccacaaattccaatatatcctttnnanaatattattcaaatacaaaattccaatattttattacaagttttaaaaaaaatttatacaaaatatatatataaattactgttcaatatcatctatccttaatacattttttaaaaatattctatccaaacccacttatccttattccttctttctatttcatttatattttatttttaatacctaatttcattatttaataactttcccatttttttttg

SEQ ID NO: 250816 - DNA, 177 bp, Gossypium hirsutum
agatggcaaaatagtctagttcatggcatttattttatgttgttgataaagaggtccatgaatgtgtattttcagttgatgaggggctcaacaaaatcatactaatagtatgactattattcattgcaagatttaatgaatacttgctacaaccctgatgatgactgcaactacaat

SEQ ID NO: 250817 - DNA, 302 bp, Gossypium hirsutum
cccacgcgtccgcgtggagccttttaaaacaattgataaaggattgttcctttccatggttagtggtgggcgattttaccgaaatggtatattcatttgagaaacaagggggacgagtgcgggatgaatagagcatgtagaattttcatgatgtattgaaagaatgtgagcttagcgatttgggtttcttcagtcaatggtttacttggaaaagagggcagctaccagaaaataatgtgtgtgcgcgactagatagggggtggctggttcaacttggtgggagctatttttttcattttttt

SEQ ID NO: 250818 - DNA, 175 bp, Gossypium hirsutum
cattttccgactcatcgttgtatttttttttaaatttctcaccgatggcgaccgctatggtaggagattctatcttcgtagaaggccgtgcggctttcatgactaccaatgatatcttcctagctttccattattttcataacaagattcttattcttaatgaggagatgccaag

SEQ ID NO: 250819 - DNA, 399 bp, Gossypium hirsutum
cccacgcgtccgcacggcgtcacccaaccgcttttcgccactgcaccgtctccgcctgccgcgggctcgttgctttacccaacaggaaaattagaaaatggaggaagatgatgattacgttgagtatattccggtagcgaaacgccgcgctatggaagctcaaaaaatcctacagagaaaaggcaaggcttctgcgcttgaagatgaaactgaaaaagccaatgtggccgaagtaaaacctagtttacttataaaagcaactcagcttaaaaaggatcaacccgagatcagtcaaatggaacaaattgtacaacaagaaaaagagatgattgaacatttatttgataggaaaaccctcatgtctgttcgggaattggcaaaagggattacctatactga

SEQ ID NO: 250820 - DNA, 419 bp, Gossypium hirsutum
  unsure (1)..(419): unsure at all n locations
tttcacacgggttgtggcgtagtttaagcagagtgtttgcgcaggataaagtctcttcacattgtttcaacatgaaggtttgtaataagagatttgtttctatcagcattgctttgcattgctattgcaggagttttgggtcaagctcctagtaatcctcctacgtctacgccggcgccacccacaccaccggcttctactcctcctccgacgactcaaccaccgtctacaccaaccgccactccgccaccggtttctactcctcctcccacttcatcaccgcccccagtgacagcttctccacctcctgcaactccacctncagcttnttcaccttccggcactcctgcaccagcttttncaccttccgccacttcaccaccagcaacccccccacctgcaacttcttctgctacccc

SEQ ID NO: 250821 - DNA, 281 bp, Gossypium hirsutum
  unsure (1)..(281): unsure at all n locations
gtggaatgtcatggttccacctctttatctttggagtcgttctgatttttcagcaaagaacaagagcatagctgaaaagcatggtcaggtacctagggaaccagcgagttcaaatcaggaaatgaatattgatgaaacacgcagatctgattttgaactgccattggaggatgatggncttcgtgatgatgctactgagttgaaagatcatatgcaaaattatgaaattgaggaatgtaaaaaaagagaaatctttggtggtgatccctaatgagtgctct

SEQ ID NO: 250822 - DNA, 253 bp, Gossypium hirsutum
  unsure (1)..(253): unsure at all n locations
ggactgcctcaaacaaggaagtcaacgagcggtatctgatgatatgccactaggacgcagaagtccgttttgggattcattagaagcatgggcggctctcgccatacaagatcgccatcaactatgagggcttgaagacacaggaaggggatcgaacacttttttacttcgaatacttgggtcctttgancctctaccctgtctactactacttccctgcatacaagtactctggttacgaagaaaagcgtgt

SEQ ID NO: 250823 - DNA, 366 bp, Gossypium hirsutum
  unsure (1)..(366): unsure at all n locations
ctctttgngccaaactagttttactctcgaattcttccgtcacctataattcatctccggccggcggatcttatacgccgccggtgccgcgtcttcttggcattcattctagtttccgataagttcttgagtgtttctgttattttcatcggagaaggattgattttataggtaagacgatgtctttattgaactatggattaattttgcctttttttttttttttttacatacttatgctcattttttttattcctattttgtatatagtttaatagcttatttttttatttatctatttatattaactatattattttcttcttttaatattttatttattttatttcatttattttatgtttt

SEQ ID NO: 250824 - DNA, 293 bp, Gossypium hirsutum
ggccaatgctatgttgcaccaaacagttgggactcttctacttcatggcagttctggaattcatttccaaggtggaaataattcagagagattggttcccaaaggtttcaaggtggaagttgggttctgcgagagagggatttagtcttcctcaacagtagcatttaatatcttttttcctccatcagaggttataattcttgagtacatttgtccttgatgtgatagattttctcttatactaaccattaacgtttctctatacatttgttggattgtaatttaggtcttat

SEQ ID NO: 250825 - DNA, 211 bp, Gossypium hirsutum
gcgaactgagaacattgtctctgtaatgtgcaatggtcggtggattatgagagataagaagatcttaaatgtagatgaggaggaagttatatcattagcaaaagaagcttcaagcaaacttttgagaagagcaagtatcaaattaccaagcagaatgaataagatcctctgaccccaacactggtctctttttgatccattgcctttaaac

SEQ ID NO: 250826 - DNA, 351 bp, Gossypium hirsutum
acccacacatcctctcatctcaaaatctgtaactacatttacccaataccaaccccttcaaagaaattttctctaacaaaaaagaaaaccccatatcatcctccccctatcttcttttattttctcctttatttatttccttcacctttttctttctttccccaaatctctcttactttcttttaaacttacccaccatttcaactttcccattttttattttctatatccaaccattccccccattttattaaccccctaatccattataaatttttctttctcttttatctaattattatctttacatttcatttaattactttaaattttttttttctatcttttttt

SEQ ID NO: 250827 - DNA, 441 bp, Gossypium hirsutum
cccacgcgtccggtaatacaatatttttacgtttgaggcttcttatagccgaatataaaaaagggaatctatatttgctactgggcggctctgctctttcctgttctcccttctttgtcatgtttgcaggtctatggagggtcaacgaaggaaaaccttgctatttcagtgcaaggaaacagccatcgggcggagggtacactgacggaggcacgtggggtgcggggcgaccgaggctacggtgctagagtggatagaaaccctagggttttttgaaaattttttatattttgggccaatcgggccttgtaatgttgggctcgagattttgagttgtgttttgggtcttaatttgggctgatggtataggttaggtattgagtcttgtaattgaattgtaaatattttaggcccgggcaaaatttgagtcctacataagtc

SEQ ID NO: 250828 - DNA, 400 bp, Gossypium hirsutum
cttcgtaaaggcatcccactgctccgccttcggctgcaacgatacaaccttcttgcagctggaatcccatcgtctcctcgtcggcgttggtgcgctgctgcagagtcgactgggctcgaagaggaggtgtcctccgcggagaagagtagtgcggtgcctagcgtgagggacccgaagaagtaccatatgttggatgatcctgattacaggaaatggaaggataaggaggaagagattcttcgtgacatccatcctatcatttctctcgctagagagaatcttcactctaattggtataaggatggggaacggatgtactgttacaatttaaggaatcttttctttagatgcttattctttataactgctctccaagctggtaacttgagtattcttactc

SEQ ID NO: 250829 - DNA, 269 bp, Gossypium hirsutum
gtttattttaggctttgataaaccaaaattgaattacaatggtggtggtgcatccaaggataatgacgtatatcaagtggtgaaaggggatctgcattaaacaaataaataattatattattaatttgttagtgggaaaggtcatattcagcccgattccatcatctctgtatcgttaaatactgaatctatcaaccgcctacataaaaatttctagttatttaagaatctaaacatctaattttgtttgcatatcattttttttttaa

SEQ ID NO: 250830 - DNA, 299 bp, Gossypium hirsutum
  unsure (1)..(299): unsure at all n locations
agaagagtaaaataccaataactttcaactaacgtttaataaccacaancagcaacaacctaaagaaggctttcaaacgagcgaagagggccacctcaagcnanccaccataatatgcattatacaccaccaggggaaaccccacaaggttctcctcaaggatatcttcattcttctcatcatccataactacaacctcaaggtatacatgtcacaccaccatctttaaaatgagaaatcacctcctctcatagaaccccatcacataaatgttgttaccacccttcaccatcaccata

SEQ ID NO: 250831 - DNA, 205 bp, Gossypium hirsutum
  unsure (1)..(205): unsure at all n locations
gaaaaatatatagcccaatgtatcttttgccttgtataaactatatccatagttctctcaagatntgaagtgtgaaaaagaagaagaaacaaanaggaatcaaaaacatgcaatatcttttgcaattttgatttggtagatccactatggtcctttcatttatatacaatgaatcagttagtgaagttatatgcccccttaaaaa

SEQ ID NO: 250832 - DNA, 443 bp, Gossypium hirsutum
  unsure (1)..(443): unsure at all n locations
attagtttctcttcttctttgtactttttttttggtttctttctttggttttatttttggcccgatctgtctgttgttttaattgatccttctttttcagatttcactttttgtttattgatttaatcaaatttccatatcttactgttactgatgctttactgttacttttgttagttttacttctttcatggatgatttgatctggtcaatctgagatctgaaagtttctaatttatttttattgctgttgntttgcttttacttctttttggttttttgctttcggaaattataaaaaaaaatagattttacttgtttatctgatttggtgttgcattagatatggttatttatccattttttaatcaagtgtgatttgttttagcatcttaaaggagctcaagtnagttactaaaagcataactagaacgggaattgct

SEQ ID NO: 250833 - DNA, 344 bp, Gossypium hirsutum
attctggtttagatttaacactttgcagagcctggtttttgaggaaacaagttcgaccaagtcggtgaatcgatccatcaaatgggtgctatggctcggtatcttttctcggacctgccgagacaatcacctaacatgactgatacctgccgtctcagatcacaaccacctcatgttgtttcctttccaataaaccaaccgttcctgtttcagttgactctgattttctttcttaattttcgtatttttttcgtcgttttttgtctttttgattccatgtttttttttatttactttttatttttttttatattgttttgtttttgtgttttttttaattactt

SEQ ID NO: 250834 - DNA, 252 bp, Gossypium hirsutum
gccagaggtcaatgaaacgcaatagtaataactcttcttctaatggcagtctctcacagcctgcagctgaaggtcctattgttgagagacgctgttaatagcccttcttctagggaccagacacagagaactggatttgcatcacagcctcatactggtagtaatgatcaccaacacccacggaattcattcagacaacgtaatggtggtccacatccacgaggagagggttctcaccattagaattttgga

SEQ ID NO: 250835 - DNA, 322 bp, Gossypium hirsutum
gattctatggccctgaagctcttctgggtcagactcacgttgttcttcggcttttgggttgttgctgtgctgtgatcaagatgggtgcttgagcttatcttgtggtggagcaaagagttatgtagattcatctaagataaaatgggtgtcagatgatacattcataaccacaggcaacacaactaccgttgagtatgctgaaagtaccttctcctcggccagcattgcacttcgattttttccggaacctctaggccccaattgctataagttaccggtagagaatatgtcctccaattgttcttgtgagggctcaatttag

SEQ ID NO: 250836 - DNA, 418 bp, Gossypium hirsutum
gttacccgctcattactccctcttcttctcatcttcgtcgcgccctaaatcccgcaggtaactctcaaaatttggccggaaatttcccatttccagcaacacaagtcaatacacctacaccaatcacacttctttttccttttcatttcttcaaagattttaatctgaagaaatcttagctccgcttttacaacaatggagcgcaaggctattgaactagatcagggatgggattatacgaagattttgattttataagagtataataattgcgctcaagtcgtcaaattcatattttgcggagggtattgtatagattattatttaaggattggctcgattccgatttcatcaccattttcatatctcaaatgatctctctgtaaccgcttgctggtaaattttatagaaaaacacg

SEQ ID NO: 250837 - DNA, 297 bp, Gossypium hirsutum
cccatgcaaaatatgtataaaaggaaaaggatgatggaagaccactctaatgtggtaaaagtggctaaaaattggaatcgaggagaggctaatagtagtggagacattgccaaaggatccatcaaaaatgaaggatgaaaagaactttgttcttatttaacttgaaatgccaaatggtaatccgcttgttgttgaaaaagcagagaacatagaagcttcagtttgcaatcaaaatagggtggaaatatcaacaggaaaacctaatcatggaagaaacattactgccttaatcgaaat

SEQ ID NO: 250838 - DNA, 330 bp, Gossypium hirsutum
cccacctccatttatttattttaaaattggcggactgttatgttgctgccctattaaaactgatggggttgtcaataggacagggcgtgaaaatagcccttcaatgaagaacatcattagaaacaagagaaaaaggagaggatgttatggataataaatagtctgattagttgttcatccaagtatcccctcttttcttatatgatattcatctgttattcataactctgtttagtataaaccttaaaagtttattatttattttttaattactcaatttgtatattgtttattttattcattctcttttttatttcttttaaattgttt

SEQ ID NO: 250839 - DNA, 362 bp, Gossypium hirsutum
tcccgtcgacccacctccgcggaccgtgggttcagagtagatattctctcttttttctttcgtcgaactcccggaggaacgctcatattgccgaggcgtgagaatgggctgtctttcacaaactgtcaccgctttttgcctgaagagatgcgtttttgaagttgtactttttgcttttgttattccaccattctttctcctcatttttaatatttttccacaattcctctttttttttattatttactattttttcatttctttccttaattttttttatttattcttagtggtgattttttttttttcctttttatttcattttttttttttttatcttttaatttccttattttattttt

SEQ ID NO: 250840 - DNA, 185 bp, Gossypium hirsutum
  unsure (1)..(185): unsure at all n locations
atcagtagctagcatctccgtcggttattttagtttttttcatgctgagaagctggtctccgattagtacggtttctaatggatagaagaaagctcctaancnnnttaagattgttatatcaaaaattcctgtatatttaattatcaatatgtaacaagttatgtagtttatttcttttttttta

SEQ ID NO: 250841 - DNA, 135 bp, Gossypium hirsutum
  unsure (1)..(135): unsure at all n locations
gaattcccccactccatttctgcaaaactagtgtttttttttcccgtcacattcttcancaataaganaatttttacatcagagatgtagatcctaaaagtnnaatgataatcacatcaaactgtcagctttatc

SEQ ID NO: 250842 - DNA, 231 bp, Gossypium hirsutum
gcctggaagaatggcacctctgatagaacttctatttcttcatgtccctcgcttttgtgatacgaagaatcttttgggtcctagaagatgcaagattttggagagaagttcttcctttgcaaaattgtataacattagtaataacccttggcatgcttgagatgtctcttttttatttttatcactcttatttaaataacataattatccattcctgtattatttcatctt

SEQ ID NO: 250843 - DNA, 351 bp, Gossypium hirsutum
gttaatgtttggcatggagattgggtgtttcggtcattcttcgctcttattcaaaaaggtacatgaatgtgtatattgaggatagcgaattaagagtcaaatggagatttacaggtttttatgggtccccgtatgcacaagacaggaatgattcgtgggatgttttgagaattttaaaagttgttggtaatatcccttggtttatttgtggggattttaatgaaataatgtatggatctgaaaaaaaaaagagagagagatacctagggatgaaaggagaatggatctatttcgaaaaactctggaagattgtcaaatgtctgatgtatgattattctggtagattgttca

SEQ ID NO: 250844 - DNA, 367 bp, Gossypium hirsutum
caaagccataaaacatgggttttcagaaagaaagaaatggggtataatagcttatacaaatctatgaagctatctatagattatgagctctttttttcactcttatattacatgttggtttccatagctttgattcttggctagctctttttacttgatttaacccatcatggtttaacaaagtgctttgaattgttcacttttttccaagatgaattttgaaactcgaccgagtctgtatacaagaaaccagattaagtgccacattcaccataccaaactttgtcacacaaccaatccctttcataaacagcgtcaaaatttcctaaggccttgaatctacacctttcttaagaaaacccatacc

SEQ ID NO: 250845 - DNA, 230 bp, Gossypium hirsutum
  unsure (1)..(230): unsure at all n locations
tcccacgcgtccgctcaaacctctctcagctttttttattttcctcctttttttctatcaaaaacagaatgtcttctatccttactcgaagtgtcctcaaacttttcctcctcatctctttgtttcaaatctctntggccggtaggaagctcatcgaagtggtgcaagaccagtcttatctcttgacataccacaatgttccccttctttctagcaaaattactattaat

SEQ ID NO: 250846 - DNA, 334 bp, Gossypium hirsutum
aaaaaaaaaaaaaaaaaaaaaaaaaaaaaaaaaatttttttataaaaaaaaaaaaaaaaaaaaaaaaagaaaatttttaaaaaaaaaaaaaagaaaaaaaaaaaaaaaaaaaagggcccccccttttaaaaaatccaaccttacttccccttccttccaacttaataccttttctatttgttcaccaaaatcaaattaactgcccctctttttacaacccttttactggaaaaaccctgcctttcccaaatttattcccttttaaaaatatcccctttttcccatttttcttattatcaaaaatccccccaccttttgccctttctaacattta

SEQ ID NO: 250847 - DNA, 150 bp, Gossypium hirsutum
gagagacagaatcatccctgcatttttgaaacttttccaaaaacccgtaaactctctcagatgactgttttctttaactaacaagaactactctctatactttcataaaagggtgtgcatcacgtctggactctttgtgcttatccaaca

SEQ ID NO: 250848 - DNA, 399 bp, Gossypium hirsutum
  unsure (1)..(399): unsure at all n locations
cctctattctctttgctttattgattgccattgttctctcatccctgggtcgtcttcacttttattaatttccatatctagagtgaatagaaaataaaagagaaaagacattgttgtatcaatattagtttagtaagtgagtaagagactgatcttcctttctcttcttacagccatcattttcctaatttccaagggagacattgagtcaacacacactttgccttgttcctctccttttctttttgttttctcttctttcccagttgaccctagacttatgagaacaataggatgggagataattcaaagtctaggtggttctattgttgactctnntatttttttcatttagccttcccatcatcaatccaaatctgccttactctctgatagata

SEQ ID NO: 250849 - DNA, 349 bp, Gossypium hirsutum
gggaaatcggcttctgctgcccatcattatcatactatccaaaaggccgagctccggttacatgatgacgaggccgaatacgaggcggatatgatctggtaaagaatccacgtgcgataccgttcgtttcagataagttcagattccctcctgttgcaatctatcgatgatttttggcttgtttcgttgtattcatgtcttatcagtagtttcctgttagatattcgaaaaggaacatgaaaaacacgaacactaacacgattgtcaaagatctctgtttcatgttctggccctgtactagcaaacatagtttatcgatcaagttatccatttgctttttatccttgtt

SEQ ID NO: 250850 - DNA, 155 bp, Gossypium hirsutum
  unsure (1)..(155): unsure at all n locations
ctctnctaacttctantttactcaaagaatattntttaatacaaaaaaaaaaactacaatttcctttcattttactcattccatccttaacaagaaacccaactttatcctacaatttaaaactctccaatcttattccactattgtttccttac

SEQ ID NO: 250851 - DNA, 297 bp, Gossypium hirsutum
ctaagtgcaatatcaatcaactgtagaaacatagtttgtattggatcatgtccagcaaaacggaagatggtttacgtagtcagaaaatggagttcagagacggccaaaaggcaaaggggagactagaaggaatgggattgaacattgtggatccacagctatctgtaaagtgacatactacgacctgagttacattcttactgacggagctaaacaacagcgaagaacagtgagtaatcaacagccgagcatctgaagtggagaacgacaagaagaaaggtatgaatggcacagtaa

SEQ ID NO: 250852 - DNA, 429 bp, Gossypium hirsutum
atctactaccagattccacccctccccctacttttttcttctattattataattaagaccaaatggatttgggcgactctctataatgatattttttctatttaccatagattttctgaagggcctatatgatttatttttcgtcgttttgcttgttttcttctccaagccgaaacgtggcggtggactgactggaaagtgcaaacatattcaacaatctactgaatctgcgcttttggatttgcaactcctttttcttttttttaattacaccaatagttactcaattttggatagttaataaaataatcactcaaaattcaatttagtcactcaactttcgtaatataacaaaacatgcgccactattccattttcgtttgacacaacaaatctaccggttttcgttgatctacattttccattctc

SEQ ID NO: 250853 - DNA, 185 bp, Gossypium hirsutum
cccacgcgtccgggcttatctttctgatcaggattttttacaaactaaattggcacgggaagcagatgaaagggcaagccaaaatatatttaaagctaggtaacctatttatttgacaagatggaagaatgtttggggattgttttgcttgaagcgttgctaaatggttcgtcagttctttattt

SEQ ID NO: 250854 - DNA, 377 bp, Gossypium hirsutum
gagcactcattcccagcttttcactgcattgtttccacattgctgctctgttcttgaccagcggtttctttgagctttgttgctctgtgcagcgaatgaaatcaaagtgctttttcacatcaggccagtggtagatgacacagctatgtatggtatttaagtagcattcatcttctccatgctggcaatggggttcacagaatcaacaaatgctatacttctggatatggacttaagcttctgctacaatatgctaatgagactgcaaagcttaagcccacttaatgagtatgtgccatgggtgggggtggtaatcagccactcaaagatgactttgaaaattttgtgaaatatgtctgtgaagcttataaaggtga

SEQ ID NO: 250855 - DNA, 177 bp, Gossypium hirsutum
cgaccacgcgtccgcccactctcactgaacacaacaaccatcaaaatcgtgtctctatcaacactcaataacaatatgctgtgcaatttgctatgcattgcgaggccccacttatccatctgacaaatgccaatgcaccaacctacatcaagaatcggcgaaagcagcggacgccca

SEQ ID NO: 250856 - DNA, 305 bp, Gossypium hirsutum
acccttccgaccacgcgttcgtccacccgtacgtttttttcttttttttcacagctgcattttagacaattaggcagacacaaaggacaacagagaacgagacctattctctcatgtctttctctgcaactattccgtctcctcttcttgatttctcccaaaccaataagaacccagatttttcttcatcaaggcctaacatgtctttctcaattccttacatcaaatactacattgggtcttcatacacagccttttttcaaaatggatgctgcttgtcataatttactgatcattgcattatc

SEQ ID NO: 250857 - DNA, 268 bp, Gossypium hirsutum
gcgggaaaaaattccaggtttatttcaaggggctaatccaacctgtttccacactgttttttcattcccttgcaagggatccatttaattaacacataaatgggaccatattgggaatctatgggaattcatgacttgaaaagagaaaatggaaaaaggaagaggagagacaaattagttggagctaataaaaatacccaggggaaatgtaaaggcagaaattaaatttgttaaaaaggttattttttttttttttagcaaagttcta

SEQ ID NO: 250858 - DNA, 133 bp, Gossypium hirsutum
  unsure (1)..(133): unsure at all n locations
cgcgtccgtacttgagaagtgtattataagatgttagctctcgttcctaaattgaaatacccactacttttaacgtgtgttttactttattcacagagaatcgggaggcttaaacacanatctcctctttctt

SEQ ID NO: 250859 - DNA, 294 bp, Gossypium hirsutum
gtcaagaagcttgctttgctggaaagcatctatatgatactcgtcggaagctctctcgattgaagactcggacacgaagaccacatgcaatattgaagcttgtattgtgtggaaaatgtctctcttcaaaatcttctagacgttgatgttgtcaagccttcttccatcttccatccgaccatggttgatcacggattttgattttccactcaacggcacatttccatttatgtatgagacattctattatgtctatcttatctcttatattttgtgaaatttattcttcttttt

SEQ ID NO: 250860 - DNA, 249 bp, Gossypium hirsutum
gcgtccgctaggggggctttcctggagtcttttttaggtcgtttatacctttcaactttcaagcaaatttgtggttcggtagagtgggcatgggggtttaggcattcaggctgaacagcagctggtgatgacttgttgctcgttcttattttcacgaaagaagacagctcgctcagctgtacatacaacagaaattgatgatgaggtttcaggtattcagaacactaaactttcttctttcaaggagct

SEQ ID NO: 250861 - DNA, 198 bp, Gossypium hirsutum
gtaaatagatgtttgaggatccaaatagatgaatattatatgcttgaagattcaaatgattgcgagtgacatggtagagtgctgctggggggagatttgctgctgaaaagtttgtggcgaaactacctgacaaagtaatagagcacctcagtgattgcattttctcaaaacttacttttgatggtttgttttattatt

SEQ ID NO: 250862 - DNA, 400 bp, Gossypium hirsutum
tataaatccaaatttcagcaagccatacgaagacaggatttcgagaaaaaattcctcttttccttcctgcaacgtttgaattgtgacagggcgttaatctttgtttggttcccgagaatatcaacaatgactcgcggcaaccagagagaaaaagatagagaaagggctcaatccaggtcaggcaacaaagggaaagctggttctaaggacgatggattgacccctgaacaacgccgtgaaagagatgcaaaggccttacaagaaaaggcctcaaagaaggcagcgcatgctgcagcttgaggtaacacttcctgcggtgatggttggtagtaattcatgtaactacataattattgtcgtttttaatattttatccgtttttgtttaatatatgttttct

SEQ ID NO: 250863 - DNA, 194 bp, Gossypium hirsutum
tcccggtcgaccacgcgtccggcgagcggccgctcgcgatcttggcggtgccggttgtaaaagtttattgtttgtggaaagagcagagattcttatattagtaagctggagagagattcgcttagagaagctattttaaccattgtagctcatttaaatggataaacatttctattttactgagaccattgaac

SEQ ID NO: 250864 - DNA, 211 bp, Gossypium hirsutum
gcagactcttggctccccgaaccttctcctcaagtacaatatctctcctctttcaagcgtattctgtgcaagtctgtgaccttttgagtgtttctgatatatgaatatgctgaaaatgaatttctcgaaagcaccttttcatattctatatatctttgatgatcgctccgattattgatttgctaatgatgttgattggcactctttgatt

SEQ ID NO: 250865 - DNA, 169 bp, Gossypium hirsutum
  unsure (1)..(169): unsure at all n locations
ggtccacgccacgcgtccgctcacttcgccatcttcaatattttcttccgtggtactttgtctagagacagcnnnntaattttgcattattttaaaggtcaagggcgcaatcaaaggatttggaaggatcgggcttttggtttcgagagttcgctctccaaatcgatta

SEQ ID NO: 250866 - DNA, 382 bp, Gossypium hirsutum
  unsure (1)..(382): unsure at all n locations
ctgagagatggaagagccgaaagcagcccagaactcaccaccgtcccaagatccaaacgcaccagcagcaaccgtaaacgctggtgggacaacggctcctcctccacagccaccaccaacagcaccagagcaaccagctagcaggaaaagacctctagaaaacagcaatgaccaataccaaaactccccgtatttcaagatgcgccttgtcctcaaagatcttcgtcctcatttcatcgaggttcttcgaacgcctgattttcgaaattgcaagggtgcccatgaaattaaagaaaagatgaagcatntagtggatttgtacaagcagatgatagtctctatagagaaaagtattaatggagcaggaaaccagacaatgcaa

SEQ ID NO: 250867 - DNA, 457 bp, Gossypium hirsutum
gccctgctgacgatctctatgctaatgctattatgaactgccatcctgagggtcctctatatgcgtggatgatcaaagatgatgccgcgctaattcctaaggtcagcatcttactcgcattaatgtcattattgtctatgcacctacattgttcaacacaataggtttcggtgactactctttcctcatgtacacaaagatcaccggtatagagaacgtacgtacaacattggtttcaatctaatagtatcataagacagtaatggacctttcttatataaaataatttatcactttttttttttttcattagtttttttaaattttttttttatttattttttttttttatatattcctattttttttcatttttattttttttttatctatttatttattctttttctttttaatttaattatttttttttttatttgttttattattttttatt

SEQ ID NO: 250868 - DNA, 310 bp, Gossypium hirsutum
cccacccatccgatcgcgagcgacctcccttttttctcattaacatctctgtttctcattccagccgtctcatttttaccagctagggtgctctcaaaaaacaccttattgataaataatacctacatcgtccaaatgcacaactctgcaatgccagctttattcttaaattcttttttattttactcatctaaattaaatttctttaattcctatacccatagttaattttatttatttatttaaaatattatcatttataactaccaaaatgcttttcatttatttaccttttatttaacttaataat

SEQ ID NO: 250869 - DNA, 360 bp, Gossypium hirsutum
  unsure (1)..(360): unsure at all n locations
gatcnttcctaatcgcctaataataaaatttgtcctatttaccaccctgttgcgggtattccatttaattctanagcttcatggttgaaaccttctttaactccgtcctttctaccacttccactctctaggctccatctctcttaataacctaaaataccatcttttcactcttatcatatccttatttttaattactaatcttccatataaacctaattcttttttctttttactatttttctccttatacttctatttttattacctataatattttttaaatcttttatcatctagctttttctcttttttaatctatattttcttcaaatattttattttttttcattatttatt

SEQ ID NO: 250870 - DNA, 224 bp, Gossypium hirsutum
atacatcttcaaagaagctggcaatccattttcatcatcttttaaagacttttctgaaagtcggtaaacttataaaggagcgggcggctttcttacatatatgtttgccaccaatggcatctccttcgcagtcaactaacttccccaccatcatgtccatcttgttttcattctttcttatcctaaccataaatgcccttcctttcatcattttgtacttcttt

SEQ ID NO: 250871 - DNA, 465 bp, Gossypium hirsutum
gacccacgcgtccgcttgtcttcagaagaccttatgattaaagaatctgctgaatgggccaagttggccattagtcgtgccatttctgtttgagggtgttgccattcagcatgtttatttcttttcgaagtccatgcatttgggaatgtctagggtcttgggttgcatgtgtcgtgtcatcaccattgtcagacaacagaagttaccagtctttatgttgtcactaacatttgcatcagcatcatggggtcagattccattttttttaatcatgaaggaactggatacagacaattttagtagaacttaacttactcctgtataaagagaatctcttttgttctcgcatgtgcggtttatgtggtggtgttttttttgacgttcttcttattgttgttttatgtattatatttattttctatttatttgtctttatgtttttcttttatttttttttaattcttt

SEQ ID NO: 250872 - DNA, 471 bp, Gossypium hirsutum
ccgattccctaatccgtgttttccccttctctgcttttccgttttttgccctcgtcctcagcctgcttcatcaatttcccttccagctcagttcagattctccgacgcctccttgcaaagacacctttttcatcgcaatcttggccgattttgcattcacccggttgttggtcatcgatctcttccccgatttccctggttacaggttagttttcctccccaagtaaaactcctctgcgatttgtgaagagaaacttgaggggacgaatctgctctcccttgctattcctacttaactgctttcgatctgttgtttttgttcattggcatgctaatgagctttatgattgcttagttggtgtttggtatacttaatctgctcaaattccaaacaatggagattttgcgtaattttagttgttgttgcgtcttggtctgcttggtttggttatatattgttgttagtaatgc

SEQ ID NO: 250873 - DNA, 253 bp, Gossypium hirsutum
atttgattttgattcgtagcttgtatcaggctgctagtaataggagaaggagatgagatgatcgacgggatgaaatctgctggatttggtgatcagcttggcaagaaagaatattatggatttctgaagattttgtgtgggattgaaagggttgagcatgcaatgagtgtttttaagaaaatgaaggctgatgggtgtaaacccggcattaagacttatgatttgttaatggggaaatggtgatctcattatc

SEQ ID NO: 250874 - DNA, 169 bp, Gossypium hirsutum
  unsure (1)..(169): unsure at all n locations
caacaaaccatttcacaggaagtattccagctagcattgcttcatgtgagaaattgtcactttgaatgtaangaataaccgattgaccggagatattccggaatcgattgctatgatgcctactttggctgttgtcgatttgtctaacaactttctaacaggtgctata

SEQ ID NO: 250875 - DNA, 373 bp, Gossypium hirsutum
ctgcctcgaccgacgcgtccgttttgattttgacaagtttttgaagtgagttgtgttattcattcaattgaattgagccccctggtggtggcgacaaagcaaatttattgtggaaaacaaaatttgatgttagattgagtaggataaggagatttgtgcttgtgaaaattcagtgctcaagtgaaaacagtttgtgaagaaatcatagtactataagaaggatgaggggaagatctgatggaagccaaaagaagagattaatcacctgtgtttttgcctttgtcattctttcttggttttattatagtatttttaaggatctttttatataaaattttataataatatgtccttttattatcttaatttattt

SEQ ID NO: 250876 - DNA, 182 bp, Gossypium hirsutum
  unsure (1)..(182): unsure at all n locations
aacaatcaatcaaatggagttaggggaactgttttcgatcttcggtcccggcgtctctttcgcagttttctatagccggcttggggttttnnttanacnccttcatatacattctttacaatttatatttataatcactttttacaatttattaatatatttttatcttatttttttttttt

SEQ ID NO: 250877 - DNA, 420 bp, Gossypium hirsutum
agcattgttgcctgagttcaccccaaatcccgttctggagcgtttttatcgtcatctagagttgaaagcaaagcagccagatgcagctgtacctccacttgatgaaactctaaagaatatcgttgaaccagacccggagcttgttgctgaaaacaagtctgtttttgatgcattacatagacactttgaactcaggcaaaatcctaagctgaagaaatcatccaggcagtggtatcaagagaaacaatcaggatcaaatgcacatgtatccagtggtcaggctgtcaatttcattgaaaatcaaccaccagttaagattgagaaaattggagatttaactcctgtccaagattttgaagccatgatgtctcaaaaagataacccagaatgggttgggaaagccatcaaggaattaagaga

SEQ ID NO: 250878 - DNA, 458 bp, Gossypium hirsutum
gtttgaaactcaattcgaatttggttcgttttgaatttattgattttgaaatccaatcatatcaggtttagatagattatttgattgaattatatttaattagaattttattgagatataaaaataaataatatttaaatacaaaagagatattatgtttagttttgttttttgtgatttcctctggtatttatttattttcttatattctctttccgactggtcttgcagtggctggctggctggcaggctttcatgccagcaactatgcgacttcctgtctcacccacccaccctcccttcttccccttgtctcttccaaattcagtccttaaagggcatatttgaaaattgcattatttttttggttgttcagtgttgcatgggatatatcgtcctcggtatcactaaagaatagctattacaggagggctctagatagggaagaaatggccttt

SEQ ID NO: 250879 - DNA, 307 bp, Gossypium hirsutum
cttacgtggaggattactgaccgagctacattgttttttttcaccaaaggaaatttacattggtggcgagcgaacactttgacaacgttggggctgtacagaacaccaactcagaagggccgcccgcgattatggttgctcgggcctcctttaagggccttgcaaggttgttcggttacagtgactgcgggtacgctgacgacgatgtgtacaggacggatgatgacttgtctgaacatactctaagcactgtcatgaccatggtggtaagcactaggctgagtacgatacggggctgtggtgtgaa

SEQ ID NO: 250880 - DNA, 440 bp, Gossypium hirsutum
gagaaaataaaaagatgtattattgaaaatatttttcaagatttggtcctaacagatattatatgatacgacatgagatggtcgggatcagggatgggcttgggtcaggggcgttacttctttcgtgaaagagcagcagcaatgccaccagcaatcagcccagcagcagaaacagcaatgccaataccaatcacaccatctttcgtaattcgatcttcgattgccttcttcagagattgtgcctgcctccattcaggttctaccattaaacactgctccacaagctctctgctccttgaatagtcaccttttcggaaatgcccaacagccagatgataaagcttctctcgcattttcagtggatcggtagtgctggctatagaagctttgagcatagctataccacgttctatatcttttgttcgttgtgagtgaacaag

SEQ ID NO: 250881 - DNA, 410 bp, Gossypium hirsutum
ggcaaacctatgaatggcattatcaaccttgtttgaggtggacgaataaaaaagcactgtggtgacatcatttactagcacaggcagagcactgactgtgacagagtccagcgaagccccgagctgcatagaacaccagctcgcggaagtcatagttgcgattgtttcagcatacataaggatgcagacaataccaaatagcagtaaggcaagtgtgctagctgacgcgagaaagacatattgacgactatggtacttgaacagtctccaagaatgttctatttaggggtatatacctagaggtgcatgaattgcgagaccaccagcaagcaggatgagaaattgattaagcattctaaaggctaggacagggtcatctttgctcagattgatgcttgtgctaatgaaca

SEQ ID NO: 250882 - DNA, 438 bp, Gossypium hirsutum
gagcttttgagctctctccctctctcaaacccccactcctgctcggcctagggtttcggccgtaagtgccgccgtagcgccaccgtgaccgatggccgacgttgcgcaaaagaggcgtttcaaccccgatttccagtgcgctcaaagatccaaccttctttggcctaaaaaaccaggagagggcacccctagccccccttttaggtctaattccgacaacgggaaaagggccttcgacgaccggacttgaggggctattctaggtagcagaggcgtggcagaggctgtgagacgcgatgatagaggcgtacggtcaatggtagaggacccaggcgcagcgcctagggttagcaactttgttttttctgctaaaattttttagcttgtgggctttgggcttcttaggttaggtttgggcttggggtgttgtttttaatt

SEQ ID NO: 250883 - DNA, 453 bp, Gossypium hirsutum
tttgtattcctattggtatcattgttagctattgttgaccaaactcggaaccctgcctatgttgaccaggtggtacttgcccatgacgtcccacaacaaccacctgctgcagcagttgtgaaagaaccacctcaagctgaaactgatgaagaatccgtaaatcagaagccggtcgagaaggctttagtggaagagtatttgtcaaaacccaagtgtgataatcagggaaatgttcttcagtcgggttctttcaaggaagagagcacgagggtggttgatcttcttgataatgaaaagaaagcgttacaacaacttaagcaacttgttcaagaagcgcttaacaagcatgagtttggtgggcaacaaccagaagcgcctaaagaggatgacgagaaaaaatcagccaaagaggaggcaaaggacgaagcggttatttgtgacgaaccaccaaaa

SEQ ID NO: 250884 - DNA, 440 bp, Gossypium hirsutum
tcaattttcccctcattctttttcgtgagagggagaacccaaagattttgtctgccgtttcttttttttttttgtgatattgaaatcctctaaatcacataaaaaaagaaattggggcaatatattggatccataccattaacatataaagagatggagaatggaggagtagagaacgcccaagcccacgcccatggcgacggcaacggcaatgggcaggcggcgtcgtatacttattgggtgagagaaacgatggcgggcgctactccgctccctgttcctaagaagctcactgctcaagacatcctttcaactcaatctcagtctacatctcttggttctgtttggaataaggctggaacttgggcttcattggatttatcttggggcaaggcatcaagtgtgttggtgatgcctttttgggcgactgtacgaaacaa

SEQ ID NO: 250885 - DNA, 426 bp, Gossypium hirsutum
ctttctacaactgggctatagcaatctctgtttgtgcaaaaatgcgtggtcggaccaaagagggggaagaactatgggagcaggcggcaaaaaactatgaaaaagctgtccagctcaactggaatagcccccaggctctaaacaattggggacttgctcttcaggaactcagtgctattgttccagctcgggagaagcaaaaaattgtcaggactgcaattagtaagtttcgtgctgcaatacagttgcaatttgatttccatcgagcaatatacaaccttggaactgttctgtatggactagctgaggataccttaagacatggttctgcgaatctgaaagaagtttcctcagatgagctgtatagccagtctgctatctatattggggctgcttatgcacttgaaatcaaattacttcgttttc

SEQ ID NO: 250886 - DNA, 413 bp, Gossypium hirsutum
gaggattcgacccaaggagaagaggggacagaaggaaacaaaggtcaagggcaagtagttgttcaagtagtcgaagaagaagaagaggaagaaaaagaagaagaagaagagtacttttacgaatcccttgatcgcattgcttcttctaattcttgttcttgttccaactcaactactccttcgtctgactcggattccgacccagttacccgttccagcaatgcccgccacccatttcccgtcccgaaattccccatggccgtttccaagttcgacatctggatctcagaacccgccttcgtttccgagagaagaactcggctgcaccgtgaaatgggtcttagccgcgaccccggtctttcccggtcaatacccggctcagaaacggaactgggtctgggacgggaaatggg

SEQ ID NO: 250887 - DNA, 121 bp, Gossypium hirsutum
  unsure (1)..(121): unsure at all n locations
gnccaaagagatactgacttccaaaacttactttgatttttttataacgccaaaacaccaatttcgcgctgtttaaccaaactggtcgcgaggctttaacttttaggccccatcaccccct

SEQ ID NO: 250888 - DNA, 308 bp, Gossypium hirsutum
cctcaaaagtcttttttatgcttctctcactgctaccgccgacttcataacggttagccgtcgtattttggcggcgccgattttcctgtttcccggcgatcttctccgaaaggaatagacaaaatgattggatcctttcttaccagaggactagtgacggtttttgcctatgcttttccagcatatgaatgttataaaactgttgaaatgaataagcctgacgttgaggaactgcgcttttggtgccagtactggatattggtggctgttttgatcggtagtgagagaattggtgatgctacaatttt

SEQ ID NO: 250889 - DNA, 305 bp, Gossypium hirsutum
aggtaaatatgcaaattccattcaaagagaaaccatacatagatgcaaccggtaaacaaagactagaaattatttaaaaggccataaaagggcacaatccttcacgtaaaaccagaaaacccacattaaggaagaccttaaggcttagaacccaccacgaagacgaagaacaaggtgaagagtggactccttttgaatatgatgagaatgctcaaccagttagggtttgagaccgatgcatggctgaagtgacttataggctgagtattgctaaggaaacaggaagtgaacctgctgttttacag

SEQ ID NO: 250890 - DNA, 308 bp, Gossypium hirsutum
ggctcagaaattggatggcaatgccacaaggtgtgactctcagtcatctctgtctgtttcaagccctcctgattctccagttcatctatctcatgatgatttggatgaatctggaggttctacagtgttatcagctgaagagaataaagaggtcaacttgtcaaggccagaaatagaaccgctagtgttacctactgaagctgggaaacaggatgtccggactgcatcaagttctatttctgctggtgatgatgaggaatggactgttgataacaatgaacagctgcaggagcaagtagaatatgacg

SEQ ID NO: 250891 - DNA, 433 bp, Gossypium hirsutum
ctactctccacaaccgaagaggagggggggaaaaagccatggctgtggacaaagataagcttcaagaagaagcttccattgttcgtttttgtaaaattattcttggctgggactattttcgcctcctcaaattatctaaaaaaaataacaaagatgaggcgacgtcggctttaaaagaagtgaaggatagctacaaagacgttgatgattatttggctactttcgaaccgcttttgtttgaggaagtcaaagctcagattgttcagagaaaagatgaggaggaagtggctgattggaagctaaagctggttatggaatgcaatgaggctgatggattttacttacctgcgattacttatgaagctgaggaggaagaatcgatatcacagaatggccttttgctgctttcaaaagaggacttttaaggggttgt

SEQ ID NO: 250892 - DNA, 223 bp, Gossypium hirsutum
ttttgtttttagcttaatctttgggtggggaaacaattaaacccgggcgttccaaacatattcttgcatcagatatatccaaatgcgggttaaaaaagggggtacatttttactacattccattcaaacgaccaagtttggtgcttgggcaggctcttaatttataacctcgtaaaaccaaatatttaacctactggctggttaaggttgaaactgttacttc

SEQ ID NO: 250893 - DNA, 329 bp, Gossypium hirsutum
ctgcaatcttcctttgcttcactgcttcagccatctctaaatcagcacgttttctatcttcaacagccttcttcttagtttctttagcaatcttcctctgcttctctgctttagccatctccaaatcagcacattttctttcatcaacagcctttttcttagtttcttctgcactcttcctcaactcgcttgctttagccatctccaaatcgacaagttttctttctttaactgccttctttttcttttcttgtagcttcttaaattcctcgtcaagatttgacttctctgaatccaacttggactctgctttactaacatctctcctt

SEQ ID NO: 250894 - DNA, 376 bp, Gossypium hirsutum
tccacacgtccagatgatgtcgacgaaacttttaggcagcttaggatggaagcagaagctagggctgaggagcttaagaaatcaaaacagatggttaagcctgtcaataacagtaagaagcaagggcaggctcagaaagctggttttgataaaggaaataagaagagggagggtagctcggctgctggtggtggggatgataatgataaacgcaaaggttgtaaagtggatcatctagacggcaaccgtaatacccatgagattgattaatctagaaaggcactctgggtgtactggccaaacagttctggttaccaaattatgatgattgaagcatgtatctataagcttaggtcttaaccaagttggtacggct

SEQ ID NO: 250895 - DNA, 298 bp, Gossypium hirsutum
cccgatttgaacatccatcctgaatcgtggtttttgattaacgctggctagattttgatgcagtgacagtgtggtggcttagatatggagacagagaatccggtgaattacaagtatatggggaggagctttaatgatttgagtatcaacgacgattctacagctttcagtgattgtaacagcgatagatcgggggagttcccatcggcatcgtctcagaaccggcgattactactcgcctgtgctaattccgagaattcggatgatttgatacggtagctcgtatcggatcttgatt

SEQ ID NO: 250896 - DNA, 264 bp, Gossypium hirsutum
  unsure (1)..(264): unsure at all n locations
ccgctccaatcgaagctcgcaactcgaggaagggaagctagaagtgcaaggcanataatgaagacccatnttnctttcttcaagagacccaatgganctatcccnntgatgggnngttgatattannaggtgannaggctcaagattgattcgnnaggttgannaggtcctcaggnnggtaagctcaatctcgtaactttcaaagcaccttcacacctcgtattttcattcttatcaagggactgaggagaggcggcaacacgc

SEQ ID NO: 250897 - DNA, 255 bp, Gossypium hirsutum
gacccacctctatgctgttaaagattaagccatgcatgtttagttgaacaaatcagactggaactgaatggctattaaatagtatagtgtgaggattgtctgataaccgagtattctagagctatcggcacacccgctttgaaggagcatttttgaaaaggtgcgcggcttgccgtgttgtgtcatgatactgacgacgacggcttggccgcaccatattaaatttgcctataactttatgtggaagggcactat

SEQ ID NO: 250898 - DNA, 173 bp, Gossypium hirsutum
ccacgcgtccgtgcaggagatttgggaaccatgttcgtgaaaagggatcatgttcgagaagctcgctgtggaacgccgtcttcgtttaatccaccggccttagcgggggtgagcccaattagagcaaggggagatgaaatggacgttgatgaggaagaggaggatgtaggtga

SEQ ID NO: 250899 - DNA, 389 bp, Gossypium hirsutum
gagacgagtggcgatggaccacacatcacaagccgttctagcctctgtaaacgaggaaagaagtgaggaatcgattgtggaaagaagctacgaagtgagtaatcgatcttgctgaagaaatgccgaggcatccggattctgcacaatcgagcctttcggcgatggcacaaattgcggtggagcaggaaccgttccatccaaaaaaccagtaggctcataaccttcaactattaacctaacatgttgcttccactgaacaaacgtgcctacatttagtttaacagtctcatgacgcggaaacgagtgaatgagtctggcactagtaaacaccggacctcaatgttcgacggaagtagaatcaaaagccgtggtggtcatgatcacaggtc

SEQ ID NO: 250900 - DNA, 219 bp, Gossypium hirsutum
gtactactactccaagcaagtatttcccttactttttggtttttctggggattaaccgatatggctagctcaaggtccctaaaacttgcatgtgtggtggtgttgtccttggtattggttgccccctggctcaaggggccgcgacccgtggtcaagatacaaacttccttgcaccctgttttttttactcttgaggcacaggtgcttttgcccctcccc

SEQ ID NO: 250901 - DNA, 413 bp, Gossypium hirsutum
ctcccatttcttctcatctccgtcgtgcgccctatattccccaaataaaagtttgtttttcttcagctgaaatcccccaaatttcccatttccaacaacagacttgaaggaagaaaaccagaagatgggatggaatcacccagacatatcgctggaagaactgatgaaactgatagaagggtttgttgatatcctggttttttgttttgttttacttttttaattttatttacttttgggactttttaaggaatgacaagtaaaaaagatattggcgatttcgacaaacccatatcagagactagggtctcaagggaagaatgtggttcaaatgggagaaatctaaataagaagagaagtattgcacagtttcatttaaaggtaggtcaatcttgttttcttttcatgccttt

SEQ ID NO: 250902 - DNA, 262 bp, Gossypium hirsutum
aaaaaagaagagagagagcgaagaaccaaatgagcagtggtaaaggaggggagctgatcccatcaagctccgaattggacttggatcgacccaacattgaagattatctcccttccggatcctccattcacgaggccctcggcaagcttcgcctatgcgatttactcgatatttctcctactttaactgaagctgctggtgccatagttgatgattcgttcacgcgatgttttaagtcgaatccttccgaaccgtggaactg

SEQ ID NO: 250903 - DNA, 168 bp, Gossypium hirsutum
tttttaggccttatactactgataattcagtgtatgttgccagaccatactgcatcttcttttctgcttgagaccctcatactgattatcaagaaatggaacctcaatacacaccttttaagattgcccgttttgtatgactacgggattggacgtacaaacatggag

SEQ ID NO: 250904 - DNA, 350 bp, Gossypium hirsutum
  unsure (1)..(350): unsure at all n locations
aagaaagatgatggaaaggggttttattgtttctgtcttgacggaggntttcgccgcgacggtggttacggcggctgacgagagtgggttagcgaatgagtgcagcaaagattttcagagcgtgatgacttgcttaagctttgctcaaggaaaagcagcgtcgccgtcgaaggagtgttgttattcaaaggcgtgtgtataaagtgtttttacccaaatgtttttgatatatttttcaacaaacacaatacttcttctgctatattttcaaattcttttgtcttcaattagatttagctgctttattttccgccaatttttctattgcatactatttttttaaaaatttt

SEQ ID NO: 250905 - DNA, 332 bp, Gossypium hirsutum
gagagcgagagacagcgttttaatggcggttgtttcgtcgtcactgaaagtgttggctaaggtctttgtttaagccaagatttgattagttatggctgcctcttcttctcttctctttacactgcttttggttcttctcactttctcagattcatcagtacaaaccctttgtcttgaagtttgtattaactatggttcttatgcaaacatttttccatctccagtccgtgtctcataccttctcagatccctcatatttcagcagagttataacctttatgatgctgatccaaattgtttttcttgctttcgccatcacaaatgttgtattc

SEQ ID NO: 250906 - DNA, 372 bp, Gossypium hirsutum
aacaacactaaaagaactacttcctgcaataataaatgggggaaacaagttagaccatattttgagagttctactctctcatatcttaggctctgctcagcgttgcccacctctttctggtgttgaagggtctgcggagtcccaccttcgtgttttaggtgaacaagagcgttggaatcttgatgtttcattaagaatgctggctaaattgcttccttttattcatcagaaagcaattgagacttgcccattttcctctgtttcggactcaaatcggacattgttgtccagctccatacttgaactggatgcagggggacatgttgaatggcctgcatttgaatgggtgcatgtcgattgctttcttggttg

SEQ ID NO: 250907 - DNA, 387 bp, Gossypium hirsutum
caggagttgagagcggatattgggttgtttgtgtgtaggattgacaagattccccatcagttgttaggttcggtatctagggagctgtttgatattttgagtaaagttagaagtttgggtgaagagggtccaaattcgatggagttgctttctgacaagccttattcagatgacctgttgtttggggagaatgttttagctcactggtgtgatcaccatgatcggatatacggtgatggcaaggatgcattattgattgaagatgttgaagacagttttggaaggactcttgtgatagttgtttttgtcaccctattcctccaatatttattttatcaatttatttttttatcattcatttttaataacttttttttttaattattt

SEQ ID NO: 250908 - DNA, 333 bp, Gossypium hirsutum
agatctcactcatcaatcgttttgccattttcctatgacggggacaagctgacagggctgtgaccttatcgtaccttgaagcaattgctagccctcccaaatttttcatccagagatatgtttctgcagtaccgatgcctaggaatgttcctgataaggtacaatgtcttccactttgatgattagctaattgggtttttccggttcaagagttgactggatactggctgacttataagtgaaatcttctgaagatttctcagctgcaaattacttataatgtgtggtaaatatagattgtcagctttaggattatttttctctatatttttt

SEQ ID NO: 250909 - DNA, 439 bp, Gossypium hirsutum
agataagtgagtggcgaaacaagggtgttgaaggtatgtttgaggacatacatgagatggacactgccagtattgaggattctcatctagcttctattgactttaagggccatttgggcatgaggcttggcaaccatggagcgtcatcctcaactgggagcatgacatcactatcctctacgaatactccaagaggaagtcactttgattctttctggttggagcgtaacaatccttctgaactagaggatttgcaacagatggttgaccttgcaaatatagctcgttgtgtagcagacacagacttgttgaaagaagggtctcatgagttcttgcttgcatgcatgcaagacttgcaggatgttttacggcatagtaagcttaaagctcttgtaatagatacttttggaggccgaatagaaactcttctgagggagaa

SEQ ID NO: 250910 - DNA, 237 bp, Gossypium hirsutum
  unsure (1)..(237): unsure at all n locations
ggcacttgcacatgagttagcacgatccccccnntcttttgaagcccgttcgacagcgcagtcagcgcgagcttcgaaagggaatcgggttaaaattccagaaccgtgacgcggaggctgacgacaacattagggagtccggagacgtcagcaggggcccaaataagaggacatataacacacaatctttctatccataagtggaaacggcagaaacggtagttggctactgagaac

SEQ ID NO: 250911 - DNA, 246 bp, Gossypium hirsutum
ggatcatccaaatttaaacccgaacttaatatcaaccaaaacctcaaatcaaaggaagccttttgacacagaatcaatgacttggttcgaattgtctaatccagttttctacgattcctcgatttttgtactcaatacaagactagacaaacctttagttagtggtccaattgaccagatttttgccctcttggacaattagcccaagtttactcaaagcatgcaatgtgttctcttatgttatca

SEQ ID NO: 250912 - DNA, 270 bp, Gossypium hirsutum
  unsure (1)..(270): unsure at all n locations
acccacgcgaccgcccacgcgnccgcggaaaaagacacagcgngcatacgnngcaacgccaagaanncaagagcgggggcanncccaagccgaagagcacaaagcagcagcgggcgccaccagaagccacgcaaagaagaacgagccgccggggaacacaccagcagaaggagaggacaacaccgcaaaggccacccaaaaaaagaaaaagaaaaagcagaggaaggcagaacgagcgaagaagaggcagaggagaaaaaaggaggaaca

SEQ ID NO: 250913 - DNA, 382 bp, Gossypium hirsutum
cccacgcgtccggtggatgacgatgatgaggcacatgaggaggaagatgggctcgggctctttgatgggaatgatgaagaggatgaagatgacttggaaaatgccagatatgaagattttttcagtagaaaaaagaacaagagttccaaggagaaagccaaatctagagacatgttggaagaagattcaggatcagatgattaacaagatgtggataagagaaagaatggcccttttaagcatgtaaaagaacttgacatacttagatctaaaatagaggaaatggagaaggccaacttggatccaaatgtttggacattgtttggtgagtgtaactcatcatttaggctaaatattagtgtaattataaagttattttatt

SEQ ID NO: 250914 - DNA, 492 bp, Gossypium hirsutum
cattgcccatggttagatctaaactaaaaaaaattccaccctgttgtatatttgacaaaaagacccatcaaagaaaaaaaaacaaaaaaaggggaagatttgctgctcaaaacaggtatctgacacctccccaaagacataggggtgttagaatctggtctggaaaatcaaacaaagtttaccctgtccatttttttcttcgatgaatcctagaatgcaaagcaattattattaagtctttcattaattgcctcaaaagaaccattactgaattcatcaaaggaaaaaaggggtgacatatggataggttccctgatgttctgtgtggttggagctgggaggagaacaagttgtttgagctggctttagcagtggtcgatgaacaacaccctgatcgttgggaagtggtagccgccatggttggagggaaaaaaactgcagaagatgtgcataaacattatgtcatacttttggaggatttgcagtttatcg

SEQ ID NO: 250915 - DNA, 244 bp, Gossypium hirsutum
  unsure (1)..(244): unsure at all n locations
tattttttattatgnacaaacaatagcagagtgatataaaagatgattaatttcaggtgtttggtaagaacagtacaaacagccaaataaaaacatacattccaaaagtttacaattacccttcttattttgtcgagcaagcactaaatttgccaaacaatctcataattgatcatagactctacgtaggcaatgaatagcagtctgaacatgttgtgatttaaacaaaactaactccaatttt

SEQ ID NO: 250916 - DNA, 444 bp, Gossypium hirsutum
ataaactatttaaacataaagaatagaatttggttttattttaacaattaggttatttaacttctgaactgaaatttgaactaactgaatttaacaacctaaccaaaagcaaaccgaagagaacactactgtttgaatcagttttcagttttctgctagcctagaacagagtagtaggaggttcaacaatggttgcagactataagcacttcatccaaataagaatggcataaaatgaaattttaaaaataaataagcattttcatgtagttgtaaccttacattcaaatttagtttctttaccttcagctgataattttttcacttgacacataacattatattaaagcactgacagtttgttatccttattttattatcacataatagactttttttttcttgttttgttagtctgttcgttcggttttttaataggaactt

SEQ ID NO: 250917 - DNA, 214 bp, Gossypium hirsutum
cccactcgagcaccaacgcgaacgcccacattatctcactcgccaacgtggctatttgagggggttggatttttgtgacgggcggggggagtaaaaacatattatgcaccatctccattgccaaagacaacaactgtgtcttcggcgaaagcacccaccacttattcaagaacttcaaacacatctttctctaaatctacatcaacattaccta

SEQ ID NO: 250918 - DNA, 405 bp, Gossypium hirsutum
gggatttctgtgcagttaaagaactttctgatatataactttagggttaaataaaaggaaaacaaattacgcattgtaaagggatggaagaaattgctttcttttagtgtgacagacaaattcttagttcaaaagcttgaagatttgcttgctttcacggcaacacaaggggagattgtacctctgtatatgtttgctgtaataaaaatgttagagaaattaggcgttattttgttttaacaatgttatctagtgtttttatgtttcgttcaattgtcacctactatatgaatattactatttttttttattatctttcttataatatgttattctactattagggcttgctccttctattgttccaatattactttcttcttttttcattcttcttttttactt

SEQ ID NO: 250919 - DNA, 337 bp, Gossypium hirsutum
cggacgcgtgggcggacgcgtgggtttcataatattatttactctaaatttaatctctcaacatctttcaaacaatggcttcttttggtgttgcttcttttttcatcgttttggtcgtggcatttggtgtatcaaacttggaagcatgtactcatgactcatagtgtcaattgaactgtgatcatttcggcctttgtgacttaaaaaccaattaatgtagttgcttgccagtgactgagccattactctttgttggtgttccgatttctaatgctatatgcttctcggtttacttttgtatgaattttgttctactttttgcttactttatatttct

SEQ ID NO: 250920 - DNA, 410 bp, Gossypium hirsutum
cttattttttacactgtttttcacggtggtggtgttttctatattactgttcgaaacaaagcgataagaggctatttttgctgggtttttgttaggggtatagtgtttgagagagaaaaatcagagccatagatttctaatcctttctctcttttcctcttttcttttttccgctagatctagcagtatctaagtcgattttcttttcttctcgttttgggttctctggaaaaggcaaaacggcagagaggaggctttgttgagcgttgttttcggttgcgctttggaagagctaatggaggttgattagtgaatatatgtcggctgagtttgattttggctttgattggggcttaattgtcagttctgtttttcatcttctacaacaactgtctttgctcgctttgttc

SEQ ID NO: 250921 - DNA, 369 bp, Gossypium hirsutum
gggcttgaaggaggaaggtgatggcagagatctagtgtttaaaatggaggatccaatggcaggatcaaatgatcctgatccttaacttgctcaaaatcttgaaattcagatagaattctacatcacctacaaccggggaagttctgttgtcaacatgcctgttgggaaggtgtttttaattttttttgtgttttgtttttttttttttttattatttaatttttattttttctttaatatttttttgtactattttattttttttttatttttttttttattttctctttttttatttattttttctttattttttttattcttttttttttattttttttattatttttattatttttgttttttttt

SEQ ID NO: 250922 - DNA, 334 bp, Gossypium hirsutum
atagatcacgtgaatgttgatatgagaatgggaaatggagacgagtggtattaatttgtagataaagttaatattacgtagtcgcataaagcggcatagtacacaacccacaactctggaattttaacatccatatttattctgtagctatcgttattttggcttccactagctggtgaactttccatgccaaaacttcacttgacgctgatgcagtcagtgctagggctgatcttgtaagggatgttgacaccgtactttgccttgatttcgattttataaccatatttttatgtcaaaaattcccttattcgtttttttgtatttatgttta

SEQ ID NO: 250923 - DNA, 509 bp, Gossypium hirsutum
  unsure (1)..(509): unsure at all n locations
tggagatccaaaataggacacatgcattctaccattggaaccgcaatgatgatgggaaaaaagtggcaactgactcgtttgtattacacaatcagtactggtcaagcaatctgagacgaagaaaactgaagaagcatcatttgagtagcgtgcttaagagtattgcttcttattgagaagatgaactttcgactagagtatttcatctctggtacagatttggttgattaaatttcagtaagaagatgaaaatgccaaaattaatcaaatcaagtaagcaaagatgctaaggagttttggcattntcttctttttcttcgaaatcatgcttcaaaatgaactctttaaatggctcataaattgtatgctgtagctagaattatcactgttcatgaattaggtggatttacttcgattctaaatctctcttttcttttttggctacacccacagttcgggttaaaataaacaggtctgtgtaaagcttgctgtttgataatttctgaatc

SEQ ID NO: 250924 - DNA, 317 bp, Gossypium hirsutum
aggttgctcttggaacatctagctttcatccaaaaatggttctccaaaacgatatcgatgtgttgatatcctccagcggagcgggagaagaagaagcacaaactcaaacgtcttgtccagtctccaaattctttcttcatgtatgtcaaattccaaggctttttctacttatcttcagattttagccattcttatacactgatttcatgtttattatttaaattaatgaatttttttatttttttttattttcctctgtaatatttacttttttatttttacttatctattttttctatattatcattatatatcta

SEQ ID NO: 250925 - DNA, 302 bp, Gossypium hirsutum
  unsure (1)..(302): unsure at all n locations
cccggtcgaccacgcgtccttttatctattattntattttatatttttagtttttaatatattttggaactggttattgggggtttgaataaactatcctaaaccttggggcttattaactaaagatgacattttggtatcttgaactatttaattttataatattttatgtttagtacccaccaaagattatgtgatgtaagctggttgtttaggttgctttccgttccccctttagatcttatagttggctccttgttgcttgtctcccaaattaatatttcatgtagccactccagtgt

SEQ ID NO: 250926 - DNA, 243 bp, Gossypium hirsutum
tttcatcaagggctattatttctatagtccaattctgaactgctttgtactttatattcaagcgggtcgtaggactacgtggccaagcatctgacatttatagtgcaacagctgtcagtttacattagttactaaaatccatccaacatctagtttatcagctagcatttgcaactaatgttccaataggatggtgactttgttaatgtcaatgttgaggaacatacaactgtgcaatatacc

SEQ ID NO: 250927 - DNA, 502 bp, Gossypium hirsutum
ctaatcttgccgctgtgtctgcaatacaaggtgaacttgagcgggcccaccattttgtgacacaagcgttgtccctggtaccaaacagcagcaaagccactatgactgcaatttacgtcgatctcatgctcggtaagtcacaagaagctctgcccaagttaaaacattgtagtcacgtcagattccttcccagcagtctacagttgaataaatcctcttaattgttgtgtgggtggttacaaattcgaccgggagtggaccaccacacggtagttagccagatagatcatcaatccttttagaggatttgtatcatatataatatagttcaaattcagataataagttttttggctttttcttcttccttttaaattttccacatctagggttcatttttcagtgatgggggctgattttccacctgtgaatttgagattatgtagtagtttccattcaggcttattttgggttctagtggctaaatcctctttgtatttta

SEQ ID NO: 250928 - DNA, 446 bp, Gossypium hirsutum
atcatccttgagcgtgtgtcaaagctcataactttaattttttgcacaaccagatgtagactcagaatggataccagttagggcaacaattcctccagcttgatctttcatgagacgttggtagaggtctcaacctgttacagggcgttttttgttatgctactatatttccgctacgtaggacttcttctgagctgactacatttccatcgaccctgtcaattgctgcatgtccgtactcggactaggactgttatttacctaactacaatatatattctcatatcttgtcagtcttatacttttttgctttcttatgattattgtttatgttacatattctttaattagttttactaattttttattatttacattttaggtttttttttaatagttttatttatattttttctttttttatttcttttttctttttaactttt

SEQ ID NO: 250929 - DNA, 424 bp, Gossypium hirsutum
cccacgcgtccgatttatatatcttgtgttctctagtattggtaggactggttttttggtgttttaattaactgtcctgaaccttctttctctatcacttaagcagtatcttggagtctgaactaatgtagtttcaagtttgatgtttcagtacccaccaaagattttgtgatgtaagctggttgttttaggttgctttccgttccccctttagatcttatagttggctccttgttgcttgtctcccaaattaatttttcatggagccactccagtgtttctttttagttattgtgtttcccttttttctaagaatgctgattcatctgaaactatcttgtgggttttatagcaatgttcgggggaaagagtgacttgggcaaatggacatgatgttgatgttgtggctgttgatgctgtttga

SEQ ID NO: 250930 - DNA, 380 bp, Gossypium hirsutum
  unsure (1)..(380): unsure at all n locations
cccacgcgtacgntaatctgagcgggcgctctttttttttatgtcccataaagagccgactttagcacaaatgaccttgtaaagggatttctcagagatcagcactccattgtcaaactacaactagatcctcggggcaatgctgacattcatggcaatgaaccccattgacagcatggagaagatgaatgctacttaaatactatacatagctgtgtcatctactactggcctgatgtgaaaaagcacttagattttaatcgctgcacggagcaacacagctcaaagaaacggcttggtaaaaacagagcattaatgtggaaacaatgcattgaatagctgggaatgagtgctcacagaatcaacataagctatacttc

SEQ ID NO: 250931 - DNA, 246 bp, Gossypium hirsutum
cccacgcgtacgctaatcggagcggccgctttttttttatatggcggaaaaaataaagtatgagtagtaatataaaaagtgtgtgaagatatatatgtaaacactagtaatattcaaaacttctcaatattcaggttgtcttttatctgaattctagactcaaagttcaactgtgttaggccgaaattttggtgcgttacaaagaaagcagactgtaaattgaagattggtagaggcaaattttat

SEQ ID NO: 250932 - DNA, 265 bp, Gossypium hirsutum
aattttcgtacctctactaattcccatgtttttttcttattgcaaaacataaaatatatttgtggtcttttatgaaaataacggagcacttatacatttattttaaataacgccagattagttacgtctaggtaaaaataacggaccaccgcccattccgattaaagttctaccacatgctattatgttgccgtcagtccatgaacatcctttcgctataggcctatgctcaatgccacctcacccattttaactggatgaacta

SEQ ID NO: 250933 - DNA, 447 bp, Gossypium hirsutum
aattttcttccgtctccaaatagccagctagtgtttgtattgcaaaatttcaattagaattttgttttctcattaattttcccgaacacttttacattgattttaaagaacgatagtttagttatgtctggaagaaatcgtgggccaccgcccattccgatgaaagggccacctcatgctggattgctgccgccggtgcatgaacatccttatgctagaggcctaggaccaatgccaccacacccagctttactggatgaaataagagaaccccaatttgtgttgggtcctagagggtttcctcctcatccagctatcattgaggagcgtcttggagttcaactgcaagaaattcaagccctcctggcggataatcaaaggctggcagcgactcatgttgcgttaaagcaggaattggaggctgctcagcatgaattaaaacagatg

SEQ ID NO: 250934 - DNA, 236 bp, Gossypium hirsutum
ctcatatctctaattgaaggcttagttttacaaatcatgtttagtgtcacggagtcacttgaggtagtttcacatagatatagatgctgcacgaacagaatttgaggagtctgttgcgcaggcattctttgatatggcgaatgacgtggtgaaccacttgatcccgtgcttgtcctacgtacaaaacggttgttgaccagattgatgatgctgtaatggggtaaaagcactctacg

SEQ ID NO: 250935 - DNA, 197 bp, Gossypium hirsutum
gagactgagttcatttagtgggcctacggtaatttttggttctcgactctccaccgcttatcacgaaatgcttatctttaatgcccggcctcacttgttgtcttgttgctccactgtgcacggtttccatatcttttctctcctccattccccaataatttttctccctttctaatggttttcgttttccctatttt

SEQ ID NO: 250936 - DNA, 188 bp, Gossypium hirsutum
cttctctgtcatctccatcaagatttctaagagctaagtctgctggagaagaagctgatttgtgagagcgtttcttaggctactgggatggaacctgctgtaatgattggtaccgaggatcttattattatattgatggctcatattgcaaagaaatatttgttttttctactaattggttattggct

SEQ ID NO: 250937 - DNA, 181 bp, Gossypium hirsutum
cccacgcgtcatggcttcctaccaaaactagcatatatgtactttgtaatgaacacctttgatggtctccatgcacaaatcatgccatagaggacttgaacctaatcccatcttcatccaccaatgagatagagacagcatccagacagcacgaaagcgagaccttctattctcagacctc

SEQ ID NO: 250938 - DNA, 192 bp, Gossypium hirsutum
tgacaatattattatctcacatagtgtatttattttttctacccatgaaactggcactggtgtccaattcatgaaaaatgggcggatcttcctttaaaggctttgttatcctttactgcataacatacctaactatcaccaatcgttcaccattaatgtatacaagaattattaccctacttaacttacttc

SEQ ID NO: 250939 - DNA, 437 bp, Gossypium hirsutum
ctttgctgttgaagtagtaatatctatagcatacatagatggagaggcaaagaagcaagcaggtttgtttgttgatgtgggttttgggggctacctttttctcccacaatagggtcattgcacatgacctccactcaccttgatgagcataaaaactactatccatctcctgaccctcacgcgttaactccccacccatgttcactattcacaccaccatcttcatgaagcggatcaccttcccctcatggaacctcgtcttatgtaattgtgaaccatccttatcctaattaccaaaagctatctagctagattaatttctattttcttaacttctccctttaacttcctttacacctattacattattcttactttcataacatcctatcttcttatagtacttatatccctacatttatcatataacatctctt

SEQ ID NO: 250940 - DNA, 209 bp, Gossypium hirsutum
gggagaatgcctgttatgtgctccagtttgttgctgaagttggaggaatttcttattacagatgagcagttgatcaaggaggaacctgtaggaaagatttagccttcccttttctcggagtcattgtcaatgtgctctttgttatttacttattgtgtttattttttgttctccttatttccattactttaatcttattatttgtagtt

SEQ ID NO: 250941 - DNA, 173 bp, Gossypium hirsutum
tctctctctcactctttctctctcctctttttctttatctcattagatccattcaaagggcatcaaatcatcagaggaagaaggggagcaaattttcataaatggcagcaacattaggagactcaatctcctggtacaccgctcttgctaagactgtaccttatactttcttc

SEQ ID NO: 250942 - DNA, 236 bp, Gossypium hirsutum
accacgcgtccgaatacacagatacacttgcttctcactttagaatgttgttttttcgattcaacaccgcttatgtgttagtgtgataaaccgggagaaccaagacagactgctagatctatcaatgagacgcgatccgggatgacaagtagtcttttggaggcttcaagcatgatttgaaattgtgaccttaggcttgggaagttcatgtacttgttacttgttgtattatagga

SEQ ID NO: 250943 - DNA, 437 bp, Gossypium hirsutum
cccacgcgtccgcccacgcgtccggctttcctatatgtccagaacctaatctggccgagctgccactttccacagactggagaaatggatcatcagaaatggagcagcatgatgtggtttctaataaagagattgaagttggccgtgccgtctctggcattcaagaaaatagtcagaattctgccggtgaaccaaaaaatgaccatgaagaaacagaggaaatgaagatggagaccaatgcagagctgcctgttcttgaagcaagatcattggaagacattgatttggcttttaagcaatttcatgaaggagttgatgttgaggaaataattcttccaagcatgattgtgaatcatcagggtgatgcatgttccaattcggatttaccagttgttgatgcgagatcttttggagatatacagagtgctttttaacat

SEQ ID NO: 250944 - DNA, 261 bp, Gossypium hirsutum
  unsure (1)..(261): unsure at all n locations
ctccgtaaagatattctatcccgaaagcctcattttactttcaatgcaaccgnctactatgtgtgcattccagggccaatgggggggccaaggttttcagagatgttgagaaggctctccatgttccaattccctacacgaactggaattgcaagaattctactttgaaagctcttctggttataattttggggggatctcttatcactcttcatccttctcctgcagtttacatttcagaacggtcatccaatctagtat

SEQ ID NO: 250945 - DNA, 431 bp, Gossypium hirsutum
cggacgcgtgggttgaaatcaagcagtttttatttcgtctcaactcaatcactattcaggataatttacaagattatggatgaaagtattgaaagaaagaaaggagatgtacctcatcgtgtcgcatgcctgttgagaaagattgtagaagagatagaatggcgagtttcaactagggcaagaaatttaaaaaatcaaaacaagctttttagggcacaggaggaaaagtatcaatcaaggataagagcacttgagaccctagcatagggaaccatggaggaaaatatggttgttctaaagaatctacaacatataaagtttgaaaagagcaaactagaggagaagggtaaagttgaagagcaggatgtgctttagcttaagaaggagaaggttcagaaagacctttagatttctggctaaaataggaacta

SEQ ID NO: 250946 - DNA, 270 bp, Gossypium hirsutum
tctaaatttccccgcataccaaaaaaccatttttttttttttgtgaaaaagatccacctcgaatttgaccagcaccaccggagacgccgtggtttgtcacgccgtcgtttccgccaatctgttcgaacattacttatataaaaaaatttacaacgataagccatgaagcgaggcttcttttttttctgtaaccgtttgtctatttggccatcgttttcatttacttttgtacggtcattttttttattttattgttagttttttaatatt

SEQ ID NO: 250947 - DNA, 259 bp, Gossypium hirsutum
aaagctcccaaggatgttgtccgtggggttcatgtatatttagcataagcagaagagaagatttgtctgaccaataaccgattggcttggctgaaatcaactgttatgctttcacaatagtgcttcatattggtcattttttcaggtttagcaatactacactaatcttttttgattatttctaaatgtttactgcttgtatttttcttgtttcctttctatcttttctgtttttcccgatttatattttttttttatt

SEQ ID NO: 250948 - DNA, 352 bp, Gossypium hirsutum
gatgagaggcccctctctgagtcccaaagagccctgtctctcgcgttgctgcttccgccgctgaagaaacaagcagaagagggttccaaaggaacaaggttttcagagatgttgagaaggctctccatgttcctattcggtacaggaactggaattgcaagatttctactttgaaagttcttctggttataattttggtgggatctctcatcactctccttcgctctcctgcagtttacatttcatatcgtgcatccaatcttgtatttcgcaggcctggttttgtagacagatggattagagacagtggtgccgtagatccatgttatttatcaatgatggatgtgaattg

SEQ ID NO: 250949 - DNA, 205 bp, Gossypium hirsutum
cccacgcgtccggaggatttaatgtccagttattccttctgctttattttactttgaaattgtgtgatctggagtatgcatatagtccttatgttgggactcacatccttaaaattcattgtgtagtaattgtttggtttcatttcttaaatagggaattttattattttttatattatatttcaattttatattattttttact

SEQ ID NO: 250950 - DNA, 152 bp, Gossypium hirsutum
aattcccgcacgacccacgcgtcctgttacttcaaccaattttttgagctagctcgcttttactcaaatggcaaccaaaactatgatgtttcaaatatagtcactgttcttctctttcctcattatctccaactccattttcctttaagcta

SEQ ID NO: 250951 - DNA, 130 bp, Gossypium hirsutum
cggctgagtatcaatacaagtcagaccccgttgtagtctcttctcgtttgtactgtccttagagagagtcttgcagggactgttgatgtagcaagtgctgggtaacgaagcatcaaccgttctgtacatt

SEQ ID NO: 250952 - DNA, 404 bp, Gossypium hirsutum
  unsure (1)..(404): unsure at all n locations
ctataaggcagctttgcttctccctggatcattatcgttatgggtatcattggcttcggcaagcatttatggggcaaaagagagttccagttttgactacatgaatatgcgatgctacataatgtctccttttacttgggtgcttggatattttgtggtgagtccccatattatctcagtagtccctgcaagtggctttgtcatctcctgcttggttaatgaggataccgaaaacaggaggtgcattttagacagaatatgataggtttgctcacaaatactagcgccaagatgatgcgctnggaatgttgggatccaggtgcattttaaacagagaatatgacagttttgcattttaacatttggttgtccaatatgctttgagacttcccggtcaatcaatc

SEQ ID NO: 250953 - DNA, 345 bp, Gossypium hirsutum
gaaaaatatcagctattgccaaagactgagagcgtaaatctatgaattcgctgctcaagtttcgaaggcctttaagttcttctctcacttcactatctttgcagcgcctctctacaactctccactatgttttcgaagagaaaaaggaggggacgagctttatacaccccactgcaattgttcatcccaatgctgtgattggccagggtgtttcagtaggtcctttatgtacaattggtccttcggcaaaactaggaaatgggtgtcaaatgcatccttccagccatatttttgggaatacagaatttggggagccacttgcgtttgatgacgcattgttgcggt

SEQ ID NO: 250954 - DNA, 299 bp, Gossypium hirsutum
gataaactttctaaaacaatctcttttccttttctaaaaccaaaaaccaccatagccatggcggtgatgtcaaagcaagatccatgaccagcttttgtagaaacggtacaagaaatcatgagactttacagatcacttccaccaaggccttcaattgaagacgttgcagcagccaaattccgttctcaaaactgttagaaaatgaataaaaaataaagcttgaggagatctcaatggaacaaccacctgaagatgttcctgatgaactcttatccgttctgcatcatgttaagaagatc

SEQ ID NO: 250955 - DNA, 153 bp, Gossypium hirsutum
gacccacgcgtccgctcatcctggacttctttatttgcatctggtgccaaacatgataattgagctcttgcagctgcatgttcaggttcctttattgttggaaaaaacgcatccaagtccagtttctgtccttgataccttggtttatagaga

SEQ ID NO: 250956 - DNA, 156 bp, Gossypium hirsutum
caaccttatttcttgtacaacttacccaaaatcactgggtgttatttataaaacacaagcgcccccaacaatactaaaaaataccgaagacctattgcctaactcaccctttcatactaattacctaattaattctacaacgttaacatccttttc

SEQ ID NO: 250957 - DNA, 287 bp, Gossypium hirsutum
  unsure (1)..(287): unsure at all n locations
catacgcgatcgagtgctactactccaagcaagggtgntacttacacgttagttaaacatgcgcttaaatgatatggctagcgcagtgtcctttaaaaaagaacaggtggaaggattgtttttgtgttgcttctctcccatgatcacaaaaatggcttgatttgcgggtgatcctgcaaataatcgtatttcgttctcttttttaacagagatgtagtgatcaataaattaccatcatctttataaatttataaacgctttaacgaggcctttgctttactattgat

SEQ ID NO: 250958 - DNA, 341 bp, Gossypium hirsutum
accacgcgtccgaccgactcattaggcatatcaaccggccccttcttgtttttctctaaaccaccacaacccgttgaaggccaaccttgcatgggcggccatcctgataaggcaccttatgttccttctcagacctatccaccaaacctgcgcctgccaccctcttagtaacccaatgggccttctttcttccaacagtattttgggaatccacctcaaatgcatgagccaccatttagaaagcctggtctaggatatttttctgaatatgtcccacaattcttggtcctattgacaatattcttatggtggattacctttacagtatggtatggtcttcc

SEQ ID NO: 250959 - DNA, 224 bp, Gossypium hirsutum
gatcaaatccctaacttaccactcttctcgctatgcaccccactggaacccctaaattaatctttcctgaacaacatccaaataccttactttctcatttttcctttttccccatcccaacccaatatggaacaagaaactcggcaaaagatcgaggaaacagtgaaggatatgctgagcaaagccgatatggaagagatgactgagtttaaagtccgagtcac

SEQ ID NO: 250960 - DNA, 217 bp, Gossypium hirsutum
  unsure (1)..(217): unsure at all n locations
cccacgcgtccgcttgaatcagttgatgatgangataactatgatcagggttttaaaagtgatacaaaagttgatgaattggaagagtgaattggagaaagtttttggatcagcttctaaattcattgaacaagaatgagatttgggtatagggaatgatgtttaaatggaactatatggacttcacatgggtgcaacataatggccttgtcatgaa

SEQ ID NO: 250961 - DNA, 265 bp, Gossypium hirsutum
  unsure (1)..(265): unsure at all n locations
tcctctttcaattaaaggtggtagcaaattgctgngttcnttcaatcttttctgccttgggaacgtgtgagttgttacatgcgattctgtgcaccaattgtttgtacaatctccgtgcttaagggtgctagatttgggcatgaataattcatgtgataatttgctttccatgatttcaagtaaattatgagatttgattcatttatagcatcttatcttatttttgatgtaagaatattcatttatctacctttatatctatatt

SEQ ID NO: 250962 - DNA, 210 bp, Gossypium hirsutum
  unsure (1)..(210): unsure at all n locations
cnagnacnagaacgcgagcggccgcncgctttttgnccggccaccaccaccacnaccacgagggccnagaccaccaagcgccgccgccgacacaacgcccgggcaaacgccacccacgacggaccaagccggaggacgacgcccgggcaccaggaacgacccaacgggcaccaacgcaacaggaccccaccgccgccaggccaaccccga

SEQ ID NO: 250963 - DNA, 235 bp, Gossypium hirsutum
acaaagtcaaggtcaacggttatcatcagtgactgataaaggcttcagaagcacacgatcacggatgattatgatgcatcaggcggaatcacaggaatctgtaggttgagcagagatcagagcctgtaatttatctcccacactaactcatatgtaggtattttataaaatatctcatgggtacctgtactcctttgatatttaagatatagtcttcggtctttaaaattgtatc

SEQ ID NO: 250964 - DNA, 350 bp, Gossypium hirsutum
tcttctctcaactccgcgccgtttcgacgattcttctttcaagatccaccacacttctctggggctcctatgactacggagtgggcgaaggttcggccaccaggtaactcgtttctttctttctattctttctctcttttccaagaactaaagaacataaaaaaaccagaaaagaaacgggtaaccaacaaaatggaaaagaacccaaaaaacctttttgtttttcaattatcttttgtattctgaatgactatgtgtgttttgcattcaatctttgtgtaaaaagaaaaaaaaggtcctcaaacaatacagaaaatggggttttattgccccataattacatcaatttt

SEQ ID NO: 250965 - DNA, 179 bp, Gossypium hirsutum
  unsure (1)..(179): unsure at all n locations
cttaaccttctccgtagcttaattgaagggtttgtgnctgtctcaaaccctcaaacagctgtggtgtctctaactaacgttaatgggagtagaaaagccaacggggtgttaaggaaaccgatgatgcttatgagattgacggtgagagctgtttccaaagaggatatctatcgggggtg

SEQ ID NO: 250966 - DNA, 398 bp, Gossypium hirsutum
aattgttgcgagggaatctccctaatttttgactgattgccatccccgatcgactccgatttggactgctctccaacaagctattgcttcagcggcgaatgcagagagcgcagcagaataaacgactttgacaaggattgagttgttcaaatacccagggcactctcgaaaaagatggtccaatgtttcagctcgtgcttcacaacggggacatgttgtgatgtttgaaagcttcctgtgctgcatattcacttttgtaggcaagaagttccatgataacctccatattgtaattacaattttagctggtagatttaggctccaaagttttttgtagaatttcctataagataagggtaatgcataagcactagggtcttcattcgaactctggaata

SEQ ID NO: 250967 - DNA, 260 bp, Gossypium hirsutum
catacgcgaaggggcgagagaacatcccacaatactcgtattgcgcacggaagccgatcgactgtgtgttttactgatgtacaacaggcgatccctaaaatggcgaatacggagagcgcaacagaataaacgacttgaacacggagtgagtagaccaaatacccagggcacttttaaaaaagatggctcaatgtgtgaactcgcgcttcacaacggggacatgctgggaagtgtaaaagctatctgggctgtatatttac

SEQ ID NO: 250968 - DNA, 200 bp, Gossypium hirsutum
atcaaaacaagggcacaatcttgtgggtttttttaacagaaacagggggacattatgcaatcccaaaaaaatactcacacgaccaaaccatacacagacttaacttatcaatgcaagagaacaaaaggaaatggaaaataaagcttcattttaaaagcagaaacgccaattgaaacaaacacaccctctctcccctcaca

SEQ ID NO: 250969 - DNA, 234 bp, Gossypium hirsutum
ctcgacccacgcgtgcgttcgaattcataatcaaaaaactatgtagctatttttcttgcatgttctattcggatcccaatagatttgtggttttctggaactggcgcccacacactgtttgctaatgcatcttctaagccttgaaaatctttgtactacacttcgtcgttgtcattggcgtaaagttactatttgaaaagtacaaatacactctcaaaacacatgcaacttgca

SEQ ID NO: 250970 - DNA, 176 bp, Gossypium hirsutum
cccacgcgtccgcccacgcgtccgcccacgcgttcggttccgtcgccaggctccaaagcttctttctatcttggagaatttttaaggtttctgttgaatcggtattctttcagggcactagacaagtgcttcggttctatttaattcattttccaagatcagtgtttatgtgctac

SEQ ID NO: 250971 - DNA, 272 bp, Gossypium hirsutum
tcacgagatttgtggacaacaggtggcaatagattcagcaacacccgttgatgatgctggccctagtttcatgatgaatcctgctggaccatttagaggttttggtggtccaatgcgcccctttggtaggatgtatggaggactgccttatgatgattggggttatgcgatcaaaatacaatccgactttaatataggggtcttcatggtacttttaccacttatcaaccaaattgccattttattttccactaatgtgcagatattggggg

SEQ ID NO: 250972 - DNA, 183 bp, Gossypium hirsutum
tcaactctcaaaccttcaagtctcatttctttctctttctctttctctcactagagaatccaaggttctgtttggcccaagggaaaataattaacgatggtcggaaacggtcaagatctgggcctaagtctaacttgacatattctcaaatattcctgcgtagctaactatgcctttcctccc

SEQ ID NO: 250973 - DNA, 273 bp, Gossypium hirsutum
gtcgctttccaaaacaaaaaacctatacacatataggcagttggtcatccaaggccaaaaccagcagtggcattttgtagtctcagttcagtgtgtcttaggagctaaccagattggcttcacccttctctattctatagaaaaagcctcaccttccgcaacttcattcaaatttaacccaaaaagcagaccaactttttagggactgctctgtcactttatgatgatttgatcacttggtttgtgacttgaactctcttcataactggttgt

SEQ ID NO: 250974 - DNA, 362 bp, Gossypium hirsutum
aaagaatctactgcgtctccaaatggcccttcgatcgttagccaccagtaaaaccctaaccttggctctgatctccaccaggctgtctcagttttcttccttgtattccttttctcttttcgttctatttctctattatttgtctcttttgctctcttatatttttttgttcttttaatttttttttttttttctaatctttcttcttactttttgtttttatttttttttattgttatttctattcttattgtattttttttgttttttattcttactaattattttttttttctttgtttttatttttctttttttttatatttcttattttattctttatttttattttttttattttt

SEQ ID NO: 250975 - DNA, 394 bp, Gossypium hirsutum
ggttgatggaataattagaaagtgaaatgtggtgtcagatgtatctcatgttgatgtagggatcagtttttaacaataaaattggatggaatttttaacagaaggctcatttgctctttgatttaatgtacaaggactaatttaccctttttttaaatagagggagcaaaatacaatccgactttaatataggggtcttcatggtacttttaccacttatcaaccaaattgccattttattttccactaatgtgcagatattgagggcagtgatctagttgcagctaaagaaaaatggtacacctacagcaccgaacaaaaaccaatcgttgagaaatatatttcatctttcaggtatcgaaagctgactatcttgccgcctcttttggaaaat

SEQ ID NO: 250976 - DNA, 375 bp, Gossypium hirsutum
cctagagaaaaagaagaatgaagactagtaatctatgcatgccaaggttcaaaggcaacaacaaaaacaaacgtttgtcgccgatgacccttttcgaacggttccgagaggcgatttttcgtctcataatgctatcggctctcactaagacctcgtcggatcaacactttaaccctttggctgtccctcagagatgttaccaccagccagatgacgccgtcgcagtgaaaacatggcggattgcattgagttcatcaagagaaaagcattcatagaagaaaatcgggagtcgagtgatcgtaattcgattgcgaatgatgttattggtgatgttgccatgcaggttctgtgatgccattcttttaatcatttttt

SEQ ID NO: 250977 - DNA, 459 bp, Gossypium hirsutum
atctctacaaaaacagtgggatttttccctaacttcgatttctcaaaaaaaaaaaattaatcctattttacataaaatgatctcttaagatctttgtttatttgctattacatctacattaaccttcatgttgaagatgaaaaactgctacttactgaagttagattttactcgtgctttgtggtacgatcctatataccacatcaaggggtggttacttattaatgtttgctaaaccccagtccagttcatttgttcccatcctaagggaggttctttgagatcgttaaccatctcccaaatatcatcttcatttgcttctggttgatcagagtggtctcctccagagtgtgaagtacttgaggagcttgttacctccatcatagaggctctctctgaaaatgttgcagtcctattctcatgaagttgtgttgctcgtgatacagtttcgagtgggcg

SEQ ID NO: 250978 - DNA, 232 bp, Gossypium hirsutum
ttaatgttctcttggtttagccctgcaagattcttacaggaaagtgattgggggactgtttttacaataattctctaatttgtcctgttttgtgttccatactcccacttttctttgcaattctcattccttggacaatagacattctatattttaaccctgctttagtatttaagttttgggtaattattttgtttgtcttcttatattcttggtctggttttttctaaaa

SEQ ID NO: 250979 - DNA, 106 bp, Gossypium hirsutum
cccacccttcgggactgataaccagaagcttacgattaagcttatccctatacctacaggacatgtttttaaatgagatagagctaacgtatacatatatggattc

SEQ ID NO: 250980 - DNA, 162 bp, Gossypium hirsutum
caaccgtgcccttcaaagttaacatttatttccctgttgatcattctgggtggtgctgttgggtatgttgccactgattcagcatttaccttgactgcatattcatgggcgttcgcatatttggtgacaattactactgaaatggtgtatattaagcatatg

SEQ ID NO: 250981 - DNA, 139 bp, Gossypium hirsutum
ctcactcgtgcggccagtcgtcagaggtagctagccttcactaagatggcagccatgccgaagaagtcgcgaatatgcaccatacagatatttgtggccattgaatggcacaatcgtttggcttgatgctaatgaagat

SEQ ID NO: 250982 - DNA, 212 bp, Gossypium hirsutum
aggcgtccgcgtacgcttggtaaacgattgactgttctggttctcattagtggaaaaaaacctttgaaagtaaatggggctggccttcctggggaatcgtttgccaaaattcttaaagtaccgaaacgtggaacttgaaaagcatgaacttttcttcagctttgtttctaaagggtttttctcatacaatggaggcctttataagatctatg

SEQ ID NO: 250983 - DNA, 262 bp, Gossypium hirsutum
tcgcccacgcgttcgcccacgcgtcctggagagtgccccttctttagcactcactacaaacatatggctgcggctgacttatgacatcaaatctgaacaaagtggaatgcttgtatgcatatccattattgcaaaaatgggaccccactttacaatctgctgcagagcttaaagtcctgcttcgatggatgatttacctctttggatgcttgcagaccttttggaaactttacctaccaaggattcctgctctatcattctc

SEQ ID NO: 250984 - DNA, 384 bp, Gossypium hirsutum
ggcacaccgcctttcaagtcctctctaccgccgccgcctctcttcttcatttagcaccgccaccaaagacaaagttcctcttctttacaaaagcccagagatcaacgaagacaacggaaatgaagccgtgacactccaagtcctttcatggggcaggggagcatcaggccaactaggtggtggcattgaagaaatcagaatatacccatctccagtagccaatctcctcttaccgcgtgctttcttttccctctccccaaccccaggcaaaacccaaaaccaaaatcaaaaggatcaaactttgcactcggttgggatatcatgcgggttgttccattcgggtttgggtgtcggcggcaagttgtggatgtggggcaaaggtga

SEQ ID NO: 250985 - DNA, 237 bp, Gossypium hirsutum
cggacgcgtgggtggttgtctaaaagaaaaggccttaccaaagggaaagaaattttggggataggggttttttagaacatggaatcaattacttgcttttattttacctaattgttcctaaggagtaatgtttggggtggtaagttttgctgggaccggtttccaacatggttagttttgtttgaaccttttttcgtatagtgtttactttgtacctctcaacggaaattattgttt

SEQ ID NO: 250986 - DNA, 241 bp, Gossypium hirsutum
gtctcttcctccttcactttcagatcatcaaaaccttcaacaatggcctttgtttagggtgaaggggccatttcttacttgaagcgtttttagttctattgaagagtagcgtattgagttagctttggtctatcaaagacattgtatattttgtgtatgtgtaggtcactgtttttgtgtgtctgtaacaaataaatattttttcttatttccttagataatgatttgtatgttttatgtt

SEQ ID NO: 250987 - DNA, 280 bp, Gossypium hirsutum
taaatacagaaaaacgaaatcaacggaaataaaatctctgaaaggggaaaaaaactcagaatcagcagatcgaagtgaaaatggagtgtgtgttcggtttagtgggcaacttctttgccatagtttcggctgccactgtgtcttttttacttcattctttgctttcttattctttctttcacaatttaccttgttccttatattctttctactcttcttctttctccttccgtgattatcttgtttctttcgtttctttcctactctttttttttttctt

SEQ ID NO: 250988 - DNA, 312 bp, Gossypium hirsutum
caatcctcaaaatctctgcaaactgagatttatatacatatctgaactttaattttctgtaaaatcgaaaccagatggagatgatccagtacaaccggttcaccgcacacctcttgctcctctcgttgattctagttgttcccttggcagtcgccaccgacgttcaatattgtgattagctcggtgagtatgttgtattggttctcggataataatttttctccataaatctattccttattggttacttcttatttctttcattattttttcttcattttttttatcctctttctctctttatcgttattt

SEQ ID NO: 250989 - DNA, 256 bp, Gossypium hirsutum
tccgtgcccaaaacacccatcttcatttacatccatacaccaaatatatgtgtcatttttgtttgtaaatcgaaggtttctctgtcatttgcatcctcacctcctcactaaactctaaaaaagaaaaaaatcgaggtgagagggaatctttttaaaatttctcttttcatataagctcccttgtttctgctttgtttcctttgttgttgcttatttcataccttactcctcttttttttactttcgtatcctatta

SEQ ID NO: 250990 - DNA, 269 bp, Gossypium hirsutum
cggacgcgtgggtttttttttaatttcaacacctaacatacatgtttcatttcacaaaagccatgtttttctgtttctcatgtgactctgaagcctccttctttccttcaacgtacgcaagctgaaggagctctcagccgtccgttcgaaatccccttccattcatcaattctctgtcgccttcaccaagacactgacccctctctttcaaattctaaagcgaactgccaccgttgaacggtttgtgcgctttgtttcagcaaggtcct

SEQ ID NO: 250991 - DNA, 223 bp, Gossypium hirsutum
taccgtccgaatcccgtgtcgaccacgcgtcgccacgcgtcgaagttttcaatggttctacatcagctttaggatatataatctttatccaagatacttcggtcactggttccgggaagcagatcttttgagcaagaggtacttcaggacctatttaggagtgcggatcttgttataatcggcagcttctgagtggggtattccatgatctcaatttattctt

SEQ ID NO: 250992 - DNA, 278 bp, Gossypium hirsutum
gaactgtcaacaaattatatatactatggtttggtctttatgaaataaagccaaaaggcaaaccagaacccgataaacaaagcatatcaaagtctcacatcacgttatcacaatatatcgatattacttcaaagatatttacattttcaatattttcctttcatttttcttttcccgtctaaaatctaatttcattgtttctcttttggatttttttattacaatctccatgtgcggtggttgggacaagtttatactgacacatctgaatgcctggc

SEQ ID NO: 250993 - DNA, 350 bp, Gossypium hirsutum
gccacgcgtccgctattcggatccaccaaaatactccaagagagataccgtcttatgatcccggcatagacttcccaaaagtctcctcacatttcgagatatcactcccacattcgatttttaattccagtctcctaatccgaccattgatccagcctaaaattgatataggttgctctcctccaccctttctctgtcttcaaccgttcggattgataagcggagctccgacgccctaactgctgaaaaacccgaaagatgggttctcttctctttttatttatttatttatttggttgaatactgacttgtttggtttgcaaggtgtcactgttgagcttctctttctt

SEQ ID NO: 250994 - DNA, 383 bp, Gossypium hirsutum
cccacgcgtccgcccacgcgtccgcccacgcgtccgtccacgcgttcgtagaaacagaaaaaatgtactagaatcggacactttgaattcatattgatcttgtgttgaaagcaggaattgaattctatgagaagtaacctcccattgttccccagtagctcagcttgtttgaggctttggcatggttaaaacagacaaatgccaaacatgttacctatgccattcttttttaaagaatctgtcattagtttgtttactcaagtgtttggtgatgatatatactcttgcttttggcagtcattatgaaagatttcacgtgtagtgttacttggtggggcttcctttcattcttaccttttagggaattacacaaccccacaaga

SEQ ID NO: 250995 - DNA, 249 bp, Gossypium hirsutum
ctgacgcttgatctgactcatcagttaattttaaaacttctttttttacccttgatcattcacggtacattttaacaacaacaataattatcaaaacccatatttttaaacccatctttcaccatttaaaattaaaaataactagagttgtatcatttttcacatttttgaaagaattcgatcgatattaatgtttttttatatattattccattattccctgattttacatcctatattcatagtttc

SEQ ID NO: 250996 - DNA, 107 bp, Gossypium hirsutum
gaaaaataaaaggtcaagggcttaagaagatgtcgctagacgacctcatcaagcgcagccgtaaatccggatccggaaactcccgcggtcgcggtcgcggtcgtgga

SEQ ID NO: 250997 - DNA, 296 bp, Gossypium hirsutum
ctttttctaacttcccttcgtttttccctttgtattttgtttcaagaacccccaaggttgtgtttttcacccatttttgggtttatattacaacaagatcagagagaaatcaaacaggatttctgggtttcgttgagttttcacgagaatataaacaattcgagtgattgaaggatttctttcttttttttgtttgaaaaatggtggtgaagatgatgaggtggagaccatggccgtctttggtttcaaaaaagtacgaggtttagttaattgtaagaagattagaagggtgggat

SEQ ID NO: 250998 - DNA, 194 bp, Gossypium hirsutum
agctaatctcttcaaagtcgaagtctcatctctgcgattctagtacggattgccgattatattggttttcattttcttatggattctcagcattttctcggattctttcttctaatcttgcttcagtcttgtttgggtgcggctgagagtaatggatcgagtcgtgagattgaaagcaggctcttttttttttg

SEQ ID NO: 250999 - DNA, 178 bp, Gossypium hirsutum
cccggtcgaccacgcgtccggttatcagaaccctaaaatccttgcttcatatcatgtgacatgggaactgggatgtgggtgaggaggcgcgattcaatttctaacgcttcacttcatcagtggaaagaagtgattttaacgcgctttttttattggtgacctctgatattctatgttg

SEQ ID NO: 251000 - DNA, 374 bp, Gossypium hirsutum
tttttatttttccgacacaatccatccactgaatccattagaatgttttatcaaaacaagtttctcatacatacaacataacattacacaactttttgttatcccaatcattcctgatcaaaaccaccactacaattggaatttctaactttatcttatattaaaactgttaccctttttatattcttttcaaacattacatcctcattatatttattctttattcaataatttttttttttttttttttattacttctccattttaattctttttaaattatatttttttaattcattttttatttcctttatttattatattatttatttaattatttcttattcattattttatttctatacatttttttt

SEQ ID NO: 251001 - DNA, 233 bp, Gossypium hirsutum
  unsure (1)..(233): unsure at all n locations
cccacgcgtccgctactccaagcaagtattttccttacacgtttgtttttcttgtgattaagcaatatggctagctcaatgtcccttaaacttgcatgtgtggtggtgttgttcattgtttattttattaatatttttntattttttttattttgttgtttctgtattttttttttattttattttttttattttttgtattgtttgtttatttttttttatgattttttttt

SEQ ID NO: 251002 - DNA, 284 bp, Gossypium hirsutum
gtccttttttgagggaaaaaagactattattatgattgacaaatttagctataactttctttgggggtctttgtacaatcaagcacatatatagcattttctgttaaatattccaggtttatttcaaggagctaatccaacctgtttccacactgttttttcattcccttgcaagggatatatttagtcaacacataaatgtgatcatatttggtatcccgttcatttccctgcagttgtcaagctttagacagcttcttaatttatggccttccttcttttcc

SEQ ID NO: 251003 - DNA, 274 bp, Gossypium hirsutum
acataataaattctcaccttttttattctcttcaaagtttctttttcttattccaaagagaaatggagagccaaagaactgtaaacaaagaacccaaaaatctatcaccatgtagcagtggaagaagaagcagtacgagcagtcattcaagttcacccgaattcgagttctggatggttagaaacccgtcttttcctcaacccgatctaatcttcgccgatgaactcttcgttaacggagtgcttcgttcttttcattttttattctgcaaaca

SEQ ID NO: 251004 - DNA, 247 bp, Gossypium hirsutum
aaaataaaaaccaaataaggtccaaggtaaatcagtccaaatattccacttacaaccttcaataaatccaaatgctaaatttattaccaaccaaaatacaaaacatttaccgatacccaaattaaaacccaaaatataacataaacttattgacctatttcccataacaccccaacttaatccctatcccaagttacaacaatccacttttaaaatatccatattttcccaacatttataatttacc

SEQ ID NO: 251005 - DNA, 207 bp, Gossypium hirsutum
agtggagccaattgtggtttggacgtttcattagtaggaggaggccgaaaattattgcaagaacggtaaatagaagatgagggacctctttttgatcttaatgggtagaataatggataatttcccgcctttacataattatggtttggatcatcatatttagcgtattttattcatttgtgtattattttgtctttgtttattttt

SEQ ID NO: 251006 - DNA, 198 bp, Gossypium hirsutum
cccacgcgttcgcccacgcgtccgaaattacttttagaggaaaatggggaaacagccggtgaagatgaggtgctgtggtatacgctttgtctccttttcaacataagattatgtatttttcctttggacaagattctatcaatatgatgatttttaacaatttttttttatttaaatttaatttattttctttttctt

SEQ ID NO: 251007 - DNA, 158 bp, Gossypium hirsutum
tcttccttttctctcatctctaaactattcttatccctctttctaacattatctcatctccatcacagaattttttcttttaattctactcatctaacctcttaaacttatctattatctatatctctaattctcctatcttatcctaattttaaaca

SEQ ID NO: 251008 - DNA, 433 bp, Gossypium hirsutum
gaagctttgaagcaacaaactttctcttcttctttaaagatggggctggaatctcctgaattcgccgaaatactttcaaccaaagaacactgcaaacctcaatgacactttgtatttaagaattgaagagagcaaattttctaagcatggaagtagtctcgctgcattcccctccatgctgtcatttaaacaggagattattagtaaagaaaagatcaagtggacagcaagtaaaaatccctttgtgtagaaaacgaagaattttgtgtagcaaggttcattacagaactgagtcacgggcattatctaataaagatcactctttgctgaatgggaaagttacaaggccatccaagcctgttgaaaggttcagtgaggattctaatggttacgtgattggtagtgaaaatgaaacttggaagcttgctatgaa

SEQ ID NO: 251009 - DNA, 133 bp, Gossypium hirsutum
cacattaactccctcgttccttggttttttatctaatgaacaccaacctgtaagagctgatcatgattaaccattttaggggctttccattaaccatcagtcaactgttctcataacaaattttactttgact

SEQ ID NO: 251010 - DNA, 186 bp, Gossypium hirsutum
cggacgcctagcatcttttatctttttcttacaaacttatataacaaggggcattacaacgagggcgatctttattatacccatgcgcatatctacatcaacctctgcagatatatcacattaattttctgcttttttatacacatgaatttattccattttattaccccaatctccatcccaatt

SEQ ID NO: 251011 - DNA, 289 bp, Gossypium hirsutum
  unsure (1)..(289): unsure at all n locations
accgtccgaattcccggnnggnnnnnnnnnnnnaccaagattagtgcttatatcggctcctttctaatccaaccatgcatgggacggatttaatttgcatgaatcatttgaactggacatgcaattatgcttgcctgagtgcagctgccagtgttcgagtgagtaatgagctaggggcaggccatccaaggtgcaaaattttcatgtttgtagcgaacgggcatgcatattgatacgattgattcagtgcaatcgtctgatattccgaatggattggcaaagcatttca

SEQ ID NO: 251012 - DNA, 349 bp, Gossypium hirsutum
ctcgaaaccccctttttgtgtcgattattgtttaaataagatcaataggactttcgccaagcctatagcaggatgtgtgtgttacctggattcatcacaattgtgaatatcctacttcggttaacctggcatctcttacattttactatccacttattctactttgcgatcaatattgcaaatgcgctcgaaagccatcttatatccaagggattacttatgagatacaaatccctccatatatccaagcttcagtatctggctattgtgatagaaagcgaagattgccgaacttcgaatgttatcgagcttttgcaatggctggcagatcttggtgtcaaacatgttt

SEQ ID NO: 251013 - DNA, 418 bp, Gossypium hirsutum
gccaaccaacccgtccgaactaaaaaaaaaaaatgggaggcccttcacggtatttttaacgtagccaccaaactcattggaagaacatttctccaacgagtgaaatgcccctcctatctaaagcttgtttgaatacacaaaaaggtgctaactttgaaaaacaaatttccctacacttatctttacgctttttaatttgtcaaacaaatttattaccataaattttataaaattttataattcgctctttgtttgatcccttcttattattaatatagtttatcctattcttatattcattactcttacccttattttactttattttatattaatttttattatttatcttctctctactagttttcaataataatctttctctaattaattccaatatttttatattatttacgtg

SEQ ID NO: 251014 - DNA, 286 bp, Gossypium hirsutum
actcttgttcggacacgtttgttttcatgttattaatacataatctaagtaagtctttatattactaacattatgtataaatgacacgaaaaaaatttattgaaatatcattaaataattaaaaagtgactataaataatgtgatgagaagagttcataaaataatttttcctgttactttaatttcaattaaacatcatgttttaaattgaaatgtgtttattaatgctaactttttttaattaaaaattagaataatttggaaaatttaaatcaatttaaaatc

SEQ ID NO: 251015 - DNA, 403 bp, Gossypium hirsutum
cggacgcgtgggatctttgagctttttcttccaaacttatagaagaaggggaaatccaacctggcgatcctcatttgagtcggctgcgtaacgaagtcaacctctgaagatatccacaggattgtctgtaggttgaaaaacatgaaattattgcctaattttgtccacatatccttcatcggtcatttgtcattagtgtcttttctcttcaacttgtccccatgtgccgttgcttcttcaaccaaatgatcttccatacattgttagtccctacactattttgttattaatccattccaagcttccggctttcattatctaaaagaatcacaaaaggatcgaagctcaaagatcaggttttgatggagaaatctgggtatggaagagatgggatttacaggtc

SEQ ID NO: 251016 - DNA, 360 bp, Gossypium hirsutum
acaccagaataataacttcattaatttgaatgtcctctttgcttacaaaaagcataaaaaaatcataataaagaaaaatcaatattacaggactcaaaagaacaggctttagccagttctagaaaggaatgtttagcgtcaaccacaagataagattgtgaggtcaaagaaatcttcacaattgagttatgcgtgcaacatgaacttagaacaacaaaaggaaggcttaattaagcaaagttgaaaatgctcgcagttattaaaagtatattgatggagatatgccacaatctgggactgatgatgaagaagaagaataagttaatggagataatacatcttctctttaccgcaacttcg

SEQ ID NO: 251017 - DNA, 125 bp, Gossypium hirsutum
  unsure (1)..(125): unsure at all n locations
tagtttgcagttgagaggatggtgagagnatctttttgaatgatgcactgaacagcatgtgcggtttttttaatacggtcaaaccacacgttatgatcaagcctttcttcaaagtgattatttta

SEQ ID NO: 251018 - DNA, 433 bp, Gossypium hirsutum
ctaatggaaaaaagtgaaaagggtaatggtgttgctcctgctacaaggtctccaatggctttaatggggtcatctagaaatgaaaaccaagaagtgaataccagcatgagaactgccgagaccatgctgcggttggtgcctatggctttaggggttgctgcacttgttgtcatgctcaaaaactcacagtccaatgactttggctccgtttcatactcagatcttggtgcttttaggtacttggtgcatgctaatggtatttgtgcaggctattcccttctttagctattatagcagctgtgccctagccttttactatgcctagagcttggactttttttcttactgatcagattcttaacatacgtaatttttgggagctggtttttttttaaactgaggttccttttcttatatcaactattgggtattt

SEQ ID NO: 251019 - DNA, 457 bp, Gossypium hirsutum
tttctgtttaacggcctgcccaccctggaaacggctcaaacggagcgtggggtccatacggtgggaagagcaccgtacgcttgcgtgtggtaacttgcgccatcgggggcccttgataatctggatgaacaagtgacagctgcgctcggacgttctgataatcgaataaagtctacaaggtgatacaaactctggcaaatgagacaccgtatgcaacgcaggttgaccgactgcatccgcgcactcatagtaaggatcggctcttgggaaagatctcggaagaagatcatccgtgagttcatgaactcaatctacggcgttgatgccaagcacccttatgttgccgcctgtggggaagaccgtacaactttatacggaccaaactggcgccaacatcttccatactgtgcatttaagggaaagagaagaacgaccggttttactcgcaccggaaaaa

SEQ ID NO: 251020 - DNA, 372 bp, Gossypium hirsutum
ggagcttcagaaacagtacgatgatgataaagctcgagtaaaggatgcagtgaagttgagagagatttgtttggcatcaacttggactctagaagacttgaaggctgccattttggaggatattagctctccacctatatctgatgttaacttgaagctgatttttgaggaattacttgaaagggtcaaggagaaggaggagaaagaagctaagaagcgtaaacgtcttgctgatgacttctttgatttattgcattctatgaaggagattacatcatcttcagcatgggaggattgcaaacatcttcttgaaagtagtcaggaattcagttccattggggatgaagacatctgcaagggggattttgatga

SEQ ID NO: 251021 - DNA, 105 bp, Gossypium hirsutum
gctctctcatcctgcttctggtcaagccaatctcaaaagactccccttttagctcacagctctgtcgagttctgtaatgggtaaggagaatgtttacattaacat

SEQ ID NO: 251022 - DNA, 289 bp, Gossypium hirsutum
gcccagagctctagaggttgaggactgttgtgaaagggcaaagagaactttatgtcatgggtaaacacatctaattgactcctttatgaggtatcattttctctccattccctaccaattttaaaactttcattttctatttaaaagttttttaaccttttttatatcttttttctttcttttttctttattttattttctatctttttttttctttttttatttttcttttatctttttctctttatttttttttttttttttatttctttttttttttatttttttc

SEQ ID NO: 251023 - DNA, 124 bp, Gossypium hirsutum
gcaacacggtcatcattaatcccatctagctttaaagatggttcggatcgttgttgtgcccttggcagttttattcggtaacaatgcgatttgcttaatgctttttggttgttattgtgtacaa

SEQ ID NO: 251024 - DNA, 348 bp, Gossypium hirsutum
attccggtcgaccacgcgtccggagagatcaaaaaaatttaaaaaatttcgcacagaaaaatttattcatccaagttggaaacgtcggcgcacaaatctccgctccgtttaccgatatctgaaaaatgtccggccaaagccagcgcttgaatgtggttccaactgttacaatgcttggaatcatgaaagctcggcttgtgggcgctacaagaggtcacgcacttttcaagaagaagagtgatgccctaaccgtacaatttcgttagattttttaagatgatagtgtctactattatgagtctatggttgtgttttttgaaattcttcttaattttctcttatctatgc

SEQ ID NO: 251025 - DNA, 445 bp, Gossypium hirsutum
tgaaggctcatatcccataatcatattatgttggatatgaatactttacaagaaacaaaaagtgcggagtgcattgtatgcccacaatgaagtacagtacaaagacttgaaattgagtgcattcactacttgttttttgactagggtttactcatttttatttttagttattattttttgttttcttttaatattttgcttttattctttttttttttattaggttcttatttttcattatcttttttttttattatttttctgttttactttttatctttttcttttttttttttattgtttgtttttattattttttttttttatttctttttttgattttgtatcttgttgttaattattgttttcttttacatttttttttgtatttttattttttatttctttattttttttttctctttattagatatttatttctctt

SEQ ID NO: 251026 - DNA, 302 bp, Gossypium hirsutum
caaaaattttcaactcctcccatttcattcactatctcttttatctctgcaaacttccactcttcaatgtatttctctttgcattccatttgtttcagtggatccattcctttcttctttgcctcatggctcttgaaacatggctcataaaactcaaaaaaaccatatccaacacccttgatactgcaagatcttcaaatcataaagccaacgttggggttttatcctttgaaatcgctggacatatgtcaaagcttctacagctctggaattgtctttcatattcgactatattttcattt

SEQ ID NO: 251027 - DNA, 299 bp, Gossypium hirsutum
  unsure (1)..(299): unsure at all n locations
aacaatcacaaagtgattttgaaaattcccattccccttcgtaatggctgaagaattcggaacggcgtcttcatcatctagctcacaaccaagatcctcttctaacactttaaaaatatcccaggtcccttctgtatactcttgtctcccaactttnnttaatggcgatttttagatttttccctgtttgtaatttttcaattttatttttttttaactttctttcttttttttttcatttcatttttctttccttttttattttattttctctttttttttattctctcttttatctt

SEQ ID NO: 251028 - DNA, 216 bp, Gossypium hirsutum
gaagccacttctcatctcacttggcatgctcctagtatgacaaatagtgtcccatattgcgtgtgcaagtaaggtcactgttgctaatggtcagtctttgttaatatctagcactggccagagtacctttcttataaataataaacctctccatatgaaaaatttgatgtatgtacttggcataacaaagaacttgatgtctgtatcacagttctc

SEQ ID NO: 251029 - DNA, 266 bp, Gossypium hirsutum
ctcatttcttctctctctctctccctcaaaggtcacccaaaagaaaattactagaagcaagtaaaaggcaaaaaaatggagcaaaatttgccagtgatcaccaaaagagtgtggagcattgtgagggcactttcttttatgacgagaaaaggggtttttttccatataaaattctttttgtttctcactcaaattttattttttattttatcttcttatgtcttttctatatttctattttacattcatttttcttttttttttat

SEQ ID NO: 251030 - DNA, 261 bp, Gossypium hirsutum
ggaaacgagctgcctttactcaacttcgcacttctcctttatcgttttctcgactcaacgtcctgttggtttgcccctaattgttaggggcaagttgatttcataacttcacgatcagttcataagctttgccaggttcgtactacagatgttagacggaattaatgaaaaaaaaaactggtcctttcagcgaaagattatgagtgattgtattcttgctatgttggtaagggattaattttaaaagtttcttgctttttt

SEQ ID NO: 251031 - DNA, 189 bp, Gossypium hirsutum
tcgctgactcgtgggctttgggcgacagaaagtaaaaccccaaaagcttaagcttacccttaggttgctacacatccttgcctttgtttccctttgaagaaaccaaagaatcattgaagatgcccagaccaggttcaaggccttatgtctttgagaaaaaatcttggcacattgacatacaccaaccca

SEQ ID NO: 251032 - DNA, 166 bp, Gossypium hirsutum
gtccgtatcccgtcacccacctcccccacctccggtattgttggtcgtccccgcacactggtgttatggttggatgcggaggggagcctattattaatcaaccctttctaaaaacctccttacctttataatctatcgacatcttaatcccccactcttatatcca

SEQ ID NO: 251033 - DNA, 214 bp, Gossypium hirsutum
aacaatcacgataaaaagtattctgcttactctaataaagcagacaacaggcttacaaatatagctttggatacttatggacaagtcattatacgacccactattcagttatattgacagtagctagagcaggaaaaccagtacaacaaacctcccaagaaggattgtaaaactttaccagccaaaagaggagactttgatgctaatttattgt

SEQ ID NO: 251034 - DNA, 348 bp, Gossypium hirsutum
ttctggagccttctttattttctctaaatctcagtcatccattgaacaatctctcttataaagtgtatcccaaacccaaatcctttccctcaagcaatttgagtgattctttctttttcttgtggcctccaaagcatcttttttttttctcatattttcattctaccattaactcaacatttttctttacattctttattttcctttatttttatttattatctttatatatttttttactctttttcttaattttttttcttattccttattcctatttatatattccttaactcttttttctatttatatccatctttttcattaatcttcacatcactattccta

SEQ ID NO: 251035 - DNA, 376 bp, Gossypium hirsutum
cttagaagcagcagaatgttctcgtgacatagactgttcattcaagtgtaaatatggtggcatgtgtgagtggcacaaacaccagaaaatgcttttgttggccacctaaggtgttcatggaggttgtttgtttctttttatgactacttttgcttttatgatttgcacctctatgtttttatttctacttatgttctctttgtctttgtttttgtaaattgttgtctattctcttttttttattttaattttttttatttttattaaattttttttattttttctaatttctattataaattattagctatttattgttatttttattttcttatttttttttttcttattttatttttattaattatttatatta

SEQ ID NO: 251036 - DNA, 335 bp, Gossypium hirsutum
accgtcctgattcccgttcgaccacgcgtccggaccagacatcaagtcttttaacttaactggaatggggtgtagtgctagtctgattgcgctggcattgttcgcaatgtcttcaagtcttacaagaacaagttcgcattgcttgttacttcttaattctttgagtccgaatcttcttttcctgtaattatttatatattaattattttctatttttcttttaaactaattttattttcatatattttcttctatttattttattttttttttcaactttttctatatagaattttttttttatttattattcttctttaattactcaaattata

SEQ ID NO: 251037 - DNA, 123 bp, Gossypium hirsutum
  unsure (1)..(123): unsure at all n locations
gcggcttcggatctgcaaaaagatcaataatggcgtttattggagcctggcaatcgtacccatgaggcgtggaggggtgtttgtactatctgactttncttccctagggttacattagtttac

SEQ ID NO: 251038 - DNA, 199 bp, Gossypium hirsutum
ttcttaaattaaactaatggctgcaattcataaacttgaggctgaagaggatgcggatcccaggtcaggtgttctcagcatcagcggcggtggagatgccgcaccgtcgaagaaccccaaagaagagcctgacatagacacaactttaggcgcgatgcccgtggcggtgcacgtgccgtcaggtgtaccggtaccgtca

SEQ ID NO: 251039 - DNA, 199 bp, Gossypium hirsutum
  unsure (1)..(199): unsure at all n locations
gttttctttaaaccaccatttaaagccttaaaaccatcattcatccaattatcatatgcttttgaatgtctatcttattttatacactcaanactttccatttaaattcctcataacatttttatatttttttatatttctcctattattttctcattctattctaatccaatttttactattcttatccttttctttt

SEQ ID NO: 251040 - DNA, 150 bp, Gossypium hirsutum
gctctagtccgactttgtgaaatgacttgagaggttatgataaggggagctctcgggcgatgttgaaataccactacttaacgttattttacttattccggaatcgaaggcgggcacgttccctttttttatacccaattccatttttat

SEQ ID NO: 251041 - DNA, 132 bp, Gossypium hirsutum
tgagaagcccctttactcctgccaagagtgatgggtcaagaagctatttaagcggttactcagaccacccaaattacatggctttcactgaatcttcaagggctaaagtaaggtctctgagtgctccaaaac

SEQ ID NO: 251042 - DNA, 369 bp, Gossypium hirsutum
  unsure (1)..(369): unsure at all n locations
ttcccggggtcgacccccacgcgnntccgcgatattttgtatttaaagaaatcgcnncctttagtgggatcagtgggaggtgannagaaaaatggtcttgggctgtgggtgggagagactgggcggttggcggctttccggttgggcaagtngnctggctagcggcttgggcggcggttgggcaagattgttnaccctgaggaatgatacttttgcttgatgcataacncacatacncggtgacaaacttgttcttgggcgtgtgcaaccccgggaaaagtgctactnttgattgggagcctgaaaatgggaaacctgggggcttggatatatggctcgcaaaatgtgggagataaacttggcacttgc

SEQ ID NO: 251043 - DNA, 208 bp, Gossypium hirsutum
tcgcccacgcgtccgagaaaaacccagagccaaaaaaaaatggccaaattattgctgttcattgcactatttgtggttccatgtcttgttagtgctacacgcatggtgaagaacccgttggtggttcaaggttaagtttactgtttccattgccgtaacgtgttagtatcatacaataattttttatctttcttatgatacatttttt

SEQ ID NO: 251044 - DNA, 175 bp, Gossypium hirsutum
ctatcaaatcttggaaacaacttgcattgcggatagatgaaatattatagacaatatagccaaacaaatgttccacactagactattaacgactaatacttgtgtcgaggatattacacctttttaaatctaaaaataaaatatcaatttgtacatattacgatcaagaaaacaa

SEQ ID NO: 251045 - DNA, 448 bp, Gossypium hirsutum
  unsure (1)..(448): unsure at all n locations
cnagaacgcgagcggccgcccnnnnnnnnnnttttttttaaanagacaaggccacaacgcatgcacaagcgggagaaagaagccagaggaaaaaacacaacaaaagggaaccangacggagggaagcgcaggacaaaagcaaaacaagcaaagacacaaggaaagagggcaacagagaaaggaccnagacacacagccaacggacgaagaaggaacgacaccggggagccgcaaacagagancaacgcgcgcgacaacaaccaggacaagggnccncgaaggcggccccaacagaacaggagaccacccggaacggagaccgcgggaaacgaggcgcgcgccagaaagccggnggcaagaaaccaaaaggcgacagaagacaggcaaaggggggccggacaaagagaccaagaagaggggaggaaccccccggagaagcgaagacaac

SEQ ID NO: 251046 - DNA, 178 bp, Gossypium hirsutum
  unsure (1)..(178): unsure at all n locations
acggaanaccgggccgacccacgacgccgaagaaaacaagaaggagcgcgcaaaacacaccattgctttccaccattgaagaaactacaaaggatgggtatctcatatgtgctagagggcgaaaaagatgaagaaaactataaggattgcgcaaaactttccaaggcgttcgaacaag

SEQ ID NO: 251047 - DNA, 449 bp, Gossypium hirsutum
cccacgcgtccgcgaatacatggtcgactctcttctttataggccaaccactgaggacaaacgtgcagtggctgaatgttgtgggaatgtggaactctgtaggctcagtgagatatacaaagagtggagattgaagagaattgagcaaacatgggatcttttccaccaaaaactcaacaaggatgagtcagggaaggcttatcttccagcaatatataaccttatccaagaggaatatatgaaggaattgttccatgacacacttggttttggtattgctaagatgataaggagaattggtggtgttgaccatgttgaggactttgaatcaattagagaaggtagcataagagcagatagtgaggcaaaggcacttgaattagccaactctcatctcaaggagaagcaacaattcttggccattggtgaaggtatatcacccatcatgc

SEQ ID NO: 251048 - DNA, 212 bp, Gossypium hirsutum
gcagtttagtccaacttcacacccaccacttttttttgtttgtaatcatgctaaaaagattggtgaccgttaaagaagtgagtggggccttaacgtcccaacgaccagacacacgtgaaggccatctagacatgaaccgctcctaactttgttgatcataacacataccctgactactacttccatatgacaaattgtgtgctccatcacca

SEQ ID NO: 251049 - DNA, 210 bp, Gossypium hirsutum
aaaaattgatataacagcaatttcctttgtattgaaactagagaaacaaatatattacaatatttatgaacaaccactctgctaaaactttataaaataaataatactttagttttacactcatgtcgtaagccaccatgcctacgtacatttaccaaggcattgcaaaactcacatatcggtctacattttttaacatcatatttagag

SEQ ID NO: 251050 - DNA, 422 bp, Gossypium hirsutum
  unsure (1)..(422): unsure at all n locations
gccacgtgttcggaacttgctaaattaatactagtgcctaaaaaacatgcacaccaaggagagaaaacctacgatttctatgaaaacacccaacatacacaccatccttttatttgctcttctctcgctatttagaaagatcagtccactgccttattctacaaccaaacttgttcaaccaactcttctgcgaaatccggaacaccatttgaccagaaaaactccagtttcagtttaagcccttcactcgccaactggtgcgccactccatttgcggatcgccgaacatgcatgaagggaatccccttcaactcttaatctccttaaacccagatctaagcacaacttcatggncactgtgcaagccacttcttccgtggcaaaaagcgatgggatactctcatgatagtcgcgcacatgta

SEQ ID NO: 251051 - DNA, 291 bp, Gossypium hirsutum
  unsure (1)..(291): unsure at all n locations
cgggacgacccacgcgnccgcggacgcgngggcgacaacgccacaaacgcgcgccgcgaaacaaggccanacncagcacgcacgccgccgaacgccgacggagaggaaagcggcgggccgaaaaccccacggccacaggganggcaggaacccaagcccgacgggccacaagaacaaaggcaacaagggggggaaaaccgagaacagaagcgccgacagagcgangggagaagggaagcgaaccnccgacgagagggaccgggaagccgaggcgacgaacgacggaaagag

SEQ ID NO: 251052 - DNA, 181 bp, Gossypium hirsutum
tcgatgacccgagataataaataacactttttttttttttgggttgtccgagttatgaatctttgtcgcttgtagaggatgtgatgggcaacccagtatcaaaatctagctagtgcatgttgacttgtgcaggtgtttatatagaatcttgccaacggatcagaaactcgacctgggatta

SEQ ID NO: 251053 - DNA, 361 bp, Gossypium hirsutum
  unsure (1)..(361): unsure at all n locations
caaagccaacaaccaaagcagcaaggagaaccgtctagggaggcgaaagagcaggaaggagaaaaacanggaggcnccagagcagcagaacaagaccagagncgcgaagaacgacncngnngaaccccgggaccgcaacacnaaccaagcgacaaaacaaggcggcccaagcgaccgacacgagacagcagcaaggcggacgccgacagagaccaggaaccccgaccgcaaagaacgggccccagcaggacaagaggcccagggccacaccgcagaaggagaacgaagagaaaggaggagcaacgaggacggaggggaaaggcaaagcccacaagcccacggaggaaagggaggaaccgca

SEQ ID NO: 251054 - DNA, 298 bp, Gossypium hirsutum
catgtcttgacctcatccatcaaaaactttcattttttcattctacatgaaagatcaaacaatcataccaacaaatccctgaatcaaacttgaaaaaccctccaaaaaatccaacccaaatccaaaatgcccactttcaacttcaaattcatcttcatcagcatcttcctatcccttctctttctccatacctgtaaatctggctcgattttagacctcaatagtgcactggcaagcagtgaaatcgatgcaagggcaagaagggtttgcaccaaaaagctagaagattgtttagaaa

SEQ ID NO: 251055 - DNA, 196 bp, Gossypium hirsutum
aaagacaaggaggttataatttcttggggagttcaaaacaaaagggagtggctctcactatgatacacacgacatgcagaagatgggcgccaagctcgggagtgcctttgaaaggtgggtgaccgctataagacacaaatatttgccaagatcgagaacatagaggggtgaaaccattatggtgagattctgtagg

SEQ ID NO: 251056 - DNA, 298 bp, Gossypium hirsutum
acaatccaactaaaatgttggaggaaaccccatttttattccccctataggcagcagcgccgacggttccaacctataccacggtgacggactccaaatcacctgttggtttataaaaactagacctttcgccgccgtatcatttaccaatgtgggcctgttccctgataccagaaactctttctacgaactattgcctttaataggaagagcagtgctcctccacgcggaacccggcggcattggaacctgatccatcggataaagggtcagggaatgaggatctttcttagactcc

SEQ ID NO: 251057 - DNA, 361 bp, Gossypium hirsutum
cttgtacggccaaagattccctaccagcataaaatcggaaagaaagacaaaacatggggatgccgactgccacgtgcgcctacgcctcttcctcctacatcggcaactcttctacgatcggtggcgctggcggaggaggaggagagatcatgctcattggaggcagaggggaggcagattgcctgtggcaatgagggcgtgtggacagccgagtttagtacgagcagcctaatgagtcgaacacgcattacaacacgcgcgccagagagcaaagccatggtagcctgaccgctggttacgcctgcggagacaagccaatcctactgctctggaatagagagcgcaaagagggagcccgtgg

SEQ ID NO: 251058 - DNA, 154 bp, Gossypium hirsutum
gtgtagcgattctcagttaggctttgctttaagctcacagctgctctccacagccctataatgggtaaggagaaggttcacatcacccttgtcgtcattggccatgtcgactcttgcacgtcgaccaccactggtcatttcagcttcaatgcta

SEQ ID NO: 251059 - DNA, 130 bp, Gossypium hirsutum
tccaaccttacttttattactaagtgatagaagatgtattatgagtgcaggggtgtctgtcctgactatgctattccttgagcggggtatacttttctactgctttcatgaatgtttatccagccctgtg

SEQ ID NO: 251060 - DNA, 131 bp, Gossypium hirsutum
agagggtgcgcacgataaagctattcattattgtttcaacatgaaggttcgcaatataaaattgtgtctatcaaaattgcatcatgtctcttgatcatgaagctgacggtcaagatcacttgtcaatcctt

SEQ ID NO: 251061 - DNA, 405 bp, Gossypium hirsutum
ctttctttctatctttttattttatttttaattttttgcattatctctttcttcttcttctccatggagaaacttaacaatggcagactgcaaacatggcgatgaagagttcgacacccaatccaatgaggaaacagcataggcctaaaaatatggaggactggcgccaaagaagaaacccttaatcttcaaaggaccatgaacgtgctttctttgattcatcagattgggcattatgcaagcaaggttcgggagttaatcaaaaattaacttgggctatcgagacttttagaccaaagcttcagagaacacgctattaactattaccacctaaggagactacattgtcatctgggccagataacttggggcagatgaattgatgaattgttgcgagaatttgtt

SEQ ID NO: 251062 - DNA, 197 bp, Gossypium hirsutum
cggacgcgtgggattttcttctcaccatttttcttttcctagaggtttagatgcgttgatcaggtgaaaaagagaaagagggctggatttgggagatccgatcgtagaaatttggtgttatttgaaagaaagatagttcaattggtaaattaatttgaaatatggagtcgtttaatcaagcgtgagttctgtttact

SEQ ID NO: 251063 - DNA, 174 bp, Gossypium hirsutum
aatataagcggtttgcatattgcagtattttctctttcttcaaatgcaccaccggtttgaccgtgatccaccttcaatgcttgaagctgatacaagccttcaagctcaggacacaaggtttcgcacaggattagaacataccggatgggtagaagctcaaacaagtttgctttt

SEQ ID NO: 251064 - DNA, 173 bp, Gossypium hirsutum
gccacgcgtcgccacgcgtcggaaactagatcctttttatctcgctcataccccaaatccccataccctttgttaacagcaagatggcaactggcagtaccttctcttgatcgtcaagcttcatcccaaccgattgagatgttctactccgattcatttttgttggattgttt

SEQ ID NO: 251065 - DNA, 174 bp, Gossypium hirsutum
atataaaactcgagaagcaaccactcatatgtaatagcgggtatcgatctatggatctatctataaagtatgaaaaaccagataaaaaaattgggggtgggcctaggtgctacatgaaaacaagggaggcatgcttccaaaccaacagagggtaagcttcgccggaaaacaatc

SEQ ID NO: 251066 - DNA, 415 bp, Gossypium hirsutum
  unsure (1)..(415): unsure at all n locations
atcttttatgcctccgtctccaacgccgatcacggcgtgaacccaggttcctaggcgggtacgcctctgacgtggcttggtgaagggcgtacgactcanaggaggcgcgcgacgtgcggtggaggggcgctgggcgtgggcacgagcagcagcttgccactttgctagaaaaaaagtttaagttattgggctaaaagcttgggctagggtttagtctattttttatttattttgggcttaaagttggactgtttgattctttggtttgggagttgtgtttaatgaaccaccaaaaaaggagaagcctgaacctaagccaccggtttatgcacctccaaagaaagagaatcatggacccaaaccaccaatgtatgaaccttcaaagaaggagaagtctgagccaaagccaccagtt

SEQ ID NO: 251067 - DNA, 238 bp, Gossypium hirsutum
ggaagccaaaaattctagaatgaaaacttgtgttgatagcaggtagaaaattaccataaaagctacttacaaagaaaatacagtccgttttaagtttgagccatctgcaggatgctgccaagtatatgaagaaggtgctagcaggagcaatgttcaaatcggtacatgccaactgaactgtttagaaggaagccgcgaaatgggagacagtaattgggattgatcttggtacaactta

SEQ ID NO: 251068 - DNA, 395 bp, Gossypium hirsutum
  unsure (1)..(395): unsure at all n locations
gtgatgggcttaaagaattgccaaagaagattgaaaaattggtgaatcttacccatcttgagtgtgaacattgtattagtttaactcatatgccacgtggaatagggaagctgacttcacttgagacgtttaagcatgtttgtagtggataaagatgggtcccatggcggtgcagatctaagtgaattgagactgcttaacaacttaaggggacgtctagaaataagaaatttgggattcgtaaaaaatgcaaaagagaagtttgaggctgctaatttgaaagagaagcaacatttgagatcgttggttttagaatggngcggtggtaaccatgatgatgagaagtcacttgaagacctccaaccccatcctaatctcaaggagctctgtattgg

SEQ ID NO: 251069 - DNA, 444 bp, Gossypium hirsutum
gcaaaacaccctttaggtttttgattgagcaagcagattcccaaaacaaatactagaaaccctactcccaaatagaagtttgattgagctctctcatggcgttttctacccgtctcctttacaaatctcgccaggtctttcgtcttcactcccaaagctaaagccaacggtttttttttcagttccacaaacaattagacaatcaacttcttttcttctctgtttcaattttttttggcgttttggaggttgagttttttttttgagttgaagttcttggactcggtaactctacgagtccgagtcattgcgtacgagttttgattctggtgatgttattatctccaccgtcgattactcagtgagctgttgcaattatcaaataagtttgttactcgtattcggttttttgtttttgggcttacttggaaacttgtgatctcg

SEQ ID NO: 251070 - DNA, 199 bp, Gossypium hirsutum
atctgcaacagttgtgattcctgccaactttgatatcaatgtttttataaggtgttggcacagaggtagcgttgaagtcttatgtttcacttttacctttttcggcccttgtgattgtccagtttctgtcatctttttctaatatctcttgcttttgttcttcctttctgattgttttttttcttttttttttcatttt

SEQ ID NO: 251071 - DNA, 326 bp, Gossypium hirsutum
cggacgcgtgggcgataatagaacttcgagatctgcttcgggcttggttgtatgcggtatggagggggatatcatggcctctaaatcagttattcactccaacatttcgtcatcgtttgtagcggaggcacatacagggttaaaggcgattcagttagggattgaaatgagattacatagtttggatataaaaagagactcaagaacagtaatcaagaaatgtcagttcataaatcaagacaaatcgattacaagagcgataatcagatatataaacagcataaaagttgtctttcagaatatcgtgttttattttactctcaaaa

SEQ ID NO: 251072 - DNA, 269 bp, Gossypium hirsutum
ccctcgtccgcggacacttgttcaaagcctttatttagcatatgataaaaatagtaagaaaactataattctgggagtgttttaaacattagcacgactcatcaaagaacccactcccttgactttacgataatgcctctatacatgccttatatccacatttaaccttccttacatcttgaacccatctatctttccatttataaacacaatttttatgacccacttattgtcttttacacttttaagcttttatttttttaatttac

SEQ ID NO: 251073 - DNA, 232 bp, Gossypium hirsutum
ctcaccgtcaatcgccttcctcccaaaaggaaaacataaaaaaatctcggccaccgctgctgctgccgccattggagtcttctttgacggccgcttcctcgaaatttctcctgcaaacatcttcacttacctgaagatggtgttgtagacacggtcaatttgcctttcaattcaactccttcaaggccttatacatttcatataccgtggttttgcagatgtgcactttttt

SEQ ID NO: 251074 - DNA, 299 bp, Gossypium hirsutum
  unsure (1)..(299): unsure at all n locations
ggaaacccggggcgcgccagcggncgacaaaaccaaaaaaaaacacgcgcaaagagcagaacccggcaaaaccccaccgggggaccacaccccgaggggagagcccgacaccacgacacggaaggcaaaaccaagaaaggaaggcacccgaccagaccagcagcgacgcaagacgccggaaaacagcacgggacggccgacccaggccgagacaacagccagaaggaagcacccgccaccaggggcagcgacacacaggggggaagcagagcacgcgaaaaccgaaaccggaaagacca

SEQ ID NO: 251075 - DNA, 318 bp, Gossypium hirsutum
tagaaaattcttaggatagagatctgagagacagagaaacaaaacagagtgagcggttttcgggatttggtaacggcgattcaagttatactgtgaggtgtttgttggagagcgaaagaagggggatgcaaaataaaacatcagcttcactcttacattacagctgcttcgccaacaaaggttaagcggtatttggagaccagacaaaagtagaaggcggtttcgtaacagaaacagagcaggccaaagtttattaaaataaatataaaaaaaaaaatatataatataaaaataaaaattaaaaaaaaaaaatataag

SEQ ID NO: 251076 - DNA, 448 bp, Gossypium hirsutum
caatgcccagccaccaccatcaccaccgctctactccgctgctgtccgccacggcagcttcctcctctggctcccaatccttcgtctctaagctcctgctcctcttaacactcctccctctctctttagctgccttagctttcgtcctccagtggcgcggagggggtgtatccgatcccaccatcgccacatccgccgcctattcccgatgggcaccacgtgggtcccaccacgagatcttccctggcatggagactttctcatctctctctcccaaatcgcattcttcttcggattgcatcaatctcggtcgtacctcttctcattctctcccttactatggggactggaaatttggttttgaagctaatttaaagccaaagatttgtattacaacaagtacatcagctggcttggagcagatttaccatggatgttctatcataga

SEQ ID NO: 251077 - DNA, 437 bp, Gossypium hirsutum
tacatatctcaagagagctgctggagcatcccatgccactaccaaatgactgattaattcggatcggcaacgatatcatctatctcacaaccaagatcctatcctaacactctaaaaatatcccaggttcctcctggatactctggtctcccaacttttcaaaatggcgattttcagatgtttccggttatgtatcctgcaattgttccaggtttaacttcgttacaaaatcaggaacagatgaatcgtggagcaggcatttatgctgttcctgttctaccatttatgggacatgtttctgggattccatctaacaatctcattcctcttacctataacatacctactcaatcagtgacagatgcaggggcagcagcttgaggatcaagggcaaggagcacagcatcctcaacatcaacagcagcaggtatgacctt

SEQ ID NO: 251078 - DNA, 339 bp, Gossypium hirsutum
attagcatgatcaccctggcaaggcacacatgttggagcaacttattcttgagttggagcatggggtgaggattaatgggagatatcctgataggacatagaaggagccccattgaacagtcttgtggctttatagcctattggatactcttaatgacataggatgacgagttgatgatgctctatcaaagagtgatgaggctatactgcacacaccaaccgtaattgatttgtactctgtcaagagccggatattgaaacatgctggagattcggtagctgcgtcttcattggcagatgaagctaggtgtatggacctagcataccgttatattatac

SEQ ID NO: 251079 - DNA, 442 bp, Gossypium hirsutum
cggacgcgtggggttgaattttacctgtaatttttttttgttttttcattgattaaagcttggaatttcctttttccttcggtgaaacgtttggttttgttcatttttcgtgacgctttttttccccgattcttgctttggcagtaatagcgttggcaatcacctcttaattcctttgccggtcccggataatcccgactttcagtcatattttccaaatcgaagcgccgattctaagaagtttgagcttccaggctcgaagctgaagttgtaaaatttggaaatattttgagcttttctgtttgttgacttcggttgaactttggggactagagaaaagggtcataaaactgtagacccaaaaagaaatccttttggttggatcataaacttgtttgggttttgattatttttaagcaaaaaaaatctatacagaagacag

SEQ ID NO: 251080 - DNA, 222 bp, Gossypium hirsutum
ggtagtgtaaagatcacatctttgacacatcctgtgatagttttcgcctactttttattgtatcaaagcaccatagatcgatggggagaatcatgatgccctacttgatggtcttctcgtacctgtatgccaactgttccttaacattatagaaggttgcatctgttataaacactccttgaggttggactgtttagactaaaggagggacttcttttgttc

SEQ ID NO: 251081 - DNA, 295 bp, Gossypium hirsutum
gggattttctctaatggcacctggaactttgatgatcacaaaccttcatctacctttcttgcattgccatttcaccaagattatacttacaacttcaatccaatctactgtccctttggtgatgaattctttttacaaagcaacacatttgatacaccctcattcccacttctacaacaacatgtatgaccaagaatccaaattccttgacatcaacttcactagttggatgtttatagctcctgcaaaaccgagcctgttcaattacctcaccctgacaatccatctaataagt

SEQ ID NO: 251082 - DNA, 317 bp, Gossypium hirsutum
acgctttcttctagattcgtaaacagcatttccaagagaagcttcatttcttctggatacaggtaccccgaacgtcacttgattttatcacagcaccgtccgatcttcaccacgtcacctgtccactcctcatggatggactcgatcaaagaggtcttcaccggcaagaagacctctccagatgatcatgtaactagtgccgaatccttcactctcctccgatttgccgatgaactgaagaatgctagaaatgtatggaaattaaagcatacatagttgggagaacccgggaggcttcgtttggaggtggttttggg

SEQ ID NO: 251083 - DNA, 405 bp, Gossypium hirsutum
cattgatgttgactctattaagacaacattgctcacgtcgaatttaccacaaaaacttggtgtgcttgtctattgcaccacctgtctacgtatatagatagcaaccactgctagctttgcttttatataagaaaaacaaaaagagatttgcaaaaacattgtaaagtgtattaattttaagacaatggctagggttccttgcaagcatgttcttcttattgttttcatctttctttgcttcatctctacaactccagtagctcggagtttgccgagcgaaatgaagaagggtctcgacgaccgggtggttacgacggaaaacgaaagtggagcaccgcctgatgttgatgaattagaatctatggactatacttcagcaagaagggagcctccgatccataactt

SEQ ID NO: 251084 - DNA, 130 bp, Gossypium hirsutum
aatgctgtgaaacggcatgctaatgggagactgttatttatatatctggataactgtgactggctagatggagaaaacactattgtcgtgaaggacaccgctgactctattttgaatcttgtgatgatag

SEQ ID NO: 251085 - DNA, 411 bp, Gossypium hirsutum
cagttttggtttcacttatttttttccatccatcaatccacattttcattagacttttcatccctttcaatgggtatgaaaagggcagaaaagcaaccaacttctctgcttttaaataaactttgattaactcttcaaggaatttatgatgcttgtttgcatatgggggtgatatagaagccaagctattttggaaattccagggtcctctctttttggaagaaagctaaatcccatgaatacaagatgtttgactttttgcttgccaatctgctttaagccaaaatgaaggtcggcttgattttgttagtggacttaaagacaataacttcattgatggagggaaacacagtttttattgaaatagacctggaatgtgtttatatatttttttaaaagccagcttttttt

SEQ ID NO: 251086 - DNA, 349 bp, Gossypium hirsutum
cttttcccaagctttcatcaaatggattttagttaaatctctctggattaaaatcaacaagttccataattgagaacagaaatcaagttctaacgaagaaggaacatccccgaattccaaaatgaagagacctaaatccatttcttccttcaacttgcttcttctcctttctgtattaataacccatctctgtttctctcttggtttcgccgattctcacttcgaaggattcgattcttaagacgacgacactgttgaagaagaactccttgatccccactctgttaaatcaccttctttacctcagtccgagtcacaggccttttttgattctgatctgaacactgtt

SEQ ID NO: 251087 - DNA, 290 bp, Gossypium hirsutum
cggacgcgtgggtcaattttgcattttttataataatttattccttttaatatttaaaacaaaggcttaacctttctctctcttcaatctttactttttttttcttgtgtgaacaaaaaaaagggaacatccaaagtctgccgcgtttcagaaagctttgagagtgtggatcgctagaaaggaagaagaaaagccctaattattctttgaattttagcttctgcattcgcaagttttacagttatacctgtcgtcggttatgtactcttttgatggctgtaaaaccattt

SEQ ID NO: 251088 - DNA, 224 bp, Gossypium hirsutum
gttctacatcacaagcatccacccttttatttttttttcgaaaactcattctaatcaatgactgttatttatatatctgaataacagtaactaactttatctcatttacacttttttctaaatacacaacactatctaaacaatgatcaaaatattggtagttatgcaaattatgctgattatagtagctatcaatcgagtatctttcagaataaaaactttta

SEQ ID NO: 251089 - DNA, 153 bp, Gossypium hirsutum
ctatctctctctgtatttctctctcccgcaaggatttaattttctaattaaaaacccatcttggatgcggagatgttttgcttgtcacttgcaagcatcactctcatggcttccatcattgaatctgggtggcctgaatcttgatcacccatt

SEQ ID NO: 251090 - DNA, 347 bp, Gossypium hirsutum
gctatataacaggcggactgccaaagctattctgattactaagcagagaacaatgaatctggagtaataaaaatcttgctaactttgattgctagaaaatatcacagcatgacgcaactagctatctatataagctcgaacaaggacacgcgcactaacgttgcttgcagacgtagaagaataacggatgccttctctgcgctccggcaggatcttacattgacccgagacttgtgtcacaaatccagatggcgagacaattcaatggctgttgcagcagttggaaccatgtatcattgctgcatctagaactgggacgatgcccgcttcaactttggcatctgctg

SEQ ID NO: 251091 - DNA, 333 bp, Gossypium hirsutum
gcaatggaaagggttgaatccggtagagatttaagggccagaatgtacgcgaagcttagtaaagagaagtccctcgacggactcgatccaaccgaactggatctggatctcgattgggtctccgagttagtgaagtgaactcgatactggcaactcacccaactcagctttctgttatgatttatttcgggaattctttttatatattaaaaaaaacaaatcggtggctataatctgaccttttgtgaatattaatggggtttttttttttataatctgattttcgatcatcatttgcactgtgtaaatagacgacggtggaaaagaaagatg

SEQ ID NO: 251092 - DNA, 240 bp, Gossypium hirsutum
cccacgcgtccgttaatttgaaaaaaaaaacatggaaggagacgatttagacatggcatctgctgaatgcgctgaagcatatcttggtgacatgaataaaaggttaaaagagatgtatgaagaatctcttgctcttcttgagatgcaagtttaagtcgattaaagagatttgttccctttctagatccttctgctgttttagttacaacttatttaaatttagatggattgtttttttat

SEQ ID NO: 251093 - DNA, 311 bp, Gossypium hirsutum
  unsure (1)..(311): unsure at all n locations
ctttgctgttgaagtagtaatatctatagcatacagagatggagaggcaaagaagcaagcagggttgtttgttgatgtgggttttggtttctncctttttttttcacaatagggtcattgcagtgtccttttactttctttgttgagctttataacttctatttatcttctgtccctcatgcttgtacttctcctttattgttctcattgttttccattcgttttctagtttattggattcttctctttttttttatatttcctttttttttttgtttgttttatttttttccgttcatcttatttttttt

SEQ ID NO: 251094 - DNA, 177 bp, Gossypium hirsutum
acgaccccgcgtccgaaaagacaacattgcataggccagcattatacttgagacattcattgtccttctttcacaacatggcagctattctttctttatacactaatccttcacattttaaaattctcttcaacaccatcttactacctattaatcttcatctttcctattccttta

SEQ ID NO: 251095 - DNA, 178 bp, Gossypium hirsutum
ctcacacgtccgatatgacgaattattatccattgctgttgagttgagccggaatgatgtgttggaacggagctagatacgcctaggattaattgattcggaagacccagatggggaagatgaagagaatgggataagaaagtgtttggtgaggggaaaccaatggttctactggaac

SEQ ID NO: 251096 - DNA, 338 bp, Gossypium hirsutum
  unsure (1)..(338): unsure at all n locations
acnactagtcgaataatcgtacagtccagaggcacccactcctttctttcttgcttactggcgtgtcttcattaccataaaattatatttctctccatcgacccctatcccaagctctcagctgcaccaggaagtaatttgaaggttttatgaactctacaatctccgacgcgaaatcaattgagtttatttccgtttttatccatttattgcatagaatgctaatatctagcttntggggtcttgttgcatccactactcagtgttgagagaatacaaaaacttttttttcttccttttccccaatgcgtgacatgtattttcgattttaatggaac

SEQ ID NO: 251097 - DNA, 371 bp, Gossypium hirsutum
cggacgcgtgggtcttgagcacgtgcaaacagccagagaggcaaagattaagacacttggttgggctggcatggcaacgaaaaccaaaaaattattattttaaaaaaacatttcgtttttgaaggaaggaaagaaagaaactcgggaaacatcaacagcaacaacaacatttgacaaagttgttgttcttcttcttcaaagaaaaccctttttctttactcatcgcaaggtttttgttgttgggttttggaaacatcattaacttaacaagaacagcacagcccagatcactttagttatcatttttggaaatctatggagcagcttgttaactttataattacgccctcccagagctgaatacaattcat

SEQ ID NO: 251098 - DNA, 326 bp, Gossypium hirsutum
cccacgcgtccgatcatcctcttcctcacctattaatcttcagtttttgccttcccagcacctgtcacttttcatttcctctaagataaggaataaaatggcgacgaatatgatgcgagccgttcaatacagtaaatataacggaggagccgctgatctcaagcatgttgaagttccgattcccagtccaaaaaaggaagaagttttgatcaaagtagaggcagctagtattaacccaatcgactggaaaatacaggagggggtagcgcgcccatttttaccttgcaaattcccccacattcctggtaccgatgtagcaggagaaa

SEQ ID NO: 251099 - DNA, 418 bp, Gossypium hirsutum
gttctagatcgcgagcggccgctcgcccacgcgtccggataatccgaaaaattggccattttcccctcgcaatcttcctcattcaccatcaacactccatcgtcaatccctgctgtcatcacaccaaatctaaaaccacacaccaccaccatggcgccaccaccaccaccgtcagtttccatgtcttcttgaattgctcttgctctgattcttcctttgctcttcgattgcgtgtttgtgtaagttgattgaaacaacccaacgggaacaaagtattgatatcgtgtgtgttttggatttttttaataacaataaattattgttaagaagagatgaagttctgcaagaaatatcaagaatacatgcagggacaagagaaggaactacctggtggtggtttcaggaagcttaagaagat

SEQ ID NO: 251100 - DNA, 209 bp, Gossypium hirsutum
cagccctaaataaaaccgatgagaaatttctttgaaaaaaaaataacagttcattgttcaggaatcacagctttatcccagacgaaaccaagcacttaaacatagaaaaccaaacgttcatacgcttaattacatgatgcctgcctgcctgtgttctatcccttacctgtatttaaacaagggtcttcctggttagaaagtgtggatta

SEQ ID NO: 251101 - DNA, 316 bp, Gossypium hirsutum
cggacgcgtgggattcccttccttcatcgctgaatagccattccattccacgggagtgttttttttcccttttcatttttttccctcagcttcatcttcttctttcctttccatatctgtgtctcccttttttccttcttatttccctttatcttatttcccttttttccttcattactgatgttgaaattccgctgtaagatccattaaaatgacattcttttcatcttcaagaatcatatattgtgaaattcatgattgctcatttttctctctcataatttatttttattatcgtatatggctattttctctt

SEQ ID NO: 251102 - DNA, 173 bp, Gossypium hirsutum
tttttttactgttaatttccatcgcttgtaagcagtgattgttagcatgcatacaaggtgttttgcaccttgtcgggtagaagggatgagaaccgaatccatccttttctgtaaatccgggattttatgccctctccatgtttcttttaagccgactttattagttttatttc

SEQ ID NO: 251103 - DNA, 138 bp, Gossypium hirsutum
ggatttctaactttaacacaagcatataagttcatttattatctgaatgaatttactcacatggggtacggtgatagttaaaattgatgtaaaacctttatgtcaaatcgtcttaaggactcttttaaattgctttat

SEQ ID NO: 251104 - DNA, 325 bp, Gossypium hirsutum
cccacgcgtccgaaaaaaaaaaaaaaaaaaaaaaaaaaaaaaaaaaaaaaaaaaaaaaaaaaaaggagaaaagataaaaaataataaaaaaagtgggctgccggtccttcggtttcataggttccaaactggggtgtccgtttttgaggctccttgtttcttgtcgcgtgcttgcaaaaattggccgttttttagcgtcctcgaaattgattaattggccgttttttcccacttttaagtttgggaaacccctgccctttcccatttttccggcttggcaaaaatttccttttttttcgcctttcttattattaaagaggcccgc

SEQ ID NO: 251105 - DNA, 296 bp, Gossypium hirsutum
gctcgagctgctcccgcggcgagagcgggtcgccgcgtgccggccgggggacggacttgtaacggcatggtatgatatctttctcgggctccctctcttttgtctagtatcttaaatgtcctttcatgttcaccacttgttgttctgtcattaaattttaattcaagttttattcctacatttacttatgttctttaatgtataatactctttttatactcctatttattttccttttgtttaatatatcttttttttacttatgactttattcttctttagttttctttaaattt

SEQ ID NO: 251106 - DNA, 354 bp, Gossypium hirsutum
gccaacccgagattttctattttccgattctttttaggtctttttcccaattttttgggatttctaaaacagaaacaaataggtgtctcaatggcagaagagagcggtgcccctgtaagttgtgctgtttttcccgttaaaaggcccagagatgacgaataaaattgggtctcttttgctgctgttgtagtattccatgtatatgtatagcattttcttttaacacttttcaaggtagtttgttatttattttctttattattttatatgtttgttattttaatttttttatacttatttggccatttatgttactcatttttatatttcttaattttatttttcattttttat

SEQ ID NO: 251107 - DNA, 408 bp, Gossypium hirsutum
cgcttatccttttgcttgtttcctctgcttttagtcctgcaaatcctcagatctactttcgcctccctgctaagcttccttttttctcctttcctttagattttagctctgcaattcctcagatctactctgtccgtcttgctcatgtgcgcttctcggagaactgagttattccaaaaacagataagcttatttttaccagacacaactttgcgcccgcgaggtctgctcggaggtcaaggttggctttagatgtatcggtcgtcgctgtggaatacttaaggtgcacacagtatgcaggcggttaccgtaagctacaagcagctagcatgcacctgctgatcggagcctattatgtttcagctggctctggctatgatgacacagctggcatggagcatcatgcca

SEQ ID NO: 251108 - DNA, 150 bp, Gossypium hirsutum
cagaaacaacaagggctgacatggctcctttatagggtgctaacagaacaagagccatagcagtagcagggggccactcagatccatcaacatggatccataagcatttggcttttcaagttctacaatgagaaccaggaaccataactg

SEQ ID NO: 251109 - DNA, 489 bp, Gossypium hirsutum
cccacgcgtccgctgatttgctatggattccttcacatgttaaaagcctctgctttaaaaatccaggtagagtttttttttcactgaattgctgtttcaaattttcaaagttcatctctttattagtaaagtgagttctggttgtaattcaatctataaatgcacactatgtactctaatttgacaaagaaccaagcttttccaattgttattaggttttcttcacaaacctcaaaaacccatctttggtcaattaggtattctccaaaaccctccttaaactccttatttggtgtttagcaccccataaaggtttccacttttcaccatataggtttttaaaacctagaaagtgttttaaggttagttttaggatttttaagtgcctttctatgtatttttcttttgttttgagtcttttactttttttctagtcttattttattttttggttttcatcgatttattggttttttttttcattctttt

SEQ ID NO: 251110 - DNA, 432 bp, Gossypium hirsutum
cgtaagttatctgctggttcattttagtgattttgatgttttttggtccaaacgagattatcagggtctatgagtcagcatcaaagtttggtgcaggactgtttcttttggttcaagtcgtgcttttactcgactttgttcatggatggaatgacaaattggttggatctgatgagcaattcctgtattgttcgctgcttgttttttcttttgtcggcactttggcctcctttttattttttgtgttcttattatcctttgtttttctttttctctcttagtatgtatgcttcttttatcttttttattcgtttttttcgttgttttttttcatttattttttatcctgattattttcactttattttctttccttttttgttccttttatttttcttatattctttggtttttatttttgtcttttttctt

SEQ ID NO: 251111 - DNA, 447 bp, Gossypium hirsutum
cccacgcgtccgctttttttctcaccaatatctgctctttttcgtcattctcagtcaaagtttcattctcttccatgctatcccttctcaatttctttaagtggttccaatgcattttccggggtttcttgtatcttatcacagtaaaaagagatcaaaggcatggaggaaaggtttctgaagaaaccacccatgtcatcaacacatcgaaacagggctctgtctttcagcttaacccccaaggcaccttctccaatcaaatttcccataacctgccagtagttggttttaaagacccaaaggatgaagaaaccgagttggaattcgatgtaggggaccaagataacattacaccctgcacagagttgaagagcatagtggctggagaagatgattctcagcttcaagtatcttcagagaccgttatcaatgatgatcatagcattc

SEQ ID NO: 251112 - DNA, 342 bp, Gossypium hirsutum
  unsure (1)..(342): unsure at all n locations
agccgtcaggaaggaggcagcggatcaacctccgaagcctccccatgaaaagacaatggagagcactaatggtggcacagcttgcaaatagtaatcaagcgagaccattaggttgagcgtctaccgccgaagatccaagtcttgtagatgctccacccttagagctnctgattcatcaccatgctgtgctcgtgaaagacccaaaacgcctcaccgagtggacgagatgaaacaagtgcctcgctatttcgatggcgacgatgatgggaaaatctcggctctcgaacttagggcatacttcggctccatcggggagtacatgtcacatgaagatgctaaaat

SEQ ID NO: 251113 - DNA, 432 bp, Gossypium hirsutum
gaccattttgtccttcatcttcccaattagatcccgtttaactggtctgcaatccttggtctttgatccgcaaagagaatcagttacacttcaaattatcgaaaggaacttttctttttgcttttattttagttatgttgggggcaggattggaattcaggagaggtcgtggagaagatcggttttacaatccacccaaggcgagaagagagaaccagaatcagcaaaacgatcaaccgtggagggatcaagccgatgtttcaccgagtctatcaaaggataaatccaagtctgtcatagggattgttttaacttgaccattccaaagcggtttccattctcgctaccgaacccaatgtttcttctttgagtaatatagaaaggtttttggaattggttcaatcctttccgtccctgccctttttctttttt

SEQ ID NO: 251114 - DNA, 283 bp, Gossypium hirsutum
cggacgcgtgggcggacgcgtgggattttgtgtgaagcaaggagaaccccttaactccttgcatgtgtaaagcttgatagccacttttttcttctcggtacttgtttatgcacgttgagcttcatcgaaatgaaactgtatttaacaaatgaagatgcttttagtatctgaaagctacaagggaaaagagcaaccgattaaagttcttaacctttaaaaaggagtacggtagagggtattgtctgatggaagccaaaaccaggaccagccagcaatgctagca

SEQ ID NO: 251115 - DNA, 421 bp, Gossypium hirsutum
ctagcaccaatatcaaagcccgagggacataaacttcaatttttgtgataagttagactaggatgaaaatgaatagcaaaagaaatgcactatctaatgccattcaattccattttacaaattggaatgaatatttacataaccaagaatcgaaatcacgacatatattattcattatccatcctacttccctcattagtaccagggatatgaatccagcaaatcttgaaatcaacagtcattaccaattgagtgctgaaacaaacctacaacaacaaatttgcttttcgcttaacatcgccaccatcaacaaatttttctatgacatgttcagtttagtcaccattattcttaaaatcggatctaatgtcttcagccaacatttccttatatttgcatttgtttcattatcattgagcat

SEQ ID NO: 251116 - DNA, 324 bp, Gossypium hirsutum
  unsure (1)..(324): unsure at all n locations
caaaacagagaaaatggctgcatcttcccttataatctccccaagaaagcttcgatccgatctctactgttattcctatcaacgtgatgcaaacaccccactggttatatcagttcttgcttctcttatcgagagaacaatggcaaggaacgaaaggattgtcaagaactgtaaatgggcattgacgagaaaagatttcaggagcagggttttcgattgccacgaaacacccgacatgacgattcaatcttacctagagagaattttccgatacaccaaagccggtccctcgatttatgtggntgcttatgtgtatatcgatcg

SEQ ID NO: 251117 - DNA, 321 bp, Gossypium hirsutum
gtttgtttgttttctggtgctttctttctctatcctgaaaccacagccgtaaccatgtctttctgtggtagccaactgcatttccagcttttcaccacagcctactttctattcaaccaagttccttaaaggcttctttccaaagctcgattccgtcaaatccataaccccaaaactccaaagttcaaggctttttaaggtcatagcatatgtttgtttctattcttaaacttttatctcttattccatctctttatcatgttatattcctacttttacctaattttaaagtatatttctttttaactttgctattattat

SEQ ID NO: 251118 - DNA, 388 bp, Gossypium hirsutum
gtgaagggaaaagccctagccagctctgaagttaaatggaagccttagctgctgaacatttagagagaatctgtattgtttcgtcctgtatttagctaaaagggatagtattcttagcagttcgggttttgaagtattcatagcgttttagctttgcaatttctgaaaatggttggaaatacattagtccagattccagcatgcccgtctttgtcatcttcaactttgaccaccctcccgcattcttctccaaaagttttgccatgtcttccgcctaaactaagaatgaggttggcaaaagttagagctatgtctgctagtactgagcataacccacaaccccggtcttcggagcaaaagaatctgcttgctgttgttttagatattc

SEQ ID NO: 251119 - DNA, 193 bp, Gossypium hirsutum
atatatactagcttaaaggatatgtgtcgatgctcttgactactagagacatacaatctcgggggtgatggcatgagatatacactgaaaaatccaggtgcgataaatggggaagatatacttggcagcaagcgtgatttaggtatttctggatatggaggggaacgagaaacgataaccttgagcttataat

SEQ ID NO: 251120 - DNA, 275 bp, Gossypium hirsutum
aactattaaatattcaacatcattagaccgggggctatgctctcccattctcatcctcagagggtgtcatcttaaaagatgggtgccacaccaaggtcactgctttattagatctaacaccttagcattcatgggtgcagctactctaaacattatggctcgagtcatactaacaaatagctttgattacattcctttcactttatcattttatctcacattcaatgcaataatattgcttgtttatggactatttattaatgttctttttgtat

SEQ ID NO: 251121 - DNA, 221 bp, Gossypium hirsutum
ctactaacctatgtgtgcaaaaatacccaaatctaattttgccacatccagatctaccctatgtgtgcgcatacgcactactaaatgcgatccttaacaccatactgtctcttctaaaattttagctacactttacaattatcacgatacatccatcacctcctagaaatacctccttgtgttcttgattcaattaaactatccccctttttcaagttttc

SEQ ID NO: 251122 - DNA, 215 bp, Gossypium hirsutum
cccactcgtacggttagaatccccaattttctcctctgaagaaatacccttctaattatagtatggtctttttatacaaaagactccgatcttttaattttactattattataaaaaatcgtgccaaatccgcatctataatacacaatttaccgcagataagacggctataattaactctgtactcgaaactgtggaaagtatctagggctttt

SEQ ID NO: 251123 - DNA, 306 bp, Gossypium hirsutum
gtattcttccaccctctcttccgcaaacacttaatctcaaaattttctcaggaaagcgagggtgggttacaaacacagctatgtagtggggcaccaatcaacatctatcgagatctggcatccagacgggcattggtttctaggcaaaaccttatctgcggcacacaagactcctctcatgcagctgactcttgcatttttcatatcaacacgcgagtcttcagctatcagcggttagaccacgccctcggttctcctagggatacgcctgagcgccttgaaaggtggctaaaacatggctacata

SEQ ID NO: 251124 - DNA, 356 bp, Gossypium hirsutum
accagttggtaggtagagcttgtggttgatagagagaaaagatgttttacttgtaaaagacctgactctctaaacacttatctctctctctctctctctctcaaaatcatactagaaaagagcaaaaaaggtatagagcaagtgaacgttgtttggacagtgctggggggttggtgtgtgcgctttctattatggatagctatgaagcaaccagaattgtgttctcaagaatccaaaaccttgaaccagaaaacgcttccaaaatcatgggtctactgctgattcaggaccatggggagaaggagatgattcgtttagcctttggtcctgaagcttcacttcagtctgtcatcctc

SEQ ID NO: 251125 - DNA, 206 bp, Gossypium hirsutum
gaggaaaaccaacccatcaatccattaacatttttaggggtgatacaaactaaaactttacaacaattaccaaacaaaacaacccttattatttggggctacatataaaagggcatatatttatatattggttggcacttcccttaaaaaaataacacttatgattggaaggtgtttcccaatttaaaacgacccaaattttgaaa

SEQ ID NO: 251126 - DNA, 270 bp, Gossypium hirsutum
gtcagtcttcccaaacaccttctttccgaaaatttattaaaaaaaaaaaaaaaaaaaaaaaaaggaaaattaaaaaaaaaagaaaggcacttcaaaaaaaataaaactaacaaacccatgcttacaaaatatattacatttctttcgtcgctctattaattcaatttactcctcccctttctaataactttttacttattttaaccctttttttaccctacttaatcttccttgaatccacccccctctctccaatgttattctttgctt

SEQ ID NO: 251127 - DNA, 235 bp, Gossypium hirsutum
cctccacatacaaaaaaaaccatctatttttattttcttatcaacgacaacaccaattgctggcgtgaggaaatgtcactgctgggagtgtcacacaggctatgctcctgaatatcactttaattgttgctgctgatatgtgaagttctttaacaatcttctacccatgaatcattatggacgtgaagtagatctttcaaaagatggagatatttcttacattgtcttaaatttt

SEQ ID NO: 251128 - DNA, 367 bp, Gossypium hirsutum
ctttatggctgacatggatggttcttctgttgattctaaagaggaatccagtgaagattccaagcttgacttctcagaagatgaggaaaccctcattattagaatgttcaatttggttggagaaaggtggtctttgatagcagggagaatccctggaagaacagctgaggagattcagaagtattgggcttctagattctcttacaataatccaatgcccaatctgagttaggattacatccaagtgtttgggttttgcattgggtgattgtttcagttttggtttgcagcgtatatatatatataaaagcaaatgcctgtgttttgacaatgcctcatgggtgctaattgctttagtatgataatt

SEQ ID NO: 251129 - DNA, 433 bp, Gossypium hirsutum
  unsure (1)..(433): unsure at all n locations
cacgccgtnctcggtaagttctcgacagcatcttcagctcttgtatttggcagtnncaggtgaacgaatgcaatcgttggttgtttcgaagagtgagtgagtagtaggaaacactgggcgcccatatctcttttacaatatgtattctctggcattcgctgtagggtattcttgcagcattccacttatggtagagccgtaagctcttgaaattctcaagtcatgattcatcactgcaggaactgttcatttgtatcaactgtagggtcctatgaactctttcgaaacttgtgtaggtattgtggctggcatgatgtatctaagctttactgagtcttgcttcttatatccttttcttttaatttattgtcttgcagatttatcatgctgatgacaggtttcgccccacccaaattgctgctgttttaaatgc

SEQ ID NO: 251130 - DNA, 229 bp, Gossypium hirsutum
cggacgcgtggtctgactcgtgtacccaagatggtaattattggtctacaaagaaacagagttgtaggtgttatttgaggatatgcggcttcactcacaagcgctgtcttctagccttcctagtgaatactctatagaggaacatgacattgacgcatttctttctgaggaaagggtgtaggatatccttcaacagtctaaagaaaagcatcggacagtgcaccgtaac

SEQ ID NO: 251131 - DNA, 260 bp, Gossypium hirsutum
gtaagttccgaagcatttagctttgtatcgcagtcatgtgaacatgaatgttggtcagattgaagatgatgagatttttaaacatgggccccattctcttttacaattgtatttctggcatcgctggaattatcttgcacatttcattattgtgagacgcactcctttaaattctcaagtcatgactcaacactgtatgaactgtttcaattcatcaactataggtgaccatatatctttttcaaacatcttcaagtttt

SEQ ID NO: 251132 - DNA, 365 bp, Gossypium hirsutum
cccacgcgtccggtcaacagtctacgatatatggttggctgaggtctaaaaagggctcctcttaaaaggaaggtaggaagaaacacagaaagcaagcaaagaagcttttattttttttccaccttgccttgtcgattttgctctcttcaagccaaacccaccttcggaaaaaggacatcatatccaaaatcttgctaccctattaccacctactgccatcttttcttgctaccctattaccacctactgccatcttttttgatcttcatcgatttccctttttttccattaagaggaaataaagccaaaaagagaagattgaaagaaagaaaggtctgggttttactcttgtttgatgggagttt

SEQ ID NO: 251133 - DNA, 177 bp, Gossypium hirsutum
cccacgcgtccgttttgattttatcttgtgtggttacactatccctctcagttttggggctacgggccacttttcttgtagattgtagaatcacttggtctgattctcatattacgcaaatcgatggagtgagagccatccaacttgatttcgactcaagattaagctgatgaattt

SEQ ID NO: 251134 - DNA, 394 bp, Gossypium hirsutum
gacccacgcgtccgcccacgcgtacgcataatctcagctttgattcaaatcgaaacctgatagctggattagaatctgaaggtaaggtttgtgtattcgcgcagactaattcttttttcacccaaataatattgtctaatattcatcctacaaacatagatgaaggtaaatataatttaatgctatttatcagcccaatttgagaaactttttataagcctggccagtacgacttttctaccgccgatagctataacaatggggaaagaagggtttctttttcgtcactgaaaatcgaacaaaaaatggcgatggcgagcgtgcgatctggtcttctccgaaccgccctttcgggcggatcttgttcttctgctcctcccaagcgaggcttttt

SEQ ID NO: 251135 - DNA, 308 bp, Gossypium hirsutum
gtgaataaaaaaacaaactacaccaccttccaacaaacaaatatccaaaaagtgaaagttagggggtccactttccttcttctttttcattattttccctcctgattttcttttcccccaaacactactattcgacggatacggtttttctatccgaagatatttttttgtcgattgttctcgctatcagacgattcgttttctttcgaagaagaagattgataaaattagaaacaaataaggccttgaattttcttctttagagggttattttccccggaaaaatggcctcctttattttcccagct

SEQ ID NO: 251136 - DNA, 240 bp, Gossypium hirsutum
ccaatctttgctttcgacaaattgaagaccttggctctgttaatcgccacttgagatcgtgaaacaggaataaaatggggttcattatggaatttgcagagaatcttgtgttgatgttaatttcttttcccttctttcttttttctcttttattctactcttatagttttatttgtgtttgttttttctttatcatatagtcttctttttttttctttttttatctctttttctttttct

SEQ ID NO: 251137 - DNA, 483 bp, Gossypium hirsutum
cccacgcgtccgcttaacccagtcaccatccaaatcctatattaaaaaacagccattttcctctcctaccacaatactgattttaaaacacctcatgcaaaggttagtgttagttcttacagtattgggttccttaatcatgttttagttcaatattttctctctttttgggtttgagtttctggtatgggtacttgggtattagtattacagtaccaaaacaagaggttcatcctcattctcatgaacatttcattcctcttggtggcatctgttttcctgatgatgtgttccagttcttcacaagttgttttagggagcaatggttctaaatttcgcaatagccagcaagattgtaaagccctggaggatttagatgattataaagccaagtgttcttatctcaagtctaataataacccatgtgtttatcaaggctatgttgattatctttaccatttttattgcaattttggaagattt

SEQ ID NO: 251138 - DNA, 135 bp, Gossypium hirsutum
accataaggtagggtgatttttttattgattgctaataatgatatttagtacatttaggactttccctgtatcagcttttgagattgaaggtgaacaagtttaggggtttaagggtaaggtcgtatagaaactag

SEQ ID NO: 251139 - DNA, 333 bp, Gossypium hirsutum
aatggaggtgcttcttgggctgatgaatttgctcatgatgaggcaagtagagatcttgtggaagctaaagaagctcatagattaatatgtcctgataatcagtcataaattccttttagcagttagacagtttcctcctttttttcttctgccttgcctacgtagactaaaatggaactaacatcactgaccttaagtagtaatctcattcaccaacctaggtggttgaaactagttttgatgatttgagaatgtcccagatgataatgatggtttggttagtgctattatctatatatctactataatttagcaaataaagtgtgaatgact

SEQ ID NO: 251140 - DNA, 182 bp, Gossypium hirsutum
ctttttctgagtctctatatggtttgcggaggagagcagcaaaaataagaacaaaacaggctgatatccgatcaaagtctaatgatgggatccaacactctagtctagaaaagcgccagagagttctttcagttgtattttttggttggttgccttaccttaattcaatatcgtattcaatc

SEQ ID NO: 251141 - DNA, 278 bp, Gossypium hirsutum
gcgttgcagaccaatgtgcaaggcggtcaagttttagcaactacgggagctgttttacgaagtgtgaatgaattagtgagttcgggagagacaggtgcgacatactttcaaccttccatggctggttttcttcatcatacatgctttggactacaacattacggttcggctgctgttgctgtgtttgcaaatcataacttgcgcttggggtttgattcctttattaatcttgtagactgtattgattttgtgattttttattatttttttctttttta

SEQ ID NO: 251142 - DNA, 422 bp, Gossypium hirsutum
gcagtccgcagtgacaaagaaaataggggtttgtgcaaggaaagtttgggcatggattcgggtattgaaaatagggtttttcggtttggagtaccttctaacgatgagttccaaggactgtcagttttattaccagccaaaggggattcacaacgtcgcaaaccgcctaatgagttagtaaatcgccagtagatactgtggatttagtggcagctatggagggcataatttttgggttgaagcatggtcatgtaaccatggagattttaactgaaaacccaaaaaatgatgaaccgatgggtcaattagattcgactaaacgccaaggttagctgctaacaattttgttgccgctagggttctcttttggtattttatatatagattccaaaatcattttttggaattgtcaaggtgagggc

SEQ ID NO: 251143 - DNA, 395 bp, Gossypium hirsutum
ggcggttgggatatgctcaaaatctttctttttttccctttcttttatggtttatgttattcagtgtggtatatcgttatgctttgttatgatgtttggggtttggctgcaaatttgattccttgttgtgattcttttagggactttatgtgtttgtgtctaccaaatgatcttgttttctttaaacttcgtatgtgttatttttttgttcttttctgtgttgcttttatttgatatagaaaaagacctaactttttttttcccaaaaaagaaccttgggtttcacttcaatctaatcttctcttttcaacggccaattatggaacaattgttcatctcttacatccctgtggttttgattgaatttttaattgctctcattcaatttgtgttga

SEQ ID NO: 251144 - DNA, 126 bp, Gossypium hirsutum
tgctttataattgaagctaattgcatgtttcaggggaggcgattctttatttagagacaatggacatccttgtatgagttgctattaatgtgaaggccaagatgatcgaggttgaaggtcccagag

SEQ ID NO: 251145 - DNA, 290 bp, Gossypium hirsutum
gttgcctcatgacttttgatttacttttgttctttccttttccatttcatattctatagggctgtcctgaaactcgatctctgttactaaaacttcagttaaaactctttgatgatgacacatagtcgattggagatgttgtttacagcctccttcttcgtctgattcagttacaaactgttcatttatagatgtttttttgtcagcccctgtttaaagttgtcgtttgtatgcctggtgttagcatctgtatgcctgtccattttcatagccctgatgccagggtatgt

SEQ ID NO: 251146 - DNA, 272 bp, Gossypium hirsutum
gaaagaggttatacaggagcttatcctaagggggctccgtaagtgagtcacagagaaacaccctaccatgggacgctatgttcacaatgctggcatatttctctggaagatattaacatctctgtcaccatgagacaacatgtctccatagcacgcttgatccccacattggtggaaagaatctagacctctcatacccttatcacgatcaatcgcacatagtcatcttttacaccgattctgagcaagcacttccggctagctaccacagt

SEQ ID NO: 251147 - DNA, 320 bp, Gossypium hirsutum
  unsure (1)..(320): unsure at all n locations
cggtcgaccacgcgtccgggaaaaaccaataaaatggcgaaaccccatcttttatttctattttacttttcccttctcggacggatatctantttccgccgtcgattcctccatcatagacgacttacgtgtagccggttccagttttccgtcggttcatgcaaagaatctgattagggaggtgaatttgttttctaaaggggaagttaatgtctttgacgatcatcgggatttttttcgcgggggttccaaaccggcggagaagcggtacaagttcccaacctttggaagtgcccggtggagttttcgttgaggatttt

SEQ ID NO: 251148 - DNA, 328 bp, Gossypium hirsutum
atcgggggcgcaacgcccgcgacctatgctcaaactttgaataggtaggacggcgcggcttcttcgttgtgccattctacagagtgaacagctcggagtgggccttctttggtgagcagaactcgggtctctggattaaccgaaagtcatgttacaggggccaactggacgctatcctatgacccagatagggtgtctgtcgatgctgacagccagacggtggggatcgtagtggagattctctcaagagtgtgctagctctcacctgacgattcaactagcctctataattgctggtgctgaaccgcgcaaggtataccctgtcatg

SEQ ID NO: 251149 - DNA, 341 bp, Gossypium hirsutum
ctttgactggtgagggcttgctggaattctgcaatgctgtgcaggaaaaactaaaggattccatggttccggtggaagctttagtcccatttgacaaaggggaacttctgagtaccatacatcaggttggaatggtgggagaaaactgaatataccgaaaacgggacatttgtcaaggcatttgtccctcttcgttttgctaggctgcttaccccaatgaggcaactgtgtaaatcataactttcaactctcttgaatgtaacctttcaatagtttgtattaaattcgatgagttttcaagagcaagagggcgatttgggaggacagcagcagcacatttt

SEQ ID NO: 251150 - DNA, 378 bp, Gossypium hirsutum
gctgaatttcggtcgtgattagatatgggattctagagctttggaggattcttgggatatttatatgataataggtcataaatttttagtccaccccagtttctcggtactttttccgtttggtttgtaagaagaaggtaggtgttaaaacttatagctttttagggtttttttcctggttgatctaagagagaaacttggtttgattgaccgcaactaattgaatcgggtctgtgaggttgggtttctgttttattgaatattccagcaatagataaacaatggaactttaagctttttcctgcaaggaaacgataagttgggtgtttggatttcggcgtagatggatgattcgggtttggaatgcggatttttatc

SEQ ID NO: 251151 - DNA, 187 bp, Gossypium hirsutum
  unsure (1)..(187): unsure at all n locations
atcccctntttctctgcagcctttagcataatctggagtattgtcgaaccaaaaaaaaggggggatatctacaaggaaactgagactgagatatcatgaattcatagaaacttctgagtattcatctcctatctctttgtgtttaattattaactttaggaatatttatatttaatttaatttgttt

SEQ ID NO: 251152 - DNA, 270 bp, Gossypium hirsutum
agcttcatctttttttcgatgatgaattacttggattgaattcaagctgtcgtacctctcagaacttaggttaagaagttggcctttttttttcccgcaaatcttgatgaaggttttgcgataaagctaagacccctgtggagtttgcttttgtaagcagcgaaaagaagctgcccttgttgagggttatttttaggggattaagaaatggatgagaatatgaagcaactccagcaaagcttgattgagcttgaaactgaagcttaacat

SEQ ID NO: 251153 - DNA, 316 bp, Gossypium hirsutum
ctagctaaggcttttcgctacactgctaaagctatttcatgaagtatacctacttctccggcgcgtttggtcatatttcctagctatgcacatgggaaagaaatcatggcaggtgacataacacgcgcctggattataccctctaatgcatcataatctctcaacagacgggcgcaaaaaactcattctcatagccacatccctatcgagtggaattttgatggaggttaagactcggtgctctaagtgagtaaggaggcttatacacagttccacacgcctaaccccattgcagtggacatagatggtaacacca

SEQ ID NO: 251154 - DNA, 293 bp, Gossypium hirsutum
tgcggtgggtttggcggatgatatggaggaggatttggaggctgaagctcaataccgttagtggagtaccttttaatctaacgaccgacatttttactttgaatttatataacttttttttatcatgttatattttttttataaaattttattttcattactatttctacttgtttttcactattcttattttttttaacattaatttttctaaaattttattttctgcaacaatttttcaaatgtaataaatttctcttctttttttcaatcatattttttaatatatattt

SEQ ID NO: 251155 - DNA, 421 bp, Gossypium hirsutum
gtccggcaaaaccgctcagcagctcccaaggcaatagccatgagtttcatggccgtctctttctcttcactcctctctatccctccacctccccattccctcattccacttcgccttgcttcttgccatcgttttcccactttcactcccggaccaagaatacaaatccaatgcgccaccaaagacaacaaggaagcaactccacccgctgcagcatcgatggggagcttcgatcccaagaaaggagtggcgctttacaagcctaagtcatacgatgttctcgtaaccgatgccgctaagtcccttgcttatgctattcaagatggcaaaacccgtctcgagattgatttcccgcccttgccaagcaacatttcttcatataagggatcttcagatgagttcattgatgccaacattcaac

SEQ ID NO: 251156 - DNA, 124 bp, Gossypium hirsutum
gttcaatgaattggataggaccctcctttaaaatcagcagactctattttgttgacgaagctgggggcaggatatctaccttgattgcggcggcttagggttgccgattcttgcattgttgcgg

SEQ ID NO: 251157 - DNA, 107 bp, Gossypium hirsutum
gtcatcttaacgctagatcgaccacctatcatataacctgattttgactccgaagacactctggataactaatatttgccaagaaacgagaatcatgacttggatga

SEQ ID NO: 251158 - DNA, 150 bp, Gossypium hirsutum
agtttttcattctgctgatttctctaaaggaatttcgcatcagctaatatttcctagagtggcttcattttagctttccagatctccttaatcccatttatcaacattttttccataatctaattttagtccatcatgttaccaaatatt

SEQ ID NO: 251159 - DNA, 244 bp, Gossypium hirsutum
aacggatcgcctagatcctagatggtgacgcagtcacgaaagttactgtaactaaccccattttggcgacacaatgacggaaattgatccactactaccaagacacatgcctaggaaactttgtaaaggcactacataacttgatggacatattaatgctgctgtttgagctatgaactacgtaagagatggctgaacaacctagggcctatatgagatctacacattgatcatctgggctgag

SEQ ID NO: 251160 - DNA, 116 bp, Gossypium hirsutum
ggaaaatcaaacataaccattttaaaactttccggcataaatttcgtagttatcggagagtggtgccccctgaaaacccttttttctggccatacttttattactcaatcttgttc

SEQ ID NO: 251161 - DNA, 391 bp, Gossypium hirsutum
aaaaacaaaaaaatcaaaccaaatcaataaaagtccaaaatttgcagtccatgttttacaaatatctgggcccaatttacaacatgcatagcccaaatcaaaactacccaaacccaattaaaacccaattacaaagcccaaaacaaatcaaccctagcccactcttaacattttcagagagcaaaagaaccctagccacctttgcctttagccgccactctgtcccatgcgcgccgcacgttagcaaggctttttcctcacgctatcaccggcctttacgtgtatttaaaatccttcgtggttgtgtcgtccgagtccttctcaccggtcctaaaatcgtacccaaaagagggaagagagagacatttttctctcgatccgggggctgaga

SEQ ID NO: 251162 - DNA, 481 bp, Gossypium hirsutum
gtttggaagccttatgcataggtcaacctgcacacaggttcctcaaaaacttgaaacatctggaagttagagaatgttgtaagttgcaagtggtgggtgagctccttcatgacgtggaacaaaatcatgagcacccactttctaatgtacaatctttgaagctctatcaattaccagcattgagatggatatccaaatgttcaccccattctttcaccctccatattatcaaggctgtattcataaatggatgcgcaaaattgaaatcccttttggcaccttttcttatttaaagactattgcttttagaacaatcagagatacaacattgctacgaatttttaactctttttcctgatccagaaattgttttgtgaaaatatatttaatgcccctcttccttctctctctgtctgcccaaattgaaaacctctttcataaaaaagctgtgcaaatctggaaattttttggcaaaaccttt

SEQ ID NO: 251163 - DNA, 299 bp, Gossypium hirsutum
ggaaccattaaaaattactccaaattcttattttataaaaaaataaactttattcacttcaaagacaatccataattggttaataccatcatcaagttttaaagcttaggaacaaacttacttcaaaaataaactttaaacatttgttataactgaaacacatgaaaaagattactcatttgattcccatttttgatccaaagattacttttttttgtttttgggaatcataaaatagcaaaatttgagatcaatcacccttttttctgaaagagcattcttcaaggaggttagctttt

SEQ ID NO: 251164 - DNA, 457 bp, Gossypium hirsutum
ggtggatttcgacaagggcaacaaccttcgcagcattttggggctcttggatacccaaatttctaccattcacaaacaggagtattaggggaccatcagcagcaaaaccctatggatggatccctgagtgggtctcaaggccagccatcaaagcagacccaacagttgtggcaaaacaattactaatgttatcacctccgggtttttcagggtcttggtagtgagtttgaaagtggccaatccaaagcattcgtgcgattgaataattacatgtatgggtgataggggtctgaagagaccttgaatggctactggcctgtgccacgagggtggattctacttatttaatggctgggtatgttaacttaagaacacaatgtgctaatttgggataagggacgttggccttcaattctttttccccctcatatgttccctggtccccttttcccttttt

SEQ ID NO: 251165 - DNA, 114 bp, Gossypium hirsutum
gtggggagccgtcaaggtgtaccgcctccgaagtattctgtggctttaggttacccatactatcaccagatatataatggattaagaggaggcttacattaacctatcccgtat

SEQ ID NO: 251166 - DNA, 245 bp, Gossypium hirsutum
gaaaaacacaagtaattctacaactatttgtcgccagagttttttcaaagcaacaacaggtcggcaacagtgattgccggcggaaacatatttgcatcaagagtcgccactgtttaaatcagcacatgaaacccatgccattaatagcagccaccgacttctccgtccatatattttcaatcaaaaccctctacgcagttcattaaatcaaaacaaaggattaaatttttagctattaaatactt

SEQ ID NO: 251167 - DNA, 396 bp, Gossypium hirsutum
attaatgcaatgcaaaaccaggatattgcctagatatacataaaataaattctttctttctggatttgttattatattctaaaggtatgttcatcattggtgtttgttattttgtttggttagggttgaacggggatctaaaaaaggcaatgaaagatggaaagccagtaataatcgagggaatacatctggacccaagcatctatttaatgaatgacgagcttaaagctccaacctctgtagatggaccatcccagcagtccgtggcatcggatgataattcttcagttcaaaaggaaaataattttattactacatctcaaagtaacacagaaaatggtaaaaaccatcctgtgcgtttatctgaaggcgtgtcagcttgcaatgtgaacaaag

SEQ ID NO: 251168 - DNA, 419 bp, Gossypium hirsutum
  unsure (1)..(419): unsure at all n locations
ctttntttttggttatttttgggaaaatcttaagatttgcattttcgtaacattgaattttaactcttcactttttgttttctcgtacgaatttttattattttttcaatcaattttgatctccgttttctattgtttttcttggtcgttcaacttgacgacttaggggaaaaaagggaaaggaaaaaaaaatacaattttgtttaattagggtttgatatggctgcaaatattaacacggctaatttcaatacctccgcggcggtgaccgctgttaatcactcttccagttgccctaaccaatcacattctgtcacgaattctggtttttcgcaacggaatcaagttgtttgtggagaattggagccgatcgctgcgggttctttatcgtcttcgtcggattcttcatcattcaccac

SEQ ID NO: 251169 - DNA, 433 bp, Gossypium hirsutum
cggacgcgtgggcggacgcgtgggttttagaaaaaaatcagagagcttctttgctctctctcccttccctcttctcttaacctcccccatggccggccatgggctcatcggtggtcgtccgcgcccacaccctgaactgctgtcagtatcgggcgaaacaaatcctcttatcctcctccgaacggggccgaagacaaagccttcacaatccaccgcgacagaggagaaaaggggaggccttttggttcgtcgttcccttccacggcctttggctgaaccccctaggggttcaacgaccttcgagtcggagagggacaccagagtaccccctaacggtggatcggaggtctatggagggtcaacgggggtgaaaaccggccattttggtgcaaggaagcagccatcgggcgttctgcgtgcccagggcgcacat

SEQ ID NO: 251170 - DNA, 252 bp, Gossypium hirsutum
cccacgcgtccgagatatcataaaaaggaaaaaaaaatgaagctcttgttcctaattttgctgctttgttctcttcttctatgttctccagtttaagaaccaacaatgggtcagcctctttcacctttttgtgaagggaaatgcaaagggaggtgcaataaaccggctgtttgggatctatgcttcaaatatcgcggtatattttgcgaggagtgtaaaagtgttcctttccggtacttatggtaacataca

SEQ ID NO: 251171 - DNA, 106 bp, Gossypium hirsutum
aaataattgaggaagctgttcaatacaaagatgagtttaacaacatcagggaggttatctttaataaaccttacataccaattatctcaaactataataatattta

SEQ ID NO: 251172 - DNA, 206 bp, Gossypium hirsutum
gacccacgcgtccgcggacgcgtgggtgaagaggcaacttatcatctccactgttctcatgactatcggaattgggattgttagttgtttaggggttatcattctatcttcaccattttcaatcttttgagatcagtatagtcttttctgaaatagtcaatttattttttaatatgttgtcataatctattaatctattatttatt

SEQ ID NO: 251173 - DNA, 99 bp, Gossypium hirsutum
tcgataccaatctctatctatatatgggtttagtaagtaagagaatagctgtggagttagtgtcaatggcatagattaggtactatattcaactatcat

SEQ ID NO: 251174 - DNA, 430 bp, Gossypium hirsutum
cggacgcgtggggttcaactcaattttacccttagaatttctcaagaaacaaatacccatttgaaggaagagggaaaaaaacccaaagaaaaaatttcccaaaatgcatgattttgcttcacaatcccttatggattgattcttgtggctggaggagttattgggtatttgaagaaaggtagcatggcatcacttggtgggggtgtaggcactggattgattctcattcttgctgcaaatttgagccttaaagcttttgagaagagaaagaactcatattttgctttggtacttgagactgttgcattgtggaatttaagaatcagtttggacattgtagatccagtgcggtgctattagctatttctcttgcaaaaactatattgctgctgtgctaacatgggtcatgggacaacgttactaccaaaca

SEQ ID NO: 251175 - DNA, 292 bp, Gossypium hirsutum
gcttagtgatgctgaacttgatgagttaaagagaagtcgctatggtgacgctagaggccgacagttaaatttggcagagagcccatcacagttattgcttgaagctgatttagcaaagcaaactactatcaaaaaagtagctttggacgttcaggagagtcagatacctgtaaaaccttctgatgagttggggctcacaaacaaaagttctgagccttagaatattgatgggaagaaaagtgtgcttgctgctagtgatggattaaataatacaatgtgctttgcacggttt

SEQ ID NO: 251176 - DNA, 340 bp, Gossypium hirsutum
gcgcccttttttttttttttttttttatcggtcaatatagcttaattaatatcaaaatgggatggtctgcatatgcagtatgagtccagataaatattctggacaagcatcaatcttgatatatagcatcttacattaaacaatgtcaagaaacaaaattagtatgtggtctaatgctctcttagcaaactttagaaccccatatacaggatctggaaaccttaaaaattatggaaattgcaaagatttagtgtttttttttttgccatgttatgagtactgtccaaaacagagtgcatctgcgtgtgtttgcatagaatgggcagaaagcagatagtgc

SEQ ID NO: 251177 - DNA, 192 bp, Gossypium hirsutum
aaaatgggaaatggggaccagtgatttttatttgtagataaagttaatttttccttgtcgctttaagcgggtttttacacaacccacaacttttgaattttaacatccattttttttttgtggcttttgttattttggctttcacttgctggtgaacttttcatgccaaaactttattttaccctttttcaa

SEQ ID NO: 251178 - DNA, 471 bp, Gossypium hirsutum
ctttcccgaagaaaaccaaaaggcagaaaaacaatttgaactgatcattgctatgatgatgatataagccaaagtgggtctgtttcatttgttgtttcgagctgcatattgaagattaacgatggcgggaatagcaatattactagatctataccagaaaaaaccaagcttttgttctccacaaagcttccactcttctgggttattctctgcctccgctgccgccgcatcggccgccgctaccgtcgctgctggaaccccttttgcctccaggtttctttttggttatcccaaggtttcacattgtgatgctggtgctgtactgcctgaacattacatttcaaatacccaaagatcatctgaagatttctttaagaatgatgctctcaaattcagtgtgaaggagtttaagattgagctggagcctctggttctgcttttgaattgaggccatttgctttgacaaccttg

SEQ ID NO: 251179 - DNA, 201 bp, Gossypium hirsutum
cgacccacgcgttcggaaaatttgaagaaataaattcatcaccgatctaagtgcctcaaattctggtatatcgccggcgaaattttgattctggtaatctaaaaatgtctttcacattcagcggcgatgaaactgctccttattttggcttcctcggtgccgctgctgcctctcgttttttactgtatgggagctgtttat

SEQ ID NO: 251180 - DNA, 370 bp, Gossypium hirsutum
tgaatattagagatgtcttgacagcatttagtccttctttggactatttggctattagttctggagatggtcgtattaagatttgggacactttgaagggtcaaattcaaactgaatttgcagacattatatcaagtgaggcaacaaacatatatgctaaggcagaaagagggcatttttcaattgattacaaatgtatgaagtggttgtcttttgacaaaaagaagaaaatgaaacttggaagttctttgctcattattgtgaacaggaagtggtgatgtcttagcactcgatgtgtttgctggtcagctgaagtggaaagtcattgattgccattctgggggtgtcagtgccattgcatttgctacaa

SEQ ID NO: 251181 - DNA, 359 bp, Gossypium hirsutum
  unsure (1)..(359): unsure at all n locations
gacccacgcgnncgaccctancncccncnccncaacaacagncgccaggccaacacccnnccggggcgcnancncggggcgcnccgncnccaancaggaanncgaggagacggnccccagccaggcanccccggccncganccgaacccanccggaaannccncaaaccagncgcccnagcncgccnacgggacccgagaancagcgccagancgcaccgcnccaccncccncnnncagagcacnccggccanacagccancnaacggcgggcaggcanacaccacagccaaggacggcnnnccaggcnnagngccaacaccgacagacnacgggccccgngggccccagaggaagaag

SEQ ID NO: 251182 - DNA, 472 bp, Gossypium hirsutum
aaacgcaagaaaaaaaaaagagaaataaagggaaacccccctttctctgctagggttccaagattgaaaccccgccgccgctatgcctccgtcgtccgatgatcggagccgtgcgaggacgccccccaacggcgccttgaagtgcgctcataagtcgaggccgcgaacaccgagacgagggggaagagaagagcttcggcccctccttgaacccacatccggcgacgatgaagttccatcggcggtgggcctaagggccgactcaggtggtctgatgcacgaccgacatgcgaggccggtgattggagagcaactgcggtggcgtgagcaggaggcgtgcggcgctggaagcctgggcgtgcggcgcttaggcctaaggtttctgtctgttccctaatctgctgggttaggggttttttttaaaaattgggcctggtgagtattttgggccacttattagtggacccttttt

SEQ ID NO: 251183 - DNA, 145 bp, Gossypium hirsutum
ggcagttttctgaatgtggtcctaccattcattcaatgcaccatagattttactatcaaagttgtcagtgttccttttgcaggagatccatattccattctgaactctcacagagactatacatgtgtggtggctagagaaaccc

SEQ ID NO: 251184 - DNA, 264 bp, Gossypium hirsutum
atccggaggtggcctagtcttatagagagtacaagtttaagtagactgaaaattgatgaaacaactagatgaagtaagaagaacaagataggaagttaaggtagaaaaagagtcattgtcaaaccctttacaagcatcagcagctttagcccttttgttcttagtgggggcaatggttccattgttgctgcattatttataaaggagtttaaggtgagattaggtgtagtggtcggtgcagtgagtttggttttggcggtgttt

SEQ ID NO: 251185 - DNA, 222 bp, Gossypium hirsutum
tccacgcgtaggtccactcgttcgggaagcgaatgtttatctctttccccctatgaagctgacctaccaacacctgctaagggaatcctacccacaactactactagtctactacccagcactagtagcaagtactaggccgtcatggttgaagcaggcgttgtcgtatgcataggaactggtctcaaggaatgcatcctcagcagggttctttctgtggac

SEQ ID NO: 251186 - DNA, 127 bp, Gossypium hirsutum
gtcacgcgtgcgcttaaatgcaaatgcaaatggatagggcgtgccatggcaggctgggcgctaaatgcgactggtgggaaggctccaaggtagcatctcgctaccatagctgcccgtaaatctgccc

SEQ ID NO: 251187 - DNA, 330 bp, Gossypium hirsutum
  unsure (1)..(330): unsure at all n locations
ctcgtttcttccgccttctcctcactttcttgtctctttgattatatcgctcttcctcccccttgtttctcttcctctctcactctctgtcggactcagaactgaagtaacaaaatgaatagcgcttcttgtgcagccaagatcagtacgcagcctttctctctcaatcccacttcccctacatctcacgacaaccccctcgttttccccaaacccacctcctttttcctcggatctacccgcaaactccgcctcagttcttcttccaaattgaatctncaccgtcgatctgggaccgtcgctgccgtctccgatgttggtaagcaaaag

SEQ ID NO: 251188 - DNA, 211 bp, Gossypium hirsutum
cacgacgccacgctcaactattagccttttagcgctttattagaagagccccctctactctgcagcaaagaaacaacaggagatacgcgaggtatcatcagcactcagagagggcgaggatggaagagagaatcaattctcaaactccataattaaagagaaaatccgaagacatccgattaacacagaagcctgtaaccatgtgaaagaa

SEQ ID NO: 251189 - DNA, 220 bp, Gossypium hirsutum
  unsure (1)..(220): unsure at all n locations
agataaatcacaaagntcccagaagggactacaaattacattacccatctcttccatttctattagtgaaaacaatacaaatttatacttatctcctatttccatgtattttacaaaaacttattttataccatcacattgtcattttggccaccatcttgataacattacattttcaccctaaatgtttaagccttaccaattttcatcttaattctca

SEQ ID NO: 251190 - DNA, 173 bp, Gossypium hirsutum
gtccgaatcggtcgcccacgcgtcgttaatctcgagcgaaatgaataccgattgttttatatgagcgggatgctttcctgggtcatgtgtgccgtgattcgtacggagactttctcggcggatggatttgaagttgatcctgtgttcgaacaagtaacggactggtacgaatg

SEQ ID NO: 251191 - DNA, 242 bp, Gossypium hirsutum
  unsure (1)..(242): unsure at all n locations
cggaannnnagggtcgacgccacgacgtacgcgtactcgtagaattcatgttctccaaccattcttttacattcatccatagaaccaatatattagacgagtgggatgcttttttacccatccaaatttctaatccaatcatcatcaccctcatagtttatatttccatgttattactttgttcacacccaaaaatagcttaacgaaccattattagacttttgcgtattcatcaaatgaca

SEQ ID NO: 251192 - DNA, 116 bp, Gossypium hirsutum
tccgagccacgacgtcacgcgtagatcgcagagcggtcgcacgatatctagatctattctgataacgagcggacgccctctagggtgacggtcactcagtacgcacgccaaatctc

SEQ ID NO: 251193 - DNA, 151 bp, Gossypium hirsutum
cgacagttcctttgattttgagagaaaagagagagtgagagaagagctgatcttggcttctctgggtcgttcgattccgcttaatcatagcccgcgtttctctcacacgtgaaaaatggggctgcctctcacaaagctatttagccggctt

SEQ ID NO: 251194 - DNA, 345 bp, Gossypium hirsutum
ctgggaaatacaattccagtcagaaagaagagcaataccctacaaaatactgctacaggctacgagtgaagaagaatgaagatgccgtagccgtcacgtaacgttgactgttagtctccaccactatcacctgacggaagcaaagtaatagtaccattagtacaataccacgtgaactgaccctccttcctgaagcagattttgggggttaagagattttatctacagagaggatggtgacatctgagcaagaacacgattttgttaagtggggtttgcaactattcaatagtgatccctatgctaattggggatattgcggagtgttaactcaagaaatggaga

SEQ ID NO: 251195 - DNA, 126 bp, Gossypium hirsutum
aatacatttacattcttaaactagagcatttccctacaaaatactttttcttgctacaaatgatttacaatgaagatgtcatctcccttacttaacgtttactattatttttcaccactatcacct

SEQ ID NO: 251196 - DNA, 387 bp, Gossypium hirsutum
ctatttttttattttcttactttttcattttttttttttaaggggaattttattgatgtctttttttttaatttatcttcatttctttacataatcttgactacactactaatcatagaagagttctatctgctttcatccctatgcaccagcagcttgatcatttattgttaaataatactcctactgttgttagaacaaaggaatggatccaaaaaaactcaaatggattggtgattttttttatgccatagatacctgaaacccagattaaaacttaaatttgtcctatagctttgccattaatttaaagatacttgcacttttttatttcaatgcattgcttagatcattgcaacatttatatattgtgtttatgctatttat

SEQ ID NO: 251197 - DNA, 211 bp, Gossypium hirsutum
cccacgcgtccgtggttacaaccaagaggattctttggtaatgaaccgggcctcgatagagcgtgggatgttccgcaccgaacatgtaagaagttacaaagctgaagtagataacaaggaaatccaggagaagaggcggaaggctgaagatattgtaaactctggaaaaacggaaagtaagatcggacgggtggacagtcttgatgatgat

SEQ ID NO: 251198 - DNA, 259 bp, Gossypium hirsutum
cgtgcgcacccattcacatctagggttttatctaacgttttagcttgctcttcccctttcaatttctggggattgggccacgagtgctaacgttaacatgtcctatctcagcggtgttattaacgagttagctcgagctgatctcctaaacgatctgaagatctgatttcatacctgttcaccagcagcctgatcatttattggtcaagatggctcctactggtggaagaacagaggagtggttcgaaagaaactcaaa

SEQ ID NO: 251199 - DNA, 144 bp, Gossypium hirsutum
acgcatagccaaattatcatcaatgcaatcagcactaatgcacaatgacgagaatgaataaaagaaacggcttttaattatggtggtttctgccaacttggttttttttttacacacaaaatcccatcttaattatgaagcctg

SEQ ID NO: 251200 - DNA, 203 bp, Gossypium hirsutum
atcaaaaaagtaatatgcagtttcatatatatatcccaaaaaagagcttaacagttggcctaacaaagcaacaaacaaaggcaggaatacagcggcacagcaataaaaaggtttaggaagatattatctacttaatatattgagagacccatttgaagccgtcaccatatcccattttgcgaacaatgctgcacataaacacc

SEQ ID NO: 251201 - DNA, 230 bp, Gossypium hirsutum
agaactactacttcaaacaagcacagacctcccacgaaagatgttcttgagaataatcaatgcgggttgctctacgaacgaacagctaaaacttgtgacgcagcttgagattgccataaagcgcacacatttatcttgcaacctcaacacaacgagaaactaatagctttctagctcccagccatagaatcatgactctacttgatcatggcttccatggataccccaaa

SEQ ID NO: 251202 - DNA, 138 bp, Gossypium hirsutum
gcgcccacgcgtacgctgtagatgtttgaaaaggtacttctaccacttccatagatacaatagcaacagacagcgggcagtttctgttgattcggaaaataataacttacccgttgcattttctcacattattttttt

SEQ ID NO: 251203 - DNA, 346 bp, Gossypium hirsutum
ataacccctacatccaatgtgcactgacgttcatcgtatagatcttgagcaccaagctgaataagggtcgctttacaaaactaaagctaaagctcctaacgatgatacagagagccatagtagacagatcctccatcccccatcttatacacagcgtctgaatgtatgagctcttatcggcagacttagaaagtccacttaactatctgccatctttatttcattcccaagatgacttcatctgtagggtttatactgtctgtccattatacactcacccggcatgtgagatgatgtatcatcgaaccttccagcgaccggctatctagaataaaatctttttttg

SEQ ID NO: 251204 - DNA, 459 bp, Gossypium hirsutum
ctaaatcgcgagctgtcgcgcttttttttgtttttttttcattaaaaaagttataatctcttggagatatatatcccaagaaagagcgtaacagtattccttacaaagcaacaatctaaggcatgaattcagcggtgcagtaattaaaagggttagggagattttatctacctaatatatttgtgagacccattttgtaggtcgtaccatattcctttttgtgaacaatgctttacataaacaacctaaggggttgatcgtgggattttgtaagaattgatcttgtcctttccagtcgtgatttaggcttgcctagttgattatgttagctaatttttttatcttattatgggatgtcaattcttgttgcctataattagtaatatggacttttgccaatgtgttttttatggagagaggcgcttttaatttcctttttgcgttttaaaatattttttt

SEQ ID NO: 251205 - DNA, 246 bp, Gossypium hirsutum
acgcataaatggatagcacaaaagttaagaatggatgtagaaaggatccgccaacaaaggctcctaaaatttgagcaaagctcccagcaggtgcaaaagaattgctcacctgctactcctcatgtaccgatatctgaaaccactatgactccaattgcacagaggatctgatctaaaacatgctccatgaccgctcctcgcatgtaatggactctaacgccatgtcccagaacaagaggtacatca

SEQ ID NO: 251206 - DNA, 192 bp, Gossypium hirsutum
ctttaccctccatctctctctccaaaaagattttattattgggaaagcaacattgcgagaatcagttagcttattgttgtttcacactttcaagctctcatggctgccattattgaatctgtgtggccgcatctgatcacgcatttcagtggactgcaactagcatatttatgaagtgtccattttcacata

SEQ ID NO: 251207 - DNA, 265 bp, Gossypium hirsutum
  unsure (1)..(265): unsure at all n locations
cttagggattgaagaacagtagcttagcagccacacatttcccctcttttgaaccttccccctcctaaagaaaaatggattaataattcaaaatctccactggattagtcgtattaggtcagtttatcactccatttccctttgaatcaagtcagtttttatgccatggaagatacaaagtcagttgcaacactcataggctcgacagcctccaagatacagcagcttcaaaaagcatntgctgaaactgaaagtcaacgtgctc

SEQ ID NO: 251208 - DNA, 262 bp, Gossypium hirsutum
cggacgcgtgggaaaagatataatctttttttttttcaggaaaatttccataccccattcttcacttcatttccccggataagtctttctctctctttcgccttgaactttttttttctttttgttttgaataaaggtcttctttcttttgctgaagttgagggattgggagattgctttggatctgtgttgattgggatatctttattcatagttttcacgtgcgactatttattgactcgttcgagttagtagattatta

SEQ ID NO: 251209 - DNA, 345 bp, Gossypium hirsutum
  unsure (1)..(345): unsure at all n locations
cgcgtacgcggacgcccacgcgtccgttgcattttacttctattgattttattttctcttgtttgaattggatgcctgagtgactatatccctcgcgggtgcacctactaccgaccttgatcttttgagaagggtacgagagagagcatgcctgtcgggacccgtaagatggtgaacaatgcctgaccttggcgtggacacaggaaactctgagagtgggattcttctagactggtggagctgcngatcgaccgactcggggataggggcgaaagactgatcgggccccttaggggctggtttctccgctaagtttctttatgactattggagcctttttctaga

SEQ ID NO: 251210 - DNA, 486 bp, Gossypium hirsutum
cacttctcatccttgttattttaaagttgtatccaatttctctagagttacgagaagaatctggtgatgatgattccattaccaatctctggttgtggggagggatataagataggacgagatcggcttacatgaccttgcctttggttttggtttaggctaagggcaatattaaatgaattatctggctcttttatgtgtataatacaaataaaaaaaattaaatattgaaatgacatttgaatattattatttattaaaaatggtatttttgaaacaatatcaaagtgggaagggggagagatgggctataccattttatttgattttatttaattatttttaaaagtgaggagagaggaatgcgcaacactagtataacaaaaattaacatactatattatacgaattcgtatatggcatcgagacttggagggctatagagtggtacccataggcggcactagtctgatggaggtttgacag

SEQ ID NO: 251211 - DNA, 305 bp, Gossypium hirsutum
attctgtgtctctgaatgtagatgcagcatatgaatttactgacccaaaccaatcggcagcgggaggaaatgcagaagttattgttcttagtgattcagatgaagagaatgaaatattgatatctcctccaactgtgtataaggataatcacaaccaaaatgatggtgggggacttggtttttctgttgcaccttctggaatttcttatacgtattcagaagatccacctcttgtgccttcttgctaattcagttcttatttcatctcattgttgaatttgtccttccttttttgttttcttcct

SEQ ID NO: 251212 - DNA, 212 bp, Gossypium hirsutum
attaaactaaaaacccttcacagatactgagattaatggcaccctcccattctacccggggagagtgaatacaccccgattcctaccatccttacctaactccgacagtctaacaagcatagctatctccttttgcactatcattgtctacctagccatttcatggctcttaatttaccgtaccaactctcacaaatccctcaaatcctcta

SEQ ID NO: 251213 - DNA, 346 bp, Gossypium hirsutum
agaccaactaatgtgcgctctaatcccagatcacactactgcctcaggcagcaaatcaaatcgtgggcggacatgaatcactaaatgggatggtatacaacattccggtgagtctgtataacacgctgttgtttacagtgattacatgcgagcgtcatacatatatatactgagcattggtgatgatacatataaaccatctgatcttactaagtttgcgcaatatcacgctgaatatatgatgggtgatgacctcatggacataccctccctaatgtggtgtggtggacagatcccaaaatttgatcatcaccacggagcggtgatcccagaacatgcatcctct

SEQ ID NO: 251214 - DNA, 307 bp, Gossypium hirsutum
  unsure (1)..(307): unsure at all n locations
atttttctctctaaacatcaaatcttttgaaaaagaatagtctggtttgattcttgaggggaagcttaaaccatgaagctggtgtttttagttcttgcaataacccaatggttcatttctcgagtctagtgcttttgtaagtaggggggttttctaacagcctgggtaattgcagctctctatatgtggtctctccttgctcctattctcttcccagacagggncnnttaannactcntaaaccaaagttgtccgatatctttgcaataaaattgctctgtatatgtatgtttgtatgtgtgtgggt

SEQ ID NO: 251215 - DNA, 299 bp, Gossypium hirsutum
ccttatccctccacagttcacacacagccgtctgtctttcaaaaaagtttgcgccagggatttaaaaggaacaaaaaatcttctactcaataaaagagagaaatatcttccttaccgtaactatttgcaggaaaattaaaaataacattgatgagttattacaatcaacaacaaccttcagttgttggtcctcctactcaaggtcatccaccctaaggatttcctaaggatgcttattcaccacctggatatcctcctacaaggatatccttaatgttatccttcttaaggatttcctt

SEQ ID NO: 251216 - DNA, 205 bp, Gossypium hirsutum
ggaaagacttatcaagacgcaaagctctcccacaattctatcaacctacactatgatgtgggtggggattctagaggcgctgccaaaattcgagtttcgagcgatttaagatactccgttgtggagtcgttgcagatgattttgaagttcgcgtggaattaggccgagtttcatactaaagtgactgttaaagatccggtgattt

SEQ ID NO: 251217 - DNA, 227 bp, Gossypium hirsutum
aagatctgaaaaagaagatccgatggtggatattagctgaggtttcgaagcgactgagtgggtggagttttggtaggggtggtgaaagatgaacatcagcttatgctaagaagaagatgggtggagtcacgtcatctatcgcctcgaaattcgcttttttcccgccagattccccctcctacacagtattagaggacgacgcatgtgacggtcggctgtatatacct

SEQ ID NO: 251218 - DNA, 195 bp, Gossypium hirsutum
cccacgcgtccgcataaaccaaacagtactcaacaagttttgggaacttcttcatcttagggtgattggcattgctggtgggtatggcttgttcggtcgtagatatattgataatggtaatcttgatgattctcactcgcatgcttctggaatggtccatgtttcgtctatatttgttgatggtttcgaacattc

SEQ ID NO: 251219 - DNA, 455 bp, Gossypium hirsutum
acgcaagatagaggaagagagggataaacagtgtctggtctctttatatttgaaagtaaaatggccactctcaggcggagagagacgcattttatcaaactcttcatcacccaaatatgtgttccttctctctacactttttcaatctttgaattccttactttatgttactaggttggtgcttggttgtctcttctctttcttttttttttcttttaatcacgagcttcatggtttctgattttgtacttttgatgaactggaagtgtatgttttgcttcgtctgtctgatagtatgaatcccaaaagaaaaacatagtattcctttttgtcttgttttcagtggccttttttcgccacttcccaagcttgaaaggttaacagcttttcaattccttgaaatttggataaaaaacaccgctttctgatcctcgagcctcaaaattccattttct

SEQ ID NO: 251220 - DNA, 363 bp, Gossypium hirsutum
aattctgcgaaatgtgtgctgcagaagcatggtccatatacctactatgctgcatctagctctggggatctcttccggcaaagctcaaaacgattgcgtctttcacttcaaggactaacacctgatccaagacaccaagctatggcaaaggctgccactataccgcaccgcaaaaacatctgatggttcaacacactgattgacataagcatacacaaacgatcgcggacgatgttctcaaagagacttttccagcttaccagcactagaaagatgatagattcatgacaactgggactgattctactcagctatctgcatctattgatgattcacactttatgaacgatcatgtttataggc

SEQ ID NO: 251221 - DNA, 348 bp, Gossypium hirsutum
gagcagagctatagcgagcatgcctgatgaacaggctattgaaattccagataccagctgtggagagacgtctgacagaactgggacaggacttatatgataccgtggactacatctggaaacccgttggctgaatatgaaaataaggtggctacctccatggtaaaatcttctccaacttcagttgtaaatcaggacaatcagcttatagaatctgactcactggaggaccaacacatattcaatccatctgtcgccgcttccacatatgggaatgttttaagccaatgtcctgcaatacctgctttatccaacatccagtgtggtgaattttatcacccggcctta

SEQ ID NO: 251222 - DNA, 215 bp, Gossypium hirsutum
atttcaccagcttttgccataaaccactaatcgggcgctcgggtccaacagagggggggatttctctcgcgctctctctctaaaaagacagatcaatattttttttatttcctttttaattatgacgagaaagtgtagaaaacttggagaaatcgcagtcatggagctctctgacgtctgacttgaaacacgagccatggctgctgccacaggaa

SEQ ID NO: 251223 - DNA, 258 bp, Gossypium hirsutum
cttttaccagattctcgactctgtctccttcatcgctctttttcatcgatcagatctggtgagacccatctgtcaaagcaacccttcactcattccatccatgacgcttggctcatgaggatccagtgttgtggtgcctttgttctttcatattgctgtgtgtgcttgtgcttggttttattgtattttgtgtaggttctttctgcttatgtttttatcgctttatcttttttttacattgtgtgcttttattttgta

SEQ ID NO: 251224 - DNA, 452 bp, Gossypium hirsutum
cccacgcgtccgcccacgcgtccgcccacgcgtccgcccacgcgtccgccagtttcaactcataataatctagtgttccctttcgagggattttaccccttttttttttttctttttttttcttttgaatttttttgaaattttttcttttttgggtttaatttggtttagtttccgtttttgtcctcatcctcatcttctttttcgatttctccagaaatcctaaccctatagattttctcagaatcttcaaatttttaactaaactgaaagaagatgcagcagcaaaggctaaagcagcaacatgctctgatgcaacaggctttgtaccacaatcccagtctcatgagtggtcctcagatagaacctatcttgagtgggaatcttcctcctggctttgatgcagctacttgccgcagcgtatacgtgggaaatattcacccctacgtcac

SEQ ID NO: 251225 - DNA, 126 bp, Gossypium hirsutum
cccacgcgtccgattaatcttatggcgactcatagaaacgagcagaagacagactcaactagtgggacagtgcttgctagtgtaatgaggagtctacacacaagtgttgactgtctttaggcattc

SEQ ID NO: 251226 - DNA, 420 bp, Gossypium hirsutum
ctgacgcgtagattttctctctaatggctgcatttcatctcacgcatgacacatgcctgcgctggtagagtttccaaggctgaattttggagtttttgccgtgaggaggtcattgaatttgggattgaatatttcttgcaagcgttcagttaggtcaattagaatggagaatggtaataattgtaacctgatgggtgcaagcaatgaatctagaggtgccttggttgtttttgaaggattggatcgtattggtaaaacttcacaatgtgtgaagctgttttcgtatatagaggttatggtgcattcattcgagttatggcgattcccctacaaaactacaaacgtttggcagatgatattccgtatatctggcttatataattccattttgattgaccatcaccaatctcttcatctttt

SEQ ID NO: 251227 - DNA, 253 bp, Gossypium hirsutum
gtcgcgccgccacgcgtccgatcgcgagcggcctttctcctttttctctttctttgagaaagaagaagtattagactgaggctttttattagctcagtcatgagcacctgatctctcttcaaacatgagagaaaacattagtacattccgtgcactaatcagacctaacatcagccggcaggtcctcttattataaatactaatattcctagcagctcaattagagcgaatgggtagctgatgggggcattct

SEQ ID NO: 251228 - DNA, 126 bp, Gossypium hirsutum
gaaactaataattcgatgtttgacgagagatgattacaaatgaaccatgattgaaaaattaactaaaaacagtagaatgggactgtttctggaaaatcatttcagattaatcaaagaaccttttga

SEQ ID NO: 251229 - DNA, 244 bp, Gossypium hirsutum
ccaaacccttaattcaggatgaatttcatggctttaaaacaacctgaaaatagcttactcgggtctgaatctgactcccagaggactctgtaccccatatgtgactggaacatcagttgcggctttaaagtacaaagatgggattttaatggctgctgatatgggaggtcatgttcattcactttcattggccttttatctttttttctgaattggtcagtttcttttaatggtttgaatcatt

SEQ ID NO: 251230 - DNA, 114 bp, Gossypium hirsutum
cagaaaagaaaaatggccaccattgatgttcctgagcaggtttcggttcttgcagatgcagaggctcttaaaaaggcttgtaaaggatgggtgacagatgataaggcaattttt

SEQ ID NO: 251231 - DNA, 274 bp, Gossypium hirsutum
gccgtttttctttttctaattcttttctgacacacacacaaatttcgaagctctggattccacctcttccgcgtcctcgccgacggtgcttatgccggttggtttccagattgcaccggacttggatttaaagggatttagcttttctttcaagacatgtagaaagcctgcttctgttcaaattgttacctttttccgtgatttattattaattgaaacgcttataacgttatatagtatttgtatttattttagttctctgtttatcatctta

SEQ ID NO: 251232 - DNA, 423 bp, Gossypium hirsutum
cgatgttcaaatcttatactttggagaacttcctggttcaacaggcattgaataatttagtagtctgtgcattctagatctcatttcatctacaatttataagcttctacgttatatatttatatctaatttatatataaggggatgacttcacatggagaactacaagatgattattaatttagtcaagttttagatttttgcagctatttctgatgaaatgtttttactcttccaggcagcatatacaggtggaggctactccttcagcgcagctgcaatcgaatatgtaattttgaagatgaaaccaccattgcatagaccacaaattgctttgcttcttgcccttcacaaactgaaggtgtcagaagagcaacgcatgtgtgccatcgatacatacgaaccactttgaacttttgcact

SEQ ID NO: 251233 - DNA, 204 bp, Gossypium hirsutum
cccacgcgtacggaaaagtgaaaaaaaaaactaaaaattctacagtaaacaaactttatgcaaaagtatgtgaacttttttttagtggagggacaacacataaaatttcacgaaatataagctatatttaatttatatattgggggatgactgtacatggagaactacaagatgattatttatttagtcatggtttaaattttt

SEQ ID NO: 251234 - DNA, 196 bp, Gossypium hirsutum
cccacgcgtccgcggacgcgtgggttcagagtagaagcttcactaagcttactccctcccggggggccgctctctggttctggggcttccatggctgtcttgtttaaaatgcctgtcgttttgggtttctttgtgggtcttatgatgctgggttggggtgtcgtcagttgagttcgattagctttttcaacctggt

SEQ ID NO: 251235 - DNA, 456 bp, Gossypium hirsutum
acggtgcttctacctttccacgcaatctcaactcccccccttttagagatcggataattttcagttctcgaattatttcccctctgtatttgtatgatagctgtctggttcaagactaacacttagttacttattcaagggttctatttgatcaagttttctaggactttttacattgcattatattgttcagtgctttggagctttgcatcaggatttgtcatctgattttctttgtacaagttaacaagtgacgattctatagttttcagtttgcgtctcacagagatacagattacagaagcctgcggtaggaaatatattcaaagttcagtgtcctgcatgttcaagatggctggtgttaaacgaagaataattactgatttggatgtccgtgctctccataaagaactggatgaagtctcatgtccaatctgcatggaccatccacataat

SEQ ID NO: 251236 - DNA, 113 bp, Gossypium hirsutum
agagcgggggcatggaatacgctgattacttgcaacattatattctatagcccgagcaaggaaactttcgcacgtcagaagcttgcagatatcacactaaatgacttcttggt

SEQ ID NO: 251237 - DNA, 467 bp, Gossypium hirsutum
cggacgcgtggggctgtgccggtccctggtaaatttggacgcggaggtggtgaagatgaaacggcgcgggatagggcccgtcttcgtcccgttggttccctcaaccttctttctgattcctgggagttgcacatcgatcgatttttgccttttttgactgagaatactgattttaaggtggctggaatcatcggtccacctggtgcaggcaagtcgacgataatgaatgagctttatggttttgatggggtatcacctgggatgttgccaccatttgctatacagtcagaagaaaccatagcaatggcaaggcattgtactgtaggtattgaaccacagatttctgctgaacggcttatactacttgatacccagtctgttatcagtccttcggctttatcttgagattatgagacctgatggcttatcacagtttcaggactaattggtgagtcactgtcttgctg

SEQ ID NO: 251238 - DNA, 456 bp, Gossypium hirsutum
tatcttaaccttttcttcttctttttttccctaaatgtcttactcctcattatggttgcagacatatgaagagtacctagaagcccatggcagaaccagcaaacaactatgccgccctgtgatgataccatctccgacagtacaagagtcaacaagtggaaagcatggagatgattcaaactcaagtttggtaaccgaccggcgccattctcgtaagaggacacataactcgtcctagattgtttccagctccagtgcttgagagatcgtggtttttttttctcctgtccattatcatctggtggagctcaaatttacctcaaggtggttattaagtgtaagtaaaaattgttaattgaatacgatacttgagaattgagatacaatttagacacataattttgtcatgctgtacacatttatgtactctattctatgaactgattgtagtatttt

SEQ ID NO: 251239 - DNA, 215 bp, Gossypium hirsutum
gaagcagccgctcctccttccatcttctaaacaaggttcagccataatggattcgcaaattgagtttgctgttgtggtgaatgtaatgggaaggaccggttcatgaggttaagtgacgcatgttagagtgttgtattttgtacgatcagatattggttcattagttatttctttgttttgtctgttttttgtggttagttattttttttatttgc

SEQ ID NO: 251240 - DNA, 406 bp, Gossypium hirsutum
ggcagaaacatccaacgtcaggccaggatctgaaatcgttgtcaacatccacgctttttcggtgggcacccttcccaaaatccgcagccttttcaacttcccactctttctttcatctctcgcaaccaacaaagaggaaaggcgggcgccatactcctcactcatctgctaatgtttgcggctgcaaccacccaaccatgatctgcctttacctttctcaaccctattccgcttcttcattttctttaatcccttcactcataccctcttcaatacccaaatttaaacctgcttttcattgctttcctaaaacccacaaaaagaaaaagaagattaatagatgaatatgcagagcggagttttcaccggatgctccccttgcggcttcaatctttgcctgtatgct

SEQ ID NO: 251241 - DNA, 340 bp, Gossypium hirsutum
gttgaggcaaggtctctggaggatatacataaagctgttcgacaacttccggaatctaatccaggtgagccgccgcattcttcaggcttaaggaatgaatcatcaacagatacgaatactgagactaatgtggtgcttccagttcttgaaacaaggtcagcagaagatattgatttggcttttaagcaacttcatgaaggagtcaatgttccgagtatgattgagaaactgccagatcttggagataacaaatcaaaattacctgttgttgaggcaagatctctggaggatttaaaccaaatctattcaacaacttgcgaaacctaatccagcatattct

SEQ ID NO: 251242 - DNA, 264 bp, Gossypium hirsutum
cggacgcgtgggaaaatattcttacgacgatctctttgatcatcactttcatgtctttcaagcggctttcacaaaacgctctcttaagcaacgcttatcgctaacccccaaaacgccattgctgcttcttcttcttctttttcatctgcaaatcatcaatgacgaaagcaaagtcccaagccgtggctggttctatagacccaaacaaaaacgggcttcattaccaccatcaagacggtgacgacgtcgcttttgacccttcat

SEQ ID NO: 251243 - DNA, 264 bp, Gossypium hirsutum
ggaacgaggggcagaaaatgatgttgaaagtgaaaagacccagattagcaatggtagtgttacactctcggaggcagagaaaaagcatgaattttatgtttcaagccctgaaaagccaaatgaagttatgccagaagcttttgtgctccaggaaaaaaataatattccaaagttttacgcttcagcaaattcaaaagacaatggaatttctggtggatgtcaattttcagcgacatctataatatttgcaccttctttcatttt

SEQ ID NO: 251244 - DNA, 426 bp, Gossypium hirsutum
atccaatatgttttcttctctacttcaaaaattgttggtatgcttcacccctatccccgggcagtatctgcttctgtgacggtctcatcaactagtttgtaaataagataccttgctccagaggcctccattctgcaattgtcggactaaagatagcccagatggtacagagaaaggatcgacaaatatccatactactgttcaaaacgatccagtttacctctccaagtcagaaagtcatcctgtggaacgagagcaagcaggatttgaaggattctctgggcatcttcttcggagaaggtatctttaatcaattatgttttccatgatctagttgtactatcaatcaggtctactaccttcgataaattctggatactcactgttttatcttaaatccattatttatgttatactgtcctgctt

SEQ ID NO: 251245 - DNA, 391 bp, Gossypium hirsutum
caaatcggcagccttctgcatctcctcaaaaggttatagcagaaggaggtctcgaactagcagggaaagtggtacagattcatggagtccttatggataccccacgccaccacaatctgcatattctcaacaaaattattactacacgtcgcaacatcctagttatgcaccaccgccatcatataattatatatcgtgaacgcctgggtgtgtacataggactatggagaggaaatactcaaggatttatgataactaccagacatgggaccaggccaatacttatgggacagcagtgccactcaaaatggatctcgacaggcaaattctctcgcgtgttggacaaattagcagcagaaccaaatgcatgaagctttaagcaaacagacta

SEQ ID NO: 251246 - DNA, 287 bp, Gossypium hirsutum
acgcgtccaacaaaatgtaaagcaaatatctctcaaacttttctttcacaaccctttaaattacaaactgggcgtcaattctgggaagatggggggcttccacaaaacaaatcccactctctatgcatcatacttctcacaagctctcatggtgagagtctccctgacacctatttaaatcttaaactgatgaagtttgtacacacgcaagcctataattaattgactattagatgatggaatcattttcctttatgccttcaacttgcacaattcatacttcttgt

SEQ ID NO: 251247 - DNA, 207 bp, Gossypium hirsutum
aaatgaggaaggctggcttccacagctacatgatggatttaattttaagaacttcagacttgtcagctgcacgagaccttgtgacttatgatgatggttcaatagtggtggtaacagaagctgatctcgatggatacgaccagagtcttggaataagtgccacgggaagtacaatatgggcagatcttaacatggtttatcgagtta

SEQ ID NO: 251248 - DNA, 159 bp, Gossypium hirsutum
gaaagcttaaatccgatctacaaaaaatctcaaatttgaaatttgaacttcgaagggttaaaacaaaacggtggttcctctaatctcgttttaacttcgtgatagcgattcgatttgattcgaatcggtagcttagcaaggatgggcgatttcaacctg

SEQ ID NO: 251249 - DNA, 208 bp, Gossypium hirsutum
tccgcgccccggtccggtgttggaccgggagaggccggtcctccattcggttcgggccttgacccacgcggggtgtggcggggggccaaggcccggccttttatacccccgtggggacctcgtcgccttgatcgggggatttaacacgcgccccctttgggtggttttggacctgggtgcttcgggggttgggcttggggcttcccat

SEQ ID NO: 251250 - DNA, 199 bp, Gossypium hirsutum
cttccggccaaccattggggatttcttccatttctgaaaccctttgccaaaaccctttttcttataaacttgggctcagccctgttaagctcttttggtttcctttctcaaatcccagtctctattcagcattcttcttacaagctctcatggggagaggcttccttacacctatttgaaagggaaacttatgtggttt

SEQ ID NO: 251251 - DNA, 179 bp, Gossypium hirsutum
  unsure (1)..(179): unsure at all n locations
gcgccacgcgnntccgattcttaactcgtgtttaattgtgtatttccaatatagtaacnctggcgaaggcgcaatcnncaacaaaatagcacagggngnnaatataatgcgctgtggtgcgttcacacaannaaagaagacagcaagaagcagggctgagccccatctggnntagcttt

SEQ ID NO: 251252 - DNA, 309 bp, Gossypium hirsutum
ccaacccttccgcggttttccacaaatggcgacccaatccctctctcgctatctcctctccaaaggcagatccctaacctccttgctcttcccttcatgccgccctttctctttcttttcccctgccgccgccgctttccccgtcaaaaccctaataacctcatcgccattccctttcctctcttttcttcggcggcttcgtgccccactttgctactcgctacttctgcgcgacttacttttccccactatcaaatcggtcttcactcgagcaggcaaggccttccttaatgacccgaattctaacta

SEQ ID NO: 251253 - DNA, 233 bp, Gossypium hirsutum
  unsure (1)..(233): unsure at all n locations
gataatgtctcacagtcgcctctccggtctctatcgtttactggttagagaagactcaccattgtcattcttctttattgttgcttagtttntttccagaaaaaaaggaaataaaattgctttttttgattgtcaaagtgtattaacaaattgtgatttggggattaatgggtttgtcttgggtttaaanttgattcttttggttttgatggattgtgagatatatttagagg

SEQ ID NO: 251254 - DNA, 469 bp, Gossypium hirsutum
  unsure (1)..(469): unsure at all n locations
gcgcccacacgcttcgcatatagcgttcttacaatcctggttccaatattttcctagttttgggttacgggagggtccacttacaagacctgacaattttcttcagttaactctgcaaacttaatatctaattactctcctccagctttttcacatgggtgcagaaactattgaaggttgtgctataatggagaagtccaatggcaaagtgtccctgcttagtgtgaagcaaggagagccgaccctggtttgtcccgctgaagacacggaaaagggtctttactttctctccaaccttgaccaaaacattgcagtgattgttcgcaccatatattgctttaagtcagacgagaaagggaatggaaatgctgctcaagtgatcaaggatgctttaaaggaaggttctttcccattactatccnctngctgggcggctaacaatcagctcggagggaaactgattgtgact

SEQ ID NO: 251255 - DNA, 231 bp, Gossypium hirsutum
gtcggaaaaaaaacacaaaaaattggttttttttttgaaatttacacaaccggaatggttcttgttaaggaacaggattaccaattttcattttggttttctttattcaaacccttaatttcaactaaaagattcacttcaatggcttctgttgctacttcttaaactcttggcattttttaaaccttctctaaactgaaaaatcaaagcaaaattgcatttattccctac

SEQ ID NO: 251256 - DNA, 291 bp, Gossypium hirsutum
accaactctcaaaccatcaactcatcgccttacactaacaaccacttcattaaagatccgcatcattataagcgtcagcgatcaattgaactccattgcttcacaaaatcttgactacactacttctcttacaagattaccatctgctttcatacctgtccaccatcatcttgatcatttattgttcaaaatggctcctactggtgtaagaacacatgagtgtatccaaagaaactcaaagtgatttgagatattctttaagctattgatgcctcaacccatagttaaaat

SEQ ID NO: 251257 - DNA, 291 bp, Gossypium hirsutum
  unsure (1)..(291): unsure at all n locations
tctaaatcgcaaccgtcccccctttttttttttttgtatttaagacaggnattnnannaaacgcacgccatatttatacagtttttaaaaactaaaaataaattttatccatcattcaagactaaattcaaaatcttggatcaattccaccacaaagaaattctcctacttttttttttacttaattataaattaaaaccccatatacttcatattcaaaattataaatccatctttaccaacttttttctataatatatttatttaaatctataatttcttgtacccctt

SEQ ID NO: 251258 - DNA, 303 bp, Gossypium hirsutum
cacgcggccgattatttcacataaagtcactagaagaaaccatctcccgttttcttactctctattatctttccaaccgataaatcactaaagaaatgttctctttaaacaaaaaaacataaaacgaaatactattcactgtctctcaagacatctcaacttacttacagtcgcttactattcttccttcttcatattctcacacaatctctttacccatttaccaactcacatagtgcttcttaaatgccatttccatctatagccatcaacaactccccgttcaccaatcccaacactccc

SEQ ID NO: 251259 - DNA, 173 bp, Gossypium hirsutum
  unsure (1)..(173): unsure at all n locations
ttactgatggatcacctctccctccaccgacttcttcaccggcgcaatcattactcnanaaactcaactactaccgccaagaacacgttttcccccttttgcacaatctttctcctcatgaacgcctccacctcttctattatatccaccattataatctttccagaatatat

SEQ ID NO: 251260 - DNA, 380 bp, Gossypium hirsutum
  unsure (1)..(380): unsure at all n locations
gacctatctctctcgtttctgggtctcgtaggttggtgaatagtgttgtaattaggcgcaatgtctcgtattgggacctctccanctcacattgtgttggcaatatttgctgtggccatgtttgttgtgtccgggaccatggcacaggatattgctccttctcctgcaatggctaccggagcaggctctgctttgccggtttccgctgtcttcttatgctcttccatgttggtctctttaattgctctcttggtgcattgaattcaaagcttttcaagactttatgacattggctacccttaaggggacgtggacgggtgaatattacacttccctttaatttttcttcgagataatatttaggttgttatcaaattttc

SEQ ID NO: 251261 - DNA, 187 bp, Gossypium hirsutum
  unsure (1)..(187): unsure at all n locations
ccgtccgaaggactctatcttgttgacagttttcctaactcttancttctcgccgaaaaatactataatgtgcggggaatatattaacatcggcgctatcttcatttcttacactttctctnnnaagtttacaaccaccggccactttatctacaaactttacaatcacctcatccgattcttatat

SEQ ID NO: 251262 - DNA, 305 bp, Gossypium hirsutum
ccacgcgtccgaaaaaaaatttctctggaaacatagcaactatcaactacttttacctcagatctaaaacacctgccgctcatatccactaaattcaccggctctactactttcatcggctatgtaacggcttccttttttcgcttcctcgtctccgccttctttctcgtctcttcctttttgctttttgttttttctttctctccttactattatctttttttctattttcttctttccctttctctctgtcttctctctttctctctttttcttttcttcattctctcttcttttctctctct

SEQ ID NO: 251263 - DNA, 455 bp, Gossypium hirsutum
cccacgcgtccgaaaaacttttaaacactcccccctctcttatttcttctctgctagggttaggaaacccatcattgccgccatcggcgaactaccgctcctccaccttgcacggtggtcggagggatgcaaaacggtccctttaggctcgttttgaccggatctagaggcctatcctcttatttgcaacaaaaaccgaataaaagaggactatttggtccttttacttagccgacgcagccgtcaaagccaaagccaaaccttaaacggtcttggggccctcggcgtaggtgaatcgccctcgacgacggatgagcgtgaggctacttaagtaagtttttcttttcctcttttatttgaaagatttgtgttataaaaataaaataaataaaataaaagaagcaaaaaaatgaaaatagatggtgaaaagattaacctttcgaaacttttgtcta

SEQ ID NO: 251264 - DNA, 152 bp, Gossypium hirsutum
aaacaagtagtacataaaaatcattgtttatttgtagcaccgaatccctaattaaattcccgtcgaggaatccaaagattcttttgttcaaccaagtttcaaaattcaaggtctaatctaatctgtacgttttgcttcccatcgacgttcga

SEQ ID NO: 251265 - DNA, 467 bp, Gossypium hirsutum
ggaaaaacaacgctgaaatgaaattttattgagaaaaaaaaaagagagagagttattgagattgaagaattttgttcttcttgaggatggtttgtttgagtcgagtgttgacgatttcttgtatggtaaagccttcgcctccatacaagcctccttctttgagctctagatttgttcatacgaaatgcgaattgaaatcgagttggcgatctatggctaccgagccggattcatcttcctccgcgcagtctgttgaatccgattctcccgccgataaaactgccgccggattttgcatcatagaagggcctgaaacagtccaggatttcgctaagatggaacttcaagaaattgaggataatattcgaagtcggcgaaacaaaatctttctccaaatggaagaggttcggaggctaaggatacaacagagaattaaaagtgctgaactaagtattttcaaggaagag

SEQ ID NO: 251266 - DNA, 486 bp, Gossypium hirsutum
cgactgccgggtatttcatcttgggttggtggtgacatgggtgattttccaatccaaattagcaccaggcttatcgaccgactaactgaagatgatgagaaggtgaagaaaagaacaaagaaaactaaaaccagggtgccacgagagcctcgactgccagaaactaaggtagatcagccgcaaatatctgatggttctgaacaacagaaagggactagtacaggcaccggctgggctgttccgcctcccttgtttatgcctgtaaaccaacctccttactctgtcagtgcagaattggatgcaattcgatctgtcgttaaagagagcgagaacgtagtagaaaagctgcggaagcaggaaaagaacatggtgcaggaagtaacacaaaaagccaaggatcttcatgataaggagttcaagataccagaaccaaagcctatgccttgttcggtgagagtaatgcttggtgacatgctacaaggagaa

SEQ ID NO: 251267 - DNA, 289 bp, Gossypium hirsutum
  unsure (1)..(289): unsure at all n locations
aaaaaaaanaaaaaaaaaatttgggatattttaaaaaaagggggggggtacaaaaatgttttttttttaattttaacatacatatttattctttacctatccttatttttgcttccactaacttgtgaactttccattccaaaactttactttaccctttttcacaccatgctaagccttttctcttaaaggaattttacaccccactttccttggaattcctcttcctaagcccaaatttattcccattattcccccctccctttctaaaaatccaactttccttccc

SEQ ID NO: 251268 - DNA, 474 bp, Gossypium hirsutum
gggaactcaaagaaaaaaaaaaaggagagagagagagaggaagagtcagtttatttgaaatttagacgctccaattctttaattctgcttcaccaaattccacgaaattcaaaacccagctttaaaaacctagcctttccaatacccagatctcaatttccttcagtttgattaaatttgcctcgtttaattcatttcccctgtttctcgttcaaccagagcatcttctcttatagttcaaaaaaactgagcttttcattcatctttctttgttattagtttcgcagctagctatctttgattcctcttttgttcttaaattatctctaaattctctagaatttatatatcctctgccttgtatttttttcccaaacgctcaattcccagaccaaaaccaaattttacctctgtggttgatccaggattcttgaaactttgaccaagagtcgagccattggagtccaaaaagat

SEQ ID NO: 251269 - DNA, 200 bp, Gossypium hirsutum
ccccgcgtccgcggaccgtgtggtttttatgttttatcccatcgaattaaattcatatgcgcacattttaatcgttagggattttttaattcctcacaattctccattttcctgagttttaaggcagtagagctccatttaagaagaaaaaaatgttgaaatctttttgatcaatgtaaggatcattttttacttatcat

SEQ ID NO: 251270 - DNA, 387 bp, Gossypium hirsutum
aaagaatacattttgtcaacagcatgccctggatctcatattcacagaagaggatgatagccatcttactgcagaaatgtacattaatatggatggtactgcagaggaggtggaatggtttccatctccaatatttcaggaactctttgcaaaactaaacagcattgctagcttggcagcagatatgtttgtaggaagggaaagatttgctacattgctattgatgcgacttacagaaactgtcatcatatggctttcggaagatcaaagcttttgggatgatattgaggaaggaccaaggcctttaggtccattaggtttacagcagctttatctggatataaaatttgtcatatgctttgcttcccaaggtcggtacctatcaag

SEQ ID NO: 251271 - DNA, 316 bp, Gossypium hirsutum
tccactcgtacacaactttccaatctatctcttgctgtatgatatgattcgcggacataaactatcgagcctttacaactcactctggggtccataattaccatcaccaccaccactgctttaacccccatctgagcccataacctttgaagaacgatctcaatattccctaccctttaatttttacggcgcactaaaatgatcgcttctacattcataaagttcttcaccgtccccaatgcatcacatagaaataccttcttgctgattctctacaccatcaacactctccctacgaactatctccccactctct

SEQ ID NO: 251272 - DNA, 539 bp, Gossypium hirsutum
  unsure (1)..(539): unsure at all n locations
ccttaaaaaccttccgggttacggttccggttcccaaccagttaagccttacacagccgttcaatacacagttggagcaccgccgccacctcaaccgtacggtactccatacgccgctgcaccatacggggcaccttctgcttccctactctgcncccttcaggcggagaaaaccaccaaagggacaaaagcaccaaggcgcaatggncnngtcggtggtggcttcnnctccagtntcaacaagccggaaaggctatttcctttcccgcagggaaggctttatgcnngagcccgtnntcgcaatctttctgttgcncnngtcggcattttcccaaaccggggaacagggatcnctannacgtccgttgcctggggctttcannaatggctgnnnatcaagaatggaaggtgnggnntttattggatgnnataaaggagggttgcaaaaggggcgcttttcttttcgtattaacccaaaggcttcaagtttgaggaactggttcggtttgcctcatggtattctcttcacttaatactaa

SEQ ID NO: 251273 - DNA, 320 bp, Gossypium hirsutum
atatgctgggtttattaaattactccgagtcattcctaaattcaccaactgggccaacaaaaccgaacaaactgcctaaaaccttctttctatctatacaactaaattcttaaattcgacccatggttttaccaaacccacccacctttttttaatctattccccactcataaactttaaatcccttcccccgaaaatctcccatatttcacccctctaaataaaatccaccatttttcttttccaaaatttaaccaaattttttaaacaaaaccttttccataccctttttttttatcgaattttttttttttaaacta

SEQ ID NO: 251274 - DNA, 271 bp, Gossypium hirsutum
caagtcctttcaggaacgaatttcatactgaagaaaaacagcttggctgtcatggtctcaaaaatgatccagctgagtttattacagctggtaaggtggactatccgatatgtctggaggaacagcatgccaaaggtggcggtgctggaaagaccgactctagcaactttcatcatggatgagttcaagagagaatagaacgtgatgcgatggaaacgagaccactgatgcctatggacatgatagggcgcatgcttgtagctctaacaac

SEQ ID NO: 251275 - DNA, 338 bp, Gossypium hirsutum
acagcttgtattcagaccaaacccttcctttcaatcagtttaatggaaggcaagttaaggcaagtaactggcatgcacaggttcaacaacagcaccagcaccagcaccagattcagactagattaaggaacaatgttgttggtgggagaccattggggcttccacaatcttcatggcctccacttcaagttcagccccaacagcagaaacaggcacaaaatgggatgagagctatgttccttggtggatctagtggtgtcaaaagggaatcaactggcactggtgtgtttatacctcgcaaatatggcaacaccaccaacaccaccacttatgaacct

SEQ ID NO: 251276 - DNA, 287 bp, Gossypium hirsutum
gagtaaaataaaacattaaaacgcttaaacatgctccacttcggggcataagaaaggttcttcctcaaacaagctattaaacaatccatgaataagatgcaaacataagcaagtaaacaactgaaaatgaaaacctaaataacaaacaggcctcaaaatcaaagagtgcagtcatattaaactctaaaccccttgctgatccgtgttactctagcccattcatactggcttgctttagagcacacatatacattgatgtagattttgcggatactgaaagcccaccc

SEQ ID NO: 251277 - DNA, 492 bp, Gossypium hirsutum
gagctcactagttgcgctgctatataccctgatcatattccctttgttttcatcgatcaaaatccccttctcataaattttctctcttgatggaagagacgcgatgtgcaatttgactgttccaatttccttttcaatgttcaattaaaaccctagcctcttccttttgcttctattggggggggggaaggaatcatgtctttcgatctcatatgctgaagccgtcctgcagctgctttggatcctcccaagatctgtacggttgaggaccaaaagaagaaagatgatgacgatttggtgagtggccgttcgggatttcgccctcgctggttctctacaccgcaaatccgaatcatttcaacttttaccgtattccccgaagcttttgaatggtatgtcctgagaatcagattgattatgtcctgttatttgcctagggcttcctttatatgtcaagatcattcgtatagaatatatgtcatggtgtgcatt

SEQ ID NO: 251278 - DNA, 400 bp, Gossypium hirsutum
tcgcaaaaatcctttggtttcttcattcctcaaatcaattcctttctttttccccaccattaaaaaaggggccttcccttaaaccagggcgagggggagttaaaccaaagaccagccaggcttctaaaaatgccgggcttaaccatggggtccttaattacccctgcttccataataatcaaccccaccaccttcttaaaaatcccttttttccttttaattaaaccagcttcaaccttttacccctcctcttccaggggtttttaatgaatattcaatcccccaaatttggaagcatgtaagagctactcaaagttgtcgatcttctttccgaccgtgtcttcccgagaatgttgtttcgggaggcacggttaagaggatttgttgggaaagtagcttg

SEQ ID NO: 251279 - DNA, 463 bp, Gossypium hirsutum
  unsure (1)..(463): unsure at all n locations
aataaaaaancgacccgcgcgtncataaaatttctttacttccttcatacttcaatccattctctttctctcccccaacaatcaaaaaatccgcatattttaaaacagacccccgcgctaaataaaactaaatacaatcaattcttctacaaatccatatcttaacatttcatacttcacttacactctctccatcatcatcatttccaacaccttcctcaaaatcccctctttcccttttaatcaaacaacctccacccttttaccctccttctcccaacttttttaatcaattatcaatccccacatttttaccatctaaagctactcaaattgtctatctctttcccaccgtttcttcccaaatttttttttcctaaccacccttataccaatttttttaaataactcatacccactccaacttcttcttcccccaatattcctttcctatcaatttctc

SEQ ID NO: 251280 - DNA, 138 bp, Gossypium hirsutum
caaacgtgtgtgggccacagtagaacgcgcgcatatgggtatccatttgcgcccagatcaagacttgaagctgtgtaagatgagacgcggaaggccgccatgggcaaaatgagtgcggggtgtactatacccaactaa

SEQ ID NO: 251281 - DNA, 309 bp, Gossypium hirsutum
  unsure (1)..(309): unsure at all n locations
cccacgcagtacgaaacactagttgtaaggctaagtaatacaaacatggctagactactcgagctgaggcgaagatgacggtgactagttcgacgaatgcgatccgacgccttacggtggtggatacaatctcgaactaacttatggtcgtnctttggaaaccctcgatgagacttgctaccctttcgctacaccctccgatggcgactttgattacgcacgtcccgatttctcttacggtacgcgcacttagcttatgccgacgaagccatcgaaactgaatacagtagctatcttaaacccaagccc

SEQ ID NO: 251282 - DNA, 436 bp, Gossypium hirsutum
  unsure (1)..(436): unsure at all n locations
ctccattaaaaatcccccaattattttctcgttactcgattttattttccaaaccaaaagaaatcaccagggctgtgtttatcaacactgntgatgctcanccacacaanaaactgagccccaccatacccaggctcaatcgcaaatagatgaaaccgatcccaagctcaataaccttactcttctaatttgaccccccactcaacgaaccctcgatgccgttatcaaccgtcttgtccagacgctctcttaccaatctgtactttccaaacgctacggcaccatccctgatgacgaggcctcctccctggccaaatctatcgaggcggaagctttctcattcgcctgttcggccttctcccccgacgatgatggcatccagatccttcacatgtattccaaggagatcagcaagcgtatactcaatactgtcaaa

SEQ ID NO: 251283 - DNA, 406 bp, Gossypium hirsutum
aaagctcgctgacgatcgggctaggacatgaatatgtttaatggccccccaaacaggatttaaaccttacaaaaggtgttgatgaggacgccgatgaatgcagagtgatgaacacacgcagataaggtgaagagaaagatccaaagaggatccgcttgtaaagggaagctccgactggcattacgcaattgcatgcaatcaacaaaggaaattctgtttgctgcttgtgatctctaatattccccgtgtctgatttactaccatgtttaattttaagacttgcagctcacgagaccttatgttttaagtgtgtgtactatatgtctatattggcttaatcactttactggacaatgcaattgtaggtaaaaactactttgaaatagaatagaagctttaagtattt

SEQ ID NO: 251284 - DNA, 107 bp, Gossypium hirsutum
ctttttcatgtatgttttacagaggaaagttttgataccccattcagagggtattgttaacatttaccatactaagagaattgttttagtttcttgacacttaagtt

SEQ ID NO: 251285 - DNA, 462 bp, Gossypium hirsutum
ccacaggttccttttttaagttttcagaggaaaggtaactgaagtgatttttacaggctttgaaagctttgaattattattgggttaatgtaatctttagtccttgaacttgtcaactattccactttgatacttgaacttgaaaaatataaaagtttgacggaatccaaatttagggataagaacggatatagttgttatgttcaggtatcaaagttgaccccaaaaaagacataagataccaaagtaaatcaaattgccaaattcaaggactaaacatcatattaaccctattattattccataacgatttcatctttgattattggttaaatgagttttaaaaataattcaagactggaaggaccggagctgatgggatttgtgagatatgatacaggaagatgcaaatgatataatttatataaccaaatttcacatatatattatctctttatatat

SEQ ID NO: 251286 - DNA, 451 bp, Gossypium hirsutum
gttcctctctctgcttctcgttctctgaaatttcaaaaaaatcaaaatttttgggcttgaaagttaatctttactgtcatccaaaacagccaaatggtggaagcgcagacatggaccacaagaagaatgagcaatccaaggttggactcaacggctaccgccgaccacgaagttttggatattccagtgactccaacggctgatgtcaggaacagcatctacaacgttggatcccatctctctcctaaccttttaacggcgctgatcatttgcttgtggttcatgtccaacatcggagtcctcatacttaacaagtatctcttaagcttctatggctaccgttacccgatcttcctcaccatgcttcacatgatctcctgtgcttgttacagttacgctgccataaactttctggaaataggtccaaggcaacacattttatcgaggaagc

SEQ ID NO: 251287 - DNA, 465 bp, Gossypium hirsutum
attagaagatgcagtatcaaatggagtgttaagtgatatgattgaggaatccatgcatgttttatgggaattccttcgagccgacaaagacaacacgaatgcgacctcaaagactccccagcaagcgcaggttgctccacatgaccctattgacttggaacttttgatggatgttagaactgaacttcaaaaaaaggagaaaaggctaaaggaaatccagagaaatacaaactgcataataaagaggctccaaaggcaacatcagagaaatctattagatcatacattgttcatcgctcaagttgagctgaaattggtttcgagagttttaaacatgttgaaaataagcacagatcagttaatttggtgtcatgagaaattacaaaggattaattttggtagtaggaatacagagatagagccctcatttacactgttcccttgttgacattagtggtgaccgac

SEQ ID NO: 251288 - DNA, 375 bp, Gossypium hirsutum
caaagctggtttggtcacaattcaaggcgcgtatttgtctataacttcgttcccagatcaagcggagaagctgcttcagatgagtcttgcaaggtagccattgcaaaatgagtccgggttatactttacccaactaacatccgaggcagtccaaaatgattataccaccaagatttgaccaccaagatgatttcttacaaaattgctttagtcatcaagctgtcaaatgattttatcggctctctaggacaccagctcgtgaatagagtatggtgtgtctaatatcatttagcaatttctttctaatcgaaggtttgtttttaccactattcttttattaaaatttccttattatctcttttattttttgctttt

SEQ ID NO: 251289 - DNA, 404 bp, Gossypium hirsutum
cgtagtttggatttatggaaggatgttcctggagtttgtgagcaagtctccaccacttctcaatccgactcatcttcaatagataatggtagcgttggatgctttacttcagtttccaaaggtatgaatgatgttggttttagaactccccaatcaaaaaaagttgtccctacgagcaggtcccctccttctgatgcctcggctgcgtccactgccaagaaagagacatccctgaaaagtaataatagcaacagtaacactcgtaggctggaccgctcaaaatcttctgattggaagattgaaactgttcaaccgaagtctttgttttctgaggcctctggtaattacaatatcaaaaggagtgtatcctttggcaaggcccatgacgaaaaagtgcaaaaatt

SEQ ID NO: 251290 - DNA, 326 bp, Gossypium hirsutum
  unsure (1)..(326): unsure at all n locations
tgtcaatggttttaacggcgtctacatcaattgaccaacgtctttttatttgagggatgctgatgcttagttggttggatcaatttacttgccccattcttcattacgttgtacggtatttagacacaaataaagcttctttcaccaacgtatggagctgccccattanntttgttcgaaatacttacgtctttaattggtgagggaaaaataaaccaatgaaaaataacctacancacttgagaacgaacatgatatgctatcaactcacanagtatatattgtgttccctttcacaataatgaatctatattttacaaacaaaa

SEQ ID NO: 251291 - DNA, 254 bp, Gossypium hirsutum
atcatttggtttttgaagagcccttaaaagagcttattgatgggctctatcaaatctgttgtgatctcattctaaatggggccaacagtagctactttctaaaaattgtggaattttatggatccacgcttggtatgtagccaagcccaagaaaaaaggaacgaggggaagaatcgacaaggaatccataacgaacaaacaacaaggaaaaacatgaaaaaagactttgaatgatctcaaaaaaaagggctgac

SEQ ID NO: 251292 - DNA, 297 bp, Gossypium hirsutum
  unsure (1)..(297): unsure at all n locations
aaagaaaaaaaaacacaaaataccctctccccaacttgtttatccgacgaatcagattccttcatcgcccgctgtaccaccaccgtactcgatggccgacggtgcgcgaagataggcttttcaaccccggtgtcagacgcgtggaaggccggtggttggtgccccgagcggtggtggcgcgcgtgaggaggctggtggcttaagagcggcggctgaaatgatgggggctagggttgctgaaatgttttgggttggtggggttagggttgatgtaatgggtcatttggttttggnttt

SEQ ID NO: 251293 - DNA, 400 bp, Gossypium hirsutum
  unsure (1)..(400): unsure at all n locations
ggctccttcttcttctccttcatcttcttgttctgcttcttcctctaaatctcctcctccacctcatcagtccccttttttcactccagtaagttccttttttcattttcttatcattatttgggtattttcttaaaggttcctcgttttggctgatgaagtagtttgattttctttttggtttgtggaacagattcaagaatgtgaaagggagggacaagaagatggtggtactaccccaaacgtatgcagggacaaagcggtgaccccaaagcacttcgcaacgcccctccatgctaaaaccactgcaaaatccaacgccaggaaacgtcacgagtctgctggaaatggtggggatgggtgagatggctctggttnttgcaacaagtgcaagcctcac

SEQ ID NO: 251294 - DNA, 391 bp, Gossypium hirsutum
  unsure (1)..(391): unsure at all n locations
atataaaattttgatggcttattaataaaggagtgagggggcatnaaaagtaaaaacatatgggctattaccaatgcaccccaccatcttaactacacaactaaccccaaaaccatgttaaattcccacaaattcaacaggacgaacccacttatcacaatcacgcctgacacaaagttaaaaaaccccgtttgtcgcaatattccccaatttaccacccaaaaagtggaaaaatccctctctcgacttcaaaaatattttccatttaccaccgcgctttcccaccaaatttcaaaaaaaaattcccctggcattttaccccaaccctccatttagttgctggccccatccaccaactgcaaatccccatcagccccattaacttgaccct

SEQ ID NO: 251295 - DNA, 456 bp, Gossypium hirsutum
catcgacatgcctactttgataagatgcaggtgctggctgttatatttgctcttttgcagatgatgtcttttttgttatggccatcttattcattgtctttgttgaaataagaactgtgtcctagttccttggacattgttgatttcaaatggcacctagaatgtattcaattaaaaaaaaatgctaacagattcattatacctattataggtttgggactatactggtttaagttacgcaaaatacaatgctagggatgcagacaaagaagtactcgggtgcgttgtggaaaatacggtgctacttagttctctgctgtcacgtgtgcaggaaacagatttgccgaagaaaatatacccatcaagattgaattcaatgtctatactaccaaattcttcatccttcggagttgacagcacattatcgatgacagcattgtttactcaatggcgttt

SEQ ID NO: 251296 - DNA, 400 bp, Gossypium hirsutum
  unsure (1)..(400): unsure at all n locations
agagcaatgctttctttgcaaaaggagattgttacctgggaaagatatttatatgtacaaaggggataagggtttttgcagtgtggagtgtaggtgcaagcaaattttcatggatgaagaagagagtttaaagaaagatagttgttctttggatgccattgttaaaccttcttcaacttctgtagcttcaacttcgtcttcttcctcagccgctcgtcaccaccggaaacctgagagaaaccgtgccggtggctttgcttattgactcaaaaaaaggaaaacggttttttatttttattttatataagttattattattgaattttggtttaaggtttttntaaggagtatatgatcctagctggttctttttaatgacnaatccgatcgtttttgcttc

SEQ ID NO: 251297 - DNA, 374 bp, Gossypium hirsutum
gtttggatcagtttcaatggcatccaccaccaccttcctcaaacccatcccttccatcaacttgccttcccaatctcacagagctttagcttccaatttctcttattcaaagccttttcccttccatggcctcaacctctcatcggtcactgaaaccagttccttcacctcatcaagatcctccaaccccttcactaccactgccttcttcttcaacaagttcaagcaggaggccgctccacatactcccaagcccggtaagcacacttcctgattgttctttttcttattcaatttcaaatctttatttgattgactttaacgtttggggtttcagcaaaagttcaagagctacacgtttatgaaatgaacga

SEQ ID NO: 251298 - DNA, 398 bp, Gossypium hirsutum
aaaaataaaaaataaattaaaaataaaattttatttttataaaaaaaaaaaaaaaaaacagagaacaaagcctttatgctagcggggggggggattcaggggccgccttttttttggatccaacatttctctcacgctaatgctaggtattaccttttttttatggccacctaattcaaatgaaatgacccgtacttttacacaatgaagcattggcaaaactctgggttttcccaacttataatgatggtatgacattcctatttcaccaggtttcgtaacagagagttgctgctctcttatacaccttattactgatggcatatcttgaatgtcctactgccatggccctatgcggactcttatagcacttgagattgctagctttcgcatatgag

SEQ ID NO: 251299 - DNA, 396 bp, Gossypium hirsutum
acccgagccacccgccacgcgtccggagggggttagattagatctacttgctatttcactgcacggtgtgtttcgaggtcattgaactaactgatcacaatggctcccacttcctaccctggacctgctcaggttggttcatacttcgttggacaatactatcaggtacttcaacagcagcctgatctagttcatcagttgtattcagatgacagtaccatgatttgggtcgatggagattcctctgactctgcttcggcgatgctgcaaattcatgccatggtaatgtcactaaattttactgcaatcgagatcaagacaattaattctcttgattcttggaatggaggtgttctggtgatggtttctggttccgttaaaatcaaggatttcagt

SEQ ID NO: 251300 - DNA, 132 bp, Gossypium hirsutum
aaaacgggggtaaaaataaattgtggtttgtgggacttacggttttcatgttgtgatcaacaagcttgttagtttgattatcaacactttctacagcaacaaggagatctttcttcgtgagcttatagtaac

SEQ ID NO: 251301 - DNA, 416 bp, Gossypium hirsutum
  unsure (1)..(416): unsure at all n locations
taaaattttatctcagtttaacaggggcagcagtgccatgcaacattatgtggcaacccgtccaatgttcattgatgtagaaatcatgaattcagacaccagattagttcttggcgaccagggttctcaagctagtcctagcaatgtcgctcgtgggctttcttcattatacaaagaaatcacagatactgtgcgcaaagaagcagcaacaattatggcagtattcccgtctcctaatgatgttatgtcaattttagttcagcgagttttggagcagagagttactgctcttttagacaaattattactgaagccatctcttgtgaatcctcctcccatggaggaaggcggactnttattgtatttgagaatgctagctgtggcatatgagaagacccaggaactngctagagagc

SEQ ID NO: 251302 - DNA, 217 bp, Gossypium hirsutum
gcttactctggaggtgagattacaagcatttttattcttctggcctgcgtctcaccatcgttgtgcattgaatggttacgtaggcactcatctctggcttttggacacttgttacggctactggagagaggtccagcctgaatatcatcctgtaatactgctcatgcataatgaattgctccagaacactgccatggattcagcttagagtccacac

SEQ ID NO: 251303 - DNA, 260 bp, Gossypium hirsutum
agattaaataaaaaaagaaagaaaaaatattttttttaaaaagagtatatttttggtggagattctcagaggaattcatccatggcaaccaaagtgtatattgtctactattccatgcacggacacgtagaaaaacttgccgaggacatatggcaaggggctgcatctgctgaaggtgaacaagccaaatcatggccagcctctgagactacataggatgaagctcctatcacgcatagcacacctcccgaatgtgtttg

SEQ ID NO: 251304 - DNA, 263 bp, Gossypium hirsutum
catggatcgtcctgggaaagcgtatttggttcttccctaacatccttgctgaggaagcaacgctgcgagaattgttccggtttttgcccaaaaaagatgaagaagaacgtccaaaatggacagcaagactgttttatgcaattgtggctgtcttggctatattgctgctgatgcatcatgcttctgatgaggctggtagagcaagatatcataaacggatgttgaacataatcgacgacgtccttaaagggtctactagccta

SEQ ID NO: 251305 - DNA, 158 bp, Gossypium hirsutum
ccttccgttctggctttgttaaaggccaaatttgcaaagttacaaaaagaactccttacaccttattaaaagggaggaggtggtgcaggtgaaggttttgatgttaccaaaagtggagatgcaagagttggtctagtaggttttccttcgtgggggaa

SEQ ID NO: 251306 - DNA, 405 bp, Gossypium hirsutum
cccacgcgtccgcggacgcgtgggtttagaaaggatgtttcttaattttgactttcccttttattacatgtcttccatgtctctatctatgtctgaaaatctttaaaagtttaacaagaacctccactagtttatccttttttgttgctctttgggtttgctttgcttcttcgtaaaaatatcactttccttttcaatatatatatatatatataaactaataagcatacttcagcaatccagcaactgctccagttctgggaacatgcaaaagttcgaacttttcagccactgttactctcttaccagggtttgattaataagaagttagggtttggtgtaaaatgttggttttaagcatgaattccaaaaggcaaaggcggcctaatggtatgttaggggaaa

SEQ ID NO: 251307 - DNA, 400 bp, Gossypium hirsutum
cactgtcgtcggggtcgtcaactacggcggatgagattgaagccgggaacctaatgggagaagaagataggattgcactgcagatgatagaagaattactcaattggaattgtcccgtgacttcttcaacttctctaattggagtttaagtgtgttatagctacttaaaacatatatgatattgtgaacagcgcagtggtgaagtcccattgctagatataaaaaggaatctctactcaaaagtccttctagcattttaccctttcaaggtcataaatcattgttctaccatccccgcatgtaaaactggtgcagtatgttgctaatagtgaaattttacaatatgaaagctaatgtagatcaccacctacataactgtttaaccttgtaatttaatcca

SEQ ID NO: 251308 - DNA, 166 bp, Gossypium hirsutum
cgccgctacaagcagattaagcgcactgaaggtgtttctagcacggatattgtaggaaggatactttcatctgtaaatgataataaaggtgtgggagacactaatcgcacactttcgagggtagatcctggcagatggcgtcaattacataggtgtccgctcttct

SEQ ID NO: 251309 - DNA, 181 bp, Gossypium hirsutum
caagctctaattttagcccataagcctactcccagttacccttaaccctccatgggcaaaggcggaggtggtgtcccaagcaaaaagagacaacctttctatgacgaaggctgtgccactgggactgccactgccgccaccaacatcgcacccatagaagccgatgaacaaactcaccaaa

SEQ ID NO: 251310 - DNA, 259 bp, Gossypium hirsutum
tcacccacgcgtccactcaacaaacaccactctacctatttttaaccgttttttttttttatccccaacccatcattcacttgggttatttttaaacagagggacgagcccaatcatcattaccgtatatatattcacaccaatagctttcattggtctcataaattataaccattctcccttactaaatttcctctatgacaatgcaaagagtttaaaccccaactctcaaaatgattctaaattttctctcatctat

SEQ ID NO: 251311 - DNA, 303 bp, Gossypium hirsutum
  unsure (1)..(303): unsure at all n locations
tagatagcggtctactaggtttacatttccatgcctttttcgccaccggtcaagccattacacggttgtgcgacgacgccccgaccttcgatcagaacagangtggaccgatttgacaggttctggtgaagactttttttggaatagagcttcgtttaaggggtcgtaacgcaggtgactagattttattttttagcaatttatggttttttcagggatacctggtgtttgcctttttttattcctgtcactttctattttttttttgtttttctaattcatatgttatatattctaaatatt

SEQ ID NO: 251312 - DNA, 449 bp, Gossypium hirsutum
cccacgcgtccgattcagatgaaaatagcaataagaatgaagatatccctcctaatgaggtaccatcaaacccttctcatgaaactcctaatcgaagaaaggaaacacttggggttgtatacggcaaaggaaaaaaatcaagttcaagtagaaaatcatcaagaatttcattagctaatcatattgagaaattgtgtgagagtatggctagtccaaggaagtcagtgaatgaaattatttttcctcactctgaatattctatttcaaatgcaatggacgctttgcgtgatttggaagatgaaattccaaaaaaagatgaactgtactgttttgccatcaaaatgttccaaataccggtaaaatgagaagtgtttttgaacttagatccagatgttagagtttggtggcttcgacgtgagtatgctgaacaaaatccaattgcatcattt

SEQ ID NO: 251313 - DNA, 184 bp, Gossypium hirsutum
  unsure (1)..(184): unsure at all n locations
aaaagggataaatctaacctcactctgcaatggcatcatccaagccaaaccttgctccagcgcctgatctttataattgcttggacttgcaggttanaaaaagtagctctaagttgcttatacagtaaagtgaatgaatgtgtcggtactattcgtgttttaagcgctctttcaattttactta

SEQ ID NO: 251314 - DNA, 381 bp, Gossypium hirsutum
gcccacgcgtccgaaattcgggatcaagaacagctgctatgtatcgaaagaagactgaagacgctgttccatggcttatactggggaatactaccacagaaatcctgaaaaagcaccgcgggaacataccgtactttcaacacatgtgccagctcagctggattctggtcggataaaccaattccgccggagttccctgcaaccataactacaaaccccggcacctcctactctgaacatcagtctacatgatcccagacaaggacatgctccgggcaccgtctaccacgcgccttcacaagttccagcttcagcttctgcaccagtaacgctacaaaaggttcgaccgattaccgaacaagccggtcaaggctactacac

SEQ ID NO: 251315 - DNA, 230 bp, Gossypium hirsutum
tcggctttttttggttgggtggtttaacccaatcggaggttgggttttggcgggaggttttaaacggccatggccacctttggttccaacttcggaggagaatccggtcttcccggaggtcggtttaagggccgccctttttggggttgtggccggccctggggtgggggacccgaaggggccaggctttggattggaagcccaggagggattggggaggggaggagggt

SEQ ID NO: 251316 - DNA, 371 bp, Gossypium hirsutum
cttcttcttatctttctttataatctccacaacattgactttagccggcgccgccgacaacaccatgagggtctccctttataagtagccggagccttaataattccattcttaccaaattctcaacaacgttattcacttcttttgttgcaagagcccaccaccttaaacaccccaaaatcaaggtcgataatactaccttttcttttttcagggctttcctatttcctaacagttattgaggctacactatctcccttaaatttggaacttccactcaaaaccttccttttaatatttgacactgggagcagtcttttctgttttcctttgaacctttcgatacactttgttcccaattcgcttttccc

SEQ ID NO: 251317 - DNA, 516 bp, Gossypium hirsutum
  unsure (1)..(516): unsure at all n locations
gcgcaacgcgtcccgattttcttttaagtggcaccctgggacactttgatgaatcatcaaacctttcattctanncctttcttccatttgccagtttcaaaccaagatnntatacttacgaacgnttcaatcncanatctaactngggtcccttttgtttgatggaaaattcctcttcacaaaagcaaacaaacatttgataccaccctttcattcccacttccaacaaacaaacatgattgaccaaagaatccaagaattccttgtacaatcaacttcacaaagttggatgttaaaagctacttgcaaaaccgagcctgttcaatcacctcaccctgacaatccagctaaaaagttggaaaggcagccttcaaagaatctgatggctgaaagaaagagacgaaaaaggctaaacgatcgccttttgatgttaagatccattgtgcctaagataagcaagatggaccgtacatccatacttggagataccatagattataccaacgaactcttgga

SEQ ID NO: 251318 - DNA, 442 bp, Gossypium hirsutum
  unsure (1)..(442): unsure at all n locations
attcgacctagcctggcgccgcacctgtgggtcatcggtgccttacacctccaccttggccgacggttcatggagcgaagtcaggtacatgtgcgggcataccactaacgtggcatggtggagcggcgcacgacgcggggcgtgtgaaggttgttcggcagctgagggctacggcgcgaaggaactctaggattcctgaaagagttttgattttgggccgtttgggcctggtttatcctatctaggtattgggccctgttgtaaatgggtattcgggtttgggcctattgtaattgggtgtggtatttgggttttgattggctgtnaatgaactttatattttggactatcgtttattgggccccgggctaaaattgggccctacaactataatgcatattttattatattaaaaacccacaattaatataataaatatttt

SEQ ID NO: 251319 - DNA, 295 bp, Gossypium hirsutum
tcccttaccaccggttctattattattccattacttttcttccggtggttttatttcttccttcatggtcaacccaaggtggggcggtggggggacccaagaccaattgtggccaaccgggggtcgggggaaccgggttagccgcttgggttttaattttttccaaaaaccccgcggtttaaaattttaaaaaggccctcacaaggttcaaaatttccaatccaatttttaggtttggcctcaatataaggcctactgccaaaagttactctttggttacctccccctccccttt

SEQ ID NO: 251320 - DNA, 420 bp, Gossypium hirsutum
agttttaccagggttaggggaaattgtatacatgttacacaaaagacttcttgcacggaaatcaatcattgagaaaagaaaggaagaacaagagcgtcaattattggaaatggaacgtgaggaggagtcaaagaggcagaatttgctgaagaaaactgaagaagcataatagtagaggattgcttgttttttttgatcaatatcgatcttctaataatatccaaagtaattatttactatagtatgctgtctcataattttttaatattaatctgacaataattatattttttttatatacttatttcacttctctttttttttattattaatggtgtttttaacctttttttaaaattttgtaaataaccttaataaataaaccaaaaaaattttacaccccttatatttttttttttg

SEQ ID NO: 251321 - DNA, 123 bp, Gossypium hirsutum
cggtccggaatcgcccgagctgactacgcgcggtgcggcgcatacataggaggatcttatgcttacgtacttcgtgcatgtcgacgtcatagcttcttctatagtgtcacgctaaattcaatt

SEQ ID NO: 251322 - DNA, 286 bp, Gossypium hirsutum
  unsure (1)..(286): unsure at all n locations
cggacgcgtgggttttttttttttttnntatgattttagaatttcctacccgancaaaaaatacggatattcgacaccattataggcggaggctggcccatgatctcactcctcttcttcctatctcctccgtatactttcttctttcgaaaatacatgggctttgtgctctttcttcgccatttcaatattaatcattctcgcaaatccttttctaaatcccaccaccttcacatctatacttataattcccttaatcattgttattaatctttatgaagaccat

SEQ ID NO: 251323 - DNA, 455 bp, Gossypium hirsutum
attctatcctttactaaccggattcaatttcttcatttatcaacggttgtttggggcaaaattcataatccccattgttgcccaatctctgaaacatcatggaaatagcatttgccgcttcagtatacccgacaaatgtgaagagagtaatctacgagataagacctcacagctcaaaactcgttaccaacaagagacggtcttttcacaacaagtttctatgctcagtagctgttgctcctgacaggaatcgggttctaattcttgtgtcgcttacctttatttctctactcatcctgttttagaacatgttttctccttattagcatttgcggtagtgatgggatttgcttttctggatattaggtatccgaggttgagttggaaaacaagaaacacaatcttctcctggctgttcaagacacacaacggggacttgctgcaactgctgatca

SEQ ID NO: 251324 - DNA, 105 bp, Gossypium hirsutum
cccacgcgtccggaacctcttactttgtgcctcattcttttatccgtatctttcccgcatcagtcacgtcggcttttacaagagatgaaacggaaaacttaagaa

SEQ ID NO: 251325 - DNA, 403 bp, Gossypium hirsutum
caaaccaaaatgaatttttgcttcgctcatacatgcaaagcctagacactgtccgtaataaaccggagtgtcgacgaacaaatttgtttagacaaagaatcagaccatgttcggaataatacaacgaatgaaaccatacatcaaacgatcccatcactatacacacctcaacatcaaaaactttccacttacacgccatcgaaaaagcattgaagcgtagaaacggaacatagaagaagttacctttccaggagaaagcaagagtcacgcttgtgacaccatgagtggctcattggattcttccatggacttcgctttatatcggaagtacaacgcgagttgtagaatccccaaaatagttccaattccatttggaacgtaaataaaggcatcaaagttaaag

SEQ ID NO: 251326 - DNA, 307 bp, Gossypium hirsutum
tctagatcgcgagcggccgccctcgccctttttttttttttttttttttttattaagctccttgatctctttttttcttcaatatattctgctttagattatgataactctagacttgttgatcgattgtcttctctctttttctttttcatttttctttggttagattctttttttggcagtaagtcaaagaattttttgattgagaggaagatagaatgtctggcggaggcacacaaaatagcttgaggaaagcactcggagccatcaaagataccaccaccgcttcattggctaaaggcaatag

SEQ ID NO: 251327 - DNA, 321 bp, Gossypium hirsutum
tcgcgcgacgcgtcggtcgtaattctagcgtattatacactctgttgccacgtttattatctttccatgtgtctcatgaccataggccagttcacaagcacccaatctgtaaccaaaataaaacgccattgaaacaatatctttgttttatattactaaaatgccagcttataacccgtaataattgaatcgaaaaacatgttgagaagacccgcaacattgctatgcttttcaatcacaaccagaaatctgtggtctttgttgggattccgatttgccccaaattttgccttttgtactacacttcaactgtcttcattt

SEQ ID NO: 251328 - DNA, 297 bp, Gossypium hirsutum
  unsure (1)..(297): unsure at all n locations
gaccggnnccggaaacccggggcgagccacgcgtccgaggacgcgtggggnnnaatagaaagctaatttgctatagctgcccacctctatgaccatcggcaggggtggcatatgccggggggcggaggggcacacaccaccgcaagcatgaaaccaaaagaaaacgccatgaaaagaataaacctgatttatatcactaaaaggccagcttataacccgtcgaaattgaatcgaaaaacatgctgagaagacccgcagcattgctatgctgttcaatcacagccagaaatctgaggg

SEQ ID NO: 251329 - DNA, 282 bp, Gossypium hirsutum
gatttcgggtctgcacaaacatgttacacaactcaaacacgtggctcaagagatctagaactgatgcacggatacagaatgaatttgtgtccgatctgcaaatgctaatgagcagagctcaggcaggagtaaaaagcgggatgacaaagctgaatcgaactgttgctcagcagagatcgaatcacattttgcaagtgataatctttggtcttacatgtttctccatcgtctacttatggccatagcacttccagagatgacaacattggcttcgaggcttcc

SEQ ID NO: 251330 - DNA, 158 bp, Gossypium hirsutum
atggagagaagggggggggaaaaaggcgcaattggcatttgaaaattatttgaaatgattaggatattgctcattgagaaagaagaagattttgaataagcattcgaatgaggacagccatgagcaactggtcttttttcaaacatgaaagaaaacat

SEQ ID NO: 251331 - DNA, 445 bp, Gossypium hirsutum
cggacgcgtgggttttaattttaagtttataaacgatagctgcccacctctatgccggcgccatgtgtggctttgccattggccacttcacaatcacccaatctgaaaccaaaataaaacgccattaaaataatatctttgttttatattactaaaatgccagcttataacccgtaataattgaatcgaaaaacatgttgagaagacccgcagcattgctatgcttttcaatcacagccagaaatctgtggtctttgttgggattccgatttgccccaaatttggcctcttgtactacacttcaactgtctgcatcttcaactgctggctatagaaccagaactagattcagggccatgtcaacatcagtgaattcaacgccttgtaatgaaaaagatgaacaagtatttcaagatttgaagtacttaatgcagtcaatgataga

SEQ ID NO: 251332 - DNA, 434 bp, Gossypium hirsutum
  unsure (1)..(434): unsure at all n locations
cgtcaaactctgcaaaagacagagagagagagacccagctttaaggcatgacagtttcattctttatttgccatattacccctctcacagggttttgtttccttctcctatcctcctcctccgccgctgatctcaacataaccttcatcctctccttcttccaaaacctaacctacttcttcttcctcctcacctcctcatcagtcgcctctgacctcacgcgtcgccaagaccccatcactttactcgccgtccccaactcttacctctccattccttctgcttgcgacctgacgcgccggcttccaccgtactgactcggcgacatgcttcgctaccacgtactgctacattatttattctggaccgacctgctccagatcccgccgtgcggcgtgatngtatccaccctcctccaaacaactagccgggcc

SEQ ID NO: 251333 - DNA, 187 bp, Gossypium hirsutum
cggacgcgtgggctgaagtcattggtttggaagagaaaggacttcgattaaaggcaaatgggctaaaattggggaggacaattgggaactcacaggctgtaatttcttctttaaaaaagaaaatgcaagcttagagaaagatcgtcaggatttgctgtcaactattgaagctcttcaagaagagaag

SEQ ID NO: 251334 - DNA, 411 bp, Gossypium hirsutum
gttcactttaaatttttgtcttatatacacattgtgggtattttaaaaaaaaaaaagatgagaatgtgtctattaccattcaaagattgatttaaaactaattattttgctaaatcatgtttaaaattggaaggattacatttcagaggatcattaaatagtagtccaacaagcaattctcttgaaactcctatgtcatgagcttgcttaactgtatcctctctggctggtatggccttacctttgtgtctaaaaacaacatcttggtatcaacaatcaatgggactggtgcagcaattgagtgcatttatgtattgatcttcatcatctatgccccaaaggaagagaaggcttatatatttgggcttttcaattttgttctcactgattgtacgggcgtgggactcattt

SEQ ID NO: 251335 - DNA, 232 bp, Gossypium hirsutum
accctcatgcagatgcatgcgtcttaccaaagggatacatgtgcgtaatgatgcaagtttgtaaatttgttcgacttaaatagacaacttaggtaccgtttagttcctgccaaatttcctcattattccagactacaaggcgaaaatgctgataatatataaagcttaatgagcgttttggtagtatacgtagattacaaaaagattaaccctaaaaatctacctgaataac

SEQ ID NO: 251336 - DNA, 230 bp, Gossypium hirsutum
ctcacgcctacataaaaactccatgtctaaactttttcttttctgcacttgcaacttcctcattgcgcgaagtttacatccctagaggaggcccattctctctcttcttattgccatgtctgtctgtcacagacatgtagctataccaactgaatatctcatcttctggagccattggtcagttcctaaagcactcattccaaaatctgccacttcgatctacttcttct

SEQ ID NO: 251337 - DNA, 178 bp, Gossypium hirsutum
cgaccacgcgtccgacacatctggtgtatactccggttttcgcgttctttttctaattcaaggccaagaggagaagcatgacagcattgccaagaagctggcgtctgcttcctctgattctcaccattgatccactaagagtggagaaaaaaaaaagccaaacttatccccatctatc

SEQ ID NO: 251338 - DNA, 464 bp, Gossypium hirsutum
gcgagggatttggcttcggttgcggcggtgatgcggagagtgagaaagacaagtgaagacaacactggaagcggccagaaacatgtagatgaaaccaaaaaaatctgaggggagcgtgatgttctattttccaatatagttttcaatctgaatttcgatggctgctcgtgtttcttcttcttctccctcttcgctttcccttaatcaacttggccttccctcaatgcctccttcctggaccttgtgatgtttggcttttcatagctctgaaggttcaattttcttcttctgtcatccttccctcctttttctgattttctaattccaatttggtttccttttttatttcattttgtgggtgtgttaaagcttctttagtcgctagctatgtttgcttcatttttttagctaatcgcaaaatccaataatcttagtttaaatcaaggtttgaactgttttaatat

SEQ ID NO: 251339 - DNA, 193 bp, Gossypium hirsutum
tcgcggacgcctggggttttccggttctttttggtgggattttggcttcaagaactcaagtcttaaaatggagcgcccttttttattaaggccagggttttgtctttgcttgcgggaaaaccaaccaaaattgcccttaaggacccaattgtggcgaaaattaggggggggcaggcaaaaagggtgggaaatt

SEQ ID NO: 251340 - DNA, 444 bp, Gossypium hirsutum
  unsure (1)..(444): unsure at all n locations
cgccctttttntttttttttttttgaacanaatttatatatctccaaaaaccattaaaaaataattggcgagagaaagtgggatgaagagcttgagggggccctttaaaatcccctatacaaacttctttggtaataaatataataaaaactccagaaaatttgagcaaatccaactacacataccatacaaacagtgaaagaaatgcacgacattcactgtgttttgatagttaaatgcttaacctgttacgaccagcattcagttaatcgacctccgcgtagcagtacaaacccaatcacacacaaacatgccactagattgatgattcgattacaccaacaacatggaaaatgttcaaccgttccctttaagttccgattcaagcacttatgaaagcatttttcaatataaatcctcgacattcattgtcatttctatcat

SEQ ID NO: 251341 - DNA, 396 bp, Gossypium hirsutum
caaatgataaaataggatttgatttcacttctttctagtttcgtgtaccttatgttttggttttgagtcttcttcttctttcatgggttgttgttcatttttgcattgctgtttttttttttctggtctccggtttaaggtttctctttcaaagattttattttttttttccttttctcctttaaataccaacttgcattttgcttacatttcgtggttgtttcttcaagcttgtaacagatgcttatggagggaggagactaagaggagacacccatgttgctaaagtgatcttgaggttccaatatgagagaaatgcctaaacagacagtgatggctataaagtcttaccaaaaccaggctcagttgttggttaagaactacttatttgcagat

SEQ ID NO: 251342 - DNA, 366 bp, Gossypium hirsutum
cggacgcgtgggcggccccgtgggggggaaatcatatcctcggttgtcagctgctaaatccttgacaattctgatgctcatgagaggtgcaacctttaagggagctggtcaaaggccaaccaaaaaaattttttttcatatgcttggtccaggggggggctaaggatatacacttgccttaaaaccgaaaaaccggtgataagactgacactgggagcgataaaagattggggacaataatttgatcaataatgaggttgaacaaccagcatcgttgcatgaagtctatcaggtctaaacgaagaaccggatgagttctttgatgtacctgaagaatctgaattttcagattacgatcacttggag

SEQ ID NO: 251343 - DNA, 153 bp, Gossypium hirsutum
  unsure (1)..(153): unsure at all n locations
cccggtcgaccacgcgtccggtgagattggaggctgatcagctggttggtgacatctctagattcagtagcacaacaagtcattggagagactatcaaagctctcatggcggttgatnctcaaaatgaagaaaaaatgaagcctgaagagagt

SEQ ID NO: 251344 - DNA, 283 bp, Gossypium hirsutum
gccaagtcaagaggtgtgaaaataactgggagagtaggaaatttgattaagtttggcaaaattaggcctgaagcttctgaattgaggtccaaatttggtgtagcaaacagttctgatggatatggaattggtccactcaaacacacacgaattccctcgggcaaaggaagcatagatggaaataggcttgctgctgctccttcaggtgaggtctccaccctaagagggggtaaggtggtgtcaggaaagcagttggaagacagagctaatatgtatggtgaaa

SEQ ID NO: 251345 - DNA, 253 bp, Gossypium hirsutum
cggacaaagaaccttctattaactgtgaggtatttgtttagacctagcgagaaagctcaatattttgccatttaagagaaggtgagggactacaactacatgcccaatggtagcttgtgtctgaatactttatgggaaccgaggacctgacaatacaccattgatactgaatacaatgcttaaaatatcatacatagcagttcgtgtcttgtcttttattcactacacatgcaaggcttttaatactacccat

SEQ ID NO: 251346 - DNA, 423 bp, Gossypium hirsutum
tgtttactgagaaaacggagaaagaaagagacaccgctgaatgcaattttagcaggttgcattgcaggattgtcgattttagctctggatgatcccaatcgaaggcgaacactttcattgtatcttttggctagagtagctcagtgtgcttataattctgcgaaatcgaaaaataagtttcatttatggggaagccattggaggcatggtgactctctactcttttctttagcttgtgcccaggttatgtacgcctttgtgatgcgtcctgaaagcttgccaaaatcatataaagattttattcagaagactggtcctgttgcagctcctgtatataaggctgtacgggagagttgttagagtgggccagtggatgttgaatctatatcagcctacttaaatagccgagggaagtctgatact

SEQ ID NO: 251347 - DNA, 231 bp, Gossypium hirsutum
aaaaggaaagcagtcacatttattacttgggagataagtttggatggtaatagatgaaaatagtagcggaagcaagagcaacgaaaaaaagcttaaaactggattattaaatatattaccgggcactacagaaaacacatgtttagcaacagcagccagtatatgactagaaagggggaggaccaatatcagggcgtttaccaaaagcattcttgtagtattccaacaaca

SEQ ID NO: 251348 - DNA, 316 bp, Gossypium hirsutum
aaaaaaaaaaaaaaaaaaaaaaaaaaaaaaaaatttttacaaaataaaaaaaaacaaaattacatgcgcatacttaaatacataatgggtggtactatatagccccctttttccgttccagtgtcccttgtctttcatcgttgtttctggttattcttttgggttacccaatttcattgcctggctttactttgcccctttctccccctggcgtcacccctgaagtttcccttttttttcgccctgtccatcttccctttttcccccttgtccttactgactctcaaattcggacacgccttttcctctccccttt

SEQ ID NO: 251349 - DNA, 149 bp, Gossypium hirsutum
tgaaaaaaaaatgggttgtgtttcttcaaaactggttaagaaagagatgaaacgagaaatggttctcaacaatggcggcgacttcgcccatcacgtggtttctctcaagtcaagcacttacggggtcctgaaacttgacaacgatgaac

SEQ ID NO: 251350 - DNA, 316 bp, Gossypium hirsutum
tttttattttattgggtgagacagggagtgaaaagaagttaacgaggcaaatgattaaacaaaaatagatatttattatgcaaatatggagatcacatctcattacaccagtattaaactcatcatatagactctgttgggaccgaaaaccatacgtgcgtgcatgcatgcacacatgcatacatacatccataccacttcaaaatggaaaacctatagtttctttcatcagcatgttgacccctggacccaaaaggaagttcaatactaaatatcaaaccccaaagcagaaaaacaaccatttaagaaaaagaaa

SEQ ID NO: 251351 - DNA, 448 bp, Gossypium hirsutum
gatgtctacaacacacttgctagtattcctacttggagtggtgactctcaccactcccacatttggtacctatgagtcaccaaattatgggaaacgccctactcctgtattcaagcctcccaaggtgaaaccaccaccatatgaacctaagccaccagtgtatgaaccaccaaaaaaggagaagcctgtacctaacccaccggtttatgcacctccaaagaaagagaagcatggacccaaaccaccaatgtatgaacctccaaagaaggagaagcctgaaccaaagccaccagtttatacacctccaaagaaagaggagcctaaacctaaaccaccagttcttagatgccaaaaatccgggaaattatggtttgttgtaaaaatcagtagctttttgtgggtcttcctgtaatttgcggagcttaattggaaatttaaccatattttg

SEQ ID NO: 251352 - DNA, 329 bp, Gossypium hirsutum
  unsure (1)..(329): unsure at all n locations
tacgcggtaccggttggctttcttttcgggaaaattataagtggacaaccttttgtgtttacacaatggcgggcggggagcaaagcgtagagtgctacctacgntactaaatgattaaacaaaaacaaatttttattctgccaatttgaggatcacattacactacacccggatcaaacttattatatagactttctttgcaacgaaaaccatacgggcgtgcatgcatgctcccattcctacatacatccataccaatttaaaatggaaaacctatagtttcttccattagcatgttgacccctggacccaaaaggaagttcaatact

SEQ ID NO: 251353 - DNA, 536 bp, Gossypium hirsutum
  unsure (1)..(536): unsure at all n locations
agcgcacgacgctcacgcccacccagtacgtagacgcgtgcgaaaatacgcttgaccttttgctgtagctcacattnntttggttttaacacgtaagcggttcttcattgaagaaagcgcctggcacaatgagttcacacaaatggtcctcaactcgatgccattgaccgcttctaagactactttgctattgcaagtaaccaattataagttgtttgctgttctctgaaaggattacccattggcacgttacacttgaagcctggccctttgcacatgaaaccaattaaatggatgaaaaggggcactggtcaaggcattctctctgcattgtgaagacaaattgggttcttgctaagttgcattctgcacttgacaaagacaagggacacttaaccacanaaccaatatggtnagttaataaagatatgggatattgtgagaaaattaagtaacattgggtgataatgagaacaagaacattgatgagctggagatacaataaagtgttttcagtatctttctgcgttctattt

SEQ ID NO: 251354 - DNA, 245 bp, Gossypium hirsutum
acctacgcgctcacgcgtatcgactgaaattgaaaagaagaaaaagaagaagaagaagaagagcaatgaaaatgaggatgctattgaggctattgctgttgttgatggtgcaattgatgtagagagtgatgaaattgaaaagaagacaaagaagaagaagaagaagaagaagaagaaagagaatgaggaggctattgaggctattgctgttgttgacggtgcaattgatgcacgggctgaggatg

SEQ ID NO: 251355 - DNA, 266 bp, Gossypium hirsutum
  unsure (1)..(266): unsure at all n locations
atattaaacacaaaaagcatacttggagtccgcgcgattttaaaacagcccccagcactaaatatacaaacatcatattcattttcataacctccanatatccactcttccaaatcacaaactcaacatccaaatatcctccaactctcctctcaatcccattcccaaaaaaaaaacacaaacctnttctcaccttcttaaatatccaacactttctttccaattccaaccacttacaaaccttttttaattcacacatcacttta

SEQ ID NO: 251356 - DNA, 223 bp, Gossypium hirsutum
cccacgcgtccggatgagatgggtgatagagtaggcttagaggttgaagaggcaacgtagcttctctctttttagtgcggtgactcacaaggtttggtttttattgagataaaccgtgttaaaacgatttctagaagcttcgtcggagagattcagtccggttgatgatcggagctccggttactcgttgaggagacgagttatagcgtttattttttttttg

SEQ ID NO: 251357 - DNA, 484 bp, Gossypium hirsutum
ttcccggtccaccacgcgtccgcatttttaagccgaaaatcacagctttggaagcaaatttctagggtttctttcgctagcagccgaaccaccattgttgtggtgatcaacagcatgcacacagtacccatcttcctcgttgaaggcgttcgaccatgcctagagaaatttggtaagtattttcttccctcatttattattatttttttaaaaaaaaacttcaaatttcactctttttttttaaacgaagataggttcatagagcaaagattcaacactatttgttccctcgcctttacctcagtatttctgaagtattcgggctttcattgggattgactcacatactaaaaaaaaatccgaaccaaatgaaaaaaataaactaaaaaaaagaaatcataagagaggacaaaagaaggcttgaaatcaactttgctaatcttaaattgctttttctctattctctgtgcgtgtgtacagatac

SEQ ID NO: 251358 - DNA, 351 bp, Gossypium hirsutum
  unsure (1)..(351): unsure at all n locations
gttcgttactctctcttcttctcatgtacttaattctttttcccttttataatctcaaaattccatgagttcctttgccccaacatctgggaataccgttcaaatcactaaaccttttctctttctctccatgaatttatatatatatgcatataacaaatgattcattgatttggggttttgtttctctctaaatcaggacaaaagggtttttcgatctataccaaaagaccacagggattgatctatggaattcctttttcagcagtgtattttctttttcctntttcagttttattcgatttttttacttattttctttctctctccactgcttcgaagtcagctttt

SEQ ID NO: 251359 - DNA, 466 bp, Gossypium hirsutum
taataataacaaaataaattcgattatttatacttctcacaaactagttaaaaaaatttccattgaattcacaaactactcgaatcaaacattgaaatattcaaattggattcgctccttactttaagcttagctccacaatgaaacttgagaagaaattcaagggaactgctgtattttaatcagtcctgatatcggtaggcattggagtaatcttcaagtagtagctaacaataaaataatcagcaacgtttgagtttgagttgttatgaattaggtgatgcacgcttgtcgattccattactataatattattcatacaaggtccactttaaatttcggatttgcaagaaaaagggtaagttccactcgccaagtacggtcaacgtgtcaaatatctgctagtcgtcaacctgtttgataaaagatctgaaagaatcagtatggaagggcaaaggcccagtgt

SEQ ID NO: 251360 - DNA, 439 bp, Gossypium hirsutum
gtttgaggtcgggggaattccactggttcggaatccatataatcgacggaaaaaactgtaaacaaggggaaggggtcccaagcctcgaatgttcggagcgcattcccacaccgctcctttatgcactcgcactcaccagatcgccgctctcatcctcgtaaccgccactttcttcttcactcgtctcttcgaccaatccttccctccgtctccctgctacctcgatcgccacctcaatcttcacgtcgccaaaaccaatgacggccggccacctattgtggcccgaccgagggtacggctcccacctttttctcaagatctatgtctacgacgagaacgagatcgacggcttaaaagaccttttgtacggtagagccggctccatttcctccaatgcctgtctcaaaggccagtggggttctcaggttaaaatccacag

SEQ ID NO: 251361 - DNA, 400 bp, Gossypium hirsutum
  unsure (1)..(400): unsure at all n locations
aaaggaccacccacgcattcgaataattcatatacccaaacctacnttttccccttttttttttttattccactcataaaacccaatcantcatgagcctgctaactatacaagaataggaggcgttcgcggtttatatattattttannnnaaaaaatattatcatttttaactaaaatcctatccatatttttccttaattctcaaaccctgaaactattcctttctttcaatcccttacttcattataaacaacccttcattgtctccatataccattattcccataaaattacactgccaccctccttgtctctccccaaacccaaaaattcctcttttctttcttctacttaacttatcaccaactcttttcctttaataaatcaaaattttatc

SEQ ID NO: 251362 - DNA, 195 bp, Gossypium hirsutum
gcagactaccatttttaataaaggaccggattccctttccaagtttcagcaagccagatatggctcaaaatatggccagtagaacagtcgttttggctctaaccttaaacctaaaccatccatcatcatcatcatcatcaagctggagaagcgataattaagtgatgggattgtacaaatcttgggtcatccaaa

SEQ ID NO: 251363 - DNA, 224 bp, Gossypium hirsutum
gggaaagaagagagaaagagaggcgacgaaaagaccgaattgacctcggctttcttttgaaattaccctttcttcttcttcttcctcgtcggcgtcgtcgacggcgttgttcctcagcgtcttagggatgaacttcgaactatatgtatcgctcgccggaggatacttttcatttcttaaacatgcacgcggaggccagtgttaccaaagagcctaacgccaga

SEQ ID NO: 251364 - DNA, 422 bp, Gossypium hirsutum
  unsure (1)..(422): unsure at all n locations
ttttactattattattctaataactaaactacacgctgctatgagtacgggntacaaggacaggcgggggggcgcattatttgcaacccaacacaacctgggccctactggtgttggcaatactcgtataaaccttttggatttcatttttttccaaaatctctacctttcacatcttaaaaaatcccttctcaaggttcttatattccattccaatattaattattcctctttattattgatctactgtcaacatatacttcttcatttcccttctctccccttttatttaaatttagcaccttaaacaattctacaacttgtcaaatctttgaaaacaaccaaaacatttcacccctttatttgattctctaacacgagcttaaacaaaacgctcgcgttagttcttcatgtaccaccaa

SEQ ID NO: 251365 - DNA, 456 bp, Gossypium hirsutum
ttctctcaaaatatctgctttttcttagttatcctttttgtcccttgcacattagatactgaccagtcatggtcgtcgttgatgtacgaggacggcgctacagcctgagggaataccatggacgaccgacgaccgatcactctaacaacactttagtgcaggagggtgaacaacgctgatcgaatgggctgatgttccacatgaacgagctgatatatgacatgatacgacgcgatgtgggcgcgactgccatatcagccgtgatccttggagcgtgacaagcgatctatgcagtagagacaacatggtcgttacaaagggagcaatgaagcgatacttgtgcaatgaagcatatatgacgctggggcggtaggggacataccctgctgatcaggtgttaaggatcttgaaagaaagcttgcctttgtgatctatgacagcaagactggaaaccgg

SEQ ID NO: 251366 - DNA, 196 bp, Gossypium hirsutum
accacgcgtatcggtttttatttccactcttacacaaataccgagaacgactaggcatccatgcgctactatatttacaccttactctccggccagtggtgactataccgatgcaactctagtactctaccgaccacagttgcacccaattacaacatttaatgattaaccctgttctaagaacattaatctcacg

SEQ ID NO: 251367 - DNA, 443 bp, Gossypium hirsutum
gcaccgcgtttttacagtcgaaacgatttgtttaggtttggaccggccggcacttgacgtactctgggaaaatacccttcttttttttggttttgcttttcttaattgctggtaaaaggggaagatatataaaaatttcgagggaaaggaggtgggcaaccatttcccttggcaaaactagaatcgtctgattttagggggattacttatgtttacctggattggtattaagctcaagtgcattgaatactgtggttttacttataaaatatatctattggttattgttttggatattaattattagagacggctttaattcccaatagttttttaccttatgattttattgaatttactaattttttgtgttgtattcattgtctaataacttgatgtaatggtgagatttttaatttttttattttaaatctttttttttt

SEQ ID NO: 251368 - DNA, 425 bp, Gossypium hirsutum
  unsure (1)..(425): unsure at all n locations
gtctccttcggctttcaatgcaatacagaaactattcagacttcatagctattttgctaatcccaaaatgtattgggttgatcttctattgcttggactctctttcatttaattgtacccctaagattggaaattgagaataaataggttttttacatagagagagagagagagagagagagagagagagagagagagagagagatggggcgtggaaaattggaatttggagttagagtttggaaatttatggtggtatcagttaaaacaagttatagattgntttggaatcatccaatatttgttggtttggttggttttattatatatttggatagatcttttcctttcatgttttcaattttggtgactgcatctcctgttttggtttgcacttgtgttttgcttggtcttcttttgagttt

SEQ ID NO: 251369 - DNA, 395 bp, Gossypium hirsutum
actatactacagaagctatcaggacggcatacatatccaactagaggggagcaattaacattacctagcaaaacttttactaaactgtggttagtggaccctattctcaacatttaataactaatccttgtttaaatacattactttaacgactgacgtagaccatccttaaggaattatctcagcgtatggcatggttataactcattcattgaactggcattggcaatactgacattttaacggatgcttatttttggatccgtaaaaacattttcctatttcaaagttaattacatttctatacttgcaattgttcttggtttgtcacttttattttatctttttttaactcctttgtttttctttggacttttttgtcgattagctttttt

SEQ ID NO: 251370 - DNA, 320 bp, Gossypium hirsutum
gaaaaaggaaacagaggacaagcccgagtcactgatcagaaaagacgagttatattgcgggactatctttacagtggggtaagaaacatgcagaagaagaagaaagcacccttttgtgcatgtgttaaacccgcaactaaaggagattgagcaatggttcatatcagtagagagaatttaattgcattgtccataaatatatacctttctagttgtggtggttcacatatttcttttgttacagaggcttcgttctatacttcatagattctactgtatatttcaggcaccatctaatagaaacaaattgcacttttata

SEQ ID NO: 251371 - DNA, 208 bp, Gossypium hirsutum
  unsure (1)..(208): unsure at all n locations
aatacaactgagagggatttaacaagagggggggggactantaaaattataataatattttatattaattatttaaaaacattattctaatttatnttactatcacccataaccttctaaccctacatacttcaccaatatcctataaaaaaccattcaattcaccctcttcattcgtcttctaaagtccactcaattcttcaaccat

SEQ ID NO: 251372 - DNA, 344 bp, Gossypium hirsutum
  unsure (1)..(344): unsure at all n locations
tatatataatatactattaatatttacaaaaagagaaagaaatagggggagagagaggtgtatggttgtttgagcggatatggggatggtgttggggtganttattcctctcttctgtagtttgtgctttttttgcccggccttttgcaccaaatctattcattcgggcaaacattacatgatttttctcgcccatttctttcctcaatcttcttactaacaacctaattaacgaattattgtgtaactattttaatattctttcaagaattctcttcatattccattaataacaagtgcatttttgcataaattttacaattattctctaacttttcaatttt

SEQ ID NO: 251373 - DNA, 184 bp, Gossypium hirsutum
ctcgcactaccggtccttaattcccttctcgacgccacgcttccgtcttaataaacaccttctttcttcttcttcttatttttttattgctttctaaaacttttcttaatgtgaaattttagagtgcgattgcggtccacatcactcactccctcttccatttcctaaacactttcttatacct

SEQ ID NO: 251374 - DNA, 315 bp, Gossypium hirsutum
tcactaccggtcctaattccctttccaccacgcgtccccccatgtttactaccactttacattaaattcaaattattttttactaccatacacaattaatatactctttgcatctattcttacggcgcgcggcattaatctatcaactctctccccatattacaaaactttttatttcatccttacttctctcatcatagaatccaacctattactcacattccaattaacaaaactctccaatgaagttattattcttttaacaccctttttcatttaaactctaccttttaatcacttccctcttcccttctt

SEQ ID NO: 251375 - DNA, 379 bp, Gossypium hirsutum
atagtggatggtcttctcgtaccagggctgttgccaagtatctccagaatttattcgaggatgaagctggacatggacgtaaggcactttctatggacagtctattggctcgtaaaacacgtaaagaagcatcgaggatgtttttcgaaacactggttcttaagacaaaagattacatccatgtagaacaggggaaacccttcgatgatatctgtataaagcctcgattgaagctcttaaaatcagatttctgatccctttgcataggaaaaaatagcagatacagtggaaattgccttgttggtgttgctttcatgctcagcctgcggtgctgattattttgcttcaatcaaaatgtcttcatattatttttactata

SEQ ID NO: 251376 - DNA, 460 bp, Gossypium hirsutum
  unsure (1)..(460): unsure at all n locations
aaattatacaaagcatcatcatccattgaaaagatcttataagaaaaagaaaaaaaaaactctactgtgtggttttttctatgagtggggagacattnatactatcctcaaagaagaagaacaacaacaagtctttttttctttatcaataataaacctcgatttttcaccttttaagctcttcaccacgtgttaacaccttttcttcttaaacgcgttcacttcttttcccaaacttaccaacgcgtgttttttacctaccagccttcgtgtcgttcgaaaaacctttgaagattgcaagaccctttttattatttcttatatttttttatttttttcatttacttatcttaataataaattaataaatttaatttttttatactattattacatatttactatttattcatataaaattaattttactttattttttttttttcattttcattcaatt

SEQ ID NO: 251377 - DNA, 226 bp, Gossypium hirsutum
  unsure (1)..(226): unsure at all n locations
atttaattcccgttttccaatcttttttgagaaatctgtagcgaaaaatgtcgtcgtcggggattgatatcacccttaagagctcaggcggcgaatcattcgaggttgatgaancggtggcgttgcagtctcatactttttaccctattttccttccacgggggcgcttattacttttttctttttcccttatttcctatcaaaatcttatccaatgttttccctc

SEQ ID NO: 251378 - DNA, 330 bp, Gossypium hirsutum
gcgcacaaaagaaaccctaaagacgctccgattcccagaaaaccgaaatgaaaagggaccaatcgcacttgatagttcaataatacgtggaggtgtttatgtaacaacagcttagcaaaatttaaaaaagaaaaattcccccttctgtctcgatccaggatcagaatttccaggtaataacataagaattttcatgggtatttatttgttttaattttaattgattactactagtatttttttttttcgaatttttaacagttaacctgattgcttcaacagtaaatttcgattcatcatctttaattttcttttttcttcttgattaat

SEQ ID NO: 251379 - DNA, 218 bp, Gossypium hirsutum
  unsure (1)..(218): unsure at all n locations
aggataagccaaaatgctaaattacacaaaacagtgtcttttantcatagaggggtagtacaaatcatacttaattaacacaccgatctacctaaattctcaccttccacgcatttaactatgccatcagctgtttccaaagagaatttattacctgcccagcgattatataatacattcttttcattcgatcaacatctacccataatacatttctt

SEQ ID NO: 251380 - DNA, 228 bp, Gossypium hirsutum
tttcctcccactttcaaactattctcttcgccctttttatagagtctgacattgctactaatagcagcccaaccactcgtgctggtgaggtgcttaaagcctttattataccctacatcttcaccttcgtccacgacaatatatccaaaaacattcattaaccctattacgtctacaaactcgcttatcaccaaacttcatctgaatcctggggtacctttcgatccg

SEQ ID NO: 251381 - DNA, 433 bp, Gossypium hirsutum
tcccacgcgtccgcttttattttgtgtcttctcatggggtaaatatgctttcaaattacaccctggcatgagtcaaaattacatagatatgtggatgatgtcaccctttaagattttagctcacaatgtattttgactccaacattccttcacatctatatctaatatatactagctcaccaaaatacatttgtattttagcatgtatcttgattgaatgtttcatgtgatttatgtgaatgtaacatatttagtcatgccagtcttaaaaccatttgaacagatataggttgaaacaacttatccaatcaaggggccgttcttttatattttccactaccacaccagtttctattatctcttcttagtcattttgtaatacttgattatttcactttgacttatttcttgtgtttttaatttttactatttt

SEQ ID NO: 251382 - DNA, 226 bp, Gossypium hirsutum
gcgagcggtcaccgaatcaaacatcaaccgggtccaggaaatctgttcgttggagcgccgagttaggtagtgaatcgcctgcgtgcggatgcacagcgtcaccatgtccgctgttaacggatccaatccttacattgctcagtctcctgctccggaatcattttcgacttccttcaaagagaaaatggacactgtgaaggatgtcttggggagatgggggagaaaa

SEQ ID NO: 251383 - DNA, 360 bp, Gossypium hirsutum
gtgagctctcaccaatggctttcaaagctctgctgctgttactattggccacttttctgcttgtttgaacgacagttgcttccaatgaagggggagtgaaaacttgaattaaatatgccgctcctggtccaatgaaagcacctattccttgttcacccggtaaggcttccaccaattcggtgtccggcgtacaagggttcaacttcaagacccccaacttaaggccccacttcatattaaacccctaccaagggccccacttcaacctttaaaccaacaacccagggttctaactcaacatataaacccccaagttcttgaacaacaaacaaaggctctacttcaacattttaagccccc

SEQ ID NO: 251384 - DNA, 352 bp, Gossypium hirsutum
ctggagtctcttttaggtcttatatacctttcaactttcaagcaaatttggaacagtttaacggttgtttagtatatgatggggcgcatgatatactctttataatggacatagaggatgatgactcctgtttggtgctttacagtggcttggtagagttcccatttgtgtttaggcattcaggctgaacagcagctggtgatgacttgttgctcgttcttattttcacgaaagaagacagcttgctcagctgaacatacaacagaaattgatgatgaaggtttaagcattcaaaacacttaactcttttcttacaaggagctgaaaatggcaactggaaattttcattact

SEQ ID NO: 251385 - DNA, 277 bp, Gossypium hirsutum
gaagatcctctcattttcatctgtatcttctgaggcacaaactgagacatctgaaatgggtgcaccctcaatgtttgttgagtcaagtgataaggaacctgaagggcatggtgaaacaagagaacagggtacttctagttttcaagagatgcatgcagcatccttggatttgtttgaaaacgaaccaagggtaagggatctaccagagatcagtgtgcatgatggtatatatgctggttcatcaaggttttcttccacttttttcgatcataatgta

SEQ ID NO: 251386 - DNA, 487 bp, Gossypium hirsutum
gcgtccgcccacgcgtccgatagagagcacctatagactctctctcgccctctttttctccggcgagctagcgcgggggctccgccatagctccgtcggtgcgcgaaaaatataaacaattcgggacaccttctcccctttttaaaaacaagtttagatctacttgcaatcttttgaaataaataaaaaaacgaatagaatttggcccttgcactttacccgtttcatattcctcttctccgaagcttattcgaaaccttagggtttcttatggctttcatgaacgaaaaagggcttccaatggtggcgaggcgcgaagaacaggtgatttctcttttatttctttatatttgcttcgagtttcaagaaaataagagaaagggactacctttggaaatctttgtatttctttttagtattgattgtgtgtgtaaaaaattacaaaaacggattccttcggctttataaccgaatatatttttacaat

SEQ ID NO: 251387 - DNA, 474 bp, Gossypium hirsutum
accacgcgtccgcaaaatttgcatcagccaggtgtttattctcagattcagcaacagcagcaacaacgacaaatattgacaagcaatgggcagtcaactcaaaccacccttcctgctaataaggcttcatatcctttgacatcgttagctcaagatacacagattcagcaacaggtggaacagcaacctaacctcgtacagagccaacagcaacagacacagttgcagcaaaatctgtcccagaggtcacaacagcagccacaaattcaacaactggcacagcatggcctctcagagcaacaattccaattattacagaaattgcagcaacagcagcagtcgtctcaacaattactctcacctactggatcactgtcgcagtctccagtggtgcaacaacagccaatgcatcaacaaaaccaaccaatgcagcaagtgcctctttctcagagccaacagacacttggcagcaat

SEQ ID NO: 251388 - DNA, 396 bp, Gossypium hirsutum
caaggaacaattgattaccattcctactgctcctcctcagtcaccagcacctgcaccacctcccggagctcaagcgaccccacaaatacgaccgaatgatcctgcagctctactagctggtttgctgtcgtgaaaatggaagatttgttcagtatacacttagaaaccttggtttttatactctgccggccacccatttggcatttatccctcacacatatggaaaatttcatgatgcaagggcttgccggatcacggaggagcttaattatgtttgtcggcttagtgaaagaagggttggtcgggtattttgttattctttctgcacatccatggtgagagtatttttttttccaattttttttaatcacgttttctatttcttctcagcatacc

SEQ ID NO: 251389 - DNA, 196 bp, Gossypium hirsutum
gcgcccttctttatctttcccacggaaacgaagagcaatcatgaaaaccttgtgaagaaaaaatgagggaaatgttggatatccaaggaggtgcagtgggcgagccagatccgggctaaattctcggaagtcatatgacatccgcatggaatctacatcacttgaaatgggtagggggtcttctaatctccttttt

SEQ ID NO: 251390 - DNA, 323 bp, Gossypium hirsutum
aaagaatcatgatattggctttgtattcactgaaaagggttttcaggacaagggttaaacagagagaaagctacatagctgacactcatatgaatgaaagaatgaagacatttgagttttgtttactcaaacattgggcaaggcttgaggaaccaaaatacatccaacgcccttgcttggcttccatccgtaacattaacattattaataacagaagaacaagaagatacactgcttgctgctttttctggcttaatatccttggtttgcttcacttcttgaaggatttcccttttcataaatttggatctggaaaccttgga

SEQ ID NO: 251391 - DNA, 173 bp, Gossypium hirsutum
aaataaaattttaggttcatgtgttgattttgccaagggattgggtaccataatacttatcatcatattaaagccagtgctttttttgtttgatggtcttcacaaaatacacgttaacatgtaaaatactgtacgataggggaaccagatttcatactcttcctcttcttttc

SEQ ID NO: 251392 - DNA, 258 bp, Gossypium hirsutum
  unsure (1)..(258): unsure at all n locations
gtgggtgagcagtgaagaaagatgatggaaattggttttattggtttggccttgacagtggtgtttcgcctcaacagtggttacggggggtgacnaaaatnnnttanccaatgattncaacaaatattttcagaacgtgatgactttcttaaactttggttaaggaaaagcaaattcttcataataagaattttgtaaattaatagtttataattataaaatattaaactctaaatatttcagtttatattttttaat

SEQ ID NO: 251393 - DNA, 189 bp, Gossypium hirsutum
cggacgcgtgggctagatcgcacacataacttatttttaaaaaaattaacctttgaacaaacgccagggattaccattttgttcggctcgggctcatccaccaattgaatcatgttctgaagtatttaatatgctatatcttactattttttttcctggtgctaggcacattttttttttattttaccc

SEQ ID NO: 251394 - DNA, 221 bp, Gossypium hirsutum
aagaaaatgggcacaggatatctttctgcatttccattttaactttttgatcgcttcaaaacaatatggcctgtctgggctccgtgctacgccattcacaagatcttggcacgtctcttacatcaatatacatttgctaatgatgctcaaactttacttattacaacatccatggtcaaatacttctataatctttttcagaatacgctcagaacactcac

SEQ ID NO: 251395 - DNA, 382 bp, Gossypium hirsutum
cccacacgtccggggttacagaatctgccaaaaaatggttttttttttaaaaaaaaaataaattttcagataacgcgcctactttctctctgagccctcttacttaacatatttcctttctttactttacttatttctatttaaagatttccactaacaaaagctctacacttttctcttccccatttttctctcaccatgattcccttacacaaaaccttttttcttaataacactaccatctcttcatcatcaacccctttctcatacaatctcaataacctttcaccatcttcattccaactcacatctttaatccccaacattgatctaaacattatccttcttattaaaaacaacatctcatttaaagaaataaaat

SEQ ID NO: 251396 - DNA, 424 bp, Gossypium hirsutum
aagaaaatgggcacaggatatctttctgcatttccatcggaactttttgatcgcttcgaagcaataaaacctgtctgggctccatactacaccattcacaagatcttggcaggtctcttagatcaatatacatttgctaatgatgctcaagctttagttatgacaacatggatggtcgaatacttctataatcgtgttcagaatgtgataagaacgcacactgtggagagacattggttgtctcttaatgaagaaactggtggtatgaatgatgtcctctacaggttgtttgccataacggggaacccaaagcatttgttcttggctcaccttttcgacaaaccctgttttctaggattgcttgcagttcaagctgatgatatatcggggttccatgccaatacgcacattcctatggttattg

SEQ ID NO: 251397 - DNA, 302 bp, Gossypium hirsutum
atctcccaccatcagatgaggaggaggatgagtacccttccggggaagaacaaactcagtctaacagacaagaaaggcagagcttgaagccacttgatacctccataagtgaaaaggaattgaagaagcgtgagaaaaaggaaatgcttgctacccatgctgctgagctggcaaaacaagaggcccttaaagatgatcatgatgctttcactgtggttatcggtagtcgggcttctgtccttgatgggtgagatgatgcggatgctaatgtcaaagatataaccatagacaatttctctgta

SEQ ID NO: 251398 - DNA, 284 bp, Gossypium hirsutum
ctttaactctatacttatctgtccaacccatgcgagtctcactctacacaaaccactactcactattcgcacacgtgagattatataaagcggattcgacaatccatctaaaaagataaactcatctcattatatgatttactaccctgggtttctttacgattcggcggggaaattatttatcgtttttttccctttatctatcatcatcaacgcattctcattttaactttacttttaattttccttttaatgccttatttttattcctttccttttaaatt

SEQ ID NO: 251399 - DNA, 310 bp, Gossypium hirsutum
  unsure (1)..(310): unsure at all n locations
aacaatttctcgtcggttttgggttttgcttctatttctgcagatgttgacaattcaagtgcagcggtaaaaactgctaaacgcggcgggttnnaannnnaaacaaccaaatcanaatcaaangaattcaatgttcaaaaccatatttatattttcacataggtgaaccctttctccaaattaatttttcccatcatatataacttcataatcactaccataaaatcacataattctaatcacgttccttttaagcaatcaactttcaattataattttttcaacacaatttctacaaataaccttaacc

SEQ ID NO: 251400 - DNA, 270 bp, Gossypium hirsutum
cttcttcccaactcttcacgccaaaaccccttcccctttaacttcgatttggacaaaacgaaacaaacgatgccgacggcgcgcctctggtggtacgggcatcgtgcgaagctaccagacgtgggtgagacgacgtgggcagtttctatgcgttcatgcgtgaagacgattgctgcaacgtgggggcgagggtgacgccgatccgctacttattgccaaaggtttctactgttcatttttttgtgttgtaggctagtgggttagggattg

SEQ ID NO: 251401 - DNA, 162 bp, Gossypium hirsutum
atagctttggagtgtgggatacttagttctgcacaagatgttactgagcccactatcattgaaggaacggtgtgttcgtgccttaactggggtagagggagaacaagtggccaggaaaataatggtaatggggagatcttctctaaatgacatgctttttct

SEQ ID NO: 251402 - DNA, 115 bp, Gossypium hirsutum
  unsure (1)..(115): unsure at all n locations
aggacgcgtgggatcattcaataattcccatcaacgttgtaaaaacggaagagaggattaggggtcggaatggccaggcccagagggagggganaaagcttgtgggaacttactg

SEQ ID NO: 251403 - DNA, 413 bp, Gossypium hirsutum
cccacgcgtccgctttatgtccctaaactaaattctctaattctaaaacaaatgaaaatctctcaaagggcacaaattttgcagggtttttattttatttgaactctataatttaatttccccttattggattcaccattcccagtaccaaaccctaggtttcttcttttcttttctctgtaattttttccaagaagattcttcaatcatcttattttaagttttttttgtgccatccggacgcggttccggctggaaaatgagtcaaaagctgtggacaagggactatgctggtgtctactaggctattcttggttttgattggacgtagcatacacaagatcttgttgctgctttttagagctttacattaataggatgttgtcacttttgcaattttttttttttactat

SEQ ID NO: 251404 - DNA, 329 bp, Gossypium hirsutum
  unsure (1)..(329): unsure at all n locations
aagcgaaaacaaataaaaaattgtatatggtcacaaatataggcgggggtcgcgtncatcaaaaatcaatcaattactttccttttatagactaatgcactttcacaattaatcttttggtttacatttacatctattatattaatattgcaaagattatatataaatcaataccttctacaatcaataatagccaacctaaattaatttcttacttaataatttttaaaagctttaaacaaattactattctattatttacaaatctattcatcattctaatatcaactaaattatcacattatctttttattatatttcaaaatttt

SEQ ID NO: 251405 - DNA, 276 bp, Gossypium hirsutum
  unsure (1)..(276): unsure at all n locations
gcgcccactcnaactatataaaacacttatacacaccatctttcccttttttactccagcaaaataacacgtaaactggtaaatatataaaacctgcctgggaataaaacatactaacctttttcactttttaaaacatctttacatctactaccattcttttaaaatatatattactacctattcaattttccctttcacttacccaaaaatattctttttctacaatcttattcaaaccttaccacttcttaacttttataatctaaatatact

SEQ ID NO: 251406 - DNA, 249 bp, Gossypium hirsutum
  unsure (1)..(249): unsure at all n locations
cccggtcgaccccgcgtccgcccacgcgtccggttcagttccacttgaaagaaagaataaaatttaatatgaatcccaaatccaattgtgttcctgctccattcccttttagctgctggtgttcttctcatttcatcnnaagtgacagctcgagaccttgcttaaaccaccacttaaaataacaatggtgaggtggctactgaaacatacctaggctgaggctgagatataaaaattcaaatatttata

SEQ ID NO: 251407 - DNA, 308 bp, Gossypium hirsutum
ctcacaccattttcatcttggttgtatttatgaatggttggaaaggagtgaaagttgtccgatatgtggcaaggagatggagtgctgtgagaacccctaaagtctggttgcatcttgattcaatgcaatggaacaaatacatatagaaccgcaagtattatcaggatgtataagctttctgatctttattgaagaggcacatcgtgtatataagagtttgttctttatccatcactagtagtactaccttggaatttttttctactcggactcgaatgatcatgacgttacctttgatgtaaaaagct

SEQ ID NO: 251408 - DNA, 296 bp, Gossypium hirsutum
atattctgtttactcgatttgcaatcgttaatttctgcaggcctagtctgcaggtcatggactttaggagcaaatgataaccatgtatgggaattgcaatatacgatattctttggcagatcaaacaattcttctagaactaagacacagtggagtggtaaatcggtaaacaaggattatacattttggaaggagaatgtgaatactcgaactgatattgatctggaaagagacccttaaaaccacatatggaggcgactattcaaagccaattaatgtccagatggtaatactga

SEQ ID NO: 251409 - DNA, 379 bp, Gossypium hirsutum
ccgccgtccccggaatatcgtcggaggttcgatctatgtcgccgggatattcttcaaaccaacagctgtgtctttagtcgaaaggggggggggataacttgggagcccaacctggggtgcctaggccgcctgtaaatcctcaaccaacaccatttggtaatgcatgttatggtgctgaatctgttcttattctaggtcttcaaagtgcatatctgtagacaacttttctaccaatttcaatattagttttaaaacgttgttaatctgtcatttttcttatcatttcctaattcttgcgtgagttcttgtattatatctattttgtttatcgtgttgatggattttttacttcctatttatttcattttattattcttct

SEQ ID NO: 251410 - DNA, 274 bp, Gossypium hirsutum
ctagaaccttctatctctctgttctccttcattccctaatttgaaagaaaaaaaaatggagatcgttttcgataattatattgtcggcacgttcttggtttccctttttgccttcctttttcttttcattttgcggcgctataataataataataatgataataacaccaggaagaagagattcgagaaagggtattctagggaatttaagatccaaaccggtaccggcaaaggagaatgctcgcctggaaatggttccggcgatgaagtcatt

SEQ ID NO: 251411 - DNA, 318 bp, Gossypium hirsutum
gaaaaaaaaagtgaaaaggataatggtgatgttgtctcttcagggcctacaacggatgtaatgggtgtgatttataaatgaaaaccaagaattgaataccatcatgagaactgccaagaccatgattcggttggagcctatggcttaaggatatggtgcaatcgtagtgatgatataagactcacagggcaatgacttggactccgttatatactcagatcttggtgctttcaggtacttgcagcatgctaatggtatatgggcaggctatttccttatttcagttaattttagatatgtgcctagttcttctactat

SEQ ID NO: 251412 - DNA, 191 bp, Gossypium hirsutum
tcgatccgtcgaccacgcgtcgtcggacagggaatccgactgtaaaaaactagtttgcatggcccgcggatgctcacgctgtgattttgccaggcttgagtacacgaaaaactgcaacacgtgaacgggctatcattacttttaaggaccaatcctcgtattaataggaccgcatgaggataacagattca

SEQ ID NO: 251413 - DNA, 251 bp, Gossypium hirsutum
cacgaaccgtaaattactgaataatatttggatagaacacgtatttatgtcggggcatattgctgaacgggcacgggtatacatcataaaaatgatcaatgaatgaacagaacattgctagggactgataaaaccaatcatagagctcatgcaccatccttggtcaacgggggatgccaagcatcctacttctaacagtccagtaattttacttagatcgagccttcttcatctccgacggcttttccacc

SEQ ID NO: 251414 - DNA, 276 bp, Gossypium hirsutum
  unsure (1)..(276): unsure at all n locations
cccacgcgtccggcaaaagatctcctgaatctggccctcttgcatctgatggcataagttttcctgtgacttctgctggatctagtcctttacaagccatcaattaaggatcgagcctcgagactttttcggaccgtgggtctaatagataatgtaagagctcattgcagacatttgtttttgttggtaatcaaatgaactcgattattttgatgtcaaattttaggtcgagttatatacatacatatatatatatattggggtcatatgtntttg

SEQ ID NO: 251415 - DNA, 253 bp, Gossypium hirsutum
cccacgcgtccggtgaaatccctcctgagttgggacaggcttgtggagctctcgaggagcttgatctgtcatctaacaaactcacaggtggatcgccttcaggtcctacataatgctgctgtttgctactgttgaacctaggaaacaatctactttcaggagatttcctcagtgcaggtggcagcagattacgcaactggagaggcatctatggaccactccactgttgtaccagctgtgaccacgttgcctt

SEQ ID NO: 251416 - DNA, 165 bp, Gossypium hirsutum
gtcctattccggtcgacccacctcgatcaatctttcgaatctcgacgctaagctacctactgtgttccatcgatcttggcaaagagagagcttaaagaacctttgagccctcgctcaagaacatgctgtaagaaccgatatgtggtggaattcatgactgaaatg

SEQ ID NO: 251417 - DNA, 175 bp, Gossypium hirsutum
  unsure (1)..(175): unsure at all n locations
tttccggtcgaccacgcgtccggattaaggaagctgattggagcccctgtttacaccgatacgatgttcaaagacacagcanaatgtgagagcggtctttgaagcgggcatcaaagccgacccacagccaccaaagcagaataagaaaaagaagagaaagtcacaaacagcctgc

SEQ ID NO: 251418 - DNA, 190 bp, Gossypium hirsutum
  unsure (1)..(190): unsure at all n locations
gcgtccgctcacttttcttattcagatcgatcatggccttnatggcctagcctgataaacacaacagaatgggggtttccttctctcagtaacctccacccaaaataaatccacttcattcgaacccgaattttcctttcaagaacccagattttcttttttcgtacgggattaccgggcggttgcccga

SEQ ID NO: 251419 - DNA, 248 bp, Gossypium hirsutum
tccgaccgagtatcacaccagctttcgcatatcagcaatggtctcctgctctacgaccactaccgtaaaagtggtactcttttgtacaccggcgctatctccatcgaccaagccaaccgatcttaaaacacgctctacatcatcatcggcctcacgtaattcgccgattccaaaatcactgagagctcatcatgtctttacaagggccaacgccattgtcgccaagaaggggacagtcccttcggcag

SEQ ID NO: 251420 - DNA, 263 bp, Gossypium hirsutum
gtcctattcacggtccacccacgcgtcgatcacctttctcaacttcacttctttattttattagcttccaaaaaggcttctttcggagaagcaccattgattagaactcataaagcacacctcttaatgatttcttcaatggaaacctttctttaccttctcaacaccacgtttataaacaatccaccctagccaacgcgcctctattacgtacaattcaccatcatagttaacataaccttcgcagcacgaaagccatttag

SEQ ID NO: 251421 - DNA, 185 bp, Gossypium hirsutum
ccgtccgattccggtcgacccaccgtcgaatttaaaggaaacctaagagaggattccatatttcacggcacgacactgttgggtttatttgtgtataaacccacacaagagtcagaacaatcttaccctttgttttctaatgtatgaaacctttattttcacaacattctctattcgctcgatta

SEQ ID NO: 251422 - DNA, 139 bp, Gossypium hirsutum
gggttcacccacgcgtccgtcaaaatgtgtctttgacctaattcaaccccctccctcgttttattcaacgaacaccccacttttgtacggtttcttaaatgatccaaccaaccacaccaccacagcagccatgtttaaa

SEQ ID NO: 251423 - DNA, 185 bp, Gossypium hirsutum
ccgtccgaatcccggtcgaccacgcgccgtttaaataaaataggtgccaggaaattgagtcgtaattccttccttactaatttgttagtttaactataatcaaatggatttaggggagctgtgggcgatctttggtcctggcgtcgcgggcgccgtgttcggtaccggctggtggttttgggttg

SEQ ID NO: 251424 - DNA, 316 bp, Gossypium hirsutum
  unsure (1)..(316): unsure at all n locations
gcgttcgcacacttgctagtattcctacttggagtggggactttcattactcccacaatngnnacctanaaggggcgggtttatagaaaaccttctgctcccacaaacaaaccccacaaggccaaaccaccaccatatgaaccgaaggacccggaggaggaaccacacctaatagccgaaggttcaccgaacccgacgtttataggaccatcaaattaaatcaacctggtgcccgaaagagcactgcccaagcttgctaagaaagaaacaccacttgcaatctcaactgatgacaacccaacgctaaaagaacacc

SEQ ID NO: 251425 - DNA, 219 bp, Gossypium hirsutum
gcttctttttctacttcactctcttgaaaattttttgaagaaaaacttgtacgtacttaagaaatccggttatctagcgggccccacaaaagaacaatccagtttgaatatctgttggagctttcaagcctgctgctaatcttgatcacattttcctatgctaaaacttgcaagcagtttgctactagatcactgtgatgtcaaatattttcacgagtc

SEQ ID NO: 251426 - DNA, 230 bp, Gossypium hirsutum
agaaaatattacaagggactttcaatctcatacaattcactcagatggaacctccacttcatctatgagttcaccaagcaatagcccaaacccttcggcaagtcaaaagaaaggagattgcatcagttaccatactggttgcttgcagtttggtaattgcgggagtggaggattgaactgtatttaccccagcgacttaattccattcacacgaagaccactttttataa

SEQ ID NO: 251427 - DNA, 454 bp, Gossypium hirsutum
aagctctatcattcaaccacttagcagccaacgcgaaaacaaagaaatttcaaaagcacgaataaaaaaatcccaataagtcaaataaaaaaggaaatctgggaggtttttattgaagagcctgttgtattttttttttatacgttatcaaacaaactcattgaactcatagccctctcaacttccctttttttatattcttctttttgttctttgcttttctcgctcaaatctcaaaagggtccttttctttatttctctccaagtttcttaaatctattcttctttggattctcactgttgggtttctttctttgatcgttacagtatagaatttgaatgctgcttatgcattcaaattccggagctatcaatttctgagtttgatgggttcaagatgagatacgacatgacatgatccgcctgtttcatacgatgacccttttccgtatgg

SEQ ID NO: 251428 - DNA, 184 bp, Gossypium hirsutum
gaaaaaatgaagctagggacgttgttcaaagtagggtcgtttgtgggtgtaattgctataggcagagcactatggaggtgcatgggggtgtcgaccaatacgccgctcttcgctatttccaccaatggtcggatcgattggggatttgggccatccctctttacgtagtcgtccacaccctcac

SEQ ID NO: 251429 - DNA, 428 bp, Gossypium hirsutum
  unsure (1)..(428): unsure at all n locations
tctacaacctcctccatgataccaaacagctatcgaaagcgtcagcgcgtgcctcaccgccacacggccgccacgcgcctctcctccaccgccactgtcgtcaattctttctcagacaaaacggtctccgaatcctcccaaaagctccaccgcacctcctcctccgcatccaccatcaccacctctcccaatgccgttacttcctccttcaatgatccctacaccgctgacgtcttactccgcctcttcgttgatcgttccccattcgattccgacgccccatccgattcttcccgccaatccgacatccagatctatctncactcctncgtcatccgccgcgccaaatatttcgcggcgattttatccgactgttggcaacaccgaacgaacgccgacgccaagagcaacaatggcgccgagggttc

SEQ ID NO: 251430 - DNA, 379 bp, Gossypium hirsutum
gttagatctagcaatacttctctcatctctagtgctaatgtcactgtgaagaattgctctagcagtaaccgaagtgcatagcataatgaggaacctcgtcagggagttgctcggaagagaagtttgactgaaactggcgaagaagaaaacggaagaagcatagatttgaatgttgagctaactccgacaggtcaacccccaaaagatcgtttatctactaaccgatcttcggagatctcatcaacatcgctatcggaaacgtcacgcatgcttctgaatcaacaagactcttctggtgaagaagttgagttcagcaacgcaacaccggaggaaccgccacttgttgcgatgggttgtacccggtgttagtatttgtgct

SEQ ID NO: 251431 - DNA, 308 bp, Gossypium hirsutum
gtctccttcaccttgactgcaccgtattctcacattgtcaccagctctaaccctctccccgtgttgccctccatagctcaactactgattggatattttgaatcttttaaaaggaaaaaacgggaacccagtatgtgttcatggactgcagctgaatcagacatggtagtgaagaaccggttggtagggttcctactatggcaatcgatcctaagtagcttgattttcttggccttcactataacgatcgtcttctggcgctccgccactgcaatcttcgtctcctttttcagctttcatctgtccca

SEQ ID NO: 251432 - DNA, 446 bp, Gossypium hirsutum
ctttcaacagattcacaaaatatggaactatggttgttcatggttagactcggctcaatcacttatgggacgtacgtaaggctcttggtagagtcgagacactaccaacaattctgggttggatttggatgtgtagatttcattcatagatatatctaacttttccctgtttcttcaaatttcctatattgttaaaatcttgtttctttttaattagaatgcttcaatgaattctgtcaatgggaaagaaaaggagctggtttagttgggtgaaaaagatttttgcttctaatgcacaaccaaaaacacagaagaaatcaaggaggtggagatggattttcggaaaactaaagctcaagcaatgccgccctgcattaccggcgataccccaacagaaatcgttatgtcaagcaatcgaggataaaaaaagcatgctttgaatcttg

SEQ ID NO: 251433 - DNA, 391 bp, Gossypium hirsutum
gaataaatagaaaagtgcaaggactcaaatggggcgaaattaaaatacaaagacgtaaatttacaactttcgcagtggtgaataaccgcagaatttaaccgaaacaaaacttatggaccttctattgaaactggaaataatgatgccatttgctataaagaatgattacagtttttataatcgagttcgtgagaagctggggacgtagaaataaaaatcttacaaagccaaatatgatggaactgtttgaagatcttacaagcttcgcattagggaaaaggaacattgtttcaataagagggtaccttttcccaaatcgtgagcaaagtccacaagcttatcgcacaaaaatgtggacgatcgcccacaaataaccagccagctgtttcag

SEQ ID NO: 251434 - DNA, 403 bp, Gossypium hirsutum
aggggatcggtacaagaattgcagcaaagcacagcaggatttagcttggcccttaaagaaggcgcagaacgggtggccggtgattgtcgggaaggggttgggaaactcactcagaggttcagaacataagtctctccacctgtgatttatgttttggcctttcttgggcacggaaataaagaaattttgcagttgagaggcatgtaattcatctcatctctgatgaatatgcattagaatgagtgtactatgttaatcatttgtcatttaaatgatgtgtaaaagaaaataataagcaatgaaaattgctatttatggatttggtcctaaatagcacccgaaaagtttcttgttggacatttaatcatatcttgaaatctttaaaaacataatttgatgaatt

SEQ ID NO: 251435 - DNA, 399 bp, Gossypium hirsutum
gccaaaaccagcttccttctccgtgaaaaagactgttcagatatgagaagaaaactcaaatgcttgggaaccagctatggagattcagagaaccttctccactacaaaacaaactatgacagactttgattcgtctgcaaccagatcctccaatccctttccaaaacccgctttacagaagccggaactccatcaacccaaaacccaaatctttggctttttcgcccttccactgccagggtatgagctgcttcgttaacagcacgagaaacaaacagttttttaataacagtcaaagaatccccttctacgatcaggcactggaaacccatctgttgcacgaacagaagcgaactttcacatgcccttgcttcagcaatgaacgcattagcaacattc

SEQ ID NO: 251436 - DNA, 397 bp, Gossypium hirsutum
gatgatatgaaggaaaaccaagacggatggcaatcaaattaacttaaaagaagttatattcatgatacaagtccaatgccaaacatatttaacacaaacataagctgcatacatatagtcaacttgaagttattgaattaacctgtattcatagaacaaagttttttaaaaactttaagtacaatactttttattacattcgcatgtttctcataatattttcttatattctatttttctcttttaaattttatctctattttctttttttttacataatttcttccatatttttaatttttttcatattttataattatttttttattttttttatacaatttttttatttattttttcttatatttttacttcacaatttttattaatttttttt

SEQ ID NO: 251437 - DNA, 235 bp, Gossypium hirsutum
  unsure (1)..(235): unsure at all n locations
caaggacttcaaggtggttaatttnatcacctaggggggaaaaccaataattgaataccaccatgagaactgtccagaccattcttcggtttgtgcctatgtctttaggggttgcttcacttgttttcatgctcaaaaacttacattccaatgacttagtcttcgttacatacttagatcttgatgctttcaagtacttttttcatgcttatattttttgtacatgcttttctct

SEQ ID NO: 251438 - DNA, 370 bp, Gossypium hirsutum
gcttagcaaatcccaaaggagctctgtactctcgatccgatcaccggaaccgtaattttcgtgacgggcggcggcgtattcattggtgaggggttagagatatgaattgggttcaacgcaagatctatctctacaatgtcacctttggactctacatgttggattggtgggagcgttaccttttcatttttaagtccaagtatcactataattcccaattgttagttcctaaaccatggaagacacactggttattgtgttggtgtgggtcgacatctacaacagctcgcgatacgtaacggagttttacatgaggcatctatcctagggttgggaggtggcaatggtgatggaagtgaaaatacttttg

SEQ ID NO: 251439 - DNA, 268 bp, Gossypium hirsutum
atccaccagtgctttggacgaggtcaatgaggcccatttgtacgagaagatgaaggcggcgggcatcacatatatcagtatcggtcatcgtcgtaccttatatgcttatcataatagggtcctagatatatcatcggcagatgcagatagcagacaacgcaattggaacatcaaatccattgaggatgacactttacacaatttcttgaagttatagttatagctgccctaaagtttggtcaaaatgctttaaatcaatttcttcatc

SEQ ID NO: 251440 - DNA, 449 bp, Gossypium hirsutum
gcgcccacgcgtccgcttttagggaaccattctttaaagcaaattagagagaagagaaaaaagaaagctaaaaattccattactttgtctctttggagatatcttttttctgcaattaaaacctcccatgcttgtatctttaaaacctttgatctttacccttttgtctcctcttctgcctcagccttagatccataaaaaacaaccccttttttcttcgtctcttataattaaaaaagaaaatggcaactggttggagaagagccttttgtactgcaacccctagagaacctgaaaccactgttcctagtcctaaaaattgtgcaaagttaagcttttttagtagtggaagtaacccttctactcctcgtcttcaaccatcttccacaaatgaaaacacccctaaagcatcaaatccttcttctcctcgttcaccactaaagctctca

SEQ ID NO: 251441 - DNA, 436 bp, Gossypium hirsutum
attttctctgtgaaaaaatcatggagtttttggacgaagacgctagacccagattcctctggcagggaaagcctcaatcttggggttgctccgagcgaccctccccacaaaaaccctcaaaaccattccttttcatttccctttcaatctcttccattatcctctcccttgccctcttctccattgaatccgaacccttcaaatctctcctcttttggctctctttctcccttttcctcggcccattcgcccctccttccctcaccggcggtgacatccgtgtcggcgttggccccaccatccctgatcccatcgaacaagacccacaacccgagactgaatctaagaaaaaatcatctcaaaaacgttcaaagcctgataaaatcgatgaaccaattggaaatcctggggagttagctggaaacgggaatgggtt

SEQ ID NO: 251442 - DNA, 230 bp, Gossypium hirsutum
ctagttctagatcgcgagcagcctccctttttttttttttttattgatgctatcatggaccaaggggtggcggcataactagatacctgtgaggtaatattctgcacatttagcatcatatctgtgcatttaatacaataaacaagggtcattttagcttaacgaagtttcttttggattcattaatttatccccccattatattattttttttttttctcactttcttt

SEQ ID NO: 251443 - DNA, 196 bp, Gossypium hirsutum
  unsure (1)..(196): unsure at all n locations
gtaaattccaaaggnctgcactgtattccaaaaggttaacacataatacaaagagaaggtcaaggtgaacatacaccatatgaacgaagggacttaccatctgaaccacatgtagcatgatcactctttaaagcgaatggtaaaggaaaactggtaaagatcatgaagcctaatctataccaatgactattaaaat

SEQ ID NO: 251444 - DNA, 466 bp, Gossypium hirsutum
atcatcgtcatcgagtgccgtattgttttcatggatctagagcaaaatctggaatcactctcactgcaaaacagcggagaaacactaagtggaaagttgcggagattgaaggtttcttcgaatgtgttcttcgtttaccatgaccaagatgggttcggaaacgccatcgcccgagctctcagtcctactccccatccttgtagtaaagccttcgagttagtcgacctggaattaggggatgcaaaactgaatgcctctattactcaatttatggatggagaaaatctaaaggcaacaatggtaatgttggatcatttggagccgccactactgtcacaggctataaattcagttctgactaaaatagcagatgcagagcacataccatctaccgtacccactatcatagcccctttttttgtaccggcatcaaagctgaagttggaaggtaggttgttacaacaaa

SEQ ID NO: 251445 - DNA, 424 bp, Gossypium hirsutum
gctattagtcttatattctgatggacaactggtggcatgctctgtgagcaagaaaggtctaaagccagttgaatccattaaagctgaaaaaagtttgggaaatggtgatgctgtatgtacttccattgctggagatcaactgatccttgctgttggtaccagaagaggtgttgttgagttatttgacttggctgattctgggtcactcattcgtactgtctccttatatgactggggatatacaatggaggacactggttctgtcagttgtatttcatggacacccgataattctgcttttgcagttgggtggaagttaagaggacttactgtttggtctgtttctggatgtcgtctaatgtcaaccatccgtcaaattggtttgagttctggcttttttcccgtagttaagccaaaccaggat

SEQ ID NO: 251446 - DNA, 365 bp, Gossypium hirsutum
cttcaaagaaatgaaataacatatgtctataatggtcaatgtcctcccatctcccaaacaataacttaaccaatgtcaaaattgtctagaacacaagtacaaaactacctcgtttagtagtttatggctttagacatatctagctttattagcatattcagtgtttctctcttcctttttgggtttttatgaaataaatatgcatacataggtggctcctccagagagagcccgactgtacctgtgaataccagaaacgttgcacccatgcatgacatgatccatgatgccgactgtgaggcctcttcatgtggaagattcaaagcttggagtaatgctgatattcttgtcctgtctgctaggga

SEQ ID NO: 251447 - DNA, 215 bp, Gossypium hirsutum
atgattgcttgaactaccataaatctatatggaacctcttgttccgattcggctggggaacgttctgggctacatatgtaggctgtgctttatgtgggttattgtttacttcacttgctactagtgggattttgatgaggtatttggtggatgaaccattgtcgattaaggtaatgttgaactttgattattgttagagtgtttcggtttcatat

SEQ ID NO: 251448 - DNA, 377 bp, Gossypium hirsutum
gtgtttatgcataatggcaaatggactgtttcacttcctgaagtgtttcattctgcaactctgaaaccagaagatactaccttcaggtctcgtgatgaaatatttcttaagagcagggacgaatcaaatcttgctggcttgtactcattgtatgtttctcagcaattatctcagtattcaacattatctgagactaataagcaaataggagccttaattatggaaccaattatccaaggtgctggaggaatgcacatggttgatccacttttccagcggatgcttgtcaatgagtgtcggcactgtagaattccagtaatctttgatgagggttttactggtttctggcgtttaggagtagagtctgcagcataact

SEQ ID NO: 251449 - DNA, 138 bp, Gossypium hirsutum
gcgagaaagtgagagatcgagagagaaaatacttcgtagggaattagcgagatcctgaaatttgggggggttttctctcttcaatcgtgtccggctacctgatttattcgtcatcatgaccacatcaatgggacttgc

SEQ ID NO: 251450 - DNA, 471 bp, Gossypium hirsutum
atttgaagtaaatttccatatttttctttctttaaattaatcttaaccagggccggtagccactgggttacgattccttataataaaatgcaaatataaagtgtctgtattgcttggtgtaaggtgcagttgagatatccttgaagatagtttattcttctagtacaattattattataggaattattatggactgactgctgtttaacaacttcttttaacaagctacaaccagggcttctgggctgaaattggcttcatttgtgaaccaagaaagaaacaacctatcttttaagttgcgtcctgtgcctgctcgcttgcggatatcctgtgctgtacgtttctcaatcaattgaatgatattactttctgtactcatttgtgagggggcaaatgctactgactacacaatggggttcacattttttttgtatttttatattcattattcataaatgtctctgcatcttt

SEQ ID NO: 251451 - DNA, 274 bp, Gossypium hirsutum
tctttttactaattccccattcatttatgctgttttttcttaccacgagcacttctcattttcggggagcaccaatagtgcctttgagccctcaactataatcccttattacaatccactccatttaaagtacatgtctacgcttttaatatacctttctaatgatatttccaagtactttaattcatctatctcccaccatttataccaaacgcaccatctaattttatcttaatactatctactactatcaaatactattttaacatccaac

SEQ ID NO: 251452 - DNA, 442 bp, Gossypium hirsutum
cggacgcgtgggcggacgcgtgggcggacagcgtgggttctagatcagcgagcggccagccctatgtggaggttatattcattttatacatgtgtactaattactcattaaatattcaaggaaacaaatccagacatgaatttacttacacataatttgcagggacaaccaatccaatccaatccaatgctagtttaccaaagaaaaagtcaacaatcttttgatgtgtttttactttctaacctcgaataaatggctacaatggcccgggattggccttccgtcctaatattatggaatcagaatgtgattagatcatatttagatgcttggtgtttctttaaattttgccccctttcagatgaacccccaccttctttaccaaaaaaaattttattcagatcatccatcatgtcataattgctttcgccatgtagttcca

SEQ ID NO: 251453 - DNA, 161 bp, Gossypium hirsutum
tggcggctcaagccgaagtatgttccgcgagctgtggttgaccgacaccaacgtgtcaacgcgtccattcaggatcagagtatgctatcccttgaatgggtcctttctactcaccaaatatttatctaaacacatccagacataaaattaacttacacata

SEQ ID NO: 251454 - DNA, 170 bp, Gossypium hirsutum
  unsure (1)..(170): unsure at all n locations
tnnnnttaaagggtggacaaagatgacaaaaacggacgaaataaaatacattgaaagcaagaaaataagacacccttgttcataaatatttatttacatttcaatggtccacactgaacttaaggttttccattttttttttggttgaagttcttatgaaattgaaagct

SEQ ID NO: 251455 - DNA, 427 bp, Gossypium hirsutum
aatgttaattgaatgcagcagatatcaagtcatggatatgagagccatcccatccatgtatactctctactcatcaaatattcaagtaaacaaatccagacatgaatttacttacacataatttgcagggacaaccaatccaatccaatccaatcctagtataccaaagaaaaagtcaacaatcttctcatgtgtttttacttcctaacctcgaataaatggctacaatggcccggcataggccttccgtcctaatattatggaatcagaatgtgattagatcatctttagatgcttgctgcttctttaaatcttgccccctttcagatgaacccccacctttcttaccaaaaatcatttcatccagatcatccatcatgtcatcattgcttccgccatgtgttccatgtcgagtacttgttttcct

SEQ ID NO: 251456 - DNA, 469 bp, Gossypium hirsutum
  unsure (1)..(469): unsure at all n locations
aaaaaggatgatcgcatacctacgaagatgcccaagtttaaccatcgtttgtggaaacaacgttggctccctccagcgttttctacacaatggtccggacaccttggaagagcttcttaacagacacctagtgaagaaggagaaatccctagatgatgaggaagaagaatcgctgaaccgacagcgtctcaccagcactcgacgagaggcgctgggtctctaccgcgacatccttcgagccacccgattcttcatgtggcccgattctcggggcattctgtggagggacatattgagagagaacgcgaggaaggagttcgaggaagctcgcttcgagaaggatccggaagttgtgacccgattgcttatcggtgggcgtgatgcggttgaatctgcattggagaagctagccgaaaagcagaggcatcagattcagaaggagcggngagatggtcggtgatgattgatt

SEQ ID NO: 251457 - DNA, 159 bp, Gossypium hirsutum
cttgaatctatttttttgaagatggagggtaaagaataagatgttaagctaggagcaaacaaggtgggatatttacaacctattgggagatcatcccatacattcaattacttcaatgtgccatcatcatcacccttcttttaacctgctgaactcaaa

SEQ ID NO: 251458 - DNA, 333 bp, Gossypium hirsutum
ctttacttgtgctctgttctaccaatgatagtttttttaacggttctttttttattaaatttcagggtcgttttgctgggggcggttccgtgtcccaaggacgttcgacggttgaagcaatcggacgtaggtggggagatcagcctaaatgaagcgtatgaaactctggattgcactttgtgagatagtgctagaggaatggatcacctagtaattccaacgagagatcattgattagctgcttcaatatcagaccttagcaaagctgtggcttagcaaagtgcgaaagatgaggcggttttgttttaaatagaaatggattattggatttcg

SEQ ID NO: 251459 - DNA, 162 bp, Gossypium hirsutum
caataattctctttctgtttctctggttttaacatgggtatgggtttaaggaatggatttcttttgggtgtatcttgtgttgctacaggctcgctctcaattttttggcgacctgaccctattcttaaaaattttagaatcactttggtctgacaccatatt

SEQ ID NO: 251460 - DNA, 401 bp, Gossypium hirsutum
caaaatcaaaatgtcctttctctctctctctctctctctctcaactgaatcaataacagttccattttttcatagcttggatttcattttatgaacaagaatttccctcattctctctcttatctaaatcttgagatttgacctaatcttgagaatcataattagaattagaatttgagagagattctaagatttcagcattttcgtggcagaaaaaaaaaactacgtaagaaaattgtacattaaaaatccctatacagagggaaaataaaagcaaagtgcgaaagagtgaggcgtttttgtttttaaatagaattgaattattggatttcgaagcttaaggagagaaaaagaaagagagagtagggattagggattagggttttctggtgcgtcgaaag

SEQ ID NO: 251461 - DNA, 239 bp, Gossypium hirsutum
  unsure (1)..(239): unsure at all n locations
ggtcaagttgttgaaactgattcaggtcgaccaattctgagtgttcgcaggattcntcctgcaaagctggattttgcctctgtggaagcgacctcttaatttgataagcccaagcgtaacctgaggaaagtttccagtcgtccagctgagatggcagtgcaggaaaacccacaaaatgagcttgaaaaggttaaacgcaacttgagaaaggtttataatcctgttatagaaaattcaat

SEQ ID NO: 251462 - DNA, 376 bp, Gossypium hirsutum
  unsure (1)..(376): unsure at all n locations
caacaccaaaccaccccctctctctttcgctctctatctcaacgtattctcctccanatctcggggagtaatcccataaagatgggtgtttttccagcccttcctttggtatataggctttagacctgttataaaatccctcagccaacaacttcgatattacccatatgctcttttctttttgttgattcgatttttttctctcttctttggggtttctggcttctcttcctttcaggaaacctaataaggaaaacagtgtgcgtgtgtttttggtagagatacagcgtctgctgggatcttgtttggagagagaaaatggagaatgaagtataaagagagagtgggtcgatgatctttaacgatgaggagttta

SEQ ID NO: 251463 - DNA, 451 bp, Gossypium hirsutum
  unsure (1)..(451): unsure at all n locations
gcttcaaaggcttgtgaggtacgtatgtgaagagtgaagtacactcttcttttgttctgatgtatggagattaaaaaatcttcagccaggtggtgcgcgtggaaatttggaatcaccgggttagtgtagattaatattcatcaaattggtcagaatgatatgcacaagttgaggggatttttgtgttaattcttttttataatattgttttgtttgtgttttcgtttnccccattccccaccttttgtggcaaatacagtatgtccttttcatataaaaagaatagtacaagatatgtatgattgttgagagatggatactccgaggtggatgattcaatataatttcatttgtttcttcttaaaaatattaaaaataaattataattattatttataattatatatttttatatctattttcttaattcttatgataatttttttttttt

SEQ ID NO: 251464 - DNA, 405 bp, Gossypium hirsutum
ggatattattaataattaaacaagaagaagaagaagatgatgatgataaaatggtgaaatagcggtgacgtgcactgctgttctctggtagcttaaagtgttgattttgttacacaaagcggccaagcaacaaatattatcagaagaaagggaagaaaagtagaaaaaggcatcaacccaaaggcaaaagcaatagaattgttacaatcaagaagctacatttttcttttgataaagagaaaaaaaagggaggaactttacgtgtgtggctgtgttgttgtaagttaccggaaatgaggagaagaacagagattctggtgttgcttatttgtttggtaatagtaacgacgtcgtttgcatccaccgtcacgtacgatcaccgagcgattgtcatcgacgggaaac

SEQ ID NO: 251465 - DNA, 475 bp, Gossypium hirsutum
gcggccgcttttcgacgccaccaccgtcccctcaaccttttttctcccacttcctccgacccagaaccggagctccactcgaaacgcagggtggaacctgggttcaaaagcttaaacccggtttcaccccttccgacgtcgaatcagctttacgagcccaacgcgatgccgatctcgccctcgatatcttccgttggacggctttacaacgtgggtacaaacacaccgataccacctacctcaccatgattaaactcctcatctccgccaaacgttacggccatgccgaaacgttggtcgaggaagttatagccggtgcttgccctatcagcgtccctctttacaacgccgttatccgtttttgctgtggtcgtaagttccttttcaaccgagcttttgatgtttacaagaaaatgctgaaatcagatgattgtaaacccacacttgaaacatttgctatgttgtttaattcttt

SEQ ID NO: 251466 - DNA, 299 bp, Gossypium hirsutum
  unsure (1)..(299): unsure at all n locations
gttgcatttgacagcagaaggcaatgcagtagtgttcgaggaagttgtgaaggttttcaaggaaggatggcttgacgcctccggaaggcgcatatgattttcctcaccactccgaaattgatgggaagaacccagagaaggcttttcagcagaaatgcttgtagtttccttcactttttttgcttcatttattaaaaccacattattctaagggttttacatatgttcatgaaaaataattacaaatgttacattatttttgaaatccaagtcttcaatatttgtattatgacttngga

SEQ ID NO: 251467 - DNA, 413 bp, Gossypium hirsutum
  unsure (1)..(413): unsure at all n locations
gtttggtatttgcttactacaaggatggtgctgttgacccgacatttttgtactttgcgtgagggattgaangaggtcaagtgctgaggtttgaagcaaagaaaaaaaaagtggttgctgaagaatttagtcctttttattattgcttttgtctcttattttcagtactctgctaaagacataaattatttatggtttttgatgtttttgatttaattgtttgttgttttatcatgaaatggtgtttatttttatgggtagtctaatcaagttttattcttatttttctatgtaataatataataattttatatctttatcgggggtggtttttttcttttcttcttttttgttttttattttttcacttttttaattttgttcgttttctttttttattctctgtttttatc

SEQ ID NO: 251468 - DNA, 151 bp, Gossypium hirsutum
aaaccatataacataaacatttctctcccaatttctttcatttactctttcctattttcctgcaggaacacatcctacttatggggtgctaactcaaacttacctctattccctctaatctattctatcaataatacatccactaaatatt

SEQ ID NO: 251469 - DNA, 165 bp, Gossypium hirsutum
  unsure (1)..(165): unsure at all n locations
gagatgtcttgcttagcttcttgctgtgctgcgttcacatgcggcctttgctcaacggtnncgtctgggatctccagaggagggggcaggcttgcttattgtggtctctttgggctttcccttatcgtctcatggattcttcgagaagttgatgcgcctgttttg

SEQ ID NO: 251470 - DNA, 496 bp, Gossypium hirsutum
gcgaaaaaagtgaaaagggtaatggtgttgctcctgctacaaggtctccaatggctttaatggggtcgggtagaaatgaaaaccaagaagggagtaccaccatgagaactgccgagaccatgctgcggttggtgcctatggctttaggggttgctgcacttgttgtcatgctcaaaaactcacagtccaatgactcagacttcatttgatactaacatgtagaatgtaacacttgcttgaagacatctaagtgtaattgaggctgtatacgacacagatgagttcatgccaactgtatctacaaactcaaccacaatctcactggcattacgcacagaccgtattggaactgttggaaaacaaagggataccctttctgctgagtgcttaaagagactggttcttttgagttccaatactaggagtttgggtgtccctgatgatgaatcagtggacttaactgaacctcgactcgaatcgttcgatgtggcaaata

SEQ ID NO: 251471 - DNA, 500 bp, Gossypium hirsutum
acgcgtaacaacagagatacctgacccacgtttgaaaggctacattgcatacaaagagatgcagataatggcgtacctagcaaaggagtgcttggtggtggaccctgatgctcgaccgacaatcagtgaagttgttcaaatcctctcaactattgctccggataaatctaaaagaagaattgttcatgtcaactttctccagatgtcatctgcccataacatgaagaatgaaactcttgtagaaagacatcaaagtgtaattgaggctttatacgacacagatgagtacatgccaactgaatctacaaactcaaccgaaatctcactgccattacgcacagacggtattggaactgttggaaaacaaagggataccctttctgctgagtgcttagagagactggttcttttgagttccaatactaggaggttgggtgtccctgatgatgaagcagtggacttaactgaacctcgacttgaatccttcgatgtggcaaata

SEQ ID NO: 251472 - DNA, 450 bp, Gossypium hirsutum
aaccgccgtgctcgttgggagagtagcagctggagagagagtgtggtgtccttaaagccaattatagtgctcttaagcttgactacaacaatcttgaacaagagaaacaagctttaactgcagagttgagggaactgaaagctaagctagaagagaattcagagagcagccactctgttaaagaagattctccaaaatcttcccagcaggtcaaagaccaaggtttcttcgacaacgatgatgattccaacgagattgtcaaagaagaaagcaatggaaatgctcagttactaatttcaccatcatcatcttcttcaattcagttcaatgggtattcttcatcttcagattcatcaaatcatctctggtttcaaccatttgactcgagtttgattctgggtaacatgtatcagccccagttagtgaaagtggaagagcaatgtgtgttta

SEQ ID NO: 251473 - DNA, 202 bp, Gossypium hirsutum
gtttcccggttccatgatattaagatatagatttattcattgttcatgattccatacattgcagcaggaatacttagtaggttggacggagagagagaaaaaaaggcacgactagctcttataaagaaaaacagcaaaaccaatggcgcacctaacaggaggaggaagacaacaagtgatcagaacgggggatatggagaag

SEQ ID NO: 251474 - DNA, 460 bp, Gossypium hirsutum
  unsure (1)..(460): unsure at all n locations
caaacagtgccatttggtgcccttttcctgaatgaaccagtaactggtaaagaancanactgcaggatttatgaagatgacaggtgcgctgtangtctaattaactcgaaccctagaagcataattattacatttagtttaaatgttacatccaaagtttatgatgtaacaaaagccagcgatatgtgttcaacactaaatggatcatgccggctccaacttcagtttccccacactcagtatgttatagtttcaactcctgataatggtgatattgccggacggtacgttgagctgtcttttgtcgctcgagttgttacttacattgcaattttaagtttcttcatcattatcattttattggtgctgaaatacctaggagcatgcaatgatgagagaacagtaattaatagtaatacaacgttcagggaaatatcgtggaggacggagactgacccta

SEQ ID NO: 251475 - DNA, 228 bp, Gossypium hirsutum
  unsure (1)..(228): unsure at all n locations
canaatggttctttgaaagtcagttacaacgacctttctaaagaatctgtttaaacctggctttgccaaataaaaatggcagtggagtgtcttaaaccttataatattttcacaagaactctgattcacacacacctcatatagatataaagagatctaatatacttctcgatttcaactttaaagctcaactatatgactcttgcctctctgtgactactctatctc

SEQ ID NO: 251476 - DNA, 436 bp, Gossypium hirsutum
  unsure (1)..(436): unsure at all n locations
tgacgttcaagaacttaccgaagctcttggggcattaaaaacacgtcttcacggctgctcctcgttcttaaaagctgcgtagtagagtggtctgcanagtttggtgctgacaagaacggtgatccgcagctgcatactatgctggctgagtacatatattctgaatctcttgaaatggacatggccaaagtatcgtatcatttcgttcgaggaaacaacctaaagaagtttgcaaatactttagtaaacttcatgagcaagtgttatccaggtgaagatgatatagccattgcacgagccattcttatgtatttggcaatgggtaatcttcaagatgcttgttcccttatggaggaattaaagaagcatgtgcaagcccaggagctggaatttcctgtatttgatttgattcaacttaacaatttactttttgctt

SEQ ID NO: 251477 - DNA, 252 bp, Gossypium hirsutum
  unsure (1)..(252): unsure at all n locations
ctnccctttccccnncccccncccccancccggccanaccaancnacnacnngncgncagccggcggcggnnncacaaanacagaggcccaaaacaaaaaagagggaagaaagaaaccgaacgaccccnnnncncagncgcnancnccgacccggcganaaccgagggancacaccaaccccngcccagaagggggngccgagcancaaggcnagnggcccggcgaccccnnnnggcagcaagggcnagacc

SEQ ID NO: 251478 - DNA, 372 bp, Gossypium hirsutum
caccgccgcggcggaattgccgcgaccgacccacgcgttcgaagatatggcaccacccatcctactcaccagagaggaatcagatgttctctacactgcgatccctgtgtctggaagaccttcccaaactcaaagatacctgctttgagaatagctttgaattcccatgcttaagagatttaacactaaaaaattgtcctctgctgaaaacattcatctctaaatctgtatgtgaagataagcctcaaattcaccaacctacacaaacaaataactctggtgtcctcaatgaaaagggtggtttccctcggttggagaagttgctgattcagggttgtgattcggtagaagaaataattgagctgcaagcac

SEQ ID NO: 251479 - DNA, 166 bp, Gossypium hirsutum
  unsure (1)..(166): unsure at all n locations
ggnggnacaagngancccgaaancagncaaagcacaannccaancanancaaacggaaagggggaggcannnaaaaaccnngccaggggaagagaaggnananggnaccaacngacannngaacaangganngggannaaganngnangnnacccnacaagaagag

SEQ ID NO: 251480 - DNA, 177 bp, Gossypium hirsutum
  unsure (1)..(177): unsure at all n locations
cggacgcgtgggcggacgcgtgggttcgtcgcagccaaacatcgggtctcctttttggcttgtctcagcttgcactttatgcttcggaagctctcatactctggtatggagctcaccttgttagcgaaggtgtttcaaccttctctaaggtgattaaggtttttgnggtattggtgg

SEQ ID NO: 251481 - DNA, 298 bp, Gossypium hirsutum
accaaggtactgtcggagcgtgtgccgtggtgatgtacaagaaatcaaacaagggacttaaggggctataagggcggaatgcagagtggaaagctttgatggttcaatatctgtaaaggaggaagactttactgaaatgatggtcaaggtatggaaggacaggtgcaggagagaaatggctgggaaattcgcagggattgctgccagaataaaggaaagagataaagcgtgaaaaagcttatgtaaggggataaaatatcatcacctgattgtgacactgtacaccataagcgtatag

SEQ ID NO: 251482 - DNA, 427 bp, Gossypium hirsutum
ggaacacatctcatcttcttttctctcttgtcagaccaactttgacttcaatcaaatttcaatcaacaggaatttgctttgaaaacataaagaaaattccttttttgggtttcgaaaattgtgagattttgggcttttagaagaaaagtggaatgggctgtgctggatcgacgccggccaaaggagacgggaatgtgaaaaagatccggaagcccaagccctggaaacatcctcagccgataacgaagtctcaacttgagcagatgcgtgaagagttttgggacactgcacctcattatggtggcagtaaagagatctgggatgcacttaaagctgctactaaacaggatttaacatttgctcaagctattgtggacagtgcaggggtcatagtgcaatctgccgattaactatctgctacgatgaa

SEQ ID NO: 251483 - DNA, 195 bp, Gossypium hirsutum
  unsure (1)..(195): unsure at all n locations
cttnnnttcccttaatttcaaagctctctttctctattctctttggcttatctatcgctttgatggggcgtccttactgtgcactcgatggcaaatcgatggttgaggcctgaggtgtatccgctgatcagcggacgtaggcgttgctgttagaatatgcaggtttaagtacgcgcgcatgctacgcaataactc

SEQ ID NO: 251484 - DNA, 192 bp, Gossypium hirsutum
gtgcatttggagagagggctgtcatagaagattgatcacacgactggttactaaaatatggatggacgctaatgtttttgcataggattaggaagaggcatttgtagctggactggaggttggactcacatagattgagaggtattaacttagcaatggaggctgtcttactatcaagagctgtcttatact

SEQ ID NO: 251485 - DNA, 254 bp, Gossypium hirsutum
  unsure (1)..(254): unsure at all n locations
cccacgcgaccgcttttcgaaagccaaagactncatannncnncgncaagcnaanaggcgaggggggggcnncaaccgaacgggagaggggggcaaggcaaaggaaacnggccaannangccnnncaaggggagagcnnaaaaaanangacnccagcagnagnngcnagcgnngaaaccaagccngagaaanggaaaagnaaggagggcaaagagaaagaagaggnccaagagnnaagacnaaagacggcagaa

SEQ ID NO: 251486 - DNA, 239 bp, Gossypium hirsutum
ctgacactgaaaagagaagaacgaagtaatgatgttcctgcatgcgtgtggatgatctatagccggcattttagcgaaacatagttagaatttaagttttgggggttctttgttagtgccaaaaataaatgtcgttccgaagtatagttaacgatgtgagggatgctttggggagcttatctaggcgtagtttggaggagagattgactggttatttaaagggaaaattataatggtta

SEQ ID NO: 251487 - DNA, 337 bp, Gossypium hirsutum
ctttttagaaataataaaaaaagttctcatttctttttttgcacgcttcctctcccttctgcgaaacccctaaaaaaatggcgacatcttctagacgaacgagcggtccggttctccgatccctctccccatccggccgcttctgttctcactacgcttctcagtcttcatcttcttcctcttcctctgcttttgccttttcgagttcaagcttttcttcacgctcttcaactttctttaatcaacacagatctatctctccgccacgtgtcaatatgtacaaccactctttatcggcgccatctgtgcgtttctcgctggataaaccgccgatctc

SEQ ID NO: 251488 - DNA, 477 bp, Gossypium hirsutum
caaacaagccaaaaccctaagcagcctctcccccacccccaccccccctctttttcgatggcaccaaaaggttcaaaccccattgaaggccgaccagccgcttcttcctctgaagaagatgaagaggtgacttcttctgaggaagaagaagaagggtcttcaactgaggaagaagatgaggaagaccccaaaaccgagtcaactccattgatccaaaagagcccaccacccagaaagccggaaaccgctacgcctggcgtcgttaacgatgaatctgatgaatccggttctgattccgaatccgaatccgacaccgctacaccgaatgttaaacctcttgcgacgaaacctatggaggaaagtttgaatgcaaagaaacccagatctaataagcccttgacttctcccattagggctttttcatctaaacggcctggggagttggaggtggatgctaaagaagccaaacgacccaag

SEQ ID NO: 251489 - DNA, 304 bp, Gossypium hirsutum
ataaattcctttatttactctgactcaaacctttttcaatgttttttagtttttatttttggttgggtggaaaatgatttctatgggttgattttcctcagggtttcagtcttctttggctgtcactttcctattcaaaaccgccttttatgatttccaagtctgaaaaaatataatacccatttctttagactttccgattcttctctcccttattgaaaaaccatttcaatggcacttctttttgattctccataactgtttttatattaagctctttcggcattttcttatctaacaactt

SEQ ID NO: 251490 - DNA, 234 bp, Gossypium hirsutum
  unsure (1)..(234): unsure at all n locations
gtgatttggataaagatgatgtaaagggtttggtttgatgttnttnttnaaaggattatttggtgggaggtgaaaataggagggggggggtaaatctaatgaatacagtattgtttattgaaaatactgttaaataaggagggatagtttttggttttagagggaagttgattgtatatattgagtggatttttgttttaattgggaaaattaaggatgtgagttaattttatt

SEQ ID NO: 251491 - DNA, 385 bp, Gossypium hirsutum
ggaaactggaggcagcaaagatgattcagcacaaaattagaggagtccagaatgacgcgctgcgagtcgttctccacggtgttaggagcgaccttgtcggatctcaccctctctaatctacttaggaatcagcaatccctactaccgtttgtttccctggaaaatatacgagacttaatattattattttgtttatttatttgtgtgtgtgtttcatcttattgtgttcattactcagatctcaaacgcacgtttgagcatagttcatcgaccgcattatatttgtgaaaaaaaagtggtttagggttttttgtggcagaagggtcttatgattcttattaactcgacataatgattcttttttaaatttcctaaatatacctat

SEQ ID NO: 251492 - DNA, 185 bp, Gossypium hirsutum
  unsure (1)..(185): unsure at all n locations
gcgacaggtaccggtatagaaaacccgtaaggtgctaggaagctgaatgacgacatacctgggggggggaaattcaaggcggcgggagggtctcacaancatttctgtactagcaaagaggtccttgctggaaggactgctagctcccgcacttctaagaaggctgaagaggaagaagaagaaga

SEQ ID NO: 251493 - DNA, 422 bp, Gossypium hirsutum
acccaaccatctctcactctctcaaatatcctgttaccggcgtcgcaatcgctgctgttgccgtggggggctccaccggcgtattctggggctctcccgttgcgatcattttcctccctcttatttttcttctttcttcgcttcactgaattccccttcacttcttgtctgtttccggtggctcttcttgctttttcctcgctctgcgaccttcactaaactccccgacagcctcgcttccgtcactcctcattgctcggcctataacacaaggttttgatcttcaatggagtctggtaaacaaaatgagtatgctgctttcgaggagaaggtgaggaggacggtttacttggacaacctatcaccgaatgtaactggagtaatcgtgagaactggtcttggacagtatggaactggcaaga

SEQ ID NO: 251494 - DNA, 266 bp, Gossypium hirsutum
acaatttccgtgtctcgtgatactctaaaaccttataaactccaaaaagctaaagaccctcccttgtacacaacaaacaacgcgcctgccccttcttcttcctcctcttctagcattcctgtctatcacttaaaaaaaccatagctttgttgttggttttgttttttttttttatctaaaaacaaaaaaatgcatgcaaaaacggattcaaaaaggacgagtatcgatgcgtcatggccgtcaaggtcgccttgaaggcctgtata

SEQ ID NO: 251495 - DNA, 218 bp, Gossypium hirsutum
  unsure (1)..(218): unsure at all n locations
gcgagaaagngagaggncgagagagaaanaaanncgcagggaannagcgagagccngcaannngggggggggnccccnncggaaggggggggggcnancnnancnanccgncancangacaacancaaggcgncnngcagaaagaaaggnggagaagnnccaaaagaacanaacaaagagaggagcngngccngaaacaaccacaaagaaggggaagg

SEQ ID NO: 251496 - DNA, 362 bp, Gossypium hirsutum
atttttggaatatgatacctaaaataattttcagtggggcttgggacaaaagcatttccaacttttcttagttgcttgtcgtgtacattttcaaggaggaacgcgtgtaccaactaattgcaactcttaaagttcattgagaacatttctgcatattaccaaagtgatcaggctattaaactggccactatgatcattctagctggtcttataagaaatttaatttatgaacaagggatcaacttggatgcttctcttgcagggaggcttacttgacctgccaccttccattcatacagtgttaacaataacttgtcatgtgtttcttgaacactttgacttcttcatacaatatttaagat

SEQ ID NO: 251497 - DNA, 396 bp, Gossypium hirsutum
atagcagggttcctgatctatttggatccagccaaagaatcctcagaaatctgtaactgatttgctcaagtatgaaatgtacatctgagttggcagacttcccataaagagccaagtggtcaatatttttggctttgtaggacattggtctctgtcacaagtattttcaaaaacaggtggcaagctgcattggctcacaggccaaagtttgctgacccctgatctacactgcttttccttctaaatattgcctgattatcttagcttcttggcaaacatgctaggccggatggggcagaggtttctgttacatgctgtggtctcttagtaatgaatcaatccatgaacacattagagaatctgaagtcaacacatacagatgtcatatgttttaac

SEQ ID NO: 251498 - DNA, 316 bp, Gossypium hirsutum
tcgaattcatgaataaagtcaatcagattacaatattttaatttatgtaatttgattttttttgaagtggagaagttaaaattgatctttacttactagaagttggctttaaccaagaattataaatttgatctaatttgtgaataaaatatgtaaagtaaaaaaaaaaagtgattgaagattaactcaattgattttattgaataaaatgtgtaaaagtgatttgtgaataaaaaacgtgattcaattattcattttatgaattgatttgtatatttggactagagttgttcatgggccaggccgggcccggaaa

SEQ ID NO: 251499 - DNA, 252 bp, Gossypium hirsutum
gtgacgatggatcttgaactgttgatatacgtttcggtgatcaaatggttttggttttgcatcacttacaccattattgaagaaacaacatagtttggtatctatctcccttgaacttgtacatgctagcctgcaagtttacaacataaacacaatttccaatacagattatatatattcgtgattacgtatatatagccttacccttagtatctgcctttggctcgaatagcatagtagtgattagaaaaa

SEQ ID NO: 251500 - DNA, 338 bp, Gossypium hirsutum
tcagccacgcgttcgcaaagtcatcagtggcggcacagagtcacctgtcacatgccaaaatagggcctaaaaggaaaaatggttgcgaaaccgcgaatccaagatagaaacgattattccaattaattcttataatttaccaagtgattagatgcatgtgttagagtatcgatggaaaattttatagatagcatgcttaatttgcctactagggcttaattgcaaaagttgctaaatatgagttttagatgctcaaggattaaattgcagagtgtaattgaagtagaggtccttaaatggtagtaagaccattacgttttcatggacaaaaatggaca

SEQ ID NO: 251501 - DNA, 179 bp, Gossypium hirsutum
atctttgtaagagacaggatttggattcttcagaaattacagaagaattcatttttccttaaccaggtgtgcaaggacagcaacaaccaatctctataatgatgagagtgtacttatattttgttttgctattaacctacttaccgggttagggatttgccgggggtggggggtgggct

SEQ ID NO: 251502 - DNA, 411 bp, Gossypium hirsutum
ctcccagccaggataaatgtttattgatctcctaggtgtcagaccctatgctggcagagtctatggtttctgcagtgaaccatactcctgtactcacggcgccccagtcgaggagatacacacctaattagacaactactacccagaaggtcagacctggagtgaggaacacaggggactatgggagcctaagaggcgcctgccccggcctatggttctagaaaggcttccaggaggtggtgatccttaagccaagtacgaataggagccagctagaatgggaatggatctggcagagtgaacaagcgccaaggcccagaggccaaaaaaaaaaaaaaagcacatggtttgattgaggaagcaagagcagcatagtatgcctagaaccgaactggagaggggaaatggtct

SEQ ID NO: 251503 - DNA, 349 bp, Gossypium hirsutum
gggaaagcggctgcgcgtgcctgtaccgatcctcaattcccgactcaacccactcgtttaccctgttccacaataggctaagatcggggcacacatttttagacggcgcgagaatgtactattatcaatcgatgtgggttcaattttgaatgaattgttgctgatgcatagagattaggtgctcatcatggtcagaggaagttagagacttaaagcttcctctcactctaatatgaagaacccaaacatggggtcaaacgcttctccttgaattatgtgagtcaatcttgtgaagattatgacaagtgaagatacttcttcttactatggacaaggagttcacacgtta

SEQ ID NO: 251504 - DNA, 418 bp, Gossypium hirsutum
  unsure (1)..(418): unsure at all n locations
atctcggaaggcgggcacgcgggccatggctccctgggcggaggcgcgagctctcggcgctgaacccgctgcgcgcggtgtggctcacgctgaccgccgccttcctgctcaccctactgctgcagctcctgccgcctggcctgctcccgggctgcgcgatctttcaggacctgatacgctatgggaaaacgaagtgtggggagccgccgcgccccgccgcctgccgcgcctttgatgtccccaagagatatttttcccacttttatatcatctcagtgctgtggaatggcttcctgctttggtgcctttctcaatctctgttcctgggagcaccttttccaagctggcttcatggtttgctcagaattctcggngcggcacagttccagggaggggagctggcgctgtctgcattctt

SEQ ID NO: 251505 - DNA, 419 bp, Gossypium hirsutum
atctcttcatcttcctcctcctcctcctcctcctcctcttcctcctcctggtcttcctcttcctcttcctgctcctcttcctcttcctcctcctcttcctcgccttcccctgctaagcctggccctcaggccttgcccaaacctgcaagccccaagaagccaccccctggcgagcggaggtgagtgctgccttgcctgagatggaaggagggtgggggagtgacttatccagagacagggccctggggtgtgagctcccggctgggtgtctcacgtgaccttgggcatctggttgtgggggaagaggcgcttgttctctcccccgcttgttgcaccttgttctggcgaagggctgcgccatccacaggggcgctcaggccaggactggggggtccttggtttcttcctctccctccctc

SEQ ID NO: 251506 - DNA, 423 bp, Gossypium hirsutum
  unsure (1)..(423): unsure at all n locations
atcttttgtgggggattttttttcctatctggagtgtatccaagtggtgagaatgtccagttcacacggagtttgatgtcgtataaagagctgtatcaaaatttgtttgatgcacacgttgtctcatttttttatgtgaaacgtctacaacctccatactctaactggtatgatacgaacgtacaatgtgactaccatgcgggaattacggggcactcaatagagaattgcactgccttcaaaaagcaagttgaaagactcatcaacatgggtattgttaagcttgatcgctcatctagtgcagaaagcccgctacccaatcatgattgataatgaagtgaatacagtgtattaaaaggtgttggaagtgtccacattaatgacatatttgaagacangaatgaaaagggaccttgctagata

SEQ ID NO: 251507 - DNA, 302 bp, Gossypium hirsutum
atcccgcgggtagtggagcccgtttgttccgcccgcgtccagcctggagccagaacctgtgaggaacgggagggccaaaggacctcttcttcacgccggttcgacttcaacaaagccgggggcccctcttcgtcctaaggctgagaaccgtgggtaccgatggatgtggccgagagccctgaacgggatcctcgctctccagaggatgaagagcagccacaggggctctcggacgacgacattctgagggacagcgggtccgatcaagatttggacggggccggggtgagggcttctgatct

SEQ ID NO: 251508 - DNA, 376 bp, Gossypium hirsutum
ttggaaaaaattttgcttatggtccatatttggggaccagggttctaaggttaagaggaagttttgcttaaacacccacttggggggataaattttaagggcccttgcttttccaacttacaagggaaggcttggcaattttggaggctgtttaaaccccacgtaacccaaacccaaccaccaggccttgggtggaaaggggctatataatggtgaagaattaagcatactatttttcagccatgataggaacagagtgcctgcattcccaggaaaatgagaaaatcccatgagataaataaaaatctaggtgatgggcagatctttttcttaaaatagaaaaggaaaaactcttgtagtacctagtcagatggtg

SEQ ID NO: 251509 - DNA, 162 bp, Gossypium hirsutum
gcttggccagccattcctggggacacaatggggaaggggagggtcgaattcaacgaatttggtcgatttggccccctggtaaccagggttgttttaacttttgttaaagggatattggtggccttaaatacccctttaattaccttaaattccttggttaca

SEQ ID NO: 251510 - DNA, 399 bp, Gossypium hirsutum
atccacttttcagcaatggtaccacactccactcatctcactggcgtactcagcaggaatgcccgcaagcctgggactgctgctgggactggcagagaagccaggttcttacaaaggataaaaggtcagacttgccttatcccccaccgtcgacttacatttcagctctttggagggaggagacagactgcttgggccaccagtgagctcccagcgccttctacactcactgcccataataggcacgaaatctgtgtttggtaaatgaaagttagggaagacaggaaagagtgggagaaggagataaagtgggagaaagagaaagaggcgaggaaaagagggaatgagggagagaaagtagagagggaggaagaaagtgaaatggaaaaacaagggggg

SEQ ID NO: 251511 - DNA, 351 bp, Gossypium hirsutum
  unsure (1)..(351): unsure at all n locations
atggtgtattgtggctacttacagaccagcatctctacactgggtcctcatcaagcatgttaataagattgctggcctcaaacactgaaggttctctgaacatacaatggggtacatttattatattgtgtcttcatctttgacaaaactcggctataattcctggactaaaagagaaatctcgattggtatcctgtgacatgcctatttttgcaattaggaatgtaccctaaggcaagtaatgtgacaaactgtggcttaaaactaattaatgggtttgtttttctcatgttatanaagtctcgggaaaattgtccagggcttcagctactcaaaagtgacttgaagcag

SEQ ID NO: 251512 - DNA, 274 bp, Gossypium hirsutum
ttctgctgcttacttgaagggtggcgcgaagaacgttatcattcactgatctcagtgacgattctcccatatgtgttgtgggtgtcaatgtgaacgacatctatgcactgactcttacatatgaatccaatgctagttgataccaacaactgtatagatcaatttgctaatgagatcaacggttactgagctattgatgtgggacatatgaccaccgaccattctattactgatactcaatataatgactatagggcttacctgaacgactcgc

SEQ ID NO: 251513 - DNA, 416 bp, Gossypium hirsutum
atcaagaatattgaatgctcagaacattgagaccaacgtagaacctttcttaaaatttagtaacttctttcttttctcatttatatatgcatttaacaaatatatttattgatttctaacaatataccagaccccattctagaaatttagggatataccagtgaacaaatggatataggaatcctggcttctattttaatggaaaaatgattaccgaaggtcaaattctacttttaattggcatggtatgatgtatcaaatggtataaggagcccattctctttccttgctagcatacttacagtcttccagatttggtgaatctggttattagttactatatcatgttcttgcaggatacatgtttcactcgataggtaaaaataattcagtgcattaaagaagttaaaatatga

SEQ ID NO: 251514 - DNA, 422 bp, Gossypium hirsutum
  unsure (1)..(422): unsure at all n locations
acaaccaaatacaaaacttgatactcggtaccgaaattcccggaatttttttttttttttttttttnanntttttttttttttttggggantttttttttttttatctggacagttataactcatttaccattcttagcttactgtaacctttagctacaagtttaagacctttttttgtattaaactaccaacaacttgcctctacaaaaaagcaccaccactcctaggttatttttttaaaatatttagtatacacaaaggttcaccacgttaaacaagactatgtcgaaataattactttattatctcaacgcataggccttctaaagagcttttattacaagtgttaaccacctatctcgaccaaaattgaactcacttttttactgtttttcaaattcattacatgattatttaaat

SEQ ID NO: 251515 - DNA, 409 bp, Gossypium hirsutum
caaaaaagcaggctggtaccgatccgcaattatctcaatacgaattgcagttagaattcctataatcacctacattacaagggttgctctactttgaaagggatagtttctatatattataaatacttgtgctctgccttcttgcatatacttgttttgggcctttgtttgataaaaactatcttattagccagttatgacatacatgaccttatgctggatgtagtatatacaaaggtttgtacaagacaacccctgaacacaaggaggttctagtctgggaggagactggtaggagacaaagttctttcctgtccaagaaatcttaatatgtaatgtttttctgctttgtttgcatagtgatggaagaagctttttacacttttcaagcttgctgctaacttaattt

SEQ ID NO: 251516 - DNA, 400 bp, Gossypium hirsutum
ctctttctctctctgctcccaacgatccctcgttccttttctcttcaaaattcagccaacttttaagtatgtggggttttgcttctaacgccattgcaagcattgggttaaagaattcaaaagagtcgagtcgagcttgttccgagttttcagacgatgatgtatgttctaatggtagtagagatgaagggttggaatgtcccatttgttgggaatctttcaacatcgttgagaatgttccttatgttttatggtgcggtcataccctttgccaaaactgcatcttggggcttcaacctgctgttttgaaactccccacttctcaattcgagatccctttgatcgtttcttgcccatggtgccacttgctatcgctccgacttctttataaagggaacct

SEQ ID NO: 251517 - DNA, 146 bp, Gossypium hirsutum
gtttgtacaaaaaagcaggctggtacccgtcccgaatttcccggatcagccaggcagcacattacaccgggaggagctgttccacgtggcgcaactcaacaatggcaatggggggccccaaaggcattatgctctaactctttggg

SEQ ID NO: 251518 - DNA, 383 bp, Gossypium hirsutum
atgcttcccttctggtcccaatacagctgtggtagtttgagacttacatccttctaattggaaggctagtgggaacaatttctatcccatgattcctgacaaactgtccttttcatctctttggctccagttggctcatagatccgcctaaaaaatgaagcactgttgtaagggagctggcatgactgcttgactcacgcccatgtcatatgcgtcactcctgagatggaattggaaccctctgtcccaagcacacgggctaagaataggaggatagtttcctggagggaatttggtgtccagctatcacaacagggaatagataggtagcaagaaaatcacaaatgctcagtcttcctacctacttccggaaggatttgcag

SEQ ID NO: 251519 - DNA, 113 bp, Gossypium hirsutum
cggatctttttccttttaacttcaagcttttaagcttttcacaagccggttatgttctggaaccatgggcgggacattcaccaccattaggggccacaacaacagccccaagg

SEQ ID NO: 251520 - DNA, 401 bp, Gossypium hirsutum
gactaattcatcaatttccataaagtaaagggatggaattttagtagtaaaaaaagcagctgtttgtgtgagtttcgatgagtttcgaagatcacgtattttgttttctgcactgagtttggaaagattttaaagcttcttcaacaattctatttacacccaaattcctttttttttaaataaaataaattgaattattaaactttttagagtattaaaaatataagttttcattaaattaaaagaataaaagggttaaattaaaatatatatatttaaaagggactaaaaaaaattgtaccatttaatcaagggagcgaagcaaggtagtgagttctaaaccgatgaacatacctttcttgctctagtattggtatgtatttgtatctgtgtattttagt

SEQ ID NO: 251521 - DNA, 202 bp, Gossypium hirsutum
atgggctggccaccccccaccgcaaccatggacgccatcaaaaagaagatgccgattcttaaactgggcaaggggaaccccatttaccccgcccaggaagcccaaacccacaagaaacaaactctggacccctttaaagaacttgaggaggggccacaagcccttccaaaaaaactttaagggaccaaaggttaggggggaa

SEQ ID NO: 251522 - DNA, 406 bp, Gossypium hirsutum
atgttgaattctagttgtgccagaattgtcttgggttttattagacttcttgaaagctacatttgcttgtctccatgatgctttctgtctctttcatcatttttagcaggtgacatgtttcttactttagctaatagctagaggtcactcaaaggaaacaatttgacaaatcaacttcagaatgaaaccctttgcatccagttgaagaatacacagcaatgtcttgtaaatgtagcacactgtggagcttttaaggtctccatagtaagtaagtgttaaacgtacctgtgattaaactctactgccatggtttactttatatactaaagaaattcttggaagtttatagtttatagggaaatctaatgtcccaattaggttatattatacaggcaccaggaaaact

SEQ ID NO: 251523 - DNA, 124 bp, Gossypium hirsutum
aggagcctccacctgcagagctgctccgacagctatggaggtgggtatgggggtacacacttgccagatgccaggcggccggggtatctttagctaagaaacaacgcacgtcgctggcgtatca

SEQ ID NO: 251524 - DNA, 208 bp, Gossypium hirsutum
atgtttttcagctgctatgttgggagagaaacaagggtagaatgtgcattcgttagtttggataggggcgggccccattattcctcctgtccaggtccaatgaaacctcaagtggcaataaaagtaaaccgaggctttgcccctaaaacaacccattggatttcgattaaatcaacccacattgcctttttggacaaaggggagaggg

SEQ ID NO: 251525 - DNA, 225 bp, Gossypium hirsutum
atctcgtcaatcgcgtgagtagagcgatgagcctccgcctgcagagctgctccgccagctatggaggtgggtttgggggtggctcttgccagctgcgaggaggccgcggtatctttagctgagcaacatcgtttgtctctgggggatcagcttgaggctaccgaagcagcatgacctgtggatctaacagaggcacccttggtggctttcgaggccgctacgaag

SEQ ID NO: 251526 - DNA, 370 bp, Gossypium hirsutum
  unsure (1)..(370): unsure at all n locations
atgggacaaatacgttagtttttgctaaagcttttaagttaagaggcatagaattgggggaatgggtaataaatcagatttcatttagttatttaccacatgaatcactttccttccaacagttgtcgtaagagccatgtgttcatgtgtaatgaagaccagtatttaactgtgggaaccgtgggtggcgtggcgaaggagactgnccgtgactgtgccagtctccgcagccccgactgctgtcctgagtcctcggctccttggcgtctggactggtttttttttttgtccagccgaaaactaaagggccagacaggtgaaaacacacacacaacttggcaggtgaagatattaaagattgaaattgcaa

SEQ ID NO: 251527 - DNA, 117 bp, Gossypium hirsutum
atctttttgcgtttgagccccccgcctgtgagaagcattagcgcggtgaacttgtctgagaacaggagtgttatcattctgccacctgactacttggaatgcttgtccatgggggca

SEQ ID NO: 251528 - DNA, 421 bp, Gossypium hirsutum
atgtgacagagcaagactctgtctcaaaaaaaaaaaaaaaaaaaaaagaggggcagttggataatgggtagggaatgatagaaaagctatgacaggaattctcagcctgttggagggagttgggtatgacgtttgtgaaagggaggagaggaaatagtgtacgtcataatactctcagaatatacaattttccatactcagagctgtcctgatggtgttttgttactgagacaaggcaggactcaaactcccagccttaaggaacgcctctgccttgactgctcaaagagctaggattacagttgttagccaccatacttcgtctgataactttagaatcctttaggtcccacacattttaaaatggctaatatagatgaaatttttgttaatcctggaactttacatatttaaaatatca

SEQ ID NO: 251529 - DNA, 413 bp, Gossypium hirsutum
attgctgtaaacggagctggcttggagccttagccctctgcctggctctcctcttccatcttttggtaggaatcttgggttctcctcttctctctgggaagccagagcccaagtgctccattcccagggagggagtgccctctagggccagggagagtgaaggccggaggaggcaccagctggagaagaagggcagggcctggagaccaagtctcaaagggaaggagctgctggccaatcaggggcgagccgactgcaccctgacctgctgggctgggacagcacagaacctacagttttcctgaatgaatggaatcctggatgttatctgctaagtggttgcttgtcctgacccaggaagcttctacatgctctactcttcagatgtggttttaaaatttttccatctgggg

SEQ ID NO: 251530 - DNA, 314 bp, Gossypium hirsutum
tcgaaaacataagaataagggatgaagttgaattggtgaacctaggggtggaagtggaaatatgcaaaagtttatgggcaaaattttaattttgtaaaagtttgagttaaggattgttttgaatattacattaattaaataaataaaatatgatgttttagatcccgaaaaacgagatttgtacctagaatgagagaaaaatcgaaaatttggaaagctggttaaatggtcgtttttggatcgaggtaagttcatatgtataattagcattaatttatgcatgtttcaatgtaaaatttatatatttattatga

SEQ ID NO: 251531 - DNA, 403 bp, Gossypium hirsutum
atggccaagctagcttctgtctgcacctgctctcaatccggctgtgaccatgagcctccggctgcagagctcctccgccagctatggaggtggttttgggggtggctcttgcccgctgagatgaggccgccgtgtctctagctgttcaactcggtttgactctcgcggatcacctatcggctacggcagccgcgttacctgtggctttaatcgaagggcttgtagcttctttccaggtggctaccctgtgtgctccaggaagctgccatctctctgcttctgcgggtgctgaagacagatggagggcacaccatgcagatttaaggcctacggacatcaaaagtgccgctgccagaggcattagacgtggtggtagcatacacactggaagttgtggcaacag

SEQ ID NO: 251532 - DNA, 407 bp, Gossypium hirsutum
tcggtagtcccatataagctagggataagagtgaagcggatgaaatagaagcatacgattgtgagtggtgtcaaatattctcttcgacaagtgtggatttcttgctttgacacagtccacttagaacctggaactgtaagttccttgagaatttcttgcaaattttcaggctccatattgctcattaagggagaatattcatcgttttcaaaattcagcaattcaaagaactcattaatagcatttgaagttaatggtaccttgattctgcgaactggaacttctgtcaactcacttgaggttaaattcacatagaactctcgcactaactcctcatccacactaggtttcttctcataaaacaactcccaattgagagttttagcaacctgatggatatgcgccat

SEQ ID NO: 251533 - DNA, 163 bp, Gossypium hirsutum
aaaagcggctggtgccggtcccgaatttcccggatcagctttaaaccattatacttattttttaacttagtggaaatattgggggcggttattcctttatggacgttatataaaggaaccttttaaaatcttttatgacctaaattatggctttattttggtg

SEQ ID NO: 251534 - DNA, 414 bp, Gossypium hirsutum
  unsure (1)..(414): unsure at all n locations
atggactattctggatcaggttccggctccggctctggatcaggagtctgtagtggcttggtaacgtgaaatggaacaagattaccaaccagtagatgaaagtgatgctttccatgacaaccttaggtctcttgacaggagtctgccctcagacagccaggacttgggtcaacatggattagaagaggattttatgatataaaagagaattttcccaccttgacaccaggcaatgtatttagcatattttgcgtaccatggttagatgatcaaccttgggacaaaggattttatagacatttttaaacatctgaaaaagaagcttaagttttatcatcctttttttctcatgaattcttaaaggattatgctttaatgctgntatctatcttattgttcttgaaaatacctgca

SEQ ID NO: 251535 - DNA, 422 bp, Gossypium hirsutum
atggcccggccaccctctaccctccccatgcctctctcttctctgctttgcttctcacttccaagtccacgggcagtgcttgatagaatcactcccacctggaggggctggctcttgccctcccggagcctatgggttgagccgtaccccaaggccccctgcccagctgggcttgtgctgtgcttcattcacctctccatagtctctaaatcttcctcttttttcctaaagacagaaggtttttggtctgttttttcagtcggagcttctcttctctaagaggctttggaatgatgaaagcatgtaccctccacccttttcctggccccctaatggggcccgggccctttcccaacccctcctaggatgtgtgggcagtgtcctggcgcctcacagccagccgggctgcccattcacgcaga

SEQ ID NO: 251536 - DNA, 404 bp, Gossypium hirsutum
tatctggaacctctcatactctctctcaatctcaattttctcaatggtaaagtttatctaatatgttggtggtgaggtaatcatattattatctcaaataggcgattgtatatgaaagggctctggaaaggcaaatcccataatttgcttaaatccacttcttcctccaaacaagatatctcatataagaatgcgaacttaatctgtatgtgtcatttctttcaagtcctatctgatgtcgcttgtgactttctgagatttcctttcgcatctcaccaggttggctttccaaaaaaacgcaacaaagaaattagactgaaagataggacgacccagcctcaattacttaggcttgcggctcctaagactgattctagcttgaccaggacctgttgagatatact

SEQ ID NO: 251537 - DNA, 402 bp, Gossypium hirsutum
atcctccctcagaatacaagttaatgcatgttactcagtcgcccagtatgtgaaagaagatgtgagggagacaaatgagttgatggtttgaattatatgatttttgccacgttaccttgatgcaaatttgccaaatctgatactgtgaaaagatttgataacttttctaatgcctgactagtaagttttaaaacatcattctttaaaaaaataatttaatatttttggttattccaatcttcagtgttaacccaaacgattctgagataaaaattatgtgtcatctgaacttcagtttacagacaaattagaactttgctttatttggagaagggggatgcattcatttggttttgatttttattttgcttttaattcattggagatgatgggatacctagc

SEQ ID NO: 251538 - DNA, 371 bp, Gossypium hirsutum
tcggtctaaaacataaagttttaatttattcaaattcgtttaaatacataattttataaactattattatatttaggagatataattatgggttaatcattctattatgctgaaatttaagatttaatcccttaactttaatttggcatgattcaatctctttacttttataatgttattaggaggtccagattgataacactgatagtagttgttgttaagtgatgatgtggattaatttttgcgattactcaatcacacaatcaagggcatgttgtaatgccattaaacatattcaacatatgattagtttacacgtaagttgaatgactaagattatataaaataaataatatttcatcactttaacg

SEQ ID NO: 251539 - DNA, 386 bp, Gossypium hirsutum
attgaaggcctcgcagtgctgctgctgtctcagccacctcttggcttccggcctcctcctgctgctgctggctgagctaagcgggcccctggcagtcctgctgcaggcagccgaggccgcgcaaggtcctgggcctcctgaccctagaccacggacattgccgccgctgccaccgggccctaccgctgcccagcagccgggccgtggtctggctgaagctgcggggccgcagggctccgagggaggcaatggaagcagccctgtggccgggcttgaggcggacgatcacggagggaaggccgtggaaggctcactgggtggcggccttgctgagagccccaaccctggcgacaagcccatgacctaacgcaccctgaccgtgttga

SEQ ID NO: 251540 - DNA, 406 bp, Gossypium hirsutum
atatcagggctcctatgctcagtagtagctctggcttagacaccagctggagtgatcaactcttagggaccctgcctatcccacttcacaggtgaggcatggcaattctgggagctgattaaaacacacgtaaaccaaaaccaaacaacaggcccttgggtgaaaggtgctatataattgtgaagtattaagcatactatatttcagccatgataagaacagagtgcctgcattcccaggaaaatgagaaaatcccatgagataaataaaaatctaggtgatgggcagatcttttctttaaaatagaaaaggaaaaactcttgtagtacctagtcagatggtagatgagctgcctgcagctgcaggagcacctctatatagtacttagaagtagtatgttattcct

SEQ ID NO: 251541 - DNA, 423 bp, Gossypium hirsutum
atcaaaaatgctactgatcaaataagcttttaagaattggaaaaataaaaatacaaaagtccttcaccattatcctcaggtgatcagtagcattgccttgtcttggatcctcagtgctgccaaaaggccagtataaagaatttatatttgcactgtaaactctgcaaaaatatggtttaaagtgacatgattgcactgaaaagggatagtgcttttgtgaaatttttcaaatttgagtaatagatgcctttttaaggcagtgaatttacacaaatatgggaggggtatatggtgttactgatttttagacctctttgaccatcttctagtttttacttctagtttttacatctaggagaattgtgaataacaccaactgttcttaaactctttaattccatgtcttaaatgccggtatttgct

SEQ ID NO: 251542 - DNA, 356 bp, Gossypium hirsutum
tcgcccacgcgtccgttttttttttttttgtttttgaaagcaaacttcttctttttatataacttctcatacaaattgaaatccacatgatatgacaaattaaatcacaaactctaaagaaaaatatacatagaaatccaagcatttttcactgcaaatcaagacgaaaagacgtgagaacccaacaacaataacaccatgtaataactgaaaccaagcttcctattaagcaaggaattagctccattggcgaggctcccagttggcttattggaagaaagaaccaccaccattcaatcattttcggcactgagtccgattccagtgaaggtggaatcgtttatgtatttaagaga

SEQ ID NO: 251543 - DNA, 415 bp, Gossypium hirsutum
  unsure (1)..(415): unsure at all n locations
atgaaaaagaaggaagaggaggaagatgaggaagatgaagaggatgaggaggaggaggaagatgaagaagatgaanatgaagaagaagatgatgatgatgaataagttggttctagcgcagnttttttttcttgtctataaagcatttaacccccctgtacacaactcacttcttttaaagaaaaaaattgaaatgtaaggctgtgtaagatttgtttttaaactgtacagtgtctttttttgtatagttaacacactaccgaatgtgtctttagatagccctgtcctggtggtattttcaatagccactaaccttgcctggtacagtatgggggttgtaaattggcatggaaatttaaagcaggttcttgttggtgcacagcacaaattagttttatatggggatgtttgtttt

SEQ ID NO: 251544 - DNA, 187 bp, Gossypium hirsutum
acgaagttcggccatgcttgtaactagattgaggtatgtttgatattattctttaaaattcatgtatattttaagttgttagtttgaattctacctagcccatggttcaaattttgctatttgatggagatgatattctgccatggatgttgtatttcttgggtggtgttttgatgttttcgttatg

SEQ ID NO: 251545 - DNA, 330 bp, Gossypium hirsutum
atggagattgtcgttcatcctcgagccgttgagcagctgaacaggggcaatgctggggcgcgcccgggcctgagacgaccacgcctgtgccactgaggaccttcagcagggctccattcacctggcccacttggctgtccagtcacactccagtgtcaaccactggcacccagcagccaagagaggtgtggcgtggccctggggacccatggctgatgcagggacaggtgagccgtcccccaacgtggagggcgagcacgttacggagtatgacacgcttactttcgacacagtctttttttagcgtctttggacttttgacctcaattt

SEQ ID NO: 251546 - DNA, 423 bp, Gossypium hirsutum
atgcgaggggcccaccctttctccagaaccaggctcatcgaacctgctctgcacccaggacgcaacagtgcggtgcagaaagcgcatgtcagagacagagccatctggggacaaccttctttcttcaaaactagagcgaccatctgggggttctaagcctttccacaggtcaaggccaggaagacctcagagcctaatcttattcagtcctcctttccccattatggaccacctgcccccctcatccacagtgacagattccaaggtcctgctgtcccctatcagaagtcccacccagacagtttcccctggccttctttgtggagagttggcagaaaacacatgggtcacaccagaaggggttacacttaggaataaaatgaccatccctaagaatggccagagactagagacctcaactag

SEQ ID NO: 251547 - DNA, 130 bp, Gossypium hirsutum
atgtcctatctgggggttaatcaggctttttctctattgcgtcgctcctactgtgcgtgcgcgatagtgtgtgttggggtgacagttggaatttctggaatggtggatgctggggggaggagtttgctgg

SEQ ID NO: 251548 - DNA, 352 bp, Gossypium hirsutum
ataccacccctccttattccttaacgaacagcctgacacatacgcaccgggccgcctcccctagtaggtgggcttgtacatgcgcagtgtcctagtgcccatcgtctgttttcctggccttgcccccgcctgccccatgccgtggacatctgggcccactcatcgccccttcaggcccccggcgccccaccccctagagtgctctgtgtatgcggatgatttagagttgtcatttctctttactggatgtttatttataaagatcttgcctgttcccgcgtctgcggagcggccctcgtctcccagctttctattaccttagctagagtgtctccttgtgggttcctgttgc

SEQ ID NO: 251549 - DNA, 266 bp, Gossypium hirsutum
atcaagccgcaggtgagacctggtacaggttaagaatgggatcagtggagagcctgccattccttcagctaaggtcaggcccctggggcgctcccccttctgttgatagcatgtgggagtgagaaaacaaagtcattgagcataaggaatgagtgcttctgtgcccatatttaaggggtgaccttggagaagctactctgtgggcatgacagcaaaggagaaaatcatttggcatattaaggtctgtcatgctttattatgcatag

SEQ ID NO: 251550 - DNA, 342 bp, Gossypium hirsutum
atggccaagcaagcttgtgtctgcacctgctctcaatcctgctctcaccatgagcctccggctgcagagctcctccgccagctatggaggtggttttgggggtggctcttgccagctggtaggaggccgcggtgtctctagctgcccaactcgagttgtctctgcaggatcagctggtggctacacaggcggcatgacctgtgcctaaggcggagggactgagggtggctttcaaggaggcttcctctgtcctgcatggaactgccttctctgtgctcctttgggggcggaagacagagggaggggacaccagtcaaatttaaggcctacggacattagaag

SEQ ID NO: 251551 - DNA, 433 bp, Gossypium hirsutum
atcccggggcagagtttcgctcctccacctctttttttcccaccaacccggccttttaccactgaggctgggccccaacatcacacctcttcataatcatcattattctccaccttattcacaactttatgactttcattcttcttgacttactctttttttaccttaaactttacttctatttacaaccatattaatttcattcctcttcattaagatattattatgtttattcatcctttttactttattcaaataataattttattttatttttttcttcatctcatttttaattcgtattttatatatttttctttctttcttttttataatcttttttttataaattttattttattttttttcttaatgattttcttttttttttatattttttatttttcttaataaatttttatttatttttttt

SEQ ID NO: 251552 - DNA, 297 bp, Gossypium hirsutum
  unsure (1)..(297): unsure at all n locations
atcccttttttttttttnttttttccnnnnncanaacaaaaccgggggtaggttttaaatctgcgggggcttggctaaattaagacatctttagttaattagngatatcgctttttgaaatcgaccatatttctcttgtccttcttcatcatgaattagtgtttcattttccaaatttaaagtgagtccttttcttatttactctgtgggcattacagcagaagagtaaatcatttgccatcttaaggtcttgcatgctttattattcatagtttcttatacatgttttttttttgt

SEQ ID NO: 251553 - DNA, 189 bp, Gossypium hirsutum
cggatcacagacatactcttccgattggggtgtttttcgagtgtgagagggaagctcccaagcctgcatgggcagaccttccctcctaaatcactgcgccttgtgaccccccatccctgccttctgcaagtcagcaaccgcgctgtgctcctgcactgtagcctagggttttaccgccttctacaccct

SEQ ID NO: 251554 - DNA, 344 bp, Gossypium hirsutum
atccgcccttttttttgtctttacttttataactgacccggccagactttattgcgcttaaaggcgcagagacagtaccaactccacatgcctacgtggccctggacctgcccaggttcccgagggtccttcacccccatgtgacaaataacctctggtgttcatcgggatgagaaaacctagggctgatctgaattgactccaaggctcgactagatcattgacagggccttcctgcctgaccctgataatacctggggctacaggcgcaccacaacaagcacggctggtttttaaaaggattagggcctacgagggatgactcacaaatccaggatggtcta

SEQ ID NO: 251555 - DNA, 413 bp, Gossypium hirsutum
  unsure (1)..(413): unsure at all n locations
atgtcatttttctcaagaaaagtgatctcttctgaatctgatttcgtcagtaatgagaactggactggtttcacttgacctctgtttcctgttagtgggaaacccctccccagaggtgctgtgtgaaagattgctggggaaagggtttctagatcccagcataacaagttcaaaagagcccagtgatattgtcattagaataatggtcttcattaagtactggttttcataatcttgaagcttcattttcaccaatttgaaaggcagtaactagggaggagagactatgcagggaacaaggaaaactcangagtgcatcacagaccttgagttaaggcagggaagaagcagatttgctgtccactgaatgaaaataaaaagaattccattgtccaaggtcagagcaagaacat

SEQ ID NO: 251556 - DNA, 249 bp, Gossypium hirsutum
tcccctatctcacttcttgtgggcactctgccatttctaaattgggtggagacataaatcggcacaggtcccttacacttttattgccaatgctgtcaacatggactgaatgctgtacttgtattccttgtcctagacacacaccctgaacgtgtttataccgcctttattaaagcgttgaatatacactatcttagtggcagtatcctccaaaacttatacccatgttggccagagacgggagaaaac

SEQ ID NO: 251557 - DNA, 387 bp, Gossypium hirsutum
atgcgccgctgacaccacagctccgacctccctcagcgtggctgggaccctgagcagctgcgcagagccatgcgccccgatgtacttaggtggcacagccctgagacctctggccagcgccaggcaggcgtcggggccggcagaggcctggatctgagtctttgggctctgcctctccctggggacaggagggagcctgggggtgtgggtggggagctggccgaccctgacccagcgcctggctctgcccccaggagtggacagagcgatgaaggcgggagtgcagaggctgcaggccagggtggacctattggaggaggtgaggccaggcttgaggcacgttactctcgacagcagtagcccaggccaggatatagggtgcatagt

SEQ ID NO: 251558 - DNA, 431 bp, Gossypium hirsutum
aagaagcaaactgctgcctggtcaccgaattcccgggatggccagtggaggttctgggtctggacgagctcgggaggagtggttgtggccatagcgcacaggcggatctgaggctcggcgaccccactggtcgcagcccgggacaggacaaccacaggaacaccgccgagcccacgtccccccgcccgccaacagagtcatggctgcagcggctgctctgagggaccccgctcaggaggagttccgcctcacaggttgttccctacaggcgcctgtggaccccaagttccatcctcccggatccgtccatctccaggccattgccctcgcccctccctgtacctgtcgttctccccaccgcatcccaccggtgtctgaaacagggatcccttccgagagcgtctcagtgtcccgacgccaggtccgggttg

SEQ ID NO: 251559 - DNA, 416 bp, Gossypium hirsutum
atgtcatgcttaagagtttactttcgttctcagagcaatgggaaggaattgcagagctttgagccgggaacggaaagacaggtactaggccgcatcctcagtggaattaggtaggtatggtgtggaacctgtgaagttcctggcatgttccactagacctagttgtaacatgacgttctgactgaagtgcagaccacaacaactatagtgcttcacttagaaggatatggccatgaggaacttgtctgactaaacaatgctataaattaaaagctcttgcaaaacattaaccatggtaatggttatttgcaccataaaatggtggcatccagcttaagtggcccacataccaacaatttaaaatgaagatagaatccagacgttaactctttttgtctctccataggtgtggtcac

SEQ ID NO: 251560 - DNA, 323 bp, Gossypium hirsutum
atgttcccttaccctctcacagggcatgcagtgggggtgtgactcacttgttcagtgccccgcgggtcaaacccctagggtgagcacgcggacgggcaggtcgtggggaggatggattaccaccccacagcatcatctagggttgagggtgtacagctgctggagacccagagggtgagtgttgcagtgcactgcttcagcttaagtcaagtggaccctgtcttatacgaaggacagagggctctatgtatcctgggttcttggcctagtgtactgaaaaaatcaggtcatgtgggcttggagaatgcatgcaggatttattg

SEQ ID NO: 251561 - DNA, 425 bp, Gossypium hirsutum
atccgggtctgagtgaagctccccgcagggttcagcatgtttgtgcgtcgacaccacaagcagggctgctgacagacgtgcacagacctgaccggcagaccctccctgggcacggagccaccaggaccccaggaggagagtcttgccgtgcctcctgtgctcacccacagggctccccaaccaggcccctcacggtccgagaagcccggaaagacccagagcgagatctcgaccttccttagacagaggccagcagggactgtgggggcgggcggtgaggctgcagggcccagccagtccccaggacctccccatgggcctgcagcatctgagtggggtgagcctcctgggagagaccttgctgggcagcaagctgcgggagcttcgagcgtgcccctcttagcaggctgtgtgtgccagggctg

SEQ ID NO: 251562 - DNA, 418 bp, Gossypium hirsutum
ataccgtcggcaccaccctccggacacatgaggccagctgcctgagccctgccatgggccagcctagcccttgtcccttttaatataaaagatatatatatatatataaatatatatatataaaatatctatattctatacacaccctgcccctgcaaagacagtatttattggtgggttgaatatagcctgccttagtggcagcatcctccaaaacttagacccatgttggtcagagacggcagaaaacagagccagcctaaacaggcccagccagttggtggggccaggccaggaccacacaagtcccagactcagctggaagtctacctgcttgacagccttcaccaagatctacaggacaaagggagggaacaagccctgctcgaatggggcacggactgtccaccttttctga

SEQ ID NO: 251563 - DNA, 341 bp, Gossypium hirsutum
tatagaacaagtttgtacaaaaaagacaaaaagcaggctggtaccggtctcgcaatatcatgattcgtgatctgatagaaattgactaatagatgatttcaagagagaggagaagaggaaagtgctagagaaaagtacttgagtacttcaggatgttcataatgaagggattggccttactcaatctgttttgttttgatttgttttgttttacctatcagaagagaaagtagagtatattgatgtagatggggtggtgggaattttgtttgagctttcttgatgagttgggcatattgtactttcaatgcttggtatatttttttctgccaattttatgt

SEQ ID NO: 251564 - DNA, 369 bp, Gossypium hirsutum
acgctaatgagaaaagagctgataccaatgtcaggtccttagagctgatcgaatgcaccaacattggattctgcaaggggggcataggtcacttatgagaattgacgatggtctcaacacttatattcgtggaaaactacaacactaagcttgcactgcctgttatatagtgaatgtgggacttcaggctgcagaactttagaaagatcgcaggcacgggtgcataccttatgtactatgtgctgtactcaggctaaggttcaggagaaccctatgaccctaagaaccctgatagacctctatcttaaaggataaaggatcatggaccggattaaggttacgaggatgcagagctcggaattgactctt

SEQ ID NO: 251565 - DNA, 380 bp, Gossypium hirsutum
attccggaaacaaaatccttttctcatttcgggaggggggtaacagtgacgtgcagggacctcttttaaacaggcaaaacaggaagggggaaaaggtgggatttatgttgaggctagaggcatttggaacaaccaatctatgtagttaacttgaagaaacagatttttaaagttggtgcatctagaaagctttgaatgcagaagcaaacaagcttgatttttctaacatcctcttaatgtgcagcaaaagcaggcaacaaaatctcctggctttacagacaaaaatgtttcagcaaacgttgcacctcatggtttttgaaggctttagttctgctttctgcctcttctccacagcccaacttcccacccctgatacgtga

SEQ ID NO: 251566 - DNA, 136 bp, Gossypium hirsutum
acatttgatatcttcaaggggggccagacacacagagaatctttcctgtgtcaacccttatatctctggaaaactccaaactaaccttgcacggcctgtaacaaaatgaagcttcaacacccagctccagaacttt

SEQ ID NO: 251567 - DNA, 362 bp, Gossypium hirsutum
cccacgcgtccgcactgatctctctaaaagagcaaccttctcctcgcatatgcatttctcctcgctccctgcgcaccgcctgctccattattacgtgccccgcaagctactccaccggctgccctcacttctaaatcttatctaacgctttttctttactcaaaatgggtttagttcaaaaccccgacaataatactgctagtcctgaaaccggaactgcaactcatctctcgtcttctgcttcttacaatgatggcgactgcactgaaacgccgcgtctcagtgaagacttcgattcaacctgctcctctccctacgttagtgcaccatcgagccctggccgtggtcccacctcgggatac

SEQ ID NO: 251568 - DNA, 267 bp, Gossypium hirsutum
agtaaggaagagcagccgctgctggttctcaggcgcggctctttatcggtggttctggctcccggccgcgccgcagcccctgcccagtctctcttcctcagctcggcgggctcctccgcgccgcacgtgagcgcgcccgccaacagggccactgccgcgggtaagtcgtgcccgcgccctgcccggcgtccagtcctcagccgctgggcgaagccggaggagcctggcgtctcctccccggcggcccgcgggacctttcccaggtcc

SEQ ID NO: 251569 - DNA, 377 bp, Gossypium hirsutum
atccccaggtccctctgtgcttcttggaaattctcctttgctgcttgttttagctttaaggaaagccctgaggtctcagccctgatcctcagggttcctggtgactgtggtcactctttgtccacccacttccaatcatacaactgtggcttccccaggtctggtgtggcccttcaaattcatgggcagaggttggaggcatgcattgcctttcgctacattaagattttgaaccccacctgctttgaggctttggggttattgggcaaatatacccatccctgcctgtcagactgtacctaggaattttggagagcaaaaaaaaaatcctcctttgtggaaaaaggaattggtgtgggctgtgattgggttgaagc

SEQ ID NO: 251570 - DNA, 296 bp, Gossypium hirsutum
atccttatgttcctatgtgcttcttggaaattctgctttgttgtttgttttagctttaaggaaagctctgtggtcttagccttgatcctcagggttcctggtgactgtggtcactctttgtacacccactttcaattatacaactgtggctttctcaggtctggtgtggccttttaaatgtattggtcagtatttggaggcatgcatatgacttttgcttctttaatattgagaactcctttttttttgatgttttggggttattggtccaatttacttattcctgcctggcaaac

SEQ ID NO: 251571 - DNA, 366 bp, Gossypium hirsutum
cagaaaagccgaatcacgaaaagaaaagcgcctcctgcaggcttccctttcccttttaacgccgctctctctttcggccgttaagccgcccgttgtctgtttctaagttccctcctctctattttcttctcatatcaatcctcttttatatttcaaatttcgcaaatatctaatgccgcaaattaaccctgcctctaaaccctagagtcccccccccctttcacttctcggctttactttatactttaattattattattatttctttgattttgtgacgtggaatggatggagtgagtagcagtagcaacaaccaaaccgatgcatcgacgagcggcggaggaacccaaacagcaacacaacctc

SEQ ID NO: 251572 - DNA, 383 bp, Gossypium hirsutum
atcgagggttcgagggaggggcacggaccaggaacctgagctaggtcaaagacgcccgggccaggtgccccgtcgcaggtgcccctggccggagatgcagtaggaggggcgcgcgcgagaagccccttcctcggcgctgccaacccgccacccagcccatggcgaaccccgggctggggctgctcctggtgctgggcctgccgttcgtgctggcccgctggggccgagtctgggggcaaagattggcctcttctgcatatgacagtagcactgttgtgccttcacccaccagctccagctccaatggcaacttgtctcaggaggccatcactgctatcattgtggtcttctccatcctggccatcttgctcctggctgtgggg

SEQ ID NO: 251573 - DNA, 368 bp, Gossypium hirsutum
  unsure (1)..(368): unsure at all n locations
naaaaaaaaaaaaaaaaaaaaaaaaaaaaaaaaaaaaaaaaaaaaaaaaaaaaaaaaaaaaaaaaaaaaaaaaaaaaaaaaaaaaaaaaaaaaaaaaaaaaaaaaaaaaaaaaaaaaaaaaaaggggggggcctttttaaaggatcaaagtttacttccccgtgtttgcaagataatatttttttttttgtgccccttaatttaaattaatgggccgtgttttaaaaacgtgtggattggaaaaaccttgggtttaccaaatttaaacgttttgaagaaaatccctttttttccattttgcgaaatacgaaaaaggcccccactatttgcttttccaaaaatttgccaaccctaattggcaaatggac

SEQ ID NO: 251574 - DNA, 380 bp, Gossypium hirsutum
ataatattcaaatatatttaaattatcttagtacttatactcaagtaaaattgatttattagattttcagccgattcatatttatattcaaagaagaaaaatccttatgtttctgactatttgtagcttctttcatccgaagaaaactactacagcacttcttacagccagtcagatagtcagtgtggttctcctccaaggggttggtcagaagagttggatgaacgtgggcataccttatataccagtgactatactaatgaaaaggtacattctttttttctcatctagtgtttttttggcagaattctctcataaaatagttgtgtactgaaggtttagtagtattttaaaaaacatgaaaatagtcttcattgtaa

SEQ ID NO: 251575 - DNA, 386 bp, Gossypium hirsutum
ataagccagttcacccggcctggtagttctgactcttaatccctagacacattcttcagaaacaactgtacatggtgagagaaaagtccaaaggaaaaaagttttccttcctttaaaatagactaaatgtgcttatcacctttaaaatttggactgaatgtttaaactttaaacacaaagcaaagggagatgctcttaaatgtcaaatctgaagcaaagattgcatttttgcaaagctatccagaggatgtgttcattattgagacatgggattcattaacacatcagcgcccaaccactgtctctcctgtcccattcacacagtatcgacaaccaaataagcagctgggcaggggagacctatcactgttaatgtcataatcaca

SEQ ID NO: 251576 - DNA, 223 bp, Gossypium hirsutum
aaaaaaaaaaaaaaaaaaaaaaaaaaaaaaaaaaaaaaaaaaaaaattaaaaaaaaaaaaaggggccaaacttttataaaagggccggccgctttcggggttcctggctttctttcgctttctttcatcctcagaaatcttctatagcgcttcctacattcaattcacatggtcagtgtgtaaatcctgccaagtgttgaacacatgagtttgcccaacttaa

SEQ ID NO: 251577 - DNA, 386 bp, Gossypium hirsutum
atggcagaggagcattttgtttcaaatgaactgcggctttgacccccaaaatgcaaggaggaactgtgctgggccaagctggagcggcgctgtcttgctggagtggggacctggagtcagagaaaatccacaggctccctgcccctcctcctccatctgcacacgcctcagcttaggaccttcaccactctatggtgaggaatgccatggccagggagaactgagtttcatccaatgtggagaggagtcccagagcagggcagctcccaaactgtgccctctgatcatcgtcccttccagcttgctggagtgtccagagagacagatttgccacaagctaggcttacttataatgctccaccccatagaaatgggaccccaagtac

SEQ ID NO: 251578 - DNA, 366 bp, Gossypium hirsutum
atttattttactttttatttactttacttttaataataatatttaatatacttatataataagcaaacataaatgtgtattacaagtgtatgtatactattggtacacattatttttaccatacacttgtcttatatttaatttatttatcatataatattaatttaataataataaatacattaattatttacttaaataataaccaaatacatacatgtattacaaatgtgtgtattatatttattacacttgtattttattttttccatacacttggcactctttttggcttatttacttatttcgtcctttcaattttctttattctataattaaactttaacttcatagtctctatacttc

SEQ ID NO: 251579 - DNA, 361 bp, Gossypium hirsutum
cttatgagaaaagagaagaaaacaatgtcaggtcctcagagctgttcgaatccaccaacattggattctgcaagtggggctgagtacgttgagaatcttcgtatttgtcaacacttatgtttgtggagatcttcaatctaagcttgttcggcctgttatctctcgaatatatacacttgacggctgcaaactttataaagctcgcggtcaaggttgcagtcgttgggtactatgtggtggatactgacattccttatggagaaccctatgaccctaataaccctggtagacctctatctgtttggatcaaggatcatggaccggataaaggttacgaggatgctgagcttgtaattgacgc

SEQ ID NO: 251580 - DNA, 379 bp, Gossypium hirsutum
atcaaagatgttactaagggctttttactactgtgagataaccagcatgatgtgaagacaacgaacattttaagaagtttgactagtagacgtttcttttaagtcttttggagggtcttggtcgacgacccacaattttattgtggctccccaggatttgagaacatgtgggcttggatgatcactgttgacctatgaaagagcacaggtctcttgagagtttattgacacaactactgattacacccccacaatatgtctcaacctctgttgaagggctattgatatttttaaaaacgttacttccaatcagaaattcaagtaagttttatgtcttctactccatcaaaatttatgtttctcagcataaggtagtcta

SEQ ID NO: 251581 - DNA, 365 bp, Gossypium hirsutum
aaaaaagaaaataaccattgccagcatgaagtttctctgattttcttttcactgattggtggaaacataaactcatttccgagtaatgatttacttaaaatattatattgtttattatcaaacattatttagacaagtgaagagttttttattcagggctaccgggtcatttctgttgatattccccaggtttggaatcatcaagagtggattcaaagttttgagaagttcttggatgtcatcaatgttcatcatatacatttatatggtacatctctaggaggattcctagctcaactttttgctcaacatcgtccaagacgggttaaatccttaattctatcaaatgcatttttggagacatg

SEQ ID NO: 251582 - DNA, 366 bp, Gossypium hirsutum
cccacgcgtccggttgaattaatccgaatttttatttattaagttatgaagttgatggattaattggaaatgatgaaatggtgactaagtagggattggatattggtataaggagagcaagagttgataggtgaattcaaaatttccattacaaaagcttaatgattaaaggccattcataccgttagatagtaaatggtgagagaaaaaggatgtatctcacgtacatatatatatataaatatcaagaattgctaaagcatgattttcattacatatggctccattttcttatcaccacttatttttccttcacttcatgtttgttttggaccagacatgatgatcaatttgttcaacattcat

SEQ ID NO: 251583 - DNA, 367 bp, Gossypium hirsutum
cagatattttatcttttgagggacctttgcagttgtgttcattttgtttgccatactctgctatgtataatataattatgtggtagaaatagatgtttgtcaagtttttgctgcgtatgtaagggtgccatagctcttcccatttgtggtagtggataatgatgaatgaaacgaaggggcatagtcgattctaacatgtaaggtacttgggcagacattcaaagttgtagcaatcacctcatcaacccaattgcttaggcccagctctttatcacacagggtctaggataataataacccaaactccataattaccccaaacaaaccaaatattaaaataaattgtatgaattaatgaatgaatgaa

SEQ ID NO: 251584 - DNA, 371 bp, Gossypium hirsutum
cggacgcgtgggaaaaagctgaaaaacatattttcatggaatgatggttagtgatgagctaagctttcatgacatttctcagctgttgagtttatttggttccaaatatggtaatgaaattgctgtcaatgcgagtaaaaatacaaagctagaagaaacctaagttttcatggccaaaagtaaaggtggattgctaaagaagaaaggttgatttttttttttgaagaagaagaagaaggaggaagagggaacaaaaaaagaaaaaaaatgccaacagtttggttttcattgaagagatctttacactgcaaatcagagccatcagatgttcatgacccagaaaccaggaagcaattgagtacaatattgac

SEQ ID NO: 251585 - DNA, 380 bp, Gossypium hirsutum
atattttcattcttttttgagacagggtcttgcccaggctgaagtacagcctcacaatcgcagctcactgcagcctcaacctcctgggctcaagtgatcctcctgcctcagcctccagagcagttaggactataagcgcataccaccacattccactattttttttccctagagatgaggtcctactgtgtggcccaggctaagattatttttatgttatccttgctctgacttgaaatcccactctaggttggggatcactcttctttgctttaatgaatgtatactttgtcctttagagacatctagacgatcagaattcataaatatcagaatgggtgtattttaaaataatgtttctggtcatatatggccattgg

SEQ ID NO: 251586 - DNA, 359 bp, Gossypium hirsutum
cccacgcgtccgtttctttcaaaatgtaattggctgtgctataccaaaagcttaccaccttgctaactctttcagtcgctcctttattatatgtacatgagattgaattcctcccaaagactaaaccgctacctcaatactcgaccgtcaggctttacagacagacctatagtcgaccctctcacttccttcgtatttattcctttttccagctatgcttgaactataattataatagaaaactcatcgtagagaaagttatggatggaatgatctcctctcttgtaccccgcgaaagctgaagaatggctttagaatcttccattccgctgctccaaaaatccttatttgctgcgtta

SEQ ID NO: 251587 - DNA, 385 bp, Gossypium hirsutum
atcgcatcccggccctcctccttcccgcctccacagagactgtgttctccgaggtcgccaaacatgttttccaaaaagtgcagcctttttctggtcgtaaaagtacagaagcagaaaacaaaacctgactgccacccttccgggataatcactattaatgttttagtgtattgtctgccctctaaacatttaatgttttttgaatagataatacggtataatgtttcagaaatgataaccagattttaaagtaaatagacctttcttagaagagtcttcctactcctccacaggttaccgcttacattagtttattatgtttccatttagttttgtaaaaaaaaaaaaaaaaaaaggacactttcccttcttaattagtgtattt

SEQ ID NO: 251588 - DNA, 388 bp, Gossypium hirsutum
atctgcggactacgacgactttgtgaatgcgatccggagcgcccgcagcgccttctgcctgacgcccatgggcatgatgcagttcaacgacatcctacagaacctcaagcgcagcaaacagaccaaggagctgtggcagcgggtctcactcgagatggccaccttctccccctgagtctttcacccgtagggtcctatacagggacccaggcctgtggctatgggggcccctcacacagggggagtgaagcttggctggacagatcatcctcactcagctccctggtagcccagactgacagctgctcttgggctgtagcctggggccaagatgtctcagaccctagaagcctagggctgggggagacagccctgtctgggagggggc

SEQ ID NO: 251589 - DNA, 323 bp, Gossypium hirsutum
ccacaatctaaaaagattgttaaaactcttctaaaaaaaactcaagaacaattcttgaaaagaaaaactcaaagagaatttaaataataatcaattgaatgaattgtatacaatgcaaaggcctatatataagctagctaaataaatctaaataaaactcttaagtatagtaaaactctaattaatctaaacaagaagtagttttaaactaaactttcttgttgacataaaactcctaaatagcttaaactacttaataattattaaaaattcggaataataaaataataataacttatagatacaatattggaatcataaaa

SEQ ID NO: 251590 - DNA, 364 bp, Gossypium hirsutum
gggaaagctttcactaataaaatgcactaattggctagaccaaaaattctggaaaaaaaactattaagaagatatatgagtctagtttcaagaaaaattcacgaatttaaattttgagttttgtgtctcgagttatgatttatttagtgactatgatgcaggtgggcagttttataaggaataatgaaaaaaattgttttgatttgtctaagtattcgaaaaatttttaatgttcccgatttggtcctgaaccatttcaattgcatattttagggcctcgagggccctttttagggacatattgaatgaatgtaaataaattaaatttaaaagcaaattttatgcccgaattagtaagttaagt

SEQ ID NO: 251591 - DNA, 383 bp, Gossypium hirsutum
atgcaggatgcggggccgcgtggcagggagctgcgctcccctgggcctgcttctggtctgtcttcgtctcccaggcctctttgcccggagcattggtgctgtggaggagaaagtttcccaaaacctggggaccaacttgcctcagcttggacaaccttccctgactggcccccctaactctgaacatcctcagcccgctctggacccgaggtctaacgatttggcaagggctcctctgaagctcagcatgcccccatcagacggcttcccacccgcaggaggctctgcagtgcagaggtggcctccgtccgggaggctgcctgccatgtactcctggccccctgaggatccttggctgatgatggctgctgcggctgcggacc

SEQ ID NO: 251592 - DNA, 367 bp, Gossypium hirsutum
ctcgctactcactttgatacattttccttcattttgcgtaattttcttgactagcaaatagagagtagatccttcagctgttaggaaatgagatttcatcttaattatgtggctgcctaactccatccacacgtaattgcaaattacaagaaaaatgataataattattaaaaaaaaaggttagtgagagtattcatttgatgagagtaattacgatgtcttttgataatttgttatgagagtattcatctttaattatgtggctacttaactccactcacaactgtaataggaaaaaaaaaagataccaataattataaaatggaggttaactagactattcattttgatgaaaactatctcagct

SEQ ID NO: 251593 - DNA, 365 bp, Gossypium hirsutum
cacgcataacatcccatattttctttcttagccaaaaaccttgataagattatctcttgactagccaccttgaggagccattaacaaaggaacaacacaaggaccgaaggaaaacatcttcaatcagagttcatgagactgctgattcaacagagtttattcttattatactttgttattttgattttaatcatgtttgcaatgggttttattatcttgtcatctacaatggtagcttaattatatttaactaggatgattgcatttatttaatgaagtttgtttaaatcatatctatagtgtttgtgcctcagtcgatcatgttttcaattaaactcaagtatgtattttattcatatgtgacc

SEQ ID NO: 251594 - DNA, 384 bp, Gossypium hirsutum
atcgcaccgcggcgccggctgcaaagttgagcgaaaagtttgaggccggagggagcgaggccggggagtcctctccagcggggcgctccagtccctcagacgtgggctgagcttgggacgagctgctttccgccccaggccactgtagggaacggcggtggcgcctccccagcaaaccggaccgactggatccagccgccgcagggaatgacgccggtgctcctacagccacagctccggacggggagggcgagccccacagccggccctgcgacgcccgcctgggcagcaccgataaggagctgaaggcaggagccgccgccacgggcagtgccccgacagcgccagggaccccccggcagagggagcccagggtcgaggtta

SEQ ID NO: 251595 - DNA, 366 bp, Gossypium hirsutum
gcttggaagcttgaaaaaccctagccatggtttctccttgctatattcggccatggggttgaagatgagcaaaattgacttttaattttgtattttaattcattttacccctaaatgaccaaaatgcccttactactaaactttccaaaaattccatccatgtccaatttttgtccatagacttagaaattggtaaaattctatttaagacctcctaattaatatttcaaaacaatttcatgctagaaacttctagaatgcaagttttgcaatttattcgatttagtccctaatttcaatttaagcactttatgcataaaatttcttcacaaaattttcacacaatcatgcaatcatatcatagac

SEQ ID NO: 251596 - DNA, 388 bp, Gossypium hirsutum
atgtcaggataaattaaaagaacatttgtctggaaatgctgccaggagcctattatgtaaatgttaggtattttgtaaaataaccttgaaattgtaaattgacacgtgtttggtcagattgtgtcaagtttaatttgttttgttttctttttttttatttgaaaactactttagcaataattaattccatgattatcacattctgccattaagggatattagtaccgtaatactgaagaaatcttactaagtctgaacttttggggtaggcagcttctttgtttcttttctatccacccttgtcggttgaggtatttgtttcttgactaataaaccctttgatacttttagccagaaatcggtctcataaagctatttttgagtatag

SEQ ID NO: 251597 - DNA, 382 bp, Gossypium hirsutum
atctcattttcatctgttttttgaagaaaaatggaaaaatgtaaaaggcggcccctccccaggctttgtgagcctggcccgagccagtataagagggcctggggcacgatgtggtcagccaggaagcatacgatgccatttcttttatagactcctcggtatttctggtagggtaaggggcaggccagggctgttcctgcccatgatggaagaggaaagtgctactgggcaaggtgtcccaccctcccctcctgaccctccttctacgaggcttatcctggcaatggggtagtcactgccacccttccatcaaaaaaaaaaaaaaaaatcccttccttgtgggattcttgggcatctcctgcctccctcactctcacggtaa

SEQ ID NO: 251598 - DNA, 377 bp, Gossypium hirsutum
atacttgcaccactaagaaagaaatgtagaaccatttggaaaaatgaaatttagtagttccaagtttcaaagaaatgtcaacattttattccattcaataaagaacaaaaccaatagtatttttattactttcatctgaaacattccatgttttaatctgagccttgcagactttgatttggagtttgaacctgttttggttgcatttcatttttggagaacttcattaacgtgagattggcgattcaaatgcaggtgcagttttctgttaatgtcatgctgttgtttaggtaataagaaatattaagtaattggctttagattttgtaattttttccctgagttcctgctagatttcgtattctagtagcaatgta

SEQ ID NO: 251599 - DNA, 364 bp, Gossypium hirsutum
atcgaggccgtgcggcatggcagctacaaagccatgaagctgctgctgctctacggggccgagctgggggtgcggaacgcggcctccgtgaccccggtgcagctggctcgagactggcagcgcggcatccgggaggccctgcaggcccacgtggcgcatccccgcacccggtgctgaccctgaccgcagcccgggtcttgcgcacctgccaccattccatcccatgcccagcccccgcgtctgtgcctctgtggttcctgccctcagccccggttcctgcctctggggtctgtgcctgctcagcagcccttgcagaactgagtggtggcaccgggccctgcaagcagagagaggggcctccctg

SEQ ID NO: 251600 - DNA, 379 bp, Gossypium hirsutum
atgtttattaaaataattaaaaatactttataagaagagatatttttgatattaggactgatgttgaaatatataggggcaatttataaaaaggtagttagagaaatatattttagtgaactataaccacagagcacagatgactcccaatgagctgatctgtctttagatttctccctttccctgacccatccctgttctctaggggctgggagtggggatgtggacacaggagggggagctccttcacattttgcacaaagcacaagtctaaacagcctatgctctggccagagccatttctaagagctttaaaccagaagacctatcctgggccaattttcctttttctttatattattttccgggaaaaaaagta

SEQ ID NO: 251601 - DNA, 377 bp, Gossypium hirsutum
atggtggctctgcagagggcgatggcatgcagccgggcgctcctgttgcccacgcctcccaggccctcacccctcaccatgcctgcgcccagctgctcctccagcgccattcatcccagcaggcagcatggacacggcagctgagaaaagatgccagcagaacgcgcttattttataatatttaataactcagtgccaatctgcattaacacagtcatcctcaggtttttcagagggctgtgtacacatctgtgagaataaatgttagcctctaagttttgaatgaagattctctgaagacgggcagccggtgacctttgttttacattgagcaatttttcaccatctcagccgctctggccattttgaaaagggct

SEQ ID NO: 251602 - DNA, 324 bp, Gossypium hirsutum
gaggctgcacactttagataacttggggtcaggggtgcacactcttggtcgtatgtgtccggtcctgccttctttgatggcataccctttttccctactaacccgtgtagacctttatctcgctggataaatgatcatggtccggctcaaggttgtgatgatgctaagactcagtattgacgctttgaaaagtaaatgatttccatgcattgcagctgatgatttctcctggggcgctaagagctgggctagactggctaaagatacccttattcaagctcctgacaggggagatccttcagttggcaatgagggtgatttcaa

SEQ ID NO: 251603 - DNA, 375 bp, Gossypium hirsutum
atgtgcgacctacatgtattcttggagtcactcagaaaaccatctggacgcagggaccgagcccccggaaagcaaaggagggtagcagcaaacaagtgtctgtacacaggagtcaaagagggggaaccgccgtcccaacatcacaaaaagtgaaagaagccggaagagattttacctatttaatagtggtgctttttggaatcagcattacaggtggcttgttttacacgattttcaaagaacttttttcttcatccagtcctagcaagatatatgggagagccttagaaaaatgcagatcacatcccgaggtaatcgctgtctttggtgagcctgttaaaggctatggggaggtgacaaggcggggtcgccgga

SEQ ID NO: 251604 - DNA, 363 bp, Gossypium hirsutum
atgccggctggtgaatgacacataacagctgtacaatgtggggaaaagacaaattgtccgaagtgctaagaactccatgagagaagatgccataaaataaacacctccctattcctattatctttcaatggttaccttgacttaacctattgagttacctggtcagcactgtgatctttttttctctccaaaggacctgcgttggacaacaataaagaaaaatttaacctatcatgcactgtacacatttcctgttcataagtttgggatttacataacccgcaaccaccatgttcctttgtatatgatgcaacagcataaatgtaagcttttatatcataagttctggtctttccagtcaca

SEQ ID NO: 251605 - DNA, 377 bp, Gossypium hirsutum
atcgcgtgtgcaattagcaatgcagtgtatatacaagaagccatgctgttaacagtttatctcaagtaatttggtgtcatttacaaaaggaagaaattcctgccatcagaagggacagaaggagatggaatgatcaaatcacagagaaacactaaaattactaaatctacaacagctcgccttatttttcttggacccaaactgtcagggtataaacactatttgtttcttttttaaaacatcgatagttttgctgtaaataataacactgtataaattctaacagaaaaatagaataaaatgttgataaggcactgcctcttagaacacaaacagaatattgcaaatgcatttaacaaataggggtctcaagtact

SEQ ID NO: 251606 - DNA, 377 bp, Gossypium hirsutum
atctgagctttttatcagaaagcttttttgatgttttaagtgttatgtgacttgttgaactttttaaaaagtgctacttttaaaatcccagatactctgaattttagaaaacaaactaattctgattgtgtcgtgcccaagtaccctttttttttttttaaacgaatagggaccaatgccacattgctttttatatttctttcttttttaatgttgccaaaaccaaaagtagctttgttttcctttgtattttgctactttgcagtatttgtgtgtggttttttttccttaatttgaaagggacagcactgtgtatgtttataaactaaatgaagataagatattattttgtataaacattcatctgagacaatcaa

SEQ ID NO: 251607 - DNA, 336 bp, Gossypium hirsutum
  unsure (1)..(336): unsure at all n locations
gcgcccacgcgtccgggggaaaggacaaaaaggaaaaaccgttctagggttgccttgaatctctctctttccagatattagataattagaaatagatatgtagggcttttcaatcgattccttctttattttcttacaattagggttntcgaaagaggtaagttgatttaactgctgggtctcattttcttttcttatctttcttgggacagtggtgtcggagtttgggttttaatcgacccaacccttaaatcggtgcttttgggaatcggacttttaacattttacctagaatcgaagctggaaaaggatcatttttttagcgactctttctta

SEQ ID NO: 251608 - DNA, 380 bp, Gossypium hirsutum
atggagagggaaaaggagagggagagggagtgagagagagagaggagaggtgaagcattggatctatgtcaagggacaggcagatatacccagagaggaaaaaaatacttaataaaggaagagtacagctgcaaaacaagacatacaggagctgaagcagacatggcagaaaccagctggagaaagcacaggacaactaggacaatttagttaagcacaatctgtcattccagtatggactaccaagttcaattcaggatgcttcagttgaagacacgtggggtaatgtgctcagctgacgagggtccaaggaggccccattttccctgtcaccctatcctatgctcgtgctttggatcgttagcacactaggaatttca

SEQ ID NO: 251609 - DNA, 379 bp, Gossypium hirsutum
atcgcagctcggagtcagggcttctgggtgagccccagttcccccgcagctcggagtcagggcttccgggtgagccccagttcccccgcagctcggcgtcagggcttccgggtgagccccagctccccccgcagctcggcgtcagggcttcctggtgagccccagctccccccgcagctcggaggcagggcttccgggtgagccccagttcccccgcagctcggagtcagggcttccgggtgagccccagctgcaagcctgtgggtcttcagtgcatgctggctgccactgcgatcacacatgtgatctcacaaagagcagatcaacagcatggtagattcaaggaaacgttaacactgtgtgtttccgatctatccga

SEQ ID NO: 251610 - DNA, 369 bp, Gossypium hirsutum
  unsure (1)..(369): unsure at all n locations
atcaaagaccctggggccaccaggccaggagtgtggaggtggctcccagaggggcctgcccccaagccctccccgctgcactgcctggagagcgccctgagggggatcttgcctttacggcccttgcgctttacctgcgtggcatgccccagccccagccccggctccagctcgagcttcagcggctctgaaggagaagacccgaggccagagcccgagctctggaggccgctcctccaggagagggaccgccttcccaactgtnagcctcctgtccctctgtccccatgtcctggtgggacccctgctggaagcagtggcagcagccctggtgaagaccccaggagaacagagcccaggtactgcagc

SEQ ID NO: 251611 - DNA, 362 bp, Gossypium hirsutum
gcctgagtgaaagttctttgaaaataacgaattgtttcaattcggtaattttgtgaattagtgtttaatttaagtataaggactaattgcataagtgattaatatgaattgatattagttataagatgaaacttgattaggggatttattaaataaataaattgtaacaccccttacctgaatccgacatcgggacagggttcgaggcattatagggctaaaacattaacattcacagaaaaccagccaataatttcgttaaaatttaaaacttttcaatttcatgcaaattacaagggcctacgaggcccaaaacatacattgaaggtggttcaggactaatcgaggactttgaaaacttt

SEQ ID NO: 251612 - DNA, 379 bp, Gossypium hirsutum
  unsure (1)..(379): unsure at all n locations
acaagnnngacaaaaaagcaggctgnnnaatgccgcggtttcccgggttcgccccacccgtgcattccaaacacacttgttcggggactgaaaggtcaaataaatgaaacccatcgacctatgtcgctactaggaacattccgcccttaacgagtgtgatcaaaccctgtgttactggcggtatgtgggattatnactaaattgtgtnagcgctaagtgttagtgtgtttaatgtgattgaccgatttatgcgctcttagactaaactgaatgatactcntttagaatgagatttatttgaatttgttgngaacaacagaccaaggaattggatttagatccactaaaatagaaagttgttggttagtcnatcatttag

SEQ ID NO: 251613 - DNA, 360 bp, Gossypium hirsutum
ggaacagtaccaagtaccatgattttacaacttgaataaattgaataactagaataacaaattggtataaatacctctcgtatcttagccaagttcgaaaatgaacaaattggtccctgaattaaaaaaaaatcaaaattatcttcaaaaattcaactaaatttttttctaaattttataaaaaaaattataaagataacttttatgaaaaaaatataaaaatcacaaaaataatatatataattctaaaaaattatataaaaatgttaattataaattttataagaaaacacaaaatataaatatgaggtcttaaatgagtaaatggccaaatcaagttcaacatactaaattattttt

SEQ ID NO: 251614 - DNA, 363 bp, Gossypium hirsutum
cggacgcgtgggcagagaatgaagcttgcaaaggagctggaattgcagaggatgcagtttttcatgaagacacagctggagatttcacagttgaagcatggtagaagaagtggtggaattgggaaatctagtgatcaccacactaaaattaataatagcaacaataataacgacaacaataacattagtggtaatagtaactaaaattctgtaggtttgtaattggattaggttttagatttaatgtgtcttcttggggcaaatgccctggatttgttgtatttgaactggtagttcttgagtgtattttcatgctttatctgttgtactctttttttttttctggccaacagttcattattg

SEQ ID NO: 251615 - DNA, 367 bp, Gossypium hirsutum
cccacgcgtccgtgtctactcagattttgtctattacatagaggtgacagttatacacctataaggctataacatcatgttgttatagagagatagttattgtaaacttaccatatcatttatgtcgtgaatttccatccaatacaaaaaaatgaaaattatgtttaaaaaaaagaaagagaaagtgataatcaaatcaacaaaattaaaagacgtataacaagcacatttattattgcttttatacatttttttttattctacattctttcacatgattaattataaagttcataaatttaacaagttcaattaattaatataagttatcaaattaaattaattaattaattaattatcataagtt

SEQ ID NO: 251616 - DNA, 387 bp, Gossypium hirsutum
aattcccgggatgggccgcccggctccggcaccaggagctgttccggctgcgcgggatcaaggcccaggtggccctgaggctggcggagctggcgcggcggcggaggcagcggcaggcgcggcgggaggctgaggctgacaagccccgaaggctggggcggctcaagtaccaggcacccgacattgacgtgcagctgagctcggagctgacagactcgctcaggaccctgaaggtgctcatcgctggcgccgcagagccctgtgcccaatgatgacaccatccttgctccccgtgccccccaggggctatgggcgacaccaatgctgcccctgggctgggccagtggggccaatgcccaggggctgaaggcacatggtgctgggggg

SEQ ID NO: 251617 - DNA, 377 bp, Gossypium hirsutum
atgaattttagagtaccattttctttcaggctgccatattatccctgtttccatttgccatggataattggagggtcatagtatagaagcaagagttaataacagaacttgcataagtgtgttaaagttcgtgggggaggggtggcaaataccatattttaagttatgcaattgccattttaagaaagtcaattctattcacttgttaactagaaacattgcctagattgagtttattgaagcaaaaagaaaaggcaatgagagagaacttttatcttccttcctgtcaccttctatatagttgattatgacttctgccagacttagaggaacaactttagttcatttcaacacttttttttgtttttataagagca

SEQ ID NO: 251618 - DNA, 362 bp, Gossypium hirsutum
cttgtattacccttaatattaacccttaacccattattgctgaaatcccctaaattaatttgatccctatttttgttgagaatctgagttggaataattgcttagctatgttttattatattttgtatctagttaacttgttcttaaaaaaaacactatgtaagtctatattctgaaacgaagccctattgtacgcaaataatgattaactctttttctagttaagcaactttttaattcaatcccgattctaaccctttctttcaacttgtgaccacacccccaaaccaagcctcattactaccctctaaagaccttttgattgatgtatcatcttaaattacagtggtggaatttgattt

SEQ ID NO: 251619 - DNA, 398 bp, Gossypium hirsutum
aattcccgggatgtaagaagtacatgaaaatctaatactttctttttcacgattcatggggagaactgtgattctttacatcgctactttatttaagcctgtttattttcctacaaaataccctccttcaaaaggttgaagtgacatggaacaaaacttacatgtgggaattgcaagtgtttctcaaatacaaggttgtcatgaaaaaggggaaaagaaggaattttgttggtgaggatactgtgagatagtgtgttgagtggtaatagttggaaaactgccacctcagagtatatcacataaactgttcaagtccttaaccagcctcaggttcctgaaatcctgggagtatttccttctcagtttttggtgaatgtgtaatttaccattgagaataa

SEQ ID NO: 251620 - DNA, 350 bp, Gossypium hirsutum
  unsure (1)..(350): unsure at all n locations
cccacgcgtccggtgggttagtgggttttgttgtattgggcctgatggcatataagtgggccggttggtttagtgggttaggtggtgggtaaacgggcttaataggttagttgggctgagggtgtatggattttgtaaaggggttgagggtaattagggtctggggttgagcccaaaattggtctgtacatatcaattcaacccctatctccagtttggtttacaaaacactagttttaatcgacgaaataactttttcgatatctcttggttcagcaagcatatgatgaactaagcgataaattgtttaacaacnncnanttgagcaattatcgatgtcaatggaacta

SEQ ID NO: 251621 - DNA, 272 bp, Gossypium hirsutum
atgtaaactttaagaatatgattctcccattcaaattcacagcaaacatctagccaccttcaaaacgaagatacagaccatcatttagcaatactaatacatgattttccttggggatggcgggtttgaaaattctttagcaacaggacatacttgccctaaattacagggaattatttataacgaggaaaaagttttcaggtccaacctgaagcgagggggtttaccacctacaacctttaattaattttcaagaggaaggttttggaaaa

SEQ ID NO: 251622 - DNA, 394 bp, Gossypium hirsutum
aattcccgggatctcagcacccgcagcgccgcatctctacccgattgtgcagggatgccggggggggggggtcatcaggagagaatcctgcgtcgggatgcggggttcatgaatgtttaaaagctttagtctgtggagttcctagtccatcttttttctcttaaaaatctgtggaagtcaccgcaaaaatattgaagaatttaatcaaagagcaatgcacgaattgtagaacacccacctgcggtttgtaatttgttctccatgggagggacttaagaaaatactactataaggtgcatgataaaggaaagcaaattcaataattggttagggagagctatgcagcttcttagttttagatcaaggtggaaattttctggtcacgtatcatagc

SEQ ID NO: 251623 - DNA, 373 bp, Gossypium hirsutum
  unsure (1)..(373): unsure at all n locations
atgtggtgcctttgcctaagggtgccaatgtctcctgggagcctggctttgatggtggctatctgcagagattcagtgtctggtacacgccactggccaagcgtcctgaccgaatgcaccatgactgggtgtccttggcagtgcctgtgggggctgctcacctcctagtgccagggctgcagccccacacccagtaccagttcagcgtactggctcagaacaagctggggagtggtcccttcagcgaaatcgtcttgtctgctcctgaagggcttcctaccacgccagctgcacccaggcttcctccaacagagatatcccctcccctgtcccctccacggggtctggtggcagtgaggacaccccggngggt

SEQ ID NO: 251624 - DNA, 360 bp, Gossypium hirsutum
aagaagggctgcaaaattgaatgtttgattaggtttcaggctattctgattcacattatcaatatataaaatttcttgggttatcccagatccaatccgtctattttgtttgtaaaattaaatgtcgattccacataccatggtgaggtggcaaagtctttgatatcagtctcgggatcaaaacttcgtatttgatcctggaacaatttctacctttcctttgtaaaaaggaaaatgaggagttggagcccaagtgaaaaccaggcttatccaagtcaaaacaaaaaattagccccataacaagaagttgcatggtaaacagagagacaggtgcctcaccttatccaaatcttatatttt

SEQ ID NO: 251625 - DNA, 358 bp, Gossypium hirsutum
  unsure (1)..(358): unsure at all n locations
gataaagttatcatttacccattcttacaacttatctccaccagtctgtactcttataatcttggtagaagttagcgcgatgtgtcggatgtagtaaatggatctccatggcataccggaatgcctaatggcggcaattaatcctttccttatatcgaaaatgatgtaaatattatcgttactaataacaaaccactgcaagttcgtaaagttatcatttacgatggtaagcgctatcgggagcacgttcttgttcctaccttgaccaaccgcaacaagtaggatctgtgtatatttgtcgtatagtcaggtctcatctactngcaaaaacggcttgtaatggggacatgcgcgccgc

SEQ ID NO: 251626 - DNA, 386 bp, Gossypium hirsutum
  unsure (1)..(386): unsure at all n locations
attcccgggattgtggctccagggagggagcgagggcccggggctgggacacctgggactcggaggaggggcaggcggggactggggtgtcctgggtccgctgaggggggcgtgggaatttcagcacttgtctaggggccagcaaccctgcttgtgaggtgggaggtgtgtggttgctaatagaccaaatgaccttccaggtctcactggatctggattttctgtaattctctgatcctgcaggcaacatgagtgagaatgaggaagaggaaatntctcagcaagaaggcactggggactatgaagtcgaagagataccatttgggcttgaaccccaaagccctgggtttgagccacaaagccccgagtttgaaccccaaagcccc

SEQ ID NO: 251627 - DNA, 373 bp, Gossypium hirsutum
gttttacaagcttattaaaagccgaatgaacaaaatataattttactaatagatgaataatattaatttaccaaactcacatctgagcacttgagtgatcgactctagtaattgcttgggggatgatgaatccattaattcgacggatttaatgttggaccagatttcattgcccttcaaaacacaggcttgcttttgacccgtagcaagctctaaatcaatcacgtttcttattatcttgtgactcttacaaaaaaaaattcacgttcgtaatcgtcttgcaaaaatttacagttttctccatcacctctagggttatgttcgcacgttcttaagctatctatttattaattgctctatcaaaattacaaat

SEQ ID NO: 251628 - DNA, 330 bp, Gossypium hirsutum
atgtgtaacaatgatttacatagcatttacattatattaaatattataagtaatctagagatgatttaaagcatacagaaggatgtatgtaggttatttgcaaatcctgctctttccttggattttggaatctgcgggagattctggggatcccctactcccactgtgcatgctgagagacaactgtatttatttgggatttaagcattggggtttgttgttgtttttgagaccacttctctctatgttcccaggctcatcttgaactcctgggctcaagcagtctttctgccttggcttccaaagtgctgggagaattacagcatgagc

SEQ ID NO: 251629 - DNA, 379 bp, Gossypium hirsutum
atgaaaggagaataatagcatgtggcttgtaaacttaacaaatgtaatcacagtaattgagaagcccaggaaataatttgaccagcataattatattacaaattgcatattgcgcaattaaacaattgcattttggccacaaatggaactccaagtatacaatttgtagtgaagtggagaggtaatttaaaataagaaaagaaaagcaaaggcccagaaatacatttacatttatatccatattggagggcataaacaaagtaataaggaaaaaggtcagtgttttcaagagaaaataatacaactgactcaaacgaattttgccaaatcctttgtggatgttttaccgctatttaactttccaatgtgcataaacatt

SEQ ID NO: 251630 - DNA, 386 bp, Gossypium hirsutum
tcaaagtatccatttcacagcatttaccaatacgtccctttcatctcgagtattcctccatttgagtagaattttacccgttgaacacatcggaatataattcggatacatggaaattttgcacataagtgccacatatgtagccaagctaccatgtaacccgcccataagtgaactcagactcaactcaacgagctcgggcgttcgcatccataagttaactcggactcaactcaacgagctcggatgcctagttacatctcacgaactcggactcaactcaactcaacgagttcgaacatttgcatccataagtgaactcggactcaactcaacgagctcggatgcccaaatattccagtgacatgtcacttgtatcctaatct

SEQ ID NO: 251631 - DNA, 203 bp, Gossypium hirsutum
catcaaaagcagctggtccttgtgccgctcaactgtcctagtccttcgtcggtaagcgccccgccccggggcctgagctgcatgtctcaggcctgcgcctctcgaccccggctggccttgctttgagctgcggaggcctcgccgcgccttcaccgggaacaaaaagcggggtgggccgggccgggcggactggcgttgtgcgg

SEQ ID NO: 251632 - DNA, 401 bp, Gossypium hirsutum
atctctgatagctaccagcttaatgtacccagcattcagcgagacacacagcgcaccgacagaggggacatgggcagagcaatggtggtcagacttgggctggggctgctgctgatggcactgctgctacccacgcagatttattccactgtaacgactcttgcaccactttcaagtaactcctcccagaatacttcgactaccccaaatgcagctaataccaccaccaaggccgttggtggtgccctgcagtcaacagccagtctcttcgtggtctcactctctcttctacatctctactgttaagagactcaggccaagaaacatcttctaaacttccccatcttctaaacccaatccaaatggcgtcttggcaaggaaaaacaggtcttcattgaatc

SEQ ID NO: 251633 - DNA, 402 bp, Gossypium hirsutum
  unsure (1)..(402): unsure at all n locations
atccggcctcgctatgtctgccattttcaactttcagagtctattgactgtaatcttgctgcttatatgtacttgtgcttatattcgatccttggcacccagcctcctggacagaaataaaacgggattgttgggtatattttggaaatgtgccagaattggtgaacggaagagtccttatgtagcagtatgctgtatagtaatggccttcagcatcctcttcatacagtagctggggaaaatgccagaatttaattgccgtcagatttcattgtgaacaaggacttactgcagaaaataatggaaaggatggttaacccttttatctctgaacattgaatgagataaatttccagatgctgntctctatttttatgttattggaccaatgttctgtataat

SEQ ID NO: 251634 - DNA, 291 bp, Gossypium hirsutum
gcaccagctccaaacaatgtgaacgccgccatgaatgtaatagccaatttgcagcagcaaaatcagaggattttgtttgatgtcgcaaattctcgcttggggatatctcgtgaagcttgtaactaggcttatttcttgtcgtttaggctaagtttctggttttatttaactaaaaaaagaagaagatggtgtagtaagttcaataaacacaggacaagaaaaaccctgttgcattggttattttaagttttcaatgaaatatcaaagggatggaagaaacctctgaagttt

SEQ ID NO: 251635 - DNA, 286 bp, Gossypium hirsutum
atgcgtgattcaagccaggatggaggagggagaactggcatgcagttccaaagtagagctgataggacttgcacagtgtctaggatcttatccagtgaatgcccagagcttgggtctggaggatgagaatggggccagaagcgggtttaatctgccaagggttggggatgtcatttgctcctggagctcccaagggacttggggaagtttgatcccaacccctttctttccttcccaggggctgccgggaggctatcaaaaggatcgcctacgagtttatagagat

SEQ ID NO: 251636 - DNA, 358 bp, Gossypium hirsutum
cggacgcgtgggctttagatgaagggtggcaagaagccaattcgaaaggtcggtcaggaaatgccactggaaagaagtatggaaggaagaaaccagtttttgcaaagctaaaggtgaatggttgtgaatattcaaatggtagagagagtgggagtaggcgagacattatctcaccagcaggaaaaactgccccgaagaacattatacgggaaatgcaaacagtaaagtaatccaagtcttccagcttgaatcctagagggacttcaattggtttacctgcttctgtttccagaggttcctccccttcagcaaatcttagtgccattgcttcaaaatcactttcttacaaagaagtagc

SEQ ID NO: 251637 - DNA, 405 bp, Gossypium hirsutum
atggtacttgataaataatcatagtcttaaatgttagaaatcctatataatattatttatttaaaattgcagatttttagtttaaaatacatttttatttttaaattttgtcttttcccttttttttcagatcaacaacccctccccgtcgtaaacgctgaggaatgatgtggcaagaatgccatgatgttgtttaaaaaaattccatgagttttaagggcttgtctcattatagaggcacattgtggctgttttatgtgaagaaccagctcagttggatactacagattaaaccaggggttttcaatgaatacagaaccatgtggttcaaatcctacaggatgaccttttcctgtctgaacagaataaagagtttcaggtaccgttgggcgagactgtacagta

SEQ ID NO: 251638 - DNA, 372 bp, Gossypium hirsutum
gctctgaactctatgagggtggaaacatccggccaaggtccggtcaccagaccactgtagtggccgtcggtcgtcgatgacggcgctgccatccacgcccattttttatcccttttcagatggatttgaggatcaagccctcctagcccaaaaatgttttaaaaaaactttgtcctctacttagaacgattgtaacatcggggaggagctcttacgacaacgagaaggccaaacgactccggggagtctatatctttctttacctttgtcgcatatgtatataaatataaaatatgcgtgaaaaaaataaatgcaaaataaacaagaacttaaaacataagtcgacaactttgaagcttttttttctctgca

SEQ ID NO: 251639 - DNA, 382 bp, Gossypium hirsutum
cccacgcgtccgtttggcagttttactacaatattgagtggcttgaccacaatgttattggatggcttggccacaacgttattgagtggcttgaccacaatgctattgagtagcttggccacaacgttattgagtgacttatccacaacgtgcaacttgattgcaatattgagtggcttggtcacaacatggtgtgttattggatggacgagttctagggaactctataattgtgtgtagcgaagattggtaggaattgttttgtaaaaattgcactaatttctgaaaaagctgcatcaacattctcatgcaccttgctatatgtgatattatgttgaaatataagtgtttccatatatataaaatatatggcttaaatatt

SEQ ID NO: 251640 - DNA, 388 bp, Gossypium hirsutum
cccacgcgtccgggcatgtatagactagattatgttttggaatattgtattttggtctatgttaaatgtgagtcattcgaaaatggcttaattgctatgcttgagttcggtgttggttaaattatagtttaagtttattttgattattatgacgagtaccatggttgactataagttatgttatgtgcttgtattcggaaatgatatggataattaggttgtattatgttttaatgaatgaaacttggtttgattattaatggtttaaaaatgttaatgagatacgtggatgttcgaatatgaattgattttgttggtatggtttgcatggtaaacgtatgtgtacttaaagtgatttaatgttatatgaaagttgtataatgtatat

SEQ ID NO: 251641 - DNA, 394 bp, Gossypium hirsutum
gcgtccacgcgttcgaatgtatgaagttatagaaaacacaagacccaaaagttaggaaaaaagcatttaggcaacaccaagcattaaaaataaatacctcatctgggcctgctgtgaagaaatatatgagattaatagtagagaaaccagatttggtgatctatggaagagcactgtaacaaaaagaaatactcagcatcatacatacacaacacaaatatatatatcagataaaacatcagggcacagaagaatatctgaccatgagacttagaaatctcaaatgaaaaacattttaaacctcataataaagtagatacccattttcaactaacctttgcaccttgttttcctcacaatactttgcagcatctgcaggttccatatcagcaag

SEQ ID NO: 251642 - DNA, 233 bp, Gossypium hirsutum
cccacgcgtccacaccggtggactcattaaaaacttagaacccataattcaggaaaaaatcatttatccaacaccaagcattaaaaataaataccttatcctttactgctgcgatcaaatatattagattaaaactatacaaacacagacttaacatgttcttaagagcactctaacatatagaaatacctatgatgactcatacacaacacatatttagatatcagttaaaa

SEQ ID NO: 251643 - DNA, 296 bp, Gossypium hirsutum
atgctctcaggagggaggctgccccagccagggggggggggcccagaagccgttaagcggaagcacttgccttcaaaagccgtggccaaagggggcctcacgggcgacgacggagccgggatccgtgcctcagcgttcgggctggagacgaggccaggtctacagtcggggtggacgtgcccaccagctgacgaaggccgggacgccaggttcggcggacttgccgagcgggacatgacatggttcggtgtgactgcgaggacagaatgggcgcgtacggccttactgaacaccct

SEQ ID NO: 251644 - DNA, 361 bp, Gossypium hirsutum
  unsure (1)..(361): unsure at all n locations
atccctcttcttcagtggccccatgccaggtgctcagaccacccagacctggccacagtgccaccaaatctagcccgtggtggccatgaccacctgggccacaccctctttggacgctcagcaaggcaggggcctaatgcccttcaggcgttactcaggcgagtcaggcctggcctgcctctgccaaggcgtggggcacgctgggagaccatctgggggtcaggatggggctgtaggtggagacacccttaaggccagtgcctcccgtgcacccaggccttagccctgtgctctgagctggcctggccaaggggtggaaacggccctgtgcccaccggctcccaggagagcttncagggga

SEQ ID NO: 251645 - DNA, 348 bp, Gossypium hirsutum
atctctgataatgagagggaggacaagggggcccatgggcccaggccagacactgttgggcagaggggaggttcccggcccagcccgggtcctatccgctgcaggcatcgatccaaggtttccagtaaccaacatacaccatctcatccggaacagcggggttcggcttctcctatggcaggatctggggcgaaaagatcaagagatggtgaactggagaccagtctaaacatccaaggttgtaccacagagggagacctgctgtttgcccagaagtgtaaagaactccaaggatttatacctcctctcacagatctactcaatgggctgaagatgggtcgttttgag

SEQ ID NO: 251646 - DNA, 408 bp, Gossypium hirsutum
atggatcacttgagcctgggaaatcaaggatgcagtaagtcgtgattttgccactgcactctagcctgggtaacagaggaagacctcatctcgaaaaaacaaaacaagattactttcttgttacatttagtcttcagaggattttgctaaaaaatagctaacactatacaaattcttttagcatccttgtggttttctaaaataatcatgctatcttttttactataccgaatgttgctatttataatatttatccaggatactttatttctggctcttctttttggtcccacagctcagtttctacatggaatgaagtggacaagaaatttacatttgatatttcattaattcaggcattcatttagtaaacatctcataacaattactttatactcggcactacgt

SEQ ID NO: 251647 - DNA, 257 bp, Gossypium hirsutum
  unsure (1)..(257): unsure at all n locations
caagagggaacgcaggagcgcgcgcaggcaccggcccggaaccccgggggcgacccacgcgagcggaggacgcggggaacggacgcgggggcagacacgagggcggacgcgaagggcgcagacacaaaaaacaccgagaaaggaaggacaaaangcgagnnaaagggccaaacagngcaaaggcagcgacgccggaaccaaaagcgcgagaagcagggagncagggaganggcgcgagaggacaagaaaaaacaaag

SEQ ID NO: 251648 - DNA, 271 bp, Gossypium hirsutum
atgcggcaccgcgggacgggacggagcgatgtcaggccgaggcgcgggcgggttcccgctgcccccgctaagccctggcggcggcgccgtggccgcggtcctgggagcgcctactacatgcggcaagcccggtaatgccgcaacaaacggtggttccgtgctcattctttcctgttgaataatagctggcaccgttattgcactcactataggcacgccacttttctttattttaagccaagttattggccctgctctcattgcaacagct

SEQ ID NO: 251649 - DNA, 382 bp, Gossypium hirsutum
ctcatgccatgaaaagcctacctccacgattaacccctagtaaacccccttgagcccaacaaaccaattcttgtattacccttattatattaactctttttctagttaggaaacttttcaattcaatctcgattctaaccctttctttcagcttgtgaccacaccccctaaccaagcctcattacaaccctctaaagaccttttgattgatgtatcatcttaaaattaaagtggtggagatttgattttcatgcaagcctatggtaatgactttccattattgactattgagtgcttcctttattatccttaaaacacctcgagcgatttgagtgaatctttagtgaggatgtaaaactctgtgatatcctgaattaaaggt

SEQ ID NO: 251650 - DNA, 318 bp, Gossypium hirsutum
atagcgtgtaccttaaatgaattttggggtaagaatgtgaagtatcaaaaaaaaaaagtagcctcttctgtattattacctatttatgcctagtgttccgttattggaacgctaagcttatggaagttatttatatcctactgatcaaggtcactcaggtctgatttttcatttaaaaaaaaaaagtgcaacctccagcataaattggttaataacttagattcacgcctgtaatccgagcacccttgggagggccggggcgggtggatcactttcggtcaggctggtcttgaactcctgacctgaggtgagccacct

SEQ ID NO: 251651 - DNA, 385 bp, Gossypium hirsutum
gaaatatgtaagtatgtatgccatatgatttatgatatatgtaagtatgatatatgattatgttttgtttttgtttttgggtggggttatgatatgatggatgaaatgttatatggcagtttatactgcaattatagtggctagactacaaatttatgtacgacagctcagctgcaattatatgagtggcacaccgccacctattggtgtgattggatggatggactctagtagccctatatggtgtgaacggctagatggagatggtgtgtagtggatgggggtaggacataatatgctttggtatgtcacgttatgatatgatatgatatggcacaatatgttatgttatgataaaatatatcttgatatgaaatctgatatg

SEQ ID NO: 251652 - DNA, 384 bp, Gossypium hirsutum
ccgacacgctccaggccaaggatctgcgtgttttattaaaatggttttatttccgttttagtccattcgctttttatcattttacaattaactttgttatgcttttaaattcgcccctcttattttgtttcattttcactttggtcccgtttaagtgcagcgctttggaaggaagggaaaatttactttttaatcccccatgccatttgtgcatttcaaataagtcctccccctttccttttatttcagattcaccccaaatgtttgttttaacttcgatttcgtcccttttcgccttttaattaatattttgcattatttctattattattattactattattatactttattattattgtattttaatatcatatctattat

SEQ ID NO: 251653 - DNA, 376 bp, Gossypium hirsutum
tcgggtctttatcatttataactataaactggtacgggcaaagatccctttccagcgaaaaatgggagcgaaagaaaaaacacggggatgccagctgccacgtgcgcctacggctattgctgctgcatcgccaactcttgtgctatcggctgaggaggccgtggcacgaggaggtggagagatcatgctttttggagacagagaggcgggtgatggcatgaggaatagtgtgagtctgaacaatcatgatcactacgatcaacctgatgaatgggacaagaattacaacaaggacgacagagatcaaggcgatgatactctgaccggcaggtacgcgtccagcgacgatacctgtcgtcactctaccggaaatcga

SEQ ID NO: 251654 - DNA, 260 bp, Gossypium hirsutum
tctcaacacactactttaaaacagcccgccttatattttatactaactgacaacccaataagccacaaccattacatcttatccctaacacaatttgacattcactacaaaacactctaatcttagatctctcaaccttatttactaacaattcatgatcctcataataaagcaacttgatcaactttcataccatattccatttggactatctagtattgcacactttcatacataataacttattattaccatcttat

SEQ ID NO: 251655 - DNA, 336 bp, Gossypium hirsutum
atggaatttgcaggggaagataattgggcttttgctagacttagaaaaacttctatttagtggagatccttgttagacatgagtacaatggtgactactgaaggactcactgctatggtatctttaagcaattggggcaaattcaaattaacaaagtttagccaaatggacaagtcccagttttgtcagagagataatttggatccacctatcttttattaaaaagtgaactgtgttactatttcatggctagagttccaagtaaaagctattggactaagttttggttccctatcttaaaacaggttttttgttttttttttaattggctttatt

SEQ ID NO: 251656 - DNA, 341 bp, Gossypium hirsutum
  unsure (1)..(341): unsure at all n locations
tcgcccacgcgttcgcccacgcgtgcgtggttggataagaacacaggtggggtttgtttatcaatgtcttctaaggcgttgacaattacagggattgatgatcggagatattggaaccatatttccaccgaggaatctagatatcgaacagtagcctacctgcaacaaacatggtggttcgaagtcgatggagagctcgagtttcaattccctgccggaacatattccctattctttagactgcacctcggaaaatcctcaaaaagactcggccgtcgggtttgcaacaccgagcacgtncacggatgggacataaaacctgtccaattncaactaacaac

SEQ ID NO: 251657 - DNA, 383 bp, Gossypium hirsutum
atggccccctcagttggccaagatctttggcacaggggccctgctgccagagaagcctcagagtcagttttggctttactgtgtgttgtccagctgagtcatcctgggtaaaggtcttctgaggatcagtttcccacctgcacgatggggatagggtatcagcagaacacagcagggtaaggcactcaggaagccatcagtgggtgttagccaataacactgctctcattcttcttcttagagccccggacccaggaggcccaaggagctggaggtgaccctcaggcagcaagaaccccgcggaagggcgtgagccctgcagacagctgtgcggcacctcgggctgggctcctgttaggaggaagtgcctgcgcccaggcagc

SEQ ID NO: 251658 - DNA, 335 bp, Gossypium hirsutum
gaacaagagggaacgaaaaagcacgttggtacccgtccgcaattttcgcgataaaaaaaaaaattgttttcacctgttgcctttcaaacgtcagagttgcagtagtataaacaacaaagcacaagtatagagaatgcattattttcaaacctattaaaaatgcatatcaataggatgttcttgcaagttggttacctagctgtgctgatatgctaacacctgctatctccaacactcatggtggctgaggctggaatgtaggttgagcttacaagttcgtgaccagacttatcaacatttcatgatactatacttcacaaaatggtaaaaaagac

SEQ ID NO: 251659 - DNA, 387 bp, Gossypium hirsutum
cattcctaaaaaattgattgcatgaagagtgacctgattcttgttacctttgcttgtcgcaggattttaacgttgcttatagacagatatattgaaagaatttcatgtagaatgtgcaacctggcttatgttacttgggtggtggctcaaaatctacaggtattgcaacatcttctgcttcttcctctctatataaaatttcttgagttaattgcaccaaacatcctcaatttctttttattacagttaagaagaggattggatggtactggttctatgattatatgtgcttgtcaactactagtttgagtgaaaaacaaagacattttgtgagcaaagtgtcctttccttctaagatgtattttggtggagctattaaacttagtt

SEQ ID NO: 251660 - DNA, 164 bp, Gossypium hirsutum
tattcctaaatatttgattgcgtggcgcgtgacctgattatggtcaacgaaaattctcatactaaaccctagctctgggaaaacaaaatctgataactaaagtaaaaaaaaatggctttgctcataggctctacagcttgtgtgaacctctaaaatacacttgt

SEQ ID NO: 251661 - DNA, 374 bp, Gossypium hirsutum
cccacgcgtccgattgtaagccattatataaatgctagataatcttttacaaatgtgaaattgttggcatggttgaatttatgaaatgtatataggtcttagctatggttgttggttgataaatcatattaagttagattttgatatgttgattggtattaaattgtgtttcagggtggcacagggctttgtaaatagccttatattgtccacacgggtagacacacgggcgtgtcttgtaataacctgaattttaccgttacagaaaaagtgtattttcgggtctccgtttctgaaaagtagattcgtaaatatttttaataaatgtttacgaagttaatcgagtggttaattagagtttaattaagtgaatt

SEQ ID NO: 251662 - DNA, 376 bp, Gossypium hirsutum
attagctttcgcattcatccgtctcattctttatcactcatccccaccaaaaatattgttgcccctaactctatcacaggttatagtaacgagctcaccgcctttagtggagatggataaaacaaattacttgattatactgaaaggcccctatgttttttgtctttaacttatgtatgggttttatagagtatcatcctttgatgaggtgaaactcattgtcatggtcgcataaccactgccaaccggggcctcatttatgctttatctcttgacaacataatttttgtaaacttgaagccctagttacacttcaacccaagaccgtataatcaccgtcaattgggaccttgagttgcaacacgatttggtttct

SEQ ID NO: 251663 - DNA, 327 bp, Gossypium hirsutum
ttatgtttcactggcggaaacaagttattctcaaagatttggtctgtattaaatttaaatgtccatgtcgatatggtttaaattctacatgctgtaaagctgcagagcagaggaaccataccagttttatttgcgctaccattaggtttttttactgtgaacagactctttatctttagtcacattttacaggattattttcattatttctttagtgtttgattttttcccttctttttattccatcttgttttataatctatatatatattaagtctttttttctcatattatcttatttagccttaattttaatatttttattat

SEQ ID NO: 251664 - DNA, 293 bp, Gossypium hirsutum
cttgatttttatgtatgggtgcgggggtcacttccatctgctggagaacttgttccacacgattacattctcggaagatctggttgactgattcgtcttgtcgaccatataatggacatatagcatcaaacctcatcctacgagcctttatgttacttagtgtaagcaaataattgcttgtaattctgcataagctgattcctaccttgctaggaacttttaggctccataatgtccgaataaacattttttgttggatctggatgatttgccttcccatagaccagcatgtc

SEQ ID NO: 251665 - DNA, 401 bp, Gossypium hirsutum
atgtttcactgggggaaacaagttattctcaaatatttgcactgtattaaatttaaatgttaatgtgaaatggtttaaattttacatgctgaaaagctgcagagcagaggaaccaaaccaggtttatttgtgctaccaggaggtgttcttactgggaacaggcctcctatctttagtcacattgtacaggatgatatccatgagtactttagtgtttgtgtatgtttttttcttttaaatagaacttgtttttataattgatttaaaatagggctttttttctataaaagccttaatgagccataattttaagaatataagaataatgactatgatattggtcagtcttagaacataaaaattgtagacaatgaatttaatcgggcccctggtggaaacat

SEQ ID NO: 251666 - DNA, 366 bp, Gossypium hirsutum
gctagaccattcgctgatcttggagtatattattcaaaccttactctgctaggtctggactgtagttgttgaatatcatgaatatagacccctatttgcgatttatcttcccctttcaccttgcatttctttattaccgataaagagtcgccttcaataatgatttccttctcttgcatgtcgagtgctatttgggtcgcttttctacaagtgagtgcttcggctgggaaggcggaaagaactctgtagtgaatctctgtgcatgttaagaggacaaaaccttcgctatttctgactactatcccgaaagccgattgtcagatgcgctcattatatgctccgtcaaagtttatttttactatttga

SEQ ID NO: 251667 - DNA, 374 bp, Gossypium hirsutum
gctttaattcatcaataaaaaaaaacttgatagtgaattatagtagtaaatgagactttaatttaatgaagcttttagttattatgctcaagttcctagtttagatttaactttgatttgttagtttaatagttgaattagtaatttaattatttaataataaaaagggatctatgtatactgatgtaaaatttaagttgttttacattcttctgtaattttttatattattaatattttaaaaatccaaacattatattttatgttccatttatatagatcatacatgtcaagtttggcataaattaaacatttctaactattcgttttacgtaaaataaaaattcaaccgttaaatatatattaatataaac

SEQ ID NO: 251668 - DNA, 296 bp, Gossypium hirsutum
acactatataacaagagggaacgcaaaagcacgctggtgccccgccgcaatttccgggatgggcccctatcctcagccctctattgcggcgcctgctcaatggccccgttgtaaaggaggccggctgaatggaggggtagagtggtctgcctctactgtcattaccctctctcaattgagctaaactgagacattaatcatagctacttgaacccctgaactgatccttgaggcaaagaagttcgaagcacatacacacaaatgccactcggctaagaatccaaccccgtgagagc

SEQ ID NO: 251669 - DNA, 369 bp, Gossypium hirsutum
cggacgcgtgggaactcgacattctagatttggaattttggtgttgattactgatgtaaatggtcatttttcagcctttaaaacactccttttgagttgcccaaagttgtccccacaattgtcaccgttggtggtggttgtggcccaaaaatctttcctttttgtgactatcgatttgagttttatttagtaaagtatgctgctgttccagccttgatttttttttcaagcttaaaacagtcccttatcatcctttaaacaaatatttttggtgtttctcaaaatagtcccttcgtagccaattttgttgatgtgttgctcctagatctaccattaggggctgccgatttttattatttttaccactta

SEQ ID NO: 251670 - DNA, 391 bp, Gossypium hirsutum
atcgcctcgtgttctcttcgcaggcagctacgtcagcgaccccagcaacacggccaacgtctccacttctggtctggaggtctacccttcgcgcacgcagctgccgggtctcctgccccagcctgtgttggccggcgtggtgggcggggtctgcttcctaggcgtggccgtcctcgtgagcattctggccgcctgcctcatgaacaggcgcagggctgcccgccgccgccgcaagcgcctccgccaagatccacctcttatcttctctccgaccggaacatcagctgcaccctctgctctgggctcaggcagtcctgacagcgtggcgaagctgaagctccagggttccccagttcccagcctgcgccacagtctgctctggggggatcct

SEQ ID NO: 251671 - DNA, 317 bp, Gossypium hirsutum
gttctagatcgcgagcgccggccttgtttttttttttttttttttttttttttttttttttttttttttttttttttttttttttttttttttttttttttttttttttggaaaagggaaaaaagaaaaagttttttaattttttttaaaaaaaaattaacttaatttggcaaccaagcacaggttaaaacctaactaaagggtggaaggttgttaataaattgggcgaattctttttaaaaggaataaacctttccaatgcttttacaaaaaataccttatggttgggatttatgagcattttaattgaagttttt

SEQ ID NO: 251672 - DNA, 382 bp, Gossypium hirsutum
cccacgcgtccgccccaactgaacggctttgagacccagtctcagtagtaggcgaaaccgtcgtcttactcatatccaagcttggcatactgcccagagaggaacactcagctcgagccccctacagcctctaccacggctgcaagttccacgtgtgctcattgtgtatttcaatttttatctatattataaagttttatgcatcaattctagtgtttattagtagatattttatgcataaattattagtaattcagaagtgtttcagagatttcagtctctatctagctctgtatagtttcagaaagtactaactacagtgtgtccaaaatattcttatcaaagctcaaaaatatttatagaatcagcgttggagactttg

SEQ ID NO: 251673 - DNA, 395 bp, Gossypium hirsutum
atgtactaagcacaagacaattctggaggcccgaagtgggctggggcccatcaaagcttaccctcggctggggcctcccaccccgggggaaccagaggctcctgcccaggaccgaactttccactgtgagatctgcaatgtcaaggtcaactcggaggtccaactgaaacagcacatctccagccggcggcaccgagacggagtggccgggaagcccaacccactactgagccgtcacaagaagtctaggggcgccggggagctggcgggcacgctgactttctccaaggagctgcccaagtccctggcgggcggccttctccccagccccctggcggtggctgcagtgatggcagcggcagcaggctcgccgctgtccctgcgcccggctccag

SEQ ID NO: 251674 - DNA, 243 bp, Gossypium hirsutum
atccgctccgggcgggtcccaaacacggttttcccgcggcagaacccttggcccgcccggggcagccgccgcccgaacccccgggttccggggggcattgagggggcatgggaaggggcactgttcctcggccattacttaaagaaacgggacaatccggccttcccgccggccctccttttcttgtgccggggcccgcgcaattctgcgacagagggacagtcgccccaatatgtaaagacc

SEQ ID NO: 251675 - DNA, 380 bp, Gossypium hirsutum
  unsure (1)..(380): unsure at all n locations
attatttnccttaaaacaaaaggagtttttttaagaaaaattttccctcaatcctcttactgccctctttcccttcgatcgatctacgtgcgacggtggcaccaaacacacctactccgtcatggtttaagtcgaatcctcaagatccatctacctttggaccggtgaaacaaccaccgactagatctgcgcagatcgataggtaagagatctttctttttcctttgtatttgctatgtcgatttcttctaaaaaaatgatctaggatcctttctctttttttaatatccgtgtatacggattgaggaaataaaaacaaaaatcaaagaagaaaacgatctaaaatccncttaaaaattgatttcgaattgatttttctc

SEQ ID NO: 251676 - DNA, 380 bp, Gossypium hirsutum
attttaacaaaaaaacagcagccctgggattaaatttgcttgggttcttagtgtttgccgaatcccccattttgcttggtaaacggcgatggaccaacatcgatcaaattcaatgcgcgcccatataaaatcgaggaggcgtgtgaaggaggccgcgcgaggagccactcgtgggagtcccaattctctggcctattctggcacgttccagaagcttctagtgctgctgagataattttgggtgtattgggcctcgggttttaaggcttattgggattgattctagggttgtgggtttattttagtattttgaaaattgtaaatggactttttgaactaattagtcttggaccttatttatttatttgggtttatttatt

SEQ ID NO: 251677 - DNA, 382 bp, Gossypium hirsutum
aaagcattcttctccactcaggccggaaaacagaaccctccatttccatctttcaaagccgcgaaatacgccataataaccgagaaggaccctgaaaagctagcggaaatcttcgaacaatgttcccatttgcccactttcctccgccaccgccccatctaccacctctccatccgcaagctagcccgtgccaaccgcctcgacctcgtcgaccggctcctcgagacccaaaagctccattctcaagacacccctgcgctcaaatccgaaggtttttggattcgtctcattatgctttactcaaacgctgggatggttccacaagcactccaaacgctcgacgatttgtctagaaacaggtattgtaatatatctgaaaaat

SEQ ID NO: 251678 - DNA, 377 bp, Gossypium hirsutum
ccttcaccaatttttacaatctccaacaatagaagtgagtagtggatttcatagggaagcgtattgatgctgatagaatgaggattagcaatttgtaatctgtcttggtaccaaagaaaataattttttgaagtttgtggtgtacttccatggtgtgtgtaggggtttatttatagtgttaaaaaaaaagttcagtgaaaaattaaacttataaaatttgatttttttaaaacttatcaggtatatttaaaacttttttttattgaaataacttatccgtataataaattaggctaaaaataaatcatgttatattaatattttaaagatttactaatatctattttatcaatataaattttttagtattttataaa

SEQ ID NO: 251679 - DNA, 375 bp, Gossypium hirsutum
aataaatcgtccggttcagagtcggggaacaagtgaaatctaggtggattcctccttgggtgtcgtctttatcaattgcttttcttcaagtctttttccaaactttctctttgctttaattaaatcagttaattagtttaaataattagttattaaaacaaacccttttattcttaggctagataataaaaagatatttattactagtacttttggttcccttgggtacgatatcccggtcttgccattgctatactattgttcgataggtgcgcttgccttttccttgtgataatagttagtctaggtttgatcttcattataaatatttattacttgttacgaatcacgtgatcaggttgtcattcacgtact

SEQ ID NO: 251680 - DNA, 399 bp, Gossypium hirsutum
atgcatcctccatacagaagcacaggacagtggacggggggagcatcctccatacagaagcacaggacagtggacggggggagcatcctccatacagaagcacaggacagtggatggggtgcttcctctttctcccgtggacactatagtctcagcactgtttctggcacaatctgtgttctcaacaaatatgtatagttgactgactaataactatagtgatgaaacccaggatatcttagaagagttgtcagtgatctgtcccttttccctcaaacctcagcctctttcagagcctgagactggattgctccatttcctggtgacaaattaggaggaagaaggaaactgcacatcccccacaatcctcgtctgttttctgtcaccataaaaatacct

SEQ ID NO: 251681 - DNA, 394 bp, Gossypium hirsutum
atctttgaaggcacaaccatggcacgatctactacctatgtttgtgcctgatggcagtcatcaaaatgccagcccaagtacacaaggcaattcggagccaaaactgagtagggatagctgtgttatttacgtgcactaaacacagagctgagaagaaggagttctaatctccagtccattactgacttacttatagggaacagtcacttacacattttgtgggtcagttttccttgacacataaaggtatttcaaaggttactagtaaacaaccccagcacactttccaaacagtcaaagctgtatgactttccccccttagaggatggagcatggcccaactccacattcttcactacctatcaccttgccattgtggcaggtacacataaat

SEQ ID NO: 251682 - DNA, 345 bp, Gossypium hirsutum
cttaactactaaaaccctaatttttcatttttcatttgagatatatatatgtgtatgtatgtttaattgtatataccatcattttattttctattttgcagttgggcaggagagactgagccagaggttattttccgtgacattgttcaaagacttcgccataaatccactggtatttttgctttattcaaattatttttaacaaaaacgaaaaaaagaagaaggaaattctctaaattatacgagttatatatataatatcaaaataatatttacgtatacaaagccaaatttacagtaataagaaaacctaaaaacgacaagcactttcaaatgaaacgcaag

SEQ ID NO: 251683 - DNA, 392 bp, Gossypium hirsutum
atccacgtgtcgagcaccttgttcctgggggtgttagtggcactgccccccgacctccaggctttcccagttcccaccctgcccctcagagactgaaattacgggtacctgaagatgggagcctctaccttttatccaaaaggtttattccagaaactagtgtacatttctataaatagatgctgtgtatatggtatatatacatatatataaaatatatggaagaggaaaagactggtacaacggaggcctgcgaccctgggggcacaggaggcaggccccaggggtctcacccatgcaagcaggagcagggccttttctggcactgcagttttgttttaaaactggacctgtatatttgtaaagctatttatgggcccccggcaccctcg

SEQ ID NO: 251684 - DNA, 396 bp, Gossypium hirsutum
atgttttaaattctgacctcctgagatactgactagcaaccatggaatgaatgtgtgaccagaaagtggctttgacaccaagtgctgctgtccctttgtaattggcttctaatggattcaaccagaaacaattgataatgtgaatttttgttaattgttcacttgtaggaaaatagaacatgtatcacccttaggtagacatgaacttttcctgcacaaagccttgcttttagagaatgcccaataaggcaagaaaaagcatagtaacttgtgctttgagagctcaatatttgtatcttatcagtacagaagaaatatttctgtgtaacttgatcttctgtctagtacttgtcttataggtaaccaacactgaaaactttgtagtgatgactacca

SEQ ID NO: 251685 - DNA, 361 bp, Gossypium hirsutum
ctcggttatgcttctattcggccaagggatgaaacaaacaaacttgatattattatgccattcttttaaatgatttcattatttaaaacttactaagcatcgaaatgcttattctctgttttatagattttgttcgtgaactatcggactcgggagtgtcaaagtcgaagtcatccacactatctaagccactttttggtactcttcagttgaacttgataatggcatgtatagggctgacccttgatgttaattaagtgtcttttggtaatgtatattcgtatagccgtgcgaaaatggcttgcttattttaacattatggtcattttgtatatatgatcttatgacatggttattaagt

SEQ ID NO: 251686 - DNA, 378 bp, Gossypium hirsutum
gatttgagtgatgttcccgtttgtttcttttgaaaataaactcattcaggattctaaacatataaatttaagtccttatttttattcaatttttgatgattttccaaagtcagaacaagggaacccgaaatcattctgaccttgtctcacaaaatttattatatctcatgatttacaattccattgtttacatcatttcttctataagaaattagactcaataagatttaatttcatgttttattcatcctctaattcgatttctattttttggtgatttttcaaagtgatacaactgctgctgtccaaaattgttttatgcaagatgttaactaccatttttgcctcttaagctttaataagtgacaatttcatcac

SEQ ID NO: 251687 - DNA, 378 bp, Gossypium hirsutum
ctctattcggccaaagttccaattctaatacagttccccaggatatcaacttgaatgcaggcttaatggatgatgataataactgtcaagatacagaacagtctaatctgtataagcctagtggatctcaaaatgagcggatttcagcttttactggtcccgaagcttttcttctttcatctggaagtggtgggtatgtcatgggtgataatgatagaagacctgtttgcccttatgagggccgtcgtgcatcctgcaaaagaaagacacttgaaggaaatgttgggcagtcctcatcaagtggaagttctagctactttcatcgaggtgaaaatagtgggtgccgtggacttcctgttagctatagcactggaagta

SEQ ID NO: 251688 - DNA, 159 bp, Gossypium hirsutum
ctttaaccttgcaggtgggccttgatgtgagcgtcttgtaccactggtgaattacatttacatttacccttgagtgacccttgcttttgggtttttctttattctcctttccgaggctgatcaagggcattgaatgaatggttattttgttttcttggt

SEQ ID NO: 251689 - DNA, 404 bp, Gossypium hirsutum
attgaccagggaacaggacagagcccaccagaccagcgagactgtgactggatctggaactcagacccaggcaggtgccacccacactgtggagcatgacagcagccaccagacaggaagcaccagctcccagacacatgggtccaccaatggccagaacagtgggactgagatccacggtcaaggcaggagccagaccagccaggctgtgacaggacatgctcagatacaggcagggacacacaccctgacacccacccagaccagggagcaagacagcggccaccagacagaaagcaccagcacccagacacaggggtccaccaatgaccagaacagggggactgagatccaaggtcaaggcgggagccagaccagccaggctgtggcatgaggacatgctc

SEQ ID NO: 251690 - DNA, 339 bp, Gossypium hirsutum
attttataaaagtaaaataatttaaaatttttttgatatatattaattctaatctggtgtccttaaaagtcattttctattcttacctcaccgctacagttgcatttgaatccaaacacacactccaccgccgtttctaatctcaccattacaatatccaatctcactactatagtaactaatctcatagccaccactgtttttaacctcaccagagctaaacacaccgcccatccaaactaagcctgagttctcaaatgtcgaaattttcaaacgaaattttcacgaaattatttcgtgaaaattgtagatcatttaaatataataagaataaatttt

SEQ ID NO: 251691 - DNA, 365 bp, Gossypium hirsutum
atgctagacaaagctacccagatttgtcttataatttttgagttaaccacagtatacctattgtgattatagtaaacagactagtgggtagtaatgctaaattaccatcacagttatgtaccatccccccatcccatttttttttttttttttttgatcagcaaagaaatacaggagaccagcctcgagtggtgctgtacttgttatgagagaggcagcagcacagtgtgtggcatttacatggtacccgggctccacagagtaccgagatgttgctctctgggaccacatttagttcaaagaatatggggtccttacttgtattcttttatcagctgatttcaaaacatataataataattttc

SEQ ID NO: 251692 - DNA, 386 bp, Gossypium hirsutum
acactatataacaagtgggtacgcagaagcacgctggtgccgggccgcggtttccgggatcactccgacacaggcgcgggttcctaccatgcacattacaaaggctcacactatgaaaccagctgcacggctaacacctgtgagggcagctgctgcctccccgattgaggaagagccaggccgagacaagtgcgatgtcaaagatgcaaagcctgtgggcaaggacagtgtggaggttgccactactgcactgacctgacgaagcttgggcggcctggactcatgaatcagaaacgtgtcctacgacagtgcttggcacccatactgcgttactcagtcacatgacccctctgtggagaggtggatcagaaaggagagacacaaga

SEQ ID NO: 251693 - DNA, 180 bp, Gossypium hirsutum
ctataaaacaagaaggtacaacgaagcaggctgctgccgggccggtatttccgggatcaccccgtccctgatgcgggtctggaacttgaccatgaccacctcggacactttcaggacttctacgttgctgtaaccggtggggcaggatacaaactctctcgatgagatatgatccacgct

SEQ ID NO: 251694 - DNA, 352 bp, Gossypium hirsutum
agcaagttgaggaattgcttattattttcatacggtcttaataagctataaagcttactcccttcctttcctttcctttagtatttttaggttagctcagggttggagatcgtcagaggccgtatcagactatcaaaccatcgcctttggaatatgaatatatgttacgcgtgttcaagtgagtggcatgtataatggctaggattttatgatatgttttaatatgattagccaaatgtattggcccttattgaattatttgtatttggccatgagatgtggcttatattggttattggctggtaagcctaagcatatgtatgcatgattaaatgcctcatgggatgtgatc

SEQ ID NO: 251695 - DNA, 355 bp, Gossypium hirsutum
cggacgcgtgggattattttaaaattctttttcaacccaaattgattattttcactaatgattatttaaaatctttaaaataatttttttaattttctagattattgtttaatcgattttaggtgaaattaacctcctaaattaaattaaaaaaatactaaaaaccctataaatttctagtttcacacttggaacccgaaaaatatacttgaaactactagacccagtttaaggatattacaaacaacatctatttacatttcacatgaacaaaagtgaacttcatagagatcacattagtcaatttattactcttttgaatgatttaaagaatgttgaggttgatattgacgat

SEQ ID NO: 251696 - DNA, 289 bp, Gossypium hirsutum
cactgtgcgagcacataggtgacgccgttgctgctattcagcacttgcttgattaaaccggacccaagtcagtgaaataaaacgatgttcttcaaaagcctggacaaaaccctctgttagatggaggccatatgacaggcacaatctacttcaaatagcttaaactcaattctaatggtggactaagggtgggcttactgcttacccattagaacctatcgttagaagagcacatcggatgcttctccaacttgctgagacatgaaagattcaaaacctagttatccgg

SEQ ID NO: 251697 - DNA, 394 bp, Gossypium hirsutum
atgtcttggttgcctcattcctccccaaaattggcccactgaaatctgtagaataccaaggattgccattgcttatctctttagactcatgacttcttgctttttttacttttaaagacttccttattttcttgtcagcttagccatatgcttaaaagaatttttaaaactatgttaactagggaagtttcaaaatactttgcaaatagaactaacattgaagccataccaacaaaagggtggcagaaacttgcagcctgaatttaaccaggctgattgtctgctaaaacaaaaatattgacattctttataggattcaaataagacccagggcctaagaacataatatttaaaattccaaggatacaattcaaaattacatggtctatgaaaa

SEQ ID NO: 251698 - DNA, 385 bp, Gossypium hirsutum
atcaggaatgggtttaaaagcacaagtttggtagcttatcatctataccatggacagtgaacccttttacgaaatgaaagtcaaacgagaccatcctagaaaaagaagatgctcataggcatttgtaccataatcaaccccacgcataatgaaaactatgaccaagtgacgtgcctgggagctttgacacatgagccatttgaattcactaggaaacatgtaataaggtaatggaagagaaaatcgtgtgtaaattttgcctttaactttaggcagcagtatattatacatttgatatctgaaatacctttacttttttaagaataagattccatatgtctgtctggaagggagccatggttatgctcacgaatatcgacgtcac

SEQ ID NO: 251699 - DNA, 174 bp, Gossypium hirsutum
tcggccagaaggaggctgattgtttggtaatgcaggaacgggtatcaagtaaattagatgtgattcattcagcggtatgggaagatgtcatcaacctagaaactctacatgttttcccaatagatagggacccgcctagttccgtggacaaagtggtttttaggtaagcatttg

SEQ ID NO: 251700 - DNA, 406 bp, Gossypium hirsutum
atctcggcccagagctgcccagggcgaggagggctgggggtatcgggggcaggccgggcggtgctcatctctctgtctcccctcactgctgctgctgcaggatctgtgtgaggtagggtcctgagtcctccccctgccctcccctccctgcacctcccctccctgcaacccctgttgcagcctcttctccccaccccacgccccccggctcccccagggaggcgacctggcatggcaatcaagggtatgggcatcagacaggcctggatttgaaccctgaccttcctgctatggactgtgcaaccctggcatgtctcaccctctctgagcctcattctcctcctctgcaatggggaatagaggtgtccctacaaggtgtagctatatggggaggttcagagcatca

SEQ ID NO: 251701 - DNA, 313 bp, Gossypium hirsutum
atctaacgcacaggggctgcaattgaatttgcgggactaaagaaggacgtggctgctgtctatctgaacaaggcgaaactcaaagccacagttgacacacttaatgaggggatcaaatggacagaaagccctatattatgcctagacagcccagatgctgacgcaagtgcgaacatgtgcgagggctctacatagacaactaccgcccctgtagtgcacagactagtcgaggagccgagaccacacgaggagacagggagaggagctgggctcacgaagcaggccattgccagaaccaagcccatgatccaca

SEQ ID NO: 251702 - DNA, 364 bp, Gossypium hirsutum
gcgacaccgacgaactatgtggaacgctggagcgcgctggtgccccgccccggttttccgggtctggccctgccgttcgggggcctatatgtggctctgggctacctgactacgaaccacggggaggtgccttacgcccttcggggactggcttaccgattgattattggggagacattctcttaccgctgtgatgccttgttctgcattcatgccgagaggcttcttcattctttgttgttggttgattacttccaattggctgccttggatggtttattctggttgacaactgagctccaccgctaggtggtcgccgacagaaagctagctcatgacggcatgagcgggatctaattgctcc

SEQ ID NO: 251703 - DNA, 398 bp, Gossypium hirsutum
atgttctccactggactcagaagccaagccgcttcccgcccggactcggcgcaaggccctgcacctgtgaggaaggtgcttttggccccattgcgaggggccttggctaggactggccctgtggccagggggcgagaaggtggctgttcccggatcaacggctttttcccgggggcctttggaagatttggtggaaggacaagagggccggtccctgtccccaggaggcaccgacagtccctgtactggttagacacacggagcgctgcacaccgaaagtccaaattgggagctctgcctgccagcagttttgctgagggggtgatcgctgcttctggggggtaaggaaacaagttacagaaattactgcgttctgtgtgaaggggctggggggtgtg

SEQ ID NO: 251704 - DNA, 373 bp, Gossypium hirsutum
acactatataacaagttggtacgcaaaagcacgctggtgcccctccgcaatttccgggatgtgacccactcttactggaacgaattgcagcgcaaaggatctcgataggcatgacggtgcctttactgtcccgccttatagtgccacaattcaagctcttgaacccaatggctgaagttgcataccagctgtgatgagtgaccaaatacccattctggcatatcatgcaccggtaaccattgaaccagaattccttgactggttactgctgttagtgagccacgagcttctaaccaacatatgcgagtcaataaatcagaccaaattttctactcaatgcatcttgcattatgatggcgaaagaaacaagaag

SEQ ID NO: 251705 - DNA, 409 bp, Gossypium hirsutum
attgccagtctaaagctttaatcgctttgtgttttcttcccagccctggtttataggggaggtaattagacttaaagcaggtatttctaccaagtcaccaagcttacaacaagtacctctgagtgaagctctgtgcccgtcctttctaaaagtgacacatacacccaccacccactcttggccttctgctgactaactgcagaggggcctcttcccaaacctgtgccaccaggaccagctgctgtgtatgttggtgggaaggggcggtggggggttgtactctgcgccatgtctcaaaatttgcatgagcacatccacggagacagaggctcctctacagacacacaagctgaaggagagcgtatctcccgtgctgagcgtgctgaccgtatgtgctctgatgcaccgc

SEQ ID NO: 251706 - DNA, 385 bp, Gossypium hirsutum
atctttaaaaagcctgcattgtgtattaaacaccaggtaatatgtgcaaaaccgagggctccagtaacaccttttaacctgtgaattggcagaaaagggtagcggtatcatgtatattaaaattggctaatattaagttattgcagataccacattcattatgctgcagtactgtatatatttttcttagaaattagctatttgtgcatatcagtatttgtaactttaacacattgttatgtgagaaatgttactggggaaatagatcagccacttttaaggtgctgtcatatatcttggaatgaatgacctaaaatcgttttaaccattgctactggaaagttacagagtcaaaattggaaggttttattcattcttgaatttt

SEQ ID NO: 251707 - DNA, 235 bp, Gossypium hirsutum
gccatacatcgggagcgcgcactatcaaagatccaatcttacatcctcatgcttactgcgaaatgtctcttttatagtgtcaccaaaattaaattgaatctcctgactggtccaacgccgggtctgtataaacaatataatgtcccaactctatctgatcatattacattctcctttcagcaactgaatttatagcatagaggccatctaagatcggcctatcctacagaagatc

SEQ ID NO: 251708 - DNA, 336 bp, Gossypium hirsutum
ctcgatctcatcccatccccttattccaacgaccaaggacgaaccctaacttgggcgtttcgactcggtttttctcaagctaacgcagctcccacccgagatctttatcctctggcaatgccactctggttctccgccatatccctctcgatagaggactcctttagtttgcctagaaccttcccctcttttcagatttatttaataagttcaagaaatgaccaacgattcccagccccctaattccaggagtctcctttgcaatgccggtgctggcgctgccgccggtgttattgctgcaacattcgtgtgtcctttagatgttataaagacgag

SEQ ID NO: 251709 - DNA, 403 bp, Gossypium hirsutum
attgcctatttttgtctcaaatataaggttccagtgctggaaaacgatattcacctcagtttgtaaaggctgccaaattactccattggaatggacattttaagccatggggaaggactgcttcatatactgatgtttgggaaaaatggtatattccagacccaacaggcaaattcaacctaatccgaagatataccgagatctcaaacataaagtgaaacagaatttaaactataagcatttctcaggaagtcctggaagatggcatgtatgcaaagtaacagttgctaggcttcaatgcctatcgtagcaagccatggaaaaagatgtgtcagctgggtaaagatgacaaactgccctgtctggaagtcagcttcccagactatagactataaatatgtct

SEQ ID NO: 251710 - DNA, 242 bp, Gossypium hirsutum
gaggaatatgacgatgaaggagatgaagagatggggaagctatgttgtggacacagttttcacattcaatgtataaagcagtggctgctgcagaaaaatgcttgccctgtttgtaagactgaggcatcacctcggtgatagtagcagcagcagcagcagccatggatggattcaatttaatccacttgttgttggtttacttactgtttcatttattttagtttagtccaaaattagtgttt

SEQ ID NO: 251711 - DNA, 321 bp, Gossypium hirsutum
cccacgcgtccgactccataacaggtatgtgcatcactgccattagatgtgaaacggcaaaatccaaaaagccgaaaagtgaagagtcgacaccactagggcgtgtgactgcccgtatggcaagtcctgtgataaaacttggtcgtgtggtcgatgagatggccatgagcactttcatggaccaagatgatgtcgggccattttgggccgaactagatcatgtgggcccaatgggcctgtgggctccacacgaggaaatcactcaagagttaggaaatattgggccaggctatgtaaaccacatggctaaggccattttgt

SEQ ID NO: 251712 - DNA, 384 bp, Gossypium hirsutum
ctcgtgaataggtgatgaatttttactcattataacaattagttgacatttttttggatgatattactctaacagtttgttttcatagatggagcactaatctgggtatcgaaaggtcatacacggttccaatataccgtctgatgatcgagaatcatgctagagaagggataagtttttctaatattcatgacattttattattttatttcactcgacctgcgttaatataaccatgttattaactgtgtagttcatttggatgtcgttttctatcctagaaattatggcggtgattccctcgtgtctgtccacgtccactcaaacctatggtgcataagcgcacctgttatcaatttccaaacagtagagtggtatcatggt

SEQ ID NO: 251713 - DNA, 335 bp, Gossypium hirsutum
atcgggatccttgcagggattgcgtgagggggatgctctcttacctacacgcgcactcgcgggtcctcggagccgactgtcctatttgtactggcccctgggactactgacccgttcagtccgctttaggtacggccagactgcacggcgaagatacgctgagggtcgccccagattgttatcgaccggagaacccgaaagtatgcaagaggaagagagcgcgcggagagcaatcgagcgggccgagtgcagcggcagcatctcctgggaccattgtgctgccggcgcctgctccgctggcgtgaaggcggggcgtctactcccttcccggactt

SEQ ID NO: 251714 - DNA, 323 bp, Gossypium hirsutum
atgtctctagatatcagcataaccaatgccttaaaacatgactctacttctccgcaatgatacttaatctaccttctttccttaaatatcacctgctttgaaccctttaagatgcacctcatatgccacttcctgtgaaatattttccctcaatatctcacacagtttttctcccacactcttgcgcaggactataggaccattaaactctgtttatattatcttcatagcacggacatcatcctcttaactaatggattgttcattcgctctgtctttcacaactttgtcttcgatcaaaagtggtaaaggaaccttttagt

SEQ ID NO: 251715 - DNA, 360 bp, Gossypium hirsutum
aaaactaggataataaaaataatttaataataaaaaaagggcaaaaaaagagactaaatcgaaagtaaaaccaaaattaaagtatgaaaaatgcaattcgagatgtccaaaggctgccttgaaatgcgcgcgtaatatttgggatcaaaaaggtaaataatcccttgcccaaaacgcagcgctttaatgtggattagaatgaaacaaaaacaaaatgagagattaaatctaaaaagaaataaaatgattggattgaagcgcatttgaaaagcggagggactggggttgtaaataacccattaatcaatacacgtggatccccatggaacgggtcgggccgcgcacggatctgggtcaata

SEQ ID NO: 251716 - DNA, 403 bp, Gossypium hirsutum
atggaaaatatagagtagacctgagatgctagtcaagccccctttgattgagttcatcatgggccgttgctaatgccgggccagtaaaagtataacagcaaataaccattggttaatctgtacttatttttggacttagtgcagcaggttgaggctaaaacaaatctcagaacagtctcaaatacctttgcctggatacctctggctccttcagcggctagagctcagtatactaatgccctgtcttagcagagatttcatagctatttagagatattttccattttaagaaaacccagcaacatttctgccaagtttgttaggaggccgcatgatactcattcaaaaaaaaatcctagaaattgttagctctcgggacactggcttggcccactggagcatg

SEQ ID NO: 251717 - DNA, 293 bp, Gossypium hirsutum
atatttttacacagggctttgtccagggacttgggtttcacacacacagcggttaactgggatgggtttttggtaagggaggtaaaaaaaatatgtagctgatgaaatagcatgtgctgggccccaccactgggcctgggaggtgcagcgcgttccaacagaggctgcctcctgcctgccacgcctgctgttctcacaggcaggggctctgctgcttagagcagtgtggccatctcggcttttctcctcatcgtctgtcgcacactggtccccaccacgcctttcgccggccc

SEQ ID NO: 251718 - DNA, 331 bp, Gossypium hirsutum
acggcagcctgctagatctgagagtgtgtgtcggtagctatcctctcgccacttcactcatcagctcagctgtactcaaactgaagttgcatgtttctaaacaagcccatggctgcagtttctccacctttggatccgcctctcttatttgctagaatatcagggatcctagtggcagctttggtcctctcgtgggctcttcttttcaagtctaagcttcttcctcactcttctttaccctcccaagaagccctcatctatgcagtcctccatcctttgctcatggttatgggcttcattctcataagtggggaacctatattgatacaca

SEQ ID NO: 251719 - DNA, 270 bp, Gossypium hirsutum
attcaccggagggataaaggggactgtttatttttttacctatcctcaaaccacttcactcattacttaatgtgaactcaaactgaacttgcatgtttgtaaacaagcccatggcttcagcttctccaactttaccaccacctatgttctaagctaaaatataacgcatcctaaaggcaattttgagcctctctaagactattcttttcaagaaaacgcttgcttgctcactcacaattacccttgcaagactaccacatgtatacaatt

SEQ ID NO: 251720 - DNA, 375 bp, Gossypium hirsutum
cggacgcgtgggtaaaaaaaaagttacattttgttctcttggctatatagccaaatacatctctgttgcgtgttgtgttgtttctatttccttttttggtttgcttgcaggttgggagcaaggtcaacgagaggggcttccgttttggtgcaaaggacaggcagagccgaccctcgagcggtgttggcgccgaggacgcacgtggctggtagaagggaggcacggtgctagggctagctagggtttctgcctctgctgaaaccgtttgggtctttgggcctgctaattgggtcataagattttttgtattttgggctatttaggctttgggccttatgtaaaaggactgctcttattctttaagattttggtttt

SEQ ID NO: 251721 - DNA, 348 bp, Gossypium hirsutum
atcagggaaggatgacaaaatggaaatttaaatgacatcctagaggtagaaaaaccgtggagatcacttttctcagactcaccagattttaatgggatttcatggggtttggttgtgctgatggggttaaggggaggcttctttctgcccttatgcccactcccatctgatttacctaattcagtctcagctgctgacatttggaaaggaccaaattgctttacagagtttttctttggggtatatctttaaaaactggaaaattctatggaatagttctggatataggacacaagtaaagggctatgcccaagaatatttatttatttattaccttatgagaaagct

SEQ ID NO: 251722 - DNA, 370 bp, Gossypium hirsutum
attgtttctatttgactttgattagaataagatttttaaacctataaatagactagtcatctctcctcttgtatcattcgaatttaacagttagtgaatttttcttctcctctgcgttctatttttctttctttgtgattattgtcattatcgacgttcgatttttcatacacttcttcaaattcaaagctgtggttgcttaaaccatttttctttgtctaagttgaatgatcttcaagaattcattaaccatgattgatgagtaggggagagcaaaactcgattcgactaaaaaaattggaaaaaatttccaatttcgagttaaacaaactgagttatttgaatcaactaaaatcttttttttttttga

SEQ ID NO: 251723 - DNA, 223 bp, Gossypium hirsutum
  unsure (1)..(223): unsure at all n locations
atggccgccctttttttttttttttgttttttggtttttttttttgccagntggttatattactttgtttgggaagcttttttgccggggcagtctaccaaaattgggttccctttacaaaacataccgattcttggaaatgatgaggccatggaagccccggccagggcctgacctggcaggaacaaacctggctggtggctctgaggtacccggggaccga

SEQ ID NO: 251724 - DNA, 384 bp, Gossypium hirsutum
cggacacgtgggcggtacgcgtgggggaatttaaccgttttcttgtaagttttcagtgtaagaatgtagatagacaccactggcgaaagcatgtgatgccatattgcgttacgagcctataggggggagaaatcttaatgagtatggaatgcgcatctaactggatctagtgaataatgaacataagcgaagtgagacaattattcgagtgaaaaagaataataaagtttatggaccattataaaatttcgaaatgattgaaaggaatatgaattattagaggcatatatatgctcttgacttggaacagattaataggaagcgtttaaaatatgaagccaaatttacgattttgcatacttgaagagtggttacaaaaatgat

SEQ ID NO: 251725 - DNA, 181 bp, Gossypium hirsutum
ctcgttttttttttgagtctcccatcgtaaaaggatggcaggtaaacaggaggaacaagcgtttttgacaggtttatagtgggatgggcttgtattcggctctattgcagccatacatttggagagggcaaggtcacactatttacttagctaaggttctgcgcattaactaccaaattta

SEQ ID NO: 251726 - DNA, 352 bp, Gossypium hirsutum
atccgaatgggaccacgggacccaaataagcccccgtccctcctggacgtaaaggcacgcgcacatacctctaggagtgtgagacttctgccacctgttgggttggttctaggccccacctgccctcagggagcctcgacagggccggtgggagatgggcttgtgtcctgggaggcagctgcagctctcaccccagcggctgtctctgcctcaggctcccctccctgaagcgtgtctcgaggcgcacgggcacggctgctccgcgccagcgcgtaagtggattgcagctcctcccgcgcctgcgctcgctggccaccccccagcccctcaggcaccaggactggccactccc

SEQ ID NO: 251727 - DNA, 332 bp, Gossypium hirsutum
tcgtgcgtaaatccttgcacgagcttcaatgaataccatgttttgcatgacctttattataccaaaatatagcgataatcgcttgcatttcagcacataatgatttaggaagtatgaagtgagtggttaaagattaatcatacaaaaatataccaaatgataaaaaattattggaatgtgtatattagggtgaggggatggctttctctgctgcactctgtatgtctatataagctaaagaatgatatcaagtttgggtggatggaatagcctatgcattggaattctattcaatgggcccagtacaaactgctgttgaggttaacggaata

SEQ ID NO: 251728 - DNA, 165 bp, Gossypium hirsutum
gcgcagtattccgggtgggacccacacctctcacaactactaactgggggcacgtatggttgatgctattgcgggttccatctattgtatgacgcatacatactcattgggcaggacgatagtagaaattttgagagctttagaggcatatactgtatatgataa

SEQ ID NO: 251729 - DNA, 394 bp, Gossypium hirsutum
attctcagatcattttgtctattcacagaaactaatttgctgccagtgatagggataatccatgatttctgagacatctacttccataatttcacagttctaagtctagaaaaattattagaagaaaattattgggtggtcttggaaccaacccaaagaaaaatcatgtcctgtgaacagtaggatagatactgaatctagcttgtctcactttggagctagttcttataatttcccttggactatatatttttgtccaatcactactgttcaggacatgggtttgatttgcttttccctcccatgagccactcaattgctttgctaaaagccccatcacttttcctctggtttcctttggtacaccaacctcaacacagagtccacttggttt

SEQ ID NO: 251730 - DNA, 354 bp, Gossypium hirsutum
atagaatgcacaaaatgtcaacatcagcagagatgcccagatctatttatctctaagtatatttgaagtgattgctgtttatatgttgtcattttaaaattgtgtgtcagtaaagctacctgtaaaatttcagtccaaaaaaataaagctctcagggagacatgaataaaaacaatgaacattagaaaataaaatatagatgcttaccattaacctaccaactcttaatatccttaaattatgtgatatataaagaggactgttacttttttttttttgctttgctttatttatttgtagtcggggatgaaggcttacggtttctcttttctttctatcgaacctcgtgggggt

SEQ ID NO: 251731 - DNA, 383 bp, Gossypium hirsutum
atggagatttgcttttgtaggacagttcatttgccacttctaccagaatgagtcattttgtgtataagtgtcaagcttggagaggttctaattaagtgcaaattacaatgaaattaataaatggcaccaatttttagattttaaaatgtgctttgagagaatgcaatgtgggcttagattgattgtaattctcgtgttttaagttgtgattcaatattatgtagcattaaaactcaattaagtaaaaaataaatgaagactcaaagagagagaacactcatctctcaaatgcctcaacttctccaatgataacttaaaatctgttaaatgcttagattggaattctccttattggtcactacattccaaaataattgcacata

SEQ ID NO: 251732 - DNA, 181 bp, Gossypium hirsutum
atgtaacatacacgtgtaaactctcgtgtttaaagagagagaacatttgatggtgtgtacttttaaaaagggaaccaaaccgccttccacaacttggaaatgtgtattccaggtttaaaggctccatacttggtaaaaaaaacttaaggccttccaccggggagctgcctttattttattc

SEQ ID NO: 251733 - DNA, 253 bp, Gossypium hirsutum
gaccttctgtaattagttcaaaacaccttttttttgtttatttgcaacataagactaaagcatgtaaggtttctttttttcctttcttgtcatttatttcctaggaaaaataataaataaataaataaggtgttttggacaaattacaaagaagtgtctaagttttgtcaaaagttaaagaaaatgttatgtgaactatctgttaataggttaatgagatttttaatgtaatgaccaatttgaataattatat

SEQ ID NO: 251734 - DNA, 322 bp, Gossypium hirsutum
atctttaagatgacttgtttcctttgaaaatacatatgtactgagggttatgatttatgtcagaaattgacataagtgcttttacaagcaccaaagttgaatgaattttcaacaaaatgtaattcaagtctatgttttcagatgtgactcaggttaagaaatgtgttttaggatctacttgctggtttttctttttgatccaaatgtatgatctgccctgataaataacaagttatagtaccatctcccccgccaaaaaaaaaagaaagaaaagaaaaaagagaaaacctgtggcactatgtaaataaaagtagcatacttt

SEQ ID NO: 251735 - DNA, 283 bp, Gossypium hirsutum
gcgggaagtctgagaatgtcccatctcccccaaatgggatttctgaaatacccccatcacaaccacaatcaatctagtattattacttgtgggcttagaggaggaacaaagaaacccttgtggaaatcaagggtgctttccaccgaagccatccaagctgttcattccctcaagttagccaactccaattccaaattacaccatgttttatccaccaggctttccaggttactcaaagctgaccttttggatactttggctgagttacaaaaacaaaatgaat

SEQ ID NO: 251736 - DNA, 389 bp, Gossypium hirsutum
atgctgaacgttaatacgtgtagtaaacgcacctccttgtattcccactttcgtagtcatttcggttctgatcttgtcaaacccagcctgaccgcttctgacgccaggatggcctcgttactagacttttctttttaaggaagtgctgtttttaagggttttcaaaacattttgaaaagcacttcagatttacttttttgaccacgagccatgagttttcaaaaaaatcgggggttgtgtgggtttttggttttttagtttttggttgtgttgcctttttttcttttggtggggttggccccatgaagtgggtgccccactcactcctctgagatcgaacggactgtgaatccgctctttgtcggaagctgagcaagctgtggcttttt

SEQ ID NO: 251737 - DNA, 388 bp, Gossypium hirsutum
atctcctacagatccatgcacttgcgtataggcgtgagattttttttaaatgattcccccttgggttacgtgggcatatgcatttttcggaagtcatagcctgtatactcaagatgtgtgcattttgctatatggaaattacacagtttttaaaaaatgagttcttcctccccttaagttgatagtggagcttgcataaatgtgcaagtggttgccatggcccacggggatccatttgtggttaccagctgggaggagatacacctgcttgcatgtctctagcaagagggtgtgacctggccccaacttctggcaatttgggcccctttcttaggcctttattctatattcattttgccttgggttcttaatacctttacttcttttc

SEQ ID NO: 251738 - DNA, 334 bp, Gossypium hirsutum
  unsure (1)..(334): unsure at all n locations
gcaacttactaagctgtatgcttattccctttcctttccattttcttatagtattgccaagctagtgtcggggatcaagggacgtcggaggcatcgatcacactatcacttgaagcttttggtatagttagtttaaatgttttgattgtggcatgtatagggacttgaatcttttgtttagagccttgatagtttagccgcaagtgttggctcatatgatggatgtaatattcaatttgtataggccattaatatntgttaatattgattattattaaatgcatttgatgcaaatttctcatggttgtgggtggtttgggtatttggggtatac

SEQ ID NO: 251739 - DNA, 337 bp, Gossypium hirsutum
agccttccggggggaaaaaaaggtaaccttgtctgcttaattaaattcattttgggcgaattaaataccaaagttccacctaacttggaccatgtttatattctgcggcctatagggcggacatcacttattccaggggctattttgcctttgaaagacccccacagtgggcttctggaaattgaacaccctgatgctataaagaggacttatgcactttatgcagatgattgctttgttacaatggggatcacattcggtaacatttatttactccaacctgttatgcacctatatgatcatgctttaacacatgagacggagaaactactggcgc

SEQ ID NO: 251740 - DNA, 343 bp, Gossypium hirsutum
atgtgctaagtatttactccctgacttcatatcacgatatagccagttaatggtagagatgggcttaaaatccatgtctgtcaactctagaaatattcccaaaattccacaccgtccctttttctcttcctaccacaccacctcacacgtgtttgtaatgatttctgaacagtaatataacaattgctgcaattagacttttctacagtctgataaaaacaatacaatttttaccatttgcagtgatgatttcccttttggttcctatctaaggaggaagctccatggtcttaccttcccaattatgaagcaacgatgacctctttaaactcgtgaatctaaa

SEQ ID NO: 251741 - DNA, 327 bp, Gossypium hirsutum
atctctctcagacctgggctgaattttgctgatcagccgggtggctttggccgagaacttcacttgcctcagtattctcatctgtgaaataaggaccctcatacccacattgtagagtcacgaaggtcagagattattctgagtggcagccagcacctggcctggctgaggacattgcaccattcattatcctggaaattgaggcagacactccagcccctttctgggatcctggccacgccactgtgctcctgccctgcaagctggctcccacgggtctctgatggcccaccaaggggctgcccaaggacctgactccatatattc

SEQ ID NO: 251742 - DNA, 241 bp, Gossypium hirsutum
gacaccctagaacaagagggaacgcaaaagcacgctcgtgccccgccccaatatccccgatgggccctattccttctgtgatagcttccaggttactctttgcactcttgaatgtcaaacagcattatgtaacaaagcggaactcgaggcttaagctgaggctcaaacatcaaatgcaggggcaacagaggtgcctaaagctcatgctcctgactttgaggtgctggacaatactcttctg

SEQ ID NO: 251743 - DNA, 451 bp, Gossypium hirsutum
gacaccatctaacaagagggaacgcagaagcacgctggtgccccgccgcaatttcccgggtgcgacccaatcgttcgttttctcttaagtggggtggcaggggaagcctaatgtgactatgagagactagtttacggagctaccgatacgctgctgatatatgacctttgtttaacgggtttcacgacttgaacctaataattgtgtgaactgctctctccttttttccctcccttattattgtttggggtgagcatttatatggttggacaacacatacaagactggtgttaaacgactgcctgtgaaagggccttaactggtggtgctgtacagatccgctggtctatgcttagagctctcactccttgctgtcttccttgggattgaaactttatataactggagcaagtggagagccaaaattttgcttgtcactgcacatcaatat

SEQ ID NO: 251744 - DNA, 350 bp, Gossypium hirsutum
atgggaagcaccgtctgtgcccggatccaagccctgccacctagagtccagagccaggaaggggctgctgagggagggcatcctgctgggctctctactcggcccgcccctccaagggtctggcctgtgagccttgactgggcttcatgctgtggaggcccccccactccctgaagcagctgggactctgctcacacaagcgactgggctggccctggcccctaaaccccaagcccgtgctggctgcctgcacaaagagcagctgaggcccaggcagggcccccacaccagaccccagcatagcttccccacccaagcacccccttcccaaggcagcaggtgtgggagtc

SEQ ID NO: 251745 - DNA, 311 bp, Gossypium hirsutum
actatagggaaagctgatacaccttcatacccctccccaatatccccgatcctacccacccgtatgatcatgcgggggagggtatatttaaaattatccttcactaaaatatccaacaacccaatttttcttgacaccctaatccaaatatcaaattcctgctctttacatgtatcatcaaatggcaacccagaaccacttaaaatactcattatcagctcctcataaattggaagacctaactattgataccaaatctactctaaaattccttcgaataaaataagctctaaaacccaaaaaaccaaaaa

SEQ ID NO: 251746 - DNA, 279 bp, Gossypium hirsutum
gactcactagagggaaagctgaggcgcgttcatgccccgccgcaatttccgggatcagctcccccccctccacccaccctttgagagtcaccaccacgaccccacgtgatatccaaccaaagaggaggaaacaccgattcttgaatcatgggagttggaggagcatttcactcttctactagtatgccttttctcagcactgctgactgatgtgcggatcaactgtaatggacaggaggtcctgttcctggcagaaggtgataatgccatgctgggctg

SEQ ID NO: 251747 - DNA, 319 bp, Gossypium hirsutum
atcaaacctggtcgcaccactcgtgtgagtaaaaactacttgtgactccagtgccatatgcaaactgcttggcaagggctgtaggtttacagtcctgacgaagaggtttactgcaaaaacttcattttgcttgcctactgaagggagtctatctcccgctacatgggactatttgttagatatgacaagggcactaacacctgtcggacctgcactgatgttgttttatctgctcatagtaccagtgctctgactctccgtcctgaccaaactgtctcttgtagttcacaggacagagagcaggtgactattctgtgag

SEQ ID NO: 251748 - DNA, 333 bp, Gossypium hirsutum
  unsure (1)..(333): unsure at all n locations
attgcatacttctggaatctccgggaagtgcctgtcgaagctgatgatgccagcgactgtgaaatcaactatgagggcctggacaacctcctcctcctgaaggagctccagtacttgtcgctgcaacgctcgcctcacttggaccactggtgtctcacccgcctttacccactggccgactcgttgcaggagctatagctggcccggtgtccccgcgtatacgaacggtggcttggctggctacaacacctccagaacctacacaagctggacatttcggacctncatgccgtgtgcaacccaggcctcactcagatcttagcggaggagatg

SEQ ID NO: 251749 - DNA, 303 bp, Gossypium hirsutum
tgataacttcaagcttactcattgacaacatgattgccagacatctgagtgagctcagctgagcaacgggctaaagtagaggctcagccatcacaggccacaggacgagaggcgccgtctggtcagactccacaactggaggtgctaaccgatgcagagttgagggctaagagcgtagcgagcgtatgaacctattgggggacccgagcgtgttcaagagcgaaaataaagcatgacatagctcatgttacgaaggagcaggccgctaatggcctgagagctttggcgaacgattaagacatc

SEQ ID NO: 251750 - DNA, 133 bp, Gossypium hirsutum
gcgaattttcttggttttcagccatctcctcggttgtggttgaagtatcgtcctcttgctcgtcctttgtgtatcttaggcttcgccttatttctctttggtttttgtgaactgcgcggtcgatctcaccctc

SEQ ID NO: 251751 - DNA, 319 bp, Gossypium hirsutum
atcagctcccccccctccacccaccccctcacacgtaccaccacgaccccacgggatatccagcccaggaggaggaaacacccagtctagaaacatgggagtcggaggagcattccaccttctactcgtgtgcctgagcccagcactgctgtctgctgtgcggatcaacggggatggacaggaggtactgtacctggcagaaggtgataatgagaggctgggctgcccctacggactggaccctgaggactatggtcccaatgggctggacatcgagtggatgcagcgtaactcagacacctcccaccaccgagagaac

SEQ ID NO: 251752 - DNA, 359 bp, Gossypium hirsutum
gatttttgttttttccaaaaagaaacttccttagttccgctaagcgaaaccgtaggttcatcatgtcgccgtccggagacggagccatcaatggtggatgttgctgctcttgttctcccggcgagaatggtggttatgatggagccaataatttcggtatctccgcatcgcaagacgagacatgcatgcattgcccgaggtctgaaccttcatcatgttcttcctctgagctcggttttgattcggtcctgttaactaattccgagatgttgcctagaattttcgtcgcttcagctaaaggcttctcaattgtagctggcctgcaaggtggcttagctatcttctccattctcgcacgc

SEQ ID NO: 251753 - DNA, 400 bp, Gossypium hirsutum
atcccaagtaagagcaaatctgtatgataacattgttttctctggacataagacataacagtaacacgatgtacatttacaagcggccttatgtacatttcccaacaatctttttaaggcaaaattgtgaccatatgtgtataattaaaatcgtttttaatcctttgcctatgaaaatattttggaaaaaaacttgctgtgtatattcagtttctgaaagataaagaaagtgctttgtattttgttgaagtcagtattttgtataaacatttatgttgacccagttatgtttagtgctgaaaactaaaatgaacatgctatctctgtcagctgaatatggaagaaatcttttttactagagatctgcagaagaaaagcaatcttctgagcacaatatgga

SEQ ID NO: 251754 - DNA, 362 bp, Gossypium hirsutum
gacactatagaacaagagggtacgcagaagcacgctggtgccgggccggagtttccgggatgtgacccacgcgctcactgacgcgacaccacatactgcagcactttctaatgagaacatcacggatgagccactaggaaatgctgcactctcatatgctcacctgggcagttgtttctaaaaatgtgtgctgcttcggacgtcctgtgctcctaccactgttgctgccctgcagcccctggtcaagtgtacagacccttatcctgccttacagtgtctctgtctgacatgacacacgcttccacccaagtacctgtgacccccaggctggaacagggctagtcggagatacgtgtgctttc

SEQ ID NO: 251755 - DNA, 376 bp, Gossypium hirsutum
ccaaaacttaccttaatctcaatacattagctaacacatacctgtaccttttaattcaatttcacattcggtctttacttaaaattgcccattgaatcatttaaaattaaataggatactcggatagtcgcacttatagtacaatgccaacgtcccagacgtggtcttacatgtaattacatatcaatgccattgtctcagacagggtcttactcgtaaacacatatcggaatcatctatcgatgccaacgtattaaacgtggtcttacttgcacacacatataaaaattacatatcgatgccaatgtattaaacgtggtcttactcgtacacacaaaccagaatcacatatcgatgccaacatattaaacgtggt

SEQ ID NO: 251756 - DNA, 397 bp, Gossypium hirsutum
atgcttggtagcctagtacaggttgtttttttaaaaaagaaaaagcaggaaggaggagtgaattttattaacatgtttgccaaatgtattgagatttggcctctgaagaacactttttcagtgttaagttgtctttaccttaagattgagaaatactttagaatattattaattttaagtcctgtcttcacgtccttttggaaaacttgtgttaccatgggtttggaaaaaggacaacaaaaggcttttcgtgtaaagataagatctctagctgtctctaaccctgtccttttttcacagcattttttctagttttgcttcattgcttatcattaggatagggtaagttaagtttgctatgctgctagcatcctaagatgatacctttgttgaaaga

SEQ ID NO: 251757 - DNA, 372 bp, Gossypium hirsutum
caaaaatggaagatttcccttagatttatctaaggtagttgaccttttaatggaagatttcccttcttgtttaggtggttgggcatcttgctgcaaaaaattaaacataatcattggttaaacaaaataaaaaaaaattaaataaaaaatgtactcaatatttataactaaagaacaacactgtacctgtttcgaatttttgcaagaccgcttgttatggccatgttggccacattgagtatatgtcatgagtagacctttcctactcaaatgaccaggctttaattttttgggttcatctttggccatcctcctattctttttgggcctcccaggcatattcctttcaatggaggtagcacaggctgaata

SEQ ID NO: 251758 - DNA, 382 bp, Gossypium hirsutum
atcacctttacacctgtcttcttatcctcacatctgttttcacaccttcacccctgtctttctcatgttcacacttgtcttccctgtgttcatgcctgactttctcaccattttggtttgaaggacagtcttctctggcttgtatttttgttttgtttcttttttttttccccagaaaatcagtattattttttaaataagagaaaccttcctaaaagatgataattgtgaaaacctcctttggcttgtttgctcttccagattttagtctcctttctccccatccaggaaagatggtggaagacaaaggctaaatttctccagcctcacagtggtcttcacttggtctgacttgtaccagttctagcacccactgaaaaac

SEQ ID NO: 251759 - DNA, 359 bp, Gossypium hirsutum
gaaaggttaggggcaaaacggtcatttggaccgggggtagatattaaacttgaaatatataatgtagtgtattaatgagttaaattttgttgtttagaccccgaggaacaaattccggaggtcgatcgaggtaagcgccaggtttcgaaataaccgaaacacaactctgaaaagaataccagttaagttcagataacttaaagtaaacccctaatatgcatatttgatggtaacatgtgaaaaatgtctcggatgaggttgacaaagggaattcgatggataaaccctcattgatatgtgtaaagagatcctgcgtgtgttgtagtaaggatttagcctggacaggtaatccgttgatc

SEQ ID NO: 251760 - DNA, 398 bp, Gossypium hirsutum
atggcattttgactgtccattgcagtgttctgatcttaaaattgacatccactttcctaatgtatatgagattctcttagttgaagtaggagaatcaaatggagcagttgtcctgcccccaccccatgttcttacaagcagctgtgatggagttattctgaccttgagtcactgcctcccatcatttcccagacgtttggaccttgctctccctttgagaatcatcttccacattttttctttcttctcccacctctatttgaggtagtggcatctgtgccattgggtggtttcactgctcctttacttcatttgcagtttctttcccatgatagtttttagttgggcagtcttaaaacccctctgataggaaggaaaatagatgtaatgtgagagag

SEQ ID NO: 251761 - DNA, 366 bp, Gossypium hirsutum
gttcaagtgtcgagtatgcggagaaaaaggccataacagaagaacttgtccaaggtcaatgttgagcaatgaaggaaggtcaagtagaaggcgtcaccgttgcaaagtttgtcgcaaaagtggtcataatcgtcgcacatgccctcaagtgataggggtgagagacattttgaccgctggaagtagaatatacacctgcaagttatgccgaaaggaggggcacaatgcaaggacatgccctagtagcagttaataacaaaacagtttgattttgggaggttatgtgaagtcacaaacttagtgtttatgttgtatgatggacggatggtaaatattgagaatgtagaacaagttatatatatatat

SEQ ID NO: 251762 - DNA, 363 bp, Gossypium hirsutum
atggagcttgcagtgagccaagatgggaccactgcattccagcctgggcaacaaagcgagactacgtctcaaaaaaaaaaaaaaagaaagaaaagaaagattctgaaagatggaaagaagaaggcagactacctgggaacctcaggaattaagaaatgacatgcagtgagttatttgggtttccttattatctcatgtatattctggagaggatactgaagaaagccttcaacctggaaccaccaacggatggcacaaacaaaaaatgcccctacaaaagcctatctgtttagccaacagaccaagacaaggctcacctaagaggcaagaatggcttttcagcaatatttgccctactacagc

SEQ ID NO: 251763 - DNA, 377 bp, Gossypium hirsutum
atgggaatttaaagaccagatggtatggttgatcagtaccctcaattatcaattaattatatattataggacatcatcctgaagactttcagcatttcctagatatgatatttcttacttggaacattgatacacctttgactttcaaatctatgacatagggacaattttatctattatgctatcttaaaattatgattttggtatttaataactaaattacttaggatgggtataccttgcaccactttgttcaattagacatgaagaagaaaacttacaacatagaaatgctctaaattttttgtgttcatttgaaaaataaaataccaactctgcatttggttaatgttcattttataaaataccttaaaaga

SEQ ID NO: 251764 - DNA, 353 bp, Gossypium hirsutum
cgatccttgagattacctaagctatgttattattcctttcgagactaataacgtctaaccctcagaggaattaatcgaaatctctttcttaattaaaacccttagggatgcacaaaatcactctatgtacttccatattaagtttcaccctaatccggtaaaatctcgtaaccctatttttaggcgatcgatcaactccgcttaattatgccaaatctactcttaggcagggtctattcctcctctacataagcacatcaaatcatgaattaataccccgaatattaactcaagcattaagaacacataattaagaacaaatcaagtatttatcatacaattcagataataat

SEQ ID NO: 251765 - DNA, 369 bp, Gossypium hirsutum
  unsure (1)..(369): unsure at all n locations
ccatgtcagcaatccggtagggggttaatggatttttaacacaattatcttaattagaggggctaaattgggagaaaaaaattagagtggcccaaatagaacaaattctattttagagggatcattggtgtagtttaccctaactttttttttgggagcaatatttatactttacgtcacttactttgaccatttttctcaaacatttattggttttttttaattataaatttacaacatatttttttcaaattgaaccacttagtaatggacaatatgtggagcaaacaactacttaaaacaaaatctttcactctcattaaattttacatttaattcttacttatttgnctntacaatttttatatt

SEQ ID NO: 251766 - DNA, 386 bp, Gossypium hirsutum
atgccccgtgctgacccgtctaacccatgtgggggtgctccactcacataggcccttggcagaaaagattgtccgttctgcccacacactgcctggatacagtctccaactctaggagatggaattggtttgctccatttagaaatagatcgaaattgggcattcagtagattctaccagtttcttcctgtgctgggaaatattaaatttaggttgtgaatgtttacttaatgataatttttagagaaggagatacagatgagtatgattggaaagttcagaaaactaaaatttgatttttacagccatccaactatagaatcattggaattcagtcatttatggataaattaaaatgaacacctggactcttgttaaaatcaaaa

SEQ ID NO: 251767 - DNA, 372 bp, Gossypium hirsutum
ataaccctgcagcaaagtgaatttctgtctgactgcaatttaaaattgaaaacttaggtagattgactcttctgcatgtttctcatagagcagagaagtgctaatcatttagccacttagtgatgtaagcaagaagcataggagataaagcccccactgaggtgcctcttgtgcctcagctgggacccaccgtgtagacacacgacatgcaagagttgcagcggctgctccaactcactgctcaccctcttctgtgagcaggaaaagaacttactgacatgcatggtttaacttcctcatcagaactctgcccttccttctgttcttttgtgctttcaaatgactaacacgaatttccagaaaattaacatt

SEQ ID NO: 251768 - DNA, 306 bp, Gossypium hirsutum
acgcggacgctgggttttatatttaatagggcttacattaataccctactcatcatgcaatttggttaatgacttgcttaaaggggcttgtacggactgactatagcgcttgaaaagccagcgaacgctacgcatgcctaatccaatgcctttgagctgcccactgaacaaatgtacgactgtgggactgatggtcgaattttataatttatcatgaccaactgactgaaaagccgagaaggcctccacctaacgaaataggactatacacgctgagcgatggccaaactgaatctgatggggtta

SEQ ID NO: 251769 - DNA, 378 bp, Gossypium hirsutum
cccacgcgtccgcccttattcttattctccctccttcattcttcaattaaaaatcaataaaaaagaaaaaaaatcagatttttggctttttgatgcgcctcaggatgaagggaaccccttacaaaatgaggtggagggctaaagaactctctctggctctcattattcttgtttgtacgactatttttattttgacatgggacagaagtccaacacttacttcaaccctgccatcaaaaaatcagttgcaggtctctccagatattaaaactgtaccagtagatcccaaaacacatgtgaaagaagatatttctacattgacacggagtgaaacagtaaataacaaagagggacaacatgtggataagacacgttcta

SEQ ID NO: 251770 - DNA, 376 bp, Gossypium hirsutum
gtaaaagggggagaaagactaatgattggcagccggttgactagaatgaaggagactgatgaatgatttataagaggtttaaccaaaattatagcatggtatttgttttttttctcaaagtgattgaaattcgggctgaaagtcttggtctcaaattgttatacaactacatctaatattgatatatttgaagcatgatctttagattttttattttttataattgcattaaaatattatatatttatattaaaatttatttgtgatatgtcttctttttcaagttaatcataatatatcttgtatgtatctataaatctgaatggtacatgatttttttattgtgttacttatatttattttgtaaaatataaaa

SEQ ID NO: 251771 - DNA, 387 bp, Gossypium hirsutum
gaaagtctagttgtattaaagatgttttcttgtcaaactagaaaaatgtccatatgtagcattccaataaccttttgcatttccttttagtaacaagaatttgggtagacttgattttctcctagttttttgatgtatttagaggatccttgtaagttcatatttacatagcatgtctggatatatgttggacatggtatttcaaaaacttgaagagtcatagcagcatagaattcatcttgtttctattcttgctgtgagcatctccttacctgtggaatggattatatagcctttgatgtctgctctatttcaatcttttgatcttgtgacaacattctcacagctctagtgatgaagagggtaattgggagttgacgagatctg

SEQ ID NO: 251772 - DNA, 357 bp, Gossypium hirsutum
cggacgcgtggggcgtaatttgagaagtcaaaattaatttaagaaacttttattcagttttaaattattaaaaaaaaagttatttgtcaatagaccttttaaattctgaaagagattagagaattattatacatctcattaagatatatttaagatattaataagatcatctatcaaaaaaatccaacaacctgtaaattttagcaaaccacgctaagacctatagagataaaatccaagcacacaagacattatccaaaatattacgcaaaacaaacaaccaaggcagataaactcaagtttatacgtgattgagtaggttacattatcgctcctttttttaagtttttttccccc

SEQ ID NO: 251773 - DNA, 342 bp, Gossypium hirsutum
atggtgtcttggcccaggccccacttcataaggttaagagccgagtccgtgtaaggcgggcaagcatctctgaacccagtgatacggacccggagccccgaactctgaaaccctctccagctggatggttcgtgcagcagcaccgggagctggagctcatgagcagcttccgggaacggtttggccgcaactggctgcagtacaggagtcacctggaggcctttggaaaccctttgacgggcacccccagctctgctgacctcagcacacctgtagccagcttccagggccctgacactacacccagaccttcacccctgcaagagggaggcagaggccccc

SEQ ID NO: 251774 - DNA, 405 bp, Gossypium hirsutum
aaaaaagcgggctgctaccggaccggccttcccgggatcaatttttatggccacgcccacccgtctcatgtctcgatgtatatactaatccaaaaggatatgaacgagaagtcaagcgggtataaatctcctgctcacttctctggttctctgcccagggaggggaggtgagccccgtagaggttcctgtcctcccagggagtattttccagaaaacagccttcttccggtaggggagaaccaggccctgctttaagtaatgtatacattctccaagggccgcatgattacatgaaatctcagtaaatcagatttcatgtttccaataacgttggatgcgttttatctttatttctgatgacaaaaccaaaaaaaatcctttcatgaaatgtgcacacttgaaaa

SEQ ID NO: 251775 - DNA, 383 bp, Gossypium hirsutum
aaatgcgaaccctggcttaaattattgctagaataagcttaatcaagttatcgggattccaaaatagtaaataacttgaaaaatggggctagaacggacttactattgagcttggaaagcttgaaaaccctagccatggcttcccccatgctaatttcggcctccatgaaaaagatgagtcaattttggctttattttccctttttatttcttttaattaccaaatgactaaaatgcccttaaggcctttctttaaaattttgtcctattcatgcccatttttgtccaaacgaaatataatggtctaattaccatttaaggacctcctctttaaacccccatttcaatcaagtacttatgaattagaacacatatttttgtac

SEQ ID NO: 251776 - DNA, 288 bp, Gossypium hirsutum
tcggttgtaccgaaggtatgtgtgaggagaatgtgacatttttgtgaacgccgaaccggcatctacgtgaaataaacagtgggcggtaggaaattcgtggttgtttttaggagcctgttgtgggaccttttttcgaccgatatcagttctctttgtgcacttaagttggtgacaatcctctttagggcaccgtcattaaccataaagtcctttaatggaacaagcttttcagtaccctgctattaatgcccttgcacggcccttggacatatacccatgtttttttaa

SEQ ID NO: 251777 - DNA, 194 bp, Gossypium hirsutum
gtttgaagctcatagcactattacaatgtttggcaataatgccgggtcgtcactagattttggaatatttcaaaattctctaatcaagactgcacagaaggatcactcaaaaggctggtgcttcagaaaagccttgtaactccgttaaaaataaaccggttttggcttctatttttgtcagcaagcctgagcaa

SEQ ID NO: 251778 - DNA, 400 bp, Gossypium hirsutum
atgttaaaagttcataaagaaaagttacctagatagactgatgctcgcaaacaggccgccattctctgcagcgaagagcctcataaattcccattcacaaggggctttttcatcattaggagacccaagtcctcaggaaaatccttttctggaaggatttgctccttcagaacgttttacagaaaacactaatgtaaaagacacaactgaaagaaatgcctttgaagaaaacattattatggaaaacactactatgccagaaggcaccatctgtgaaaaaacaaactacaatccttcttctgaggcagattccgatgggactgcgttcaacttagggccagctgttaaacgaactaatcagacacaatgggaatacaacaacatgggcactgacctgtac

SEQ ID NO: 251779 - DNA, 401 bp, Gossypium hirsutum
atgttttttcttagccaagtcatgcaataattgaatgtacctcaaatttttagagaggggagggtgggttagggactgatactccctaataattgggtaataattgaattgatttttaaaggcaacgtagcattctacagcagggttaaactattaccaagaacagtcaccctggttaataacaagttttactgatcagttgctgattggttggttggcgtgtgggcgtgtgggtgtgtaggtgtgtgtgggtatgggtgtgtgtgtgtatcttttcccatgagccctttttgtaatcctgtggctttttcacttacaactagcctaaccctgtaatttttctatatccaagaacacaatcacaaagtagtggttacaatactttgttgtatttggctaat

SEQ ID NO: 251780 - DNA, 430 bp, Gossypium hirsutum
ggctggctgtttccgtaccggatattcccgggatgaaattatccttacccaacttatggagtgtaaatgacggacgggatggttttatgtctttagaaatgttttgcctttttaagcctcgtgctaaaggcgtttaacgttggtgcctatctacttagggggcattctagtctttaaagttgtctgaactgtcccgacctggcgttttttgatttggggtaaacctaagggtgtttgttagtctcaaaactgtgaagagacatagcagatcagaccagactggtgaagaaaataaagggctctactttaatgtaaaccagctctacataggaaaaaaaccagcctcctcatttgctttttcaattggagtgaaacattccatattttataacaagtaaggctgccattgttaaataaatagcatttaatg

SEQ ID NO: 251781 - DNA, 283 bp, Gossypium hirsutum
caacattatgctttggaatgctgttatatttggacttgatgacaccccatgggatggagggtacatgaagattggataaccaggaatgtagcagatgtagtttgcattgtattttttattaccaagatttacttgattaagaaaatgcattgtattttttattaccttgcaatgtgtatggtcataggcaagttcaactagtcagtctatttctcatatgtattattttttagttttgattctaaatttttatttttactttaatatttacgataattttatt

SEQ ID NO: 251782 - DNA, 383 bp, Gossypium hirsutum
catttttacgatttagtccctaagctcgtataatgaaacacatgaaatttctatcttacccaagcctagccgaacactttttttcctcttatggaagcccacattttccattattttcacagttctaccacacatttaacaacttttgcaaaaaggtccctttaggagtttttcatgaaaatcacctaggaaaagatgtttaacacacatgcaactttcatattcctctataaaccatcaaaaaacaagtaactcatgcatgggtaaatttttaaacataaatcttatcatgaaaatatgggtagaaatggagagagcaagctatcgggatctcaaaaatgcaaagaacattaaaaacggggcttgggagtacttactaataa

SEQ ID NO: 251783 - DNA, 283 bp, Gossypium hirsutum
cggacgcgtgggtttaggtagctatgtggagccattgctcctcttcatcatctttttaattctcaccggtataaattttgagacgatgtctatttaccttaaaagggtcctgtgatggatggcttacctctactgagccatattgaaacactattttgaactactaataggaccttgcccatcttgaattaaagcttttctaaggaaacaaatttctagcccttgagtttatattaatattgacaaagaatctctcaacttttaaaattagtccttttttttt

SEQ ID NO: 251784 - DNA, 367 bp, Gossypium hirsutum
atgaaccagtgtcgctggttccgcgcgtgactaccttttttttgcaaaccagttattccagtttctggtctaaaaaactctgtggctgtacggtagccgaggaggttccagcgcggcggaagtacccagtagggaggagagagaatgtcttttcgaggcggaggtcgtggaggctttaatcgaggtggtggaggtggcggcttcaaccgaggcggcagcagcaaccacttccgaggtggaagcggcggtggaggcggcggcaatttcagaggcggcggcaggggaggatttggacgagggggtggccgcggaggctttaacaaaggccaagaccaaggacctgcagaacgtgtagtgttattaggag

SEQ ID NO: 251785 - DNA, 145 bp, Gossypium hirsutum
atgaaccacagtcgctggaaacgcgcgtgactaccttggttttgcaaaccagctattccagtttacggtctaaaaaactctgtggctgtacggaagccgaggaggttacagcgcggcggaagaacccagttgggaggagagagaa

SEQ ID NO: 251786 - DNA, 387 bp, Gossypium hirsutum
ggaaactggagctatagtacaagtttacggcattaaagcaaatactggagagaaggttgaaatttctactcccgatggtaatgaaacccaggatgcttatgaagagctgtatgttcatctatcagctgacacttttgagaaagttgatggagcggtggcgctgattgagttgctagttagttcaatatcaggaaatttaggtgctggttcagtgcctgcgatatctggtaatgatgtgaatgttctaagtcaaatccctgacacagctgtatcatgtgtgactgatgctgctttaaatcagcaagtgccacaacttacaatagcatctccacaaggtcagtttcaatatcagaattcatggttccctaccagctctatgccgctgaa

SEQ ID NO: 251787 - DNA, 163 bp, Gossypium hirsutum
tggaaatcttctatagggatagacctattttagatgatgatagtcaagagataagacttttgaaaatgctaaatttttagaaatacaataataataaacatagaaaatataatattatatagcaaggtggcttctagacttctccaactagtactagtgttgg

SEQ ID NO: 251788 - DNA, 338 bp, Gossypium hirsutum
attgtctacatcaacctcaataagctctgcctcacggtgtaccagctgcatgccctgcagcccaactccaccaagaacttccgcccagccggaggcgcggtgctgcacagccctggggccatgttgtaagtaggcaggggagaggggttcgggcatgcctaccccatccctctgcacctagagggccgggccccccctcagggaccctctcaccgcccacagcgagtggggctctcagcgcctggaggtgagccacgtgcacaaggtggagtgcgtgatcccctggctcaacgacgccctggtctacttcaccgtctccttgcagctcttgcagcagc

SEQ ID NO: 251789 - DNA, 394 bp, Gossypium hirsutum
atgcccggcccggcccttatccctctttctactatatagatgtggtcaagattctaatctttaaaaaggacattccccccaaccaccaaaaaaaaaaacccttataattgcatgtctctgtttgctgccattcccacagtccttcccttcagtctagcttttaggaaaagtagtctgttctttactttctctcttttcttgactctgttcacccttccacgcactgcattctgatggtggcgggttttattctgtgtcctgactgtgccactgaagctgtgctcactgaggccaccctgacctctttgacatatgtaatgggcagtgcagcttttgtcttatgagtcctctgttacccttcacgtagctgcttttcttgttgaagcttcttgat

SEQ ID NO: 251790 - DNA, 385 bp, Gossypium hirsutum
ggacaaggtgtcagatgttggttgggatgcatctggatggaataaaaatgttgaggatgttgacaaatttgctgcagctgcgaccagttcggagaagcaaaatgagtggtctggttggggtgcgagcaaatctaactctcaagttgtctctccaaaagtggatgttggttgggatgctttgtctggatggaataaaaatgcggaggaaggtgacaaatttgcagctgctgcaaccagttcgaagaagaaaaatgagtgttctgattggggggcgaggaaatctaaatcacaagatgttgtctctccaaaagtggatgttggttgggatgccttgtctgcatggaataaaaatgcagaggatggtgacaattttgcagcagctgca

SEQ ID NO: 251791 - DNA, 364 bp, Gossypium hirsutum
cggacgcgtgggtgtacaaaaagctgtatcaaagcttattcgatgcacatgttgtttctcctttacatgtgaagccttcacagcctgcgtatcccaaatagtatgacgcaagtgcacaatgcgattatcatgcaggaattacgggacactcaatagagaatttcattaccttcaaaaagctagttgaaaaattcatcatcatgggtattgacaagttggatggctcatttaatgcagaaaattcgctacccaatcatgattgacaatagggtgaatgcaatgtattaggagatgttggaagttgtcacatcaatgacatatacggagacacaaatgaaaaggggaccttttgatatctgccctt

SEQ ID NO: 251792 - DNA, 400 bp, Gossypium hirsutum
atcttttccattcttccaggtctccagtatctattattctactctgtatgtctatgtttacacactgttatctcccatcttaaaaccttttaaaatatgaacttacttaccttattttctcctccccccttaattattgtatcactttgttaaaataacttctgtaacaatattttacttattatttaagaaatgatgattcattatatcataagcaaaaaagtgtaaagtctggagttcatttatgactttgtgacatttgctgtcaaattataatgctgaatattatgtctttttattttagataggttaatccatttaaaaagtcatgccctggaagtggagaggatattctagagatatttgctaacatataagatcaatatccggtgtcagaaag

SEQ ID NO: 251793 - DNA, 289 bp, Gossypium hirsutum
gctcttcctcctcgcgaaacgacgcggaggatgctgtcgcaaatgacacgtggcggggtgttttgataaagcatgacactcattccagcacgagtcttgacgattgaagtgcccttaagcttcttcacgtctgactatgactgcccacccacacagaacatatcctgtgctccagctatgtataccattacctgtgctggttcgacctactgataaagggcgtagcacttgacgttcaaaacccgatcaatgacctttgccagaacacaattggggccgttacccaatt

SEQ ID NO: 251794 - DNA, 354 bp, Gossypium hirsutum
atgtttgttcatctgtagctctaaaagatcctttttatccttttaaaattcagtcctaagaatgagtgcttgtcccctaacagtgtttaatggcaaggcagccttgtccgaaggacacctccagcctaaaggtgagcgggatctgcatactagaattctagtgctgctgaatcaatgggaaatactactcctgtaagttttacctccctgcaaccaactacaaccaagctctctgcatctacttccacgtacgggattcaagagagtaatgggtttcatatttcttatcaccacagtaagttcccactaggcaaaatgagagggcaatgtttccttattggtacttattactgc

SEQ ID NO: 251795 - DNA, 384 bp, Gossypium hirsutum
atacccctaatttgtgaaattaccaaaatacccctaatttgtgaaattactgaaataccctcgacctataaaattattgaaatacccttgacttgtaaaattaccaaagtacccccgatttacagaattattgttttaccctcgatttacaaaattattaaaatacccctataaggtagaattaccgaaatacccttgtagggtagaattatcgagatacccttgtggggtaaaattaccattttgcccctagggtgttgaatgaatgttttgcccttgtgggcaagtgactaacgtggactgtgtggttgacggaattgattgtgaatatatgttggtgatatgaatgacttgactgcgactggttgattcaaatatgggcat

SEQ ID NO: 251796 - DNA, 384 bp, Gossypium hirsutum
gttacggccgaattcggcgtgtcacattgaagtgtttttcgaaaaccatgttttcattaaaaacccttcttgatgtaaaactcattggagcgttattgtaaaactcatgttttaattaaaaatctttgagaagaatattttcgttatagattaaagtgaatggaagctgtgcaccaagtaggaagccaaaaaagaagaggtgagtctattggactgcttaagtaccaagctcttcatggatccaatcctagacatgcacacatccattgccacacttaaagcatattacttgtccatgaacaacaaattaagtttaagtccatttaaaatatttatttcctttgaaaatatttacgttgcggaagctttgctcggtaatcgtga

SEQ ID NO: 251797 - DNA, 380 bp, Gossypium hirsutum
  unsure (1)..(380): unsure at all n locations
atgtgcggactccgctcctccgcggcccgcccgcccgccggtctagccgccgcctccctcgctccgtgaacgcgccaggcgagggccagcggccggggcgacgcggcgcggagagggcgggcgggcgggctgtgggagcgccggtctctatatggcggcggctctgtcgggcctggctgtccggctctcgcgctcggccgccgcccgctcctatggggtcttctgcaaggggctgactcgcacgctgctcatcttcttcgacctggcgtggcggctgcgcatcaacttcccctacctctacatcgtggcttccatgatgctcaacgtccgcctgcaggttcatatngagatccattgaaggccctcccagagtgatgaag

SEQ ID NO: 251798 - DNA, 284 bp, Gossypium hirsutum
cggactgaaattccgggtccaacccaaccttccaaatggaaaagaagggtgtgaataataaaaaaaattttaaaggaaaggccaatttgggggggggtctaaacaagggctcttcgtgaagagtttccccaacatctatactataacctctattattgaccgcacggctgcttcaaacatggttgaggcagaaccatacatcattaagctgacggaggatcagataatgcagctactgtcaggtttctggatacagaccacacattcttataatttgccttcaa

SEQ ID NO: 251799 - DNA, 378 bp, Gossypium hirsutum
gcgaacgagagtttctcatccgcggttcctacatggaatttgacattgaagaaaataaccaccttgttgctgaagagagtgcttgccagcatattcatcatacaaaagaggccgacttttacactggccaaattccatagacaaatgccagcaagcctgcactatttatgagcctgtttatcttctattggtgacaaacatcaaacttcgtttgagactgagactacacatattctttttcttcgtattacccatccagacctcatatagttccaataatgagcatataatcattttctagcttaatgccaaattgatggcacctagagtcattcatcacacacacaaaaaaaacataatgattacacgatcaaagct

SEQ ID NO: 251800 - DNA, 142 bp, Gossypium hirsutum
ctggtgccggattttcttcttacccatttgggccggattttaaaacggattttgggcaattttaagaccattttgttttgaggccgattagttaagcaggcccgacaaccggcaacaaccggttgaccggcctggccggctt

SEQ ID NO: 251801 - DNA, 346 bp, Gossypium hirsutum
atgctaatttgtggcttttacgaccctaccccaccccctattttcaggggtttagactacatttgaaatccaaacttggagtatataacttcttatcgagcccaaatgctttttttttttttttttttttttgcttctctgccccttgtccatttcttttgtatttgttttctgtgagagcgctgaaatggcggccctggaatctagaatttggctctccactgagcaccttatcttgccaccttagccttaagaatgaatatgaagaaaaatacacagccatctctgtccagggcagtaagaagggggctgcaaggaaggggagattggggataaggaaaggaac

SEQ ID NO: 251802 - DNA, 241 bp, Gossypium hirsutum
acggttctatcacttagaattacactgccaattttgatctttctaccagaagaagtgttaggctaataaatcatcatatctatctcttcaatttgttcctgcaatgcataatgacattcatggatattacagggattaatgactaatgtgcatgactagcgctaggtggacatctgctaatgatgtttacattacactgctagacgaaccacattagctacaagtgcaaaatctgcgtaaa

SEQ ID NO: 251803 - DNA, 388 bp, Gossypium hirsutum
gcgatgaatagtagatgacataaattaactgtaattgaactgtaaactgcggtaatgctccataaccctggtctagcgacggatacagattaggggtattacatttattggtatcagatctaccgtttagctgattctcagactaacgtaacaagtatagagtgatatcttctgaccattataaacatgttttccatagagtaatgtcatacaaccaagctagacttgaattaaaggagctgagagcattgatcaagctttagttcaaagaactgcatgtagtattactagaaggctttcgattgataaaattcaaaaatataaggtcgaagaatttaggggtactaccaaaactgaactgggaagagctgtattttggctggaaaat

SEQ ID NO: 251804 - DNA, 134 bp, Gossypium hirsutum
acgtggctcgtcccaaacgttcagttcttgcaatcaattaagggaagccgtctattatcctattacaaccagacttatggtgctaataaatgattttttcgttgccatgaattcgcctagcataccaatcttta

SEQ ID NO: 251805 - DNA, 262 bp, Gossypium hirsutum
gaggatggccatatgatgcatttcacctgaatactgacgttgtaaagtgggcgggaaaaaaagagagctactgtctaatcatcagatggtttacgccctgcaattatggatcctgatgacctaacgatttcaaaagttttcatcgtcatgcatactggaaaggaaaaaacaattgagtttgtaagcagattgcctaacgcttttactgtgattactatttacgctagagatcacgaccctttacatttgaatagaccttatg

SEQ ID NO: 251806 - DNA, 320 bp, Gossypium hirsutum
atctccggatggctcacttcagaccagaagcacagaacgggctgtttctggcgcttgggcattgggaggtggggagctggtgggcaatgggcttgccattccctggcactggacattcaggcctgcagaacaggcaggtgacgaaggcaggggagagacgccctttctcctcccggcgtgcctgtgggtgaggcctccagagaggacgtggagacgaggtaaagaggatggggacataatctgtcaatttccttagaccagaagcgggtgggggctggacagaaagggatgaaaagggaagtggaagccatgagcctcac

SEQ ID NO: 251807 - DNA, 370 bp, Gossypium hirsutum
ccggaactgaatataaaaggacaatgggagacctttttctttccattttttgagggtaaggaggctagaccctcaaaacatgggaaacgagggctaaaaagccctattttgcacgactccgaccaccgtctgtagtggagccacggtggagatgcagtggattgacggtgggctccaaagttgggttgaaaccctagcagagaaagggagtgttttaattttttttaaaacaaaacattagaatgagttttttttttaaaaaatttgcttttataaagggtatgaaacggcgtcgtttatggcctatagtggcctcaaaacgacgtcgtatagggacacccacacgcgacccaacccattccatggggat

SEQ ID NO: 251808 - DNA, 352 bp, Gossypium hirsutum
cccacgcgtccgaaaacttgtcagaagaaaataaatgaagagttagaaaagaaaagaaaattttaaattgcaataaaagtaaaatggctaaagtaataaaatcgagtgttcctaatatcttagttcctcagcaacggcgccaaaaacttgatacgtgatattcgtgacaagttttaaatatttataatgaatcattcttaaaactaactattatcacgatgaaggcaagtgtacctatcgaacagtagtatagatttagcaagaccgaattatcgaacccaaaggaactaaaagaactaggatcaactttcttttattatctagcctaaaaaaataaatggggtttgtttat

SEQ ID NO: 251809 - DNA, 316 bp, Gossypium hirsutum
attattaccgatgccgaaagctatcacatctgttgatgccatcatatgaaacagaagcaactatgtccattacaaagaatacttcttgatcaaactagttttttaaacatacatatcacatagtatccaccatgactagacatgcacagaagctaatgaattgcttatcatacccctactacaacaaagacaataatgaattttaacaccaaagtatgttaacattgcctatggcatctattggatgacatatcaagattgacgaccttacgctctgtaatcctacccaaacggacattaatgccaatatcgcatg

SEQ ID NO: 251810 - DNA, 231 bp, Gossypium hirsutum
atcaggaacacagtccagcaaacagcagcacgcagttaaaaggaagactcataggagacagttgaagaaggaaaggggcgttggacctaatcccaaatttggccatggaaacctggtttttcctggttgtaaacctggggcttctttttttttacgggacccgttaatttggactttttaaaaaaaaaggaattccagggcccaacacttttgcttttttgggaaaatttt

SEQ ID NO: 251811 - DNA, 370 bp, Gossypium hirsutum
cggacccgtgggttagccgccaaattggagggatggggttttaatctaaaattattaaactaatttaactaaaaccgtaccaaaaggggaaaggggaaaatattcgaggatacccaatgggatagacattgccggggaaggaataaggagacggtaattcctagcacttttagtcctgggggatccgtattctttactcaccatagctatactatggttcgataggtgcacttgcctttgtggtatttatagttagtttaatgaccataaagttttgggcgctgttgccggggattaaaatattatgaacactttatttttattaatataggcatttttttattatttttatattttttttagtttaaat

SEQ ID NO: 251812 - DNA, 165 bp, Gossypium hirsutum
ggaacctaaccttcgggacgggtgaggaaaaaggagattacttgggtaaaattttttaacaaaaacgggaatagtttgggtaactggtaactttggatgctgaaggttcacgttttagggcaaatagttcacgataacctacatattgtgacctttatttttgtt

SEQ ID NO: 251813 - DNA, 355 bp, Gossypium hirsutum
ctgctctcatgctttgttatgcagataatggactttttacccaggctgaggcaatatgggaggaaatgctaaatatatcatcttttatgcctgctattcctctggtttcaaaatttttggatgcttacggaaatatggggcaatttcaccgagtacagaaaattttggatcatgtaattcttgaaaaggttaacttggtacccccaagtgtacccagtggctatctcttgctttggaaagcatgggcaggttgatctaatggagaatacattgaaggagatggtttcaaagggcttgtccatagattctgccactggaaatgcttttgttagatattataacattttttgtttct

SEQ ID NO: 251814 - DNA, 125 bp, Gossypium hirsutum
atcgggcacatgcggacaagcacgcaggttaacggagtgggttgacttagggttgaatgaaaacccagttaagcttgcctttatccccacttgggaaaattattgaaaaggtgtatcaaatgttg

SEQ ID NO: 251815 - DNA, 294 bp, Gossypium hirsutum
gttattaccgagtccgaaaggtatcacatctgttgatggcatcatatgatacagaagcgactatttccattacagagaatacttcttgatctaactagttatttaaacatacatatcacatagtacgaccatgactagacatgcaaagagctaatgaattgcatacatacccctactaaaaaaaagacaataatgaattttaagaccaaagtatgttaacattgcctatgccatctattggatgacatatcaagattttcgacctaacgctctgaaaccctacccaaccggaca

SEQ ID NO: 251816 - DNA, 244 bp, Gossypium hirsutum
ttttgtatcaaggttgccattggttctgagcatgaaagatgggatctggcatgttgttgatagattcacaatgttgggtcaatttattcccgtacgtatagataattaacttgatatgttaaacgaaatatatgatattcatattgtaaagttaccacggggtacctacttttattgggtaggatagagatcctagatttacattacaagtttagaagattttgtatgtaacatagaactcttt

SEQ ID NO: 251817 - DNA, 380 bp, Gossypium hirsutum
aacgcgacactaaagtaacaagagggaacgcaaaagcacccggagacccggcccaaaaacccggggtaaagacaaccgaacggcaaaattaaaatcccgggggcccaaggtaaaaaagggatccaaataatggaaacccagggaacacaaagggggaataaatgaacacggggcctccaaagtggaaaaaaaaaaaggggtaaaggggtgaaaaacaacacaaagaggacgcaaggcacaccactaagggggggggaacaggaaaagccaaacccccactaatagaaaatacccctacacagtgcacccccgaacaaaaataaaatggcaaaaaaaaaaaaaaagggggggacgagctcaaagaaaccccccgagggggg

SEQ ID NO: 251818 - DNA, 383 bp, Gossypium hirsutum
atgccagtgaattgtacacctaaaaatgggtaaagtggtaaatttcattacaagtttttcaccacaataataaaataataataccagaagctgaagagtaatcaggacctcagtattactcatagccatgttgtatctaatattgggcagagcagaagcagaaaaaggaagaagttggagatttagaaactagctcaaaagaaaaaaaagtatagatttttatttaactgttttagtaaaagtttagtttttactttttttctcagttatcaggaaacacatgttttaaatttaaaagatgggagggaaactacctattactactatcacctaatgtttatcttaaaaaatttgtcacctactgatatggtttggatttgtgt

SEQ ID NO: 251819 - DNA, 388 bp, Gossypium hirsutum
atgtttttagcatttgcttttatttttttactttgatgccttttcagattggcatgtctctaaagtatttttcttcctgattaaaaatgtgtgtgtatgtgtgtgtgtatatgtatatatttttttaatcacattaactttaccaagtgaaaccaagccatactgtgtttgagccaattaagaaaattgccatttttaaagtgtagcatttcagggtaaagatccataaaatgacttgatgtattctagactactgaaagaaaaccacttcaaagattttgttgaaagttttagtgttgtctgaaaagcaagagggaaggtgattggtagtgagctaaaagaaaaagagagaaaaagagagtagttttgtcttcaggtaaaatgtctg

SEQ ID NO: 251820 - DNA, 312 bp, Gossypium hirsutum
cccacgcgtccgttaatactcgaaaaacatcccaatattgggatatgttacgtaagtgttgaatttaatcgagcccttacaaataaatattcgctcagttgatgaacgagctaccggccttcggctaagttggtcttttgtgtatgtacataagggttaacgttgtgaagtaagtttgatgtcggaaaattgtgtattatgaaatattccgtgtagctaaatgtgtgctattctttcgttatgctggaatgtctgctcaaacttactaacataaattgttacttcgtccattgctccctgtttatagatttt

SEQ ID NO: 251821 - DNA, 207 bp, Gossypium hirsutum
cccacgcgtacaattggactgggaaaacaaatcaattttgggatatggtacgtaagtgtagaattaaattgacccctgacaaataagaattcgctcagcagatgaacgagatacacgtcttttgttaaattggactttacatgtatgtacataaaggttaacgacgagaagtaagcttgattaagaaaaatagagtatgatgaaaat

SEQ ID NO: 251822 - DNA, 268 bp, Gossypium hirsutum
atggccttcattgctgcctatgggtgcggggcagagtggcaaagtgatggcggagaggcacagggcaccatgggggcccaattcctacttcggggatctctgggatagagccgagggtcccctttgtgggggtagatcactagggttaggcgttcctactgtctgtgcggacctgagtcctggacatgcccaagtgcctcaagtacggatgctaggacggtctcgatcgctctaagatgtcatacatttctggaactggacaggtgca

SEQ ID NO: 251823 - DNA, 357 bp, Gossypium hirsutum
gtctatgaccatgcatgtctgcctacgacgaggggtaggacctttgaaggagcatgtatgtctccactcgaagaacgggcctgcgcatgagcttacagcgacgctcataggtgtctgtccaactgatgccatatgcgctgatgtggacgaaacaaatgagccgatgcgagcatttgcatactgtacattatatcatcgagaggaattgcaacacatgactttgataaggcctgaactatcacaagctggatacacattctagcgggtgccgtactcatggctgttaaagagctagactacacatacatggatggtgctgagaatgtgcacgcgaccgaccttattgacataaacagc

SEQ ID NO: 251824 - DNA, 370 bp, Gossypium hirsutum
attgagtcgaatcgaattttactcaccttaacgaaagctgtggtaatgagaacttgttagctaagaaggaaaaaaggaggccaagtctaaaatgcagacaaaatccaatgcaaaaatacagacaaaatccaatgcaaaaatattgacaatgacttcacgttttatttccgcaaggagttggaactctgctgaccataaatgagaaatgccatatttatataatcatatatactaattatagaagtattgattaagttccgccgtgttaaaaacacattaatacttgaataatttatcttactatttattgttttgaattaagtgaaattaaaatcaatcaaattaattgctttcgttatttcattaaatg

SEQ ID NO: 251825 - DNA, 367 bp, Gossypium hirsutum
aaacacctccttccacccaccttttcaaaatatcagtttgtttctttgattccactcccttgtattaaccattttgtttgaaatttagtaaaattgtttgtttgaaattaattaataatatttttatttaaatatatactagcttttaaggtaataataatactaatcttcttcttcttaaaaacagtggataaggtaagaaagtctaattttgttttgtttgtttttaaatttgaggtggttttctttcagttattaaaccctaaacagaaccgaacatgaaacagaaagaatcagcagcagcctctggttttagttttatcatacttatctctctctctaaaacagtctcttctcttcgtctttt

SEQ ID NO: 251826 - DNA, 319 bp, Gossypium hirsutum
atgtccaccctgtcccatgacttgattacttttgcacattccctggccacttctccccagggctgcctgctctgtgggccccacagccctgctcatccctcacgcccttcaatgctgcaggatggactggcccctgacctagggactctccaaatgggacacaggagaaaagctggtctagattgtttgctgatccccaacctgcacggggcattcctgctcctctctcaggccaccacagagggcaggggatggttagccagctgccccagcacccacaccctaactcaaaataaatgttaaataagtgcgatcacac

SEQ ID NO: 251827 - DNA, 265 bp, Gossypium hirsutum
aagaagcccaccatcactttcagggaaatccaaaacggttgttaaattggtttttcttgaaaacttggccaaaccccccgtttttaagggccccaaacccgggcccaatttaattagttttggatttggaggaatttaagggtaagggtttccccttcatttttgcaaccgaagtttgaagaccgtgaagacctggggtaattattgatttgaaaaggaagaacctttttttttttggaatatataaaatgcttatggttggctt

SEQ ID NO: 251828 - DNA, 217 bp, Gossypium hirsutum
atggatttgggtattccactattattacagtcgaaaaaaatgatctactgaagtgatgagttatttagcaatatatgagaaggtttcaactactttaaacccttctaataaatgaattcacatatgcatcgttttaatacatattgggtagctaaaacacattttttttattaacaaaatccaatttctaaaggggagtcttttacatttctgaaaa

SEQ ID NO: 251829 - DNA, 369 bp, Gossypium hirsutum
gttcaatattaattcgacatggaaatgagaaagtatgtaagtttgtatgtaaataatacattatctttattatgtttttgtatttcagcatattttatgtattgtagctgatttttgaatcataattgactattggaagtatggaatcaagtattagaaagagagagaaatcccggttaaaccttcagaaagattggatgatacagatggtatgtagctaggtcacatgtatggtgctgagtgcacatcatgtgtacaagagagctacgggatatatgtagctgggtcgcatgcgtggttccaggtgaaggacaccatgtagacaagagagctacgagataaactggctaggtcacatgggtggtacta

SEQ ID NO: 251830 - DNA, 264 bp, Gossypium hirsutum
cccacgcgttcgcattgttgaatctcacctgcaaaatgcaaattgctgtgtgtgatttaaaacatggatggcacaataaacttaaagtcctaaagcggaaggagataaaattttagagaagagaatccaaggccattttgtttctccagtaaaatttttgtgttatataaactgaaaactcacggtctctaattgcttgtcgcttgctacatgaaaagctgtcaataaatggatccatcaattttcataacgttcttgcgccaa

SEQ ID NO: 251831 - DNA, 241 bp, Gossypium hirsutum
ctagagggaaagctggaacgcctggaggcaccggcccgaaatccggggtgcgacacacacgtttgaatacgtgtgctttgaggaccagacataccgactgtatgctgaggatggaggctttgagctataattttaccattggaactttcttctatgggaccaagatacttgatggttaatcaaatgctataccccaaagaaacaaaaattataataaaagctgctgtctttatgctaacgg

SEQ ID NO: 251832 - DNA, 308 bp, Gossypium hirsutum
cccacgcgaggaacttctatccacactgaccctttaggtcctaaccctaatatcctgaattgaacccatgccatgtttgtcggacggaacttggaatccccccaaacagttgtaatgttggcatggataacctgctttgagaccaaaaactcccccccctggcctcggacaatcatacccaaaagggatcctgcattttgctgatcaaagggcgcatcaaaatacactgagattttcgcacatttctcaacagttcgcaagacaccatttcctgtcaaatgatcccaataccgtatccaaaaaaataa

SEQ ID NO: 251833 - DNA, 297 bp, Gossypium hirsutum
atttttaaaaaattttacaaacggaaaccctaattttaatagtggtaattcctaaaatttttccaaatcgcttatttgaagaaaataaaattttttgaaatttgaattgaatcccccaaaaaaaatatttgaaattaaaaaaaatactaaaagtgcgaaaacttttgtcgaaaactataaaatatacacccccctggttgaattataaaaacttaatttaaatttgttgaactatataccacaatagtgtaaaaaacttttcaaaaataatactctaaaaataattttttttatttt

SEQ ID NO: 251834 - DNA, 324 bp, Gossypium hirsutum
gcgcccacacgtccgcggacgcgtgggcacagcctaaaaccctccacgcggtctgacacacaatcgtgtcttctctgtagatgaagaaggcatgttgcacacggccatagtctattatacggcctagccacacgactgtgtaacccttccacatggcttaaagcattgcacacgacgatgaggggcccttatacaacagtgtgcagcatagttgactactcaatcaagtccctacattattattaaaatatttttagaataattctctttcaattagttctatgatattatgaaaaatgtagaatctgtgatttgatggatgaa

SEQ ID NO: 251835 - DNA, 301 bp, Gossypium hirsutum
cccagacgttcgcttttgagatggtagaaacgactatgcttcttgaagccatgcaccctacgacagcattagttgatcttaacaatgatatggaatacaatccattggctatgcatattctctaagggaaggacctggctgcatcttaaaatgcgggatttgcttgtatgacataaccagctgctgataggacttgcggatgcatagaaggaaactgctacaacaaggatcatgattgcaatgtaaacacataatgaacgctactgtgttaaaaaaaaaaatcaaattataattaaatata

SEQ ID NO: 251836 - DNA, 138 bp, Gossypium hirsutum
atttttcacaaattgtacgaacggaagcccttattctcatagctcgaattcctataaattgttccgaaatcgcttattggaagaaaataactttcttgaaatatgaattggatccccccaaatgaaatcttgaagttg

SEQ ID NO: 251837 - DNA, 371 bp, Gossypium hirsutum
cccacgcgtccgcggacgcgtgggcacagcctaaaaccctccacgcggtctgacacacaatcgtgtctcctctgtagcttaagtttgcatgttccacacggccatagtctattatacggcctagccacacgactgtgtaacccttccacatggcttaaagcattgcacacgaccatgtgcccttattttacagttttgtccagaattgtaaactattcaatttagtccctacattattcttaaattatttttagaatttttctctttcaattagttctatgatattatgaaaaatgtagaatctgtgatttgattgattagattattactatttgtacgtgatatgtgattaagtacatgtcttttatgac

SEQ ID NO: 251838 - DNA, 330 bp, Gossypium hirsutum
agatacttctctttctcaaatactgcactggttgctaaaatcagagttgcatgcttgcttctcacgcctagaatgtcaggtgcatttgtgcttgagattcctgactgatctgttagccgcaacaggctgatgctgcaggatgcgcatgtgtgggggctgagatgactttcttgcatcatgaagatgaattgggagagatcttctcctggatgaatagaagtgccatgtatcacaatcaagttccttactcttctctgctcaaaactgagtttgcagatggacaaatcttgcaccattcattttgtacttggttcatagagaagatttatc

SEQ ID NO: 251839 - DNA, 226 bp, Gossypium hirsutum
atagtttcttatcataattcttaacacaatgtttctgtgtgggggagaagtttatggtgagttggaatgtctctggtcagaggggaggttatcttggggctgacatctctcagattagaggggaggatgtctcggggctggcgtgtctctggtcagggaggggtttatcttatggttggaatgtcgctggttggaggagacatttgtgatttttggtcattctaac

SEQ ID NO: 251840 - DNA, 323 bp, Gossypium hirsutum
caatgttttaccactctgattagtggtagtagttgtgttggtaaaatattagatttcaaatcttgttaggtaagcttagtctttttatttcaagggcaatagtggtagtagtgggatttcaagaacaacatttattaaatgattattttaaattaaaatccaaggtaagcagaggtgtcaaattatgaaactttcagttcataagagccttagtgtgaattatggaattttgtgaaccaattggtagatagttgaatttcaatttcggttttaatatattttggactagatagaatgagtggggaacaacatgattacaactt

SEQ ID NO: 251841 - DNA, 345 bp, Gossypium hirsutum
tcgaaaagaaaaaaaaaacaccaataaatgagccttcgcatgacaagaacgagcaatagggtttttattcatttcccttttctctgcacccaaagcctcaccttcgtggattttgtgtgcaattttttcttataggcagccgagcggtggctttgtgcaactatggctggtattgagcaatgtgaggcaaatgattctgcttcttctctgatagagcaactttataaggcggttcatgaactggaagctttcaaggatgcttctgagaacaaggttcattggacagaaattgaacaatttttctgcaatcttgaagtgacgtttaagaagaaatctgaagagcta

SEQ ID NO: 251842 - DNA, 164 bp, Gossypium hirsutum
gcgtccacacaaacgaatcttttttttttgtgccataccaggaattgaactagcaatgggcttaaattcgaccgcattctgtctgtaaccatagactaaaaatcttggacaatgagagctatgaacacttataggctcacaacccttgaatattaactactata

SEQ ID NO: 251843 - DNA, 311 bp, Gossypium hirsutum
atgggaaatcaaagttgctacaactatctgtataggatgaaagctctggatgccattcgacctctgaaatcccatttcattctgaaggccggcatccccgttccttaatgggcaagattttccgctcctacctgcttgatctgcgaaacactagtacacctttcaagggtgtacgcaaagccctcatcgataccctattgggtggcttttagacagcccgctatgggacaggggtctttggccagaatgaagtccttccctatcaagaagccctgagtgagccggccactggggtttaagcacgaattggg

SEQ ID NO: 251844 - DNA, 405 bp, Gossypium hirsutum
atgtagctgtctccgcgttgtcggacagcggcacctagaggttgagacttggcattgcatctatttaatgaacttaagtctgtgaataagcctttgtgttaacgactggtatttggtcacagcatatttagagaaaagacttggagcttaaataaaaacgaaggcaaaatagacgctaagctgctgatctacagagaacttcttgtaattaaaatagttcaattcatagcgaactagggttttaaactattgcagtagctggaactttttacggtaaccatcatttattggagaagtgagtcacaaagaaattaaaatgagtaaaagcaaagatgatgcttctcacgaactggagagccagtttatcttacgtctgcctccagaatatgcctctactgtgagaag

SEQ ID NO: 251845 - DNA, 285 bp, Gossypium hirsutum
atctttgcttaagagcgccataaatattcacagggagctaggctcctatttcataggttttagaaaaaaaaaattctaatatacacacatgagtcaaacagtctgcagtaaaaagcattcaatgtgtaattgttataatacactataagagggagtaaagccttgtcactcaccagatgaaatctgatctctctcaaattatttcacccaacaatgtcaaagacattactactgtgacatatttcaacctcaaaacatcttatgggaaacacaaggtaagtttta

SEQ ID NO: 251846 - DNA, 246 bp, Gossypium hirsutum
cattagtttatgagatattggaaaaaccagcaacaagtgtataataggaatatgtagcggtatatggttttacatacagataataaacattggatatcagcatgttggcttaagttactaaacctcgatcgaaggtgaccattggagggtaattacttcagcgttttcacacataaggcgtcttaatctagattgtaacatgagagccctttggagtcttgggggtattgaacagttagatcattt

SEQ ID NO: 251847 - DNA, 194 bp, Gossypium hirsutum
tcgatgaccagtatgaacattctgatggagaggtggctctaacttgttggctcggattaggtggatttgctgaaccaaaattcaatgatctaacctacttactatgattgttggactgagatataaaaagttagtgatctttgaaataaaggctcaaatctaaaatctttcatttaaaagctttttctaattta

SEQ ID NO: 251848 - DNA, 120 bp, Gossypium hirsutum
tcgcccacgcgtacgtgctgagcagttttctggagccttctctggattttcctccatgggttggagttctatctagcaggcaaattgtacaccttttgtactgcttaggctattatttct

SEQ ID NO: 251849 - DNA, 224 bp, Gossypium hirsutum
atcttttctcagccacaacaaaccccagtctgcattctatctctgaggattagcctattttgaaccataccatatggggccttccatttctgacaactcattgagtgtcatagttttcaagactggcatttgtcagagcttcattacttttttataggtagcacagtattacattatgtgtgtgtaccacaatttacctgctcatccactgatggacattcaag

SEQ ID NO: 251850 - DNA, 164 bp, Gossypium hirsutum
gcaggctggtgccgcgccgcggtttccgggatgggccctattgcttctctgattgctacgagcttactatacgcagacatgattgacagaagcagtgtgtccaaagcgggcctcggtgcttcagctgaggctcaaccattcgtagcagtggcaagagaggcgcc

SEQ ID NO: 251851 - DNA, 384 bp, Gossypium hirsutum
attttatctttatgatatattcataatatatagtaaatttataaataattataaaatagtaatatatgatgcaataatataataaattattgataaatctaagctattatttaaatttctgtttgagttagtgttacgagtcaatcgggcaccaaatcaattaaaaaaattactcaaatatttctttggaagtaaaataattatattatttgaagatatttttatcattttattttaacaaaaatcatttgaaatatactttactttgtcttaattcgttctaatgcctttggtttacttattttaatttaaagatttcaaatgaatagaatattatgacattttgcttattcattatttcttttttttttccttaaatttaat

SEQ ID NO: 251852 - DNA, 311 bp, Gossypium hirsutum
atagttccgattatgttaccaagcagaggtctcactcccagatgcacattgaagccatacaaaggtaccagcttttcaggaaaaaaaaaaaaaaaaaaaaaagcttctttattgccatgtcaattgacaaggagacaggagacctcattctcccagagctggggtctcagggagggttttatgggaagagtaaaacggtgagggagacggaaaaatgcagtgaggtatgatttgattgagctctgcaatgaaggcatgctaggccttttgctcttaaattcctgttgcaacaaaacaagactccctttagt

SEQ ID NO: 251853 - DNA, 236 bp, Gossypium hirsutum
  unsure (1)..(236): unsure at all n locations
atatttgcttttcttgttggagtcattctcttaccttggtagagctggtgtaatgnatttttcttgttgtgtcctgctaggtgagtttagtaggtcatgaggcaaccatctaccatatataaattgctgcatgatatcaaatagaattggtatctatgcttgcgtgtgcctgaggtggtgtttttttatttacttacatgctgctctgcctggcataggttagtgacgtgcttttt

SEQ ID NO: 251854 - DNA, 328 bp, Gossypium hirsutum
tccacgcgtacggtgggttcaaacttttgtttctaatataaaaaagattgcacatgtgattacgcaaggaataattgaagcttagaagtcattgtcaaggtggcaaacagtacttatcatatatcaaacaaaaggtcatacaatttatgacattctcatgttcaataccttcagcatcaaagtgtaaggtctttgaattatgttttcatcaagctttctatcagattattctttagcttacgggttaactggtagagtataatatgatgggtgcacatatttaaaatatttgagaataattttttaacaccgccgcgtctttattttt

SEQ ID NO: 251855 - DNA, 373 bp, Gossypium hirsutum
ataaaaactcttacagataatattataattgttacccttcacaattccacatgagaaatatcagacaaaatgtatacaaatatattccttatggcataatttactgcatttctgactgaaatcaaaattctgatttgatggcaattgaattttaattttacaataaataaatgcttgtgttacctaaagcacttagcacacagttaaattatactgacatcctaaacccaaagaaataagattgtgtgtatatttgggatatttattaaagaaaaaaaaaacctgaaagataatggacatgttttatgtcatattttaaaaataatttaaacaactattttggtttaataattaaaactctggataacccttc

SEQ ID NO: 251856 - DNA, 171 bp, Gossypium hirsutum
tagtttgtacgctgaagcacgctggtgccgggccgcaattcccgggatgcgacctgctccaccgggacctcaacaggggtgtctctcccataaatgcccgcgcttcatcttcttatccgagtgacccgcaaaagcctatgagtccaagccgagtacactcaataccaaact

SEQ ID NO: 251857 - DNA, 384 bp, Gossypium hirsutum
atacagcttcagtaatgtgtgctgagtttgtaaaaaggagaagtcctttattggcatttctaagccctctgacattgttagtgtctggattggttggtttgcattttaccattatggttgaatctttgttccttcaccattagttaagtctgaggaactaactgtgaaattccttgatggccaacttggataaaaatgaagaatggtattttcccagtttactacacatggaccaatagtgattatttgggagagaacactgggtagtgttgcttgacttaaaaaccttaaatgtattgaaaagtaacagcattcttactcatggtttgcatttgttactgagatctcaccatattatttaatggagcttcttacttaaaattt

SEQ ID NO: 251858 - DNA, 404 bp, Gossypium hirsutum
atgattccctctcaaaaaactttatagtcaactttgtaatagtttcattattaaatggtgagaaaatcattaaataatactaaccttaactttcataaacctgcaatatggcctccctttgtttgaaatgtattgataggcagcatatttaaatcagatacatacgattaaacatataaaataacttcttaccttatgactggtggagatgtcaatgatttgctattatttttatcacattacgtttgtttttattaagactttcattgtttttattggtataatttacatatagtaaaattgacccttagtgtacagttctgagttttgacaagcgtacacaatcattgtaccaccccaattaaaatacaagacatctttaatacaaaaactttcccttacac

SEQ ID NO: 251859 - DNA, 235 bp, Gossypium hirsutum
taaatagaataggtgagtgctcattttgtaacttactataatttagtgacaaaaaaaattacttataattgtgcaaccattgtaactttttatagttgggcacaaaaaaaaacataattagataaactacttgaaattgggataatataatttttacccctcataatttaagtatatttttgatactggtccttcataatataatggattacttttataatataatcttatacca

SEQ ID NO: 251860 - DNA, 328 bp, Gossypium hirsutum
ctctcttcacactctgaagaaagaaattaaaaactaaaaaataccgagtttttctcgggattgattttttaactctttaaatcaattccaggtcactgatcaccgataccctgcatttctttccaattttgaaacggaccgacgaggatggccatggcagaaaaaaccttacgaaaagactggaaccgacaagcagggggttgtatctgacggaaccagagcttctttgtcttccttagcacctcttggagatcaggaaaagtgtatgaagggcaattatggtctaatatgcatgggattttacctgcaattgactgggttaaaggat

SEQ ID NO: 251861 - DNA, 242 bp, Gossypium hirsutum
tgtattttgcctctggaacgtgaaggcagaaagaaggcatggcctgataaataaagccggcgaatagagaatcaatctgtggaaaaatcacaaagaaacaggaaatcagcgatgggagagagcaacagcagcgttgatgaggatttagctctcaaaaaatttttcgctgaagtcagcgaattcgaaagagacaacgaagtcgtcaggaccctttcatgcttcaaattaaaaccgtctagaag

SEQ ID NO: 251862 - DNA, 191 bp, Gossypium hirsutum
atacctagaatatacaacctccatctttaatgtgttcaaccatacacaccatgcaaacagtgaattaaaccaaaaaccactaggggctagtaccaaagatgccacctgtggagccctcatatcataccaccttttcctgttgaacaggaatgaccagtactcaaggtgaccttacaactagctcatattat

SEQ ID NO: 251863 - DNA, 261 bp, Gossypium hirsutum
  unsure (1)..(261): unsure at all n locations
gcgcggacgcgtgggctcatcacaggctgcagtggcaaatggggaaccatatgcccagcagcataaatgaggctgcagtctccagctatagtaataaggattaaggagtgcttgttgggttttttcagaggaaaaaaaagagtaaatgaatgcttgctggtctaactatgtgacagtactaattaagttagtgaactctttttatatgttgatttgacctgcatggacttctgcttcatttacatnnnnnnnaaaaanaaa

SEQ ID NO: 251864 - DNA, 366 bp, Gossypium hirsutum
tattgctcctctcccccaaacgctcttttctctttaaaaacataaaccatcaacccctggcggtctggtcctgcccctcggccgccgtctcctgctccatgcaacattttcatgaggtggagcttaaagccgaatcatgctcttggccgtgttcgctgtgcttcttttggtgctgcctctggtgttgccgccattgccgcctccgcccttcgtccttctcttaatcccagttgtgatgatgctggctctccttttcctcgcattttcaccgtctaagatgccagacttggatatctcctcctctgtgtgatctaaaacgcatgtaatgcatgtatattccgaggagaatctagattcgacatatat

SEQ ID NO: 251865 - DNA, 239 bp, Gossypium hirsutum
  unsure (1)..(239): unsure at all n locations
aattggtggaactattaaggttcgttacacgtgaacgcatcacattcttcgagggaatcatgagagcatactgacacacacgtttatgagggttatgattagagcttaagaaaatatgggaaatgcagcagtgttttggaagatatttttacagagggttaaaaaacgatcnttcctatcactgccttggtggaatgtgacagctcttatttacatggtgggctctttttatatattga

SEQ ID NO: 251866 - DNA, 325 bp, Gossypium hirsutum
tattgctcctctccgggcaaacgctctttttctttaaaacataaaccctcaccccccgggggtatgggcctgccccttcccccttctttactagtgcatgaggacatcttcatggggtgggcttaaaacccaaaaaatgctcttggccgggttcgctgggcttcttttggggcggcccttgaggtggggccattggcaatcccccctttcgccttctcttaatcccagttgtgatgatgctggctctccttttcctcgcattttcaccgtctaagatgccagacttggatatctcctcctctgtgtgatctaaaacgcatgtaat

SEQ ID NO: 251867 - DNA, 354 bp, Gossypium hirsutum
gtattgtcaggcatttttcttagttaagttgcagcaaatattttctgctattgggatgtgatttagaatggaaatttctttttagaattttatttggctattacgcttgttttgctgtctaacgagaaggaagagagtattttagaaaacattgaaaagaatttaatctcccctattcttattgaaaatgaccttgatattctgtgaatctgttaatagcatagctagcctaaaagtttaagttattatattagtgcctttattttgttgtttttggttctaatgtccacttttgcccttagctgtctttatagttttatgatctattagttcctctattttttatatgataag

SEQ ID NO: 251868 - DNA, 379 bp, Gossypium hirsutum
atcagacttagaagcatcaacgagatctataataataaagaatgcaggggataactgaggttagattgaactgttttcaaggagtctaacaaaaataattgttttactttcctcaggtctgcagtttggcagatctagaaactccattttgaaattgtttgcagggttaaacaggtccagaggcaatggctcttacttccagactcaaaagagatagtcatataacaaattgtttattcctttatgtgcgattgtcaggtgtgccaaaggactcttcagcacattctttctcctgtatgacaacatatgtggcaaagtgttgcttggtgagaatgaactcaaaacaggatgagttagttggatggattgtatcatcaag

SEQ ID NO: 251869 - DNA, 296 bp, Gossypium hirsutum
atgggtgaccaacgcaagagcatatgccagttggtggtagagattggactggctaaggacgatcaactgaaggttcatgggttttaagtgcttgtggctcactgaagcttaagtgaggatttccttgcaatgagtagaatttcccttctgtcccttgtcacaagggtaaaaaccttacagcttgtataatggaaccatttttgggtccgtttttaacttggactagtgtaactccttcatgcaataaactgaaaagagccatgctgtctagtcttgaagtccctcatttaaacaaa

SEQ ID NO: 251870 - DNA, 402 bp, Gossypium hirsutum
gtttgtacaaaaaagcaggctggtaccggtgcgcagttcccgggatgcgagactgcatctcacgaacagaaactaatggcacactttttaggtaggtggcaagaacgccactgtgcccagccatctataattttctggtagtcacactggcaacaaaacaccttagaaccagagatcaaccccctccaagcaatacgtgaattcccttcacaagaaacgtcagggctacgtgaggatctgtgttgaatgcaatctgaaatgaccctgtggattatcctggctgggtgccactactgtacaacattcagtgcccacacccaccttggccattaagggtttttgagacatgagagaagcctctttccttgtgtgtgacacggatttgggaagttggaaagaaat

SEQ ID NO: 251871 - DNA, 306 bp, Gossypium hirsutum
atcttgaaagacagttactttaggtccagttggaaccctcgggctagagatcgtaccagtgttgattggccacattgtttggtctagcagtttttctttatcattctgaaactgggtttgcctaatacattgataaattattttgaaggaatttttatagttccagtcacttcacttttaccctgactcatattaatgactaggaatgaccttcagatcgcatttagcatctgtatccaatctgacaataatgtgttcatcagggacctatggattaaatttcattctggcataaataaactggat

SEQ ID NO: 251872 - DNA, 366 bp, Gossypium hirsutum
tcaaaatcaaaatcgtaatcaaaaagaagaaacagaaaaatcaaaatcaaattcaaattcaaaatgaaaatgaaaaaagagagaagaaaaaaaggaaaaaaggaaaaaagaaaaggagaggccacggcgaaaacccgcaaagggcgctttgtgaccaaaggtggttttgagttgaaaacccgaaaaggacgactcaaattttgagcaaaatggggcatggacattaccattatcgaagacttctaatgggcattgcttcactattgatatcattaattacttcatcaaatggatagaggctactgcatgcgtcaatgtcatcatatgccgatggtattggaaaatgcattgaacttgaattataac

SEQ ID NO: 251873 - DNA, 356 bp, Gossypium hirsutum
ggataagatgtcgtgtcttagtagagagcttgtccttttgatcttacagtttctagatgaggaaaagtttaaagagactgttcacaaatttttttgaaacttaaatggatttgattttaattagtattttattgttaatagataaaatataaaatatgattattattttaaatttaaataggcttgaacatgaatctgggtttttctttaatatgaaatattttgaggatgatgtacataatggaaattgggatgaagttgagaaatacttattaggttgatgataactggtattcaatgaaaatctttttcgacattagaaagcatgtaacaccctagattttgaggttaaaagt

SEQ ID NO: 251874 - DNA, 353 bp, Gossypium hirsutum
cggacgcgtgggctaattttcactgaaactagactcacgtatcttcttaccataaaattttcataatttttggtttaaccaataagtacagtttattctttaaattcacctctgttctactgtctaacagtttcgacccttcttcactgaaaattaattatctcctcgtacaggaattgaatgatgttcccgtttgtttctcttgaaaatagactcattcagaattctaaaaatataaaattaagcccttaattatttttattaatttttttatgatttttcaaagtcaaaacagggcacccgaattcattctgaccttgtcttacaaattttattatatttcatgatttaca

SEQ ID NO: 251875 - DNA, 332 bp, Gossypium hirsutum
ctgtaccggccgaattccggatgaataagctgccaacttgaaatgaggtggagaatcttgctaagcagtttctaccttcaagcaatgaagaatcctaacaattgagattactttggtgaccatgatgggaggaaatgaaacttgtaagattgggacagttgttatttttatgaaatgactctaaatatgaattgtactaactggacctaaatagcaaagccctgtgtagattctggtaatgatctatctcaaggtatgtgtatttttgaagagtgttatgtccttagttttaattttgggtaaagaaagggctaaaatcatggattaggtac

SEQ ID NO: 251876 - DNA, 337 bp, Gossypium hirsutum
acggaatattgcggccgagtatgagaaaacagcatacatttttcgaatacaagatcctgcgaaattgatagctaaaggtggtgcctatggttaaaaagtcaaagatatagtgaggcaacagggaaaaaacggctagggctcttttttacaaaaggagatattgaggagagaaccttcaaaagtacacacatacattgagaaaaaagtggcatggtcaagtctataaagaaacaattctaactggcatttgttgaattaaaatataaataataaccccatcacattattggaggctactagatgcgtaattgtgtgtataatccgataatatttggaa

SEQ ID NO: 251877 - DNA, 222 bp, Gossypium hirsutum
atcttgggtgcccgcggcagggcgtgggtggtgctggcagtgtcccttgccgacctgatcgctgtctacaccgacctgcttctattatgcacataccaggcggatacctgcactgtggcccctctggccagcctggacccattcatggagcttactttcttcttggtcatgggaccctgggtctggctaggtagtactgtttcttacttttaagatgcccgt

SEQ ID NO: 251878 - DNA, 342 bp, Gossypium hirsutum
aatcgtggatgggaccaagcgttccaccactcagggcggttgaacaacacaaacacctttttgttcactcactcacagacagagaggagggccgatgcttaaactccaggcgatgccaatgcaatcaaaatcagggggatctttgtagggtaacgtaagtaggaagtaataaaaagagttgcagagctatgtccgacatggattttgttgttgatcgttgaggcactgaaagattaaggtttagaggatgaataataaaaagaaagggtattacaaggcggtcctttcatttcatgtaatctgctgaaatgttacaacttcaatatatgtaactttctattt

SEQ ID NO: 251879 - DNA, 302 bp, Gossypium hirsutum
atcgtgtatgtgatgaaagtatacaacctgaggcgcctgtacgaatcaaagcatatcctgagctaccaccagttcacagagcagactcgagacgccatcctcagcgtactgataaagggactcagaggtcagtaggagctgtcttgcttagagaattaccataagtcgtgcggcagtggtaccccactccggactcacgtgcgaagaatgacctgagtactacctgctacaggagcaggcgagatgataaaagagcaaagcgtcgtgttcttgacagaaacacatgactgactcgaccatta

SEQ ID NO: 251880 - DNA, 349 bp, Gossypium hirsutum
atgtggagaatgcgcagagcccagccccgccagcacccccggccctggaccgagagccgccggcgcccgagcgtcccccggaggttgacctcgcgtcagcgccgggcctgcagttcccgctgctggaacctttcacgacccccgcccctgccgccaccggaccgttcgtgccctacttgatccctgcgccctttggcctaagccccccgcgcctgtgccccttcctggccgctgcacccgggccgccggctttcagcgccgccgtctggaaaaagagccaaggtgctggcagcagcccccgaagaccccagggcggttccggcgcgccctcaggtgcgtgcatgtgacc

SEQ ID NO: 251881 - DNA, 356 bp, Gossypium hirsutum
tatttttgtagtttatcctataaaaattgaaggttgaatttatcattatatcatataatatctataaatattttatttcttagttagtgcccaaaatcaagcatcatcaaaaatcattacaaatttataaatgtgacacattgtttgtatgatgtttgataatttgatttccataacattaatcaataggtggttgaatatatatttgtgcctaaaaactacaaagaaagactcaatattttggcataaaacaaaaacctttaagatggtggatacttttttttgaataatctcattatagattctgatcatatctattctttttgacacaatgcttagaactactcataacatct

SEQ ID NO: 251882 - DNA, 270 bp, Gossypium hirsutum
gctcgatcccctcgagtatgggtcttatgccaattatgatttcattagataagaacttgatcagtattagtctaaaaccatgatatagtctgtagttactgtgctatagcaagataccttaaacttacattagtctaaaaccatgatatagtgaggagtaaccggcactataatggaggaatactttaggtatcaaaatggggaaaaatgctaaagggggaaaatgggtatgctgtaagagcctaatcctgaattaagactttgcttttc

SEQ ID NO: 251883 - DNA, 290 bp, Gossypium hirsutum
  unsure (1)..(290): unsure at all n locations
cttcgcggacgcgtgggatcccccaaaatctttaaccttctgctacacgtttccaagagaccatttcaattcctcaatctggagcctgtggccttctcctttccagaactcttcgaacatgctcaggaattcctccatccaggaaatgaccttcattttcttttaaacgcttactttgcaaacacattagcaaaangtgttttctgactttggaatatgggaaaaagacaagtttttgggaagaaaatgcttacataatcttggaatggtccccttaattaatagccccc

SEQ ID NO: 251884 - DNA, 326 bp, Gossypium hirsutum
tttaaggaccgccaaggaaattctgaaactgaaagctgattgatcggatgtgtatgccagctttcatcaactacattcgaaggccttactaggaattgaaatggtgtgtaaagagattgcttcttctgatcagatttttcgatataaatactggacaaagtatggatattttactgctgttagtaaaataggattctcttcttaggatcttagtttcttcgcttgtattagactcaacaatggcttgcattgcattggtgttgattttaccaaaatttcgaggtttacaattaactatttttattaaaaaaaaaaaagtttgaaat

SEQ ID NO: 251885 - DNA, 375 bp, Gossypium hirsutum
atcgcgtccactcaaggaaactttgacggaaattttgagtcactggaccttgcggaatttgctaagaagcagccatggtggcgtaagctattcgggcaggaatctggaccttcagcagaaaagtatagcgtggcaacccagctgttcattggaggtgtcactggatggtgcacgggtttcatattccagaaggttggaaagttggctgcaacagctgtgggaggtggattttttctccttcagcttgcaaaccatactgggtacatcaaagttgactggcaacgagtggagaaggacatgaagaaagccaaagagcagctgaagatccgtaagagcaatcagatgcctactgaggtcaggagcaaagctgaggag

SEQ ID NO: 251886 - DNA, 377 bp, Gossypium hirsutum
atagagtattggttcatacggagaaactgtgggcctttataaatagccagcccgcatcaccctcttccccaatttgtaggtgtattctatgctcttaaggcttcatcttctccctgttaagtgaggtttctaccacacctttgaacaatgttctttcccctctggttatctgaagactgtcctgagaggaagacgtaagtgttgtgattagtagaagctttctagtagaccatgtttcttctggattgtaataaaattgttagctccttttactttgtgcctgtctctggaaagccatttttgaatcgctaattactttggctttaatcagaggtcacctggtaaaagctttgtaatcataacacaatcaattcttg

SEQ ID NO: 251887 - DNA, 377 bp, Gossypium hirsutum
atggcaaccaagcaagactctgtcttgaaagagaaataaaaaagaaagcgataggtctttattatgggacattaagaaaaacctaaatatcatgttcaaagtaattttggggaagcttgataaactaattctaaaataaaggaacagtggtctcagaagacccaagacatccctggaaaagaacttttcctctagatatggaaacttataaagccgtcttaattcctatagatttattttgtcgatgcagtatacaaaagtcaaacagaacagagagcctagaaacagaccccacatgtgtatgaaaacacgtgtatatggaagatgacagaaagagcgttgccgatttgtgccccatgcaaatctatttcagattg

SEQ ID NO: 251888 - DNA, 159 bp, Gossypium hirsutum
gtgagtgggtatagccactccggtgatccaagcttctccaagagcccactacgccttggttattctttcaggaatctgccccttctgttgaaaggtgtccccgtgcggcccacacgctcattggaggtgccacttgatggtgcacgggtttcatttttc

SEQ ID NO: 251889 - DNA, 295 bp, Gossypium hirsutum
ataattgcctagccatggacacaagaaagctaggaggaagagttatacttgtggatcaattttatttattttaaatatcaggagcaatccagggccatacaaccatgaatcgcttagcgaaatgaacacaggaagatttactatctgaagctagcgttagtgattagaaaacaaaactgccagttttgagcttcattaacgtgaactcatctttcacgcaaggagggaaaacttgctttccctagcagatggtgcatatgtgtgtacagactgcacaattctaagaaattatgca

SEQ ID NO: 251890 - DNA, 266 bp, Gossypium hirsutum
atatcgtatgggaccattattggtgggttatggcatcatatgggaaaatttaatgaaggttattacctaatgtgggtctttgtgtgtcctagaatgataaggggcaaacctcattaaatgtaaggttaggcaaatacctatcgtttaaaacatcagttaaaggacaacctttgtggaaaaactctagaaaggtaagcctttatggcgaacatgttataaaagattgcctttttggcaaatctctagaatggtaagtccttgtggcc

SEQ ID NO: 251891 - DNA, 380 bp, Gossypium hirsutum
attgttttttgacttctgcctgtgggcctgaggaagggagaaggcagacccataggcagtccctgggcaagggaggattttcccagctgcagcacagctttccattcatgtgcatgtgagtctggtgaaaatggccttgtgtagtccagtgtctgtcatgcccctgagttcttgtggtcccagagaggcagcctgggcagtctgtttacagctggcaaacactggctggcaagttgtggtgctgggtcagaaagtgtctggactggtaatcgggtgccctgctgtccacaggtggactctggggaagccaggcccctggatcccaaggcctttgtgtctggagccttacctggcctgtgcctggaacatagcacattttt

SEQ ID NO: 251892 - DNA, 318 bp, Gossypium hirsutum
atgctgtgactggtgggtgagcaggctcatcgcggagcggatgcggtccacagctctcacctaagcaagacatcccaacaacggtctggtgtcacaatgaccatgtgacctaaaacaccgactgcttcctaactgcattaaacaagagcgtgaaaagccaggcaccacgctctacctgacgaatatgcctattgccagactgactaaaaccttgaggtgagcggcactgcgggttgcgaccacaagatgaccttatcttccacggggagctcgctgtgctgattcatacacaacaggacctcaactagctgttatgcc

SEQ ID NO: 251893 - DNA, 370 bp, Gossypium hirsutum
atgtttgttttaacagagatgccttttgtgatggcagtctactagaagtatcctcacaacatctaggttgctgaaaatttgttcccagtagaaagccaggagaggatcaacctcgggggtttgttttcgttcccaagatggcctttttgaatgataatggtctgagaccatacttgctgatgactcagggcctggctttggcaggaggacagcatcagacacaggaatcagtgatgagatgagcttatgtagtgtagcagggggtttcataccagtacagttcccagttagcactattgacattattattaggtcacaacaatacttgtcttttgagagcaatatttagattttacatgcattcacatgg

SEQ ID NO: 251894 - DNA, 344 bp, Gossypium hirsutum
cctctgcccccaactccctcaggtcatcttgcttgactgcaattatctggtacgaatgtaaagaaagaaatcatcagtaaggataaaaaatctgacaaaaattacttggataaaggagtaaagacgtcaactttgagccttacctccccttgcattgttaaagctgcaatccctgatcgatttacaagcgctattgccaaggccccatcatctcttggatcttttaagagcatctccaaatctcttggcttgaaatattcctccaattgcagaacccttatggcgacctacaagattaagcttgtaggaccaaagggtgaggtgacggagtttgaagcccccaa

SEQ ID NO: 251895 - DNA, 415 bp, Gossypium hirsutum
cacaattccgaacgctggaacacgttgcagctccggcccggaattcctggttcggctgacgcattatcagggggggatatctgtctaatgcttgaaaaactgtgtctgcgaacactctgtaatggacaagatcaggatttgagcggaagaacgaatgctactttcttaaggcaggaaagacaaattttattcttcatcaagtgatgagcatataataattccaggcacatggcaatagaggccctctaaataaagaaataattaccctttagacaggttggagataatgatcagagtaaaaggtaattacacattttatcttcagaaagccaaggggctatatattgacagtgacctgaattaaaaaaagtactctttcacatttccacaggttgcatgttaactttaaatgctt

SEQ ID NO: 251896 - DNA, 355 bp, Gossypium hirsutum
gaaacctaaaaacttcgagagaaattggagggagatcttcagtcttgaaggagatcctacttcctagctgaatccattggcgttctttgagtaatttatgtgttctactctgcgtgtctccttaggtcttcttctagtatgtatttatagacttttgaatgctcaaaaaccctaaaaattgactttttctgcgtgtttgggaaataggaagcgatatcgacacaagttggcacatgggtgtgtgacctgcccgtgtggatcacattggcgtgtggcctgcccatgtagatcctgaaaactccgattttggcccccttttcgctcctttttctcccaaatgctctcctaagtatag

SEQ ID NO: 251897 - DNA, 385 bp, Gossypium hirsutum
atagtattattaaaatacaatgtttatatgtgtatttgtgtattatagatgtatcaagtgatttctaattttttctcatatgaatatgccagattactctagaactagatgcctcttctttaaataattttagttttcctgaataaatttgtaatggttaaagtaccaaggaaggaaggcgagaagggattctgtttttaaaatcacatctgaactgttcctctactaagattaaattaaatgtgaaatactcgtaattgcaattcttaaacttaggcacatgtgctcactgtgcacctgctcctggactctattcaccagagtaccagtaaatgtgtgtcccaagattcacaggcttttgattaatcaatattcttttcaagtt

SEQ ID NO: 251898 - DNA, 365 bp, Gossypium hirsutum
atggccaagcaagcttctgtctgcacctgctctcaatcctgctctcaccatgagcctccgcctgcagagctcctccgccagctatggaggtggttttgggggtggctcttgccagctgggaggaggccgcggtgtctctagctgttcaactcggtttgtctctgggggatcagctggaggctactgaggcggcgtgacctgtggctttggtggagggactggaagcggctttggagcaggctgcacaatgggtcttggacctggccttgtggatcacatttgccggggggcctgcccatgtaagattcttaaaactcctattttggtccccctttttgctccttttttctcccaaatgctctcct

SEQ ID NO: 251899 - DNA, 354 bp, Gossypium hirsutum
gaggggcgaactatcaacccttcaataattgtgtcatgatggccttactgtatctggcacccgtttacgcagagtacgtgatgtggatatgaagcgtgactatgcatttgttgtacgtatttctttactctttttgtttaatcccgacggacatttcttatctataatattcttcactattttagtaaatatgatcattttgcttggaacttttttccttctttatgttttgtatattgttggcctccttgattgtaggaattcagtgatcctagagatgccggtgatgcaagatatgcattgaatggtcgagacttggatggaagccggatgattgttgaattatccaaagga

SEQ ID NO: 251900 - DNA, 193 bp, Gossypium hirsutum
gaagcacatatatgtctctagcttgcatgtctgcctttctcataatcatgtagtatatctacctttgttattgtacatttggcacatacttatatggcctcaactatgactagtttctaggatgtctaccttgtgcctccttttggagaaaagcttcggtcttctttttgaaatatgcagtaaatcattactc

SEQ ID NO: 251901 - DNA, 361 bp, Gossypium hirsutum
atgttctcggagcctcctccgttcaggggctgagtcaggggccggcggtgcctttgagaggggcctgctttgtccctgaagttccgaatggatagtttacactcttctccacttggatctgtttctttctcccctctttatctttttcaaatccgcaattattaagtacttagtgtgcacacaggactatgaacctgaactgaagaagaatcccattctgatttcttcctccagtaggccaccttaggcctaccggtggcttcccgggatcgtgcagaaaccaaagagctaagggaattgccgcccaacccacccctgcacacacactaagactttgccgatttggccgaaaagctgtgac

SEQ ID NO: 251902 - DNA, 294 bp, Gossypium hirsutum
attatgggcaaaaaagtggaagttaaacgagctgagcctcgcgacagcaagagccaagcgccgggacagccaggtgccattccagtgggggagcagggtcgtgcccaacactgccaatggctgggcaggccagcccccgcccacgtggcagcaaggatactgtccgcaaggaatgtgggtgccggcaggacaggctattggtggctattgaccgccccctgcaagtagaggagtccccccgacacccccacttgtcaaccttctacatggtatccacccctcctggaggctttt

SEQ ID NO: 251903 - DNA, 324 bp, Gossypium hirsutum
caaattgcataaaaaatgaatagagatgggaaaatcgcataaaatgcttctattctagaacaaaaaaacaatataaccccttttttatttatattccatacactatccagaaaaaaaaaagaagaatttgtatttaatttattggtacctttcttttttatatctccattcaaatctataggatagaataggatctatatctattatgatatataaatcgaattgatgaaatcaaaaaaacgcaaaaaaagtctttctttttctatctacgcccagttttttgttgtcttacatttataatttatacatctccatttatacatg

SEQ ID NO: 251904 - DNA, 371 bp, Gossypium hirsutum
atctcttttaatcctcatttaagtcttcattaatcccctcataatccattttgcagatgaggaagttgaggctcagaaagtccagatcctgtagccagaactgagatacaaaacaagatcttgttccaaaggctgtattcttagccacatgttgtattcacctgggaagctttaaaaacacacacacagtgtgcaggccccactacagatgagtttatcagttcctggcaccagctgtacttgctagccattgccccctaattctccaaggcaaggcgaggctcagagccccccagggtggctcagctggccccagagggcagcaggtgggcctttcttagcctatggaccctggcaactttccaaacaga

SEQ ID NO: 251905 - DNA, 375 bp, Gossypium hirsutum
cccacgcgtccgaaaaatcgattcgagagcaaaaataaaataaagaaaaaaaaaaggaacagagagtgaaattccacctttttgttttttttgattgcttaatcgtgtgttacaatttttttgtgtttgtggctatatagccgaatacaaaaatctattgtttgctactgttttggcactgctttttgctgtttccctttctttgccatgtttgcaggtccatggagggtcaacgggcgagggagtttccactttcatgcaagggcgttgatcctcaagccgagtggccgctgatgcacatggtcaatggctgcggcgcgagggaagctcgaaaaccctaaggtttctgagttggcttaatgttttgggcttatt

SEQ ID NO: 251906 - DNA, 318 bp, Gossypium hirsutum
aatatgcgtaaaggaggcctatgaaaaccatagcatctacccagcgagcgaagttacgtagctatagcctcctcatgcagtcttgagcgtgccacctatgtaaaagcgaaattgagaccacagcgccaagattgaggttgatggccggatggtctgcttagaaagttactgcgttcaacaagacgaggagaaccgatttgcacgacgccaagtcgacaaggtttggcgtatgagagataatgcgagttttaacaccgttctgtagtgaaactgctaatgctaaacccaccggtagggccaactgagtggatcacaaga

SEQ ID NO: 251907 - DNA, 351 bp, Gossypium hirsutum
atgcaaaaatgtatatatcaggaattaataagctaatggggaaattttaagactttgatgcctattagttttttcagtatgcttgtttgtcttcagaacatattttaagtcagaatgaacaaagatagtggtcaaagttgaaagaaggtgtaattttactgatttttttctttttgacttatttgaactttgatacgtgctatgggtgagtttagataggtgtgtacaaatatttcagcctgggatgccttactctaactatatcttgatttcttagcataacttaatgaaagcttgggttaagaaaccttagatttttaaatagtgtaaatttaacaggtggggggaaat

SEQ ID NO: 251908 - DNA, 194 bp, Gossypium hirsutum
tccgctccgttatttcattcccgacccaccccacccatccagattgaatgtatggcagggtgaaaaagctgaagctgttaacattcttggagaatgacagtaaaggccgagcccttgattaccatgcatacctctgaaaaagaatcagatactgctgaatacctgcaaaccatcaccatgctatcaatccttat

SEQ ID NO: 251909 - DNA, 107 bp, Gossypium hirsutum
atctatgaactcccctccttcgactatgttggtgttttgaggtcttgccgttcattttagatcaagtacactctgcaaaatattatacacttctgaaacctagattt

SEQ ID NO: 251910 - DNA, 339 bp, Gossypium hirsutum
gaaaacctaacactcaattatttttgctagttgaatgtaatttactaatgattgagtaaatatgtgtggagttatgcctcatattttttggcttttattctcccaatggaactctgtttttagtttcccatttaaactctgattagtgtaggctattttaatattagtttctcacttaaactctgattagtataagttattttaatattatttgacctacaaatgtagcctataaattggcccatttttccacctagaaagataatcaatttcacatttaaggtttagcttttacaaggtttcaaagaaatatgtgttaacattttgaggggtcttatt

SEQ ID NO: 251911 - DNA, 269 bp, Gossypium hirsutum
atgcaggttgaagggaaattctctggggctttgggaagttttgtgcggtgggtgagccaagaaaatactaattaataatagtaagtgttggttaagttgttgcttggaagtgaaaagttgcttagaaaggttagaacttttagtgcatttataagataatgatattatcccattacaattgtttttctttgctgcatggtggggattgacctgtaaaatttgttaaccaaatttcttttttgtcagcatttctctactccttttttttt

SEQ ID NO: 251912 - DNA, 379 bp, Gossypium hirsutum
cggacgcgtgggctagctgctcaacaactccaccacctcctgttccttaactaattcccgtgattcctcaaggtacggaaccagtccgagttagtaagcctcttgttgttaagattcgtaagtaaggggttgaagatttctaagctactgctgaaaatgatcctgaaagagctgaattttggtttgagaatactattagggtttttgacgagttatcttgttccctgactgaatgtgtaaagtgtgcagtatttttattaaaagatttggcttaccagtggtggaatccattgactcctgtagtgccgaaagagcatttcacttggaagttctttcaaaccaagttttgtaagaaatacatcagccagaggtttctgga

SEQ ID NO: 251913 - DNA, 396 bp, Gossypium hirsutum
atatggacaggaactgaagcagaggttgggctgtggcttgacccctggatgatgctctattcatgaagcaaatgtaattctaatcatggaggaattctcaagttagatatgagtgaagcctgacagtaaaaagcctgcttgcttgctgtgcctccagggtggagccctcattctgaagtcactgtgcatcctagctgtttcctaggtttctgtgcactcaaggctccatgagatttagagcattgggattcccagagacttttcttccctatgtaatctgaggttgacaagatggagctgagcctagtcaatcttgaattgagagagaaacaaataccaggtaccagctgtgtctacctgctggcctctactggggcttttttgtgtgctttgctg

SEQ ID NO: 251914 - DNA, 395 bp, Gossypium hirsutum
atccggggagcgaatgaatagggccgcgcagaccaaggcgtccgatccacgcgcgctccacacccggaccctctccaagttggaaaggacaaaaagaaggcaataaatgctaaaaagggagagaaggggagctggatcgagcggcaactcccagcctctgctggaacagagaggggagggagggagccggagcgagcgagcgcgcgcgagggcgagccctgcacgtaaagaaactgacacccggaccccccacttctcctgcacgttgctggcaatcagatcgcgtttaagcaatttcctgagcccaagaatagcaatgagtcgggagactttcgcgggctgaaattgggagcttcaagcacttttgtcccccacattttttttttttttttttt

SEQ ID NO: 251915 - DNA, 245 bp, Gossypium hirsutum
taggtactggccctgggaggaatgaccaaggaagggtgcataactgaggactgggatagtatctttacagtggaggatcttggattctataaaatgaccaggatgaacatcaattttgagggcgtaaactagactactattgataggtgaagccacttaatagggacctgtatctctggttcgttgatagtttataacctcctgagtgcaggtatgaacaagttgctgataaatcatgtgccata

SEQ ID NO: 251916 - DNA, 254 bp, Gossypium hirsutum
aagaagcaaaaataaattaactaaaaaatttattaaaattggcaggaaaaaatttatatggagagtttatatatgttttggctaagccagactatcatctattcctaatctgcatttggggggtccttttttcctccttccttccaagttttaggagaggaaacccagtaaggagtggttgccttcctgcctaaaaggtgggggtttattgataaagccaggtgagaaaaacctcctcattggccaggtccatt

SEQ ID NO: 251917 - DNA, 302 bp, Gossypium hirsutum
cccaagcgtccgatgtggtaacttgaaaataagactcattaaagtgtttggaatatatatgtcatctccttaatagcttggtacaacagacgatgattttacaaagataaaacattggtactccattctgaccttgctctacaaaagctattatatatgataatctacaatgttggtgcttacatcatgttttacggacaaaattggactagataatatttaattgaatacttaattaacctgcaacttaattgctatgattttcggtgatttatcaaagtttagccactactactgtgcaa

SEQ ID NO: 251918 - DNA, 145 bp, Gossypium hirsutum
  unsure (1)..(145): unsure at all n locations
cactatanaacaagcatgtacaaaaaagcaggctgttcccgggcccgttaccccaagatcaggacctgccaacccactagagcccggttcttaagctttaccaggaacatgccatcgtgttttgtcaaataaacatgtccgatta

SEQ ID NO: 251919 - DNA, 282 bp, Gossypium hirsutum
atacttgatgccctgaactgaatcttccttggagcccaccgcgcccggccaagtgatgatgatttaaaagaaagaaggaagtgattaccatgtaaatctggatattttttgttgtaggggtgtgaggatatggtgatcgggaagggcactattgggagacttttgggtactgatgattcttggcctgagtagcaattccacaagtggttgctttgtgatattaattgagctgtatgtctcaattttatgtattcttttttttaactattgacagaaaaggtt

SEQ ID NO: 251920 - DNA, 169 bp, Gossypium hirsutum
cccacgcgtacgattctctctagatttttagaccaaaccatggatcttattcacaagttcctcaacctcgtagctcctacattcaccttcttttcatttgtctttttattgccacccttttatttcttcaacttctttctttccattttacgctccgttttcagagaga

SEQ ID NO: 251921 - DNA, 378 bp, Gossypium hirsutum
atggcaggggccttagcaatccaagaagcttaaaatgtctgctgaatcttccccttcagtgaccttatactgtggtggcaggtggaaacagtagatgtataacataaaccagtcaacagataccaaggaagcagcagccatcgaggccagaagaaatcgagaaaaagagcgacaaaaccgattcttcaatgtgcggaaccgagtcatgggggtggatgtccaggccctgaacaaccaggtgggagaccgaaagcgtcgggaagcagcagaaagaagcaaggaggcagcttatggtaccagccaggtgcagtatgatgtggtagtccagatgttatagaaggaagaggctgatcgaacacgtcagttttccaagaaagt

SEQ ID NO: 251922 - DNA, 181 bp, Gossypium hirsutum
gtgagtatgcgaacacttgtgaggagaaaaccgataggttatttgaggcccatgggcaactccatgaactttagatctgaatagtccatatttttctttaatagattgcatcatacctttataccaattattacttacttttgactgctgcatgttagtattttgttcgtctatgatacat

SEQ ID NO: 251923 - DNA, 381 bp, Gossypium hirsutum
gttatatatatgtgatttatttggtaataggaaatttgttaaaatgcttagtaaatggatatttggctaatgttgtgtatataaattacttaaaatattaactttaaatgagtactaaaggttgtatatgaattcggccttgggagatatgttagtataaaaatgcttgaaagttaaataggtgattgctttaatgaccaaatgttccaaagaataatgcatgatctagttgaccaatatgtgttaagggaacatgaatagatatattttgatgagctattcattcggttatagtatgaaatgcaatgttaatacttaagtgctaggatgtatatgggtgctagccgaaattgaacttgaataatgatttgaacaccatgt

SEQ ID NO: 251924 - DNA, 371 bp, Gossypium hirsutum
cccacgcgtccgtaactacaagacataaagaaacttaataaaacttcgaaagaaattaaaaggagatcttcgatcttgatggatatctgcttccgagttgattctaatggtgttcttctagtgttttctttgatcttctctaattgcccccgtatgtattcttctaatgggtatttatagattttagaatactcaaaaaccctaaaaattgggtatttccacgtatttggaaagtagggtgcgaaatcgacatgggctggcacattggcgtgtggctagcccgtgtgagcgtgtcaagcctgtgtgcaaatgcccagcctgcgtggatcttgaaaacaactctttttgtctaattttgacttgcttttcgc

SEQ ID NO: 251925 - DNA, 386 bp, Gossypium hirsutum
cgaaatcattctgactatatcttacaacaatttaaatatttcaaaatatgaaactattgttgttacatagtttcttctatgggaaactagactcattaagctggaattgcatattttatccaacctctaactcaatttccacaattttttgtggattttcaaaatcaaactatggctgctgtccaaaactattttagtgtcaattgatgagactaagtttatcacaccatattaattcattttcaccacactggtaaagatacatatttatacatcataagtatagacttataatcacaaggtcatcacaaatcattctcataggcatgaattacctatttacatcttcaccaaatgtgtatcataaaccgaaatcatttctcatg

SEQ ID NO: 251926 - DNA, 331 bp, Gossypium hirsutum
catttatggctcctacctagttcaccttgttttaattccaaccattaattcggattctaaagctgcgttagtgtatacaatctattatgctccaagcttagcgtgtagtgattttgtatcagatttcctagcataccattggacccaagagacattcacagctcgaaattgttgtggcataggacatcaaatatgaggcagtttcttgattgtagacaaccagtttttagccttttgtttaacttagatgacatattactgtcttaatctggacaaaaaaggccttcagtattttaaataatcccacttccaatttttgaattaatctttt

SEQ ID NO: 251927 - DNA, 336 bp, Gossypium hirsutum
  unsure (1)..(336): unsure at all n locations
acactatagaacaagattgtacgaagaagcaggctggtgccggggcgcggttttcggggtgggacctacgcgtccgcatttatgactaatacatagttcaccttgttttaagaacaactattaatagggattctaaagcgtgaggagtgtatacaatatattatactacaaggttaantgttagtgactgtgtataagatttcttagcataccagtggacccaagagaaattcagagtttggaatagttgagtaacagaatatcaaacttgaggcagttccatggtagaagaaaaacaggtcttatgactttcgggtaacacagatgctcaatgac

SEQ ID NO: 251928 - DNA, 383 bp, Gossypium hirsutum
tccacgcgtacgggttgatgatcagaatagggatgaatattctaggtggcggaaagacgaccggcctatgcatgaatattcttggcgggggctgagtgaccggcctaagggcgaatactctagatagtgaaaagatgactcagaataggacatgaatatttctaggtacgcagaaagatgatctgtgaccggatgaccattgtagggcagatagatctagaggcgatagtgactcgaacattcgttgacaacacgacagacttcaatgtatgatcaccacacctgatcatggatcgatgagagactatcaggattatgatttctacagaggatgtctgaagcgtgttagaaatgattcgctacctctgtggaaagaacatgtt

SEQ ID NO: 251929 - DNA, 384 bp, Gossypium hirsutum
attgcaactcttgttggcagaggaaaacagcatgtgggtatttgtcgaccaaaatgatgccaatttgtaaattaaaatgtcacctagtggccctttttcttatgtgtttttttgtataagaaattttctgtgaaatatccttccattgtttaagcttttgttttggtcatctttatttagtttgcatgaagttgaaaattaaggcatttttaaaaattttacttcatgcccatttttgtggctgggctggggggaggaggcaaattcgatttgaacatatacttgtaattctaatgcaaaattatacaatttttcctgtaaacaataccaatttttaattagggagcattttctttctagtctatttcaagctaaaaagaaaga

SEQ ID NO: 251930 - DNA, 370 bp, Gossypium hirsutum
atcacgcctgcaactgaaattaatatcccttgtacacatttaactagagttgggcagcagcatctcagtcttgcacaagagactctccgatgaggatgagtatgtttttaaacttattttttcttaaacacaacaacaaaactcttgaaagacttcaaattcttcccccttctagttttacaaggagagataaatctttccagtctgttctttggttttgatctgttaccattgtcaatgctgatccctagatgaggccttaagagggttgtgtcaatgaaaattgtttgaggcaggcctttagaaggaggcacaatttaactcacattttattaaactttgaggattttttggaacttcacatgtgaca

SEQ ID NO: 251931 - DNA, 380 bp, Gossypium hirsutum
atggcggcaggaggccgtggaggtggtgggaagcacagctcgaaaagtgatgccgattctggtttcctggggctgcggcctacttcggtggacccagcgctgaggcggcggcggcgaggcccaagaaataagaagcggggctggcggcggctagctcaggagccgctggggttggaggttgaccagttcctggaagacgtgcggctacaggagcgcacgagcggtggcttgttgtcagaggctccaaatgaaaaacttttcttcgtggacactggctccaaggaaaaagggctgactaagaagagaaccaaaggccagaagaagtcactgcttctcaagaaaccccttcgggttgacctcattctcgagaacacatccaa

SEQ ID NO: 251932 - DNA, 400 bp, Gossypium hirsutum
atggagagagcagctctgagctgtggtctgcaggccctgggttaaaagtgccaccagacctaagcgaagccactcagagggctgagcctcctaaggggcagagcagtcctattcctgttgctagggctgccaggaagcccaaagacatgcagtgtgctaggagctggcccttgagatcagccactgggtcccagcaggccagtgctggctccgtcccgtgccatggccctcgggaactgctgggcacactgctctgtggccgcgggaggtcatgtggaagaactaggggcatgaatgctcacaggatctcaaggcctgcctgttggtgaccctgggtccttgaagccgagggtcagagcctctgtctctggctgctgcctcagggcaggggcctgggaca

SEQ ID NO: 251933 - DNA, 385 bp, Gossypium hirsutum
ctttcatctcgtctcttctgctctcaacttggctgccttaatctacgattttccttctcgcgacgagcatggcctgggtcctccccttgcagacccgaagttgatctgaaggatctcttgtcaaaagccgcatcaaagaaggctgtaacgccccatacccgagaccgtcgccggagtcgaacacgaggtgttaatagacttaattcattacttaaacaactcaaacaatttatttttaaaattttcagtcaagctaacaatctgcgtcatagtcgcttaaaaattcatatatcgagttacgaaacttgaaatttaatttcgtaaattttcgttgaaactatactcatatatatatttacctaattttttatagaatttttggtcg

SEQ ID NO: 251934 - DNA, 388 bp, Gossypium hirsutum
atttaccgtaaaagtatttacatcaaatattccttttcttctggtatgataacaaagggatttgaaccatagcattgccttttggctatccaatagcactttttggcagcaaaagcaatgttaaacaaaggcttttgccatccaaaacacgttttacttttggaaccaaacaaagaaattgacagctaaatgcttttcaacatcaattttgaactgcaacagtattgctaaattagccttttataaggaactaagcatacaacacttttcaatcgcaactgttatgcattcataaggaattaagtatattgactagcatataatttgctcttgatttcgaagctgactgctaagtgcttttcaaatactaaactagtatacaatcttt

SEQ ID NO: 251935 - DNA, 154 bp, Gossypium hirsutum
tctaactatttggtacgctggtgcgcgtgggggccccgccgcggtttcccgggttcgacccatgcttacagacactgttaggtagcctgttgtgagtgtgaggctcagtcttcaaacttgccccgacagctcaagaaacggtcttgcttgttga

SEQ ID NO: 251936 - DNA, 233 bp, Gossypium hirsutum
gacattataatggatatgccgctttgaaaccgaagtattctctttggtgtctcgaacaacctgtcccgacgcctacctgtatagatgtgggtcactaccctcatgctttcatcgtcatggttcaaaatgctttctgtatccgagataccttgagaagcttctaagctttgcaactctgagatacatctgcttatcagtcgagagatttctatacctatactattgctactttg

SEQ ID NO: 251937 - DNA, 378 bp, Gossypium hirsutum
atcgggaagtcgcggagacttcggaggtggcggatgtggctgtgagctggcgggggagaggccaacacgcggctgaaccaggctgaactgaggaaagctagaacgtcatcgtggtttacgtcttgcccttgccacagcagagactctgcctgactttggaggtgctgctgctgcctccactgtactcagacccgggtagcacaagattgtccatcctccagcagttcagtgcaacggtgtgaactcagcctgtttcagagcctccccaccatgacctccaagaagctggtgaactcggtggctggctgtgctgatgacgcccttgctggcctggtggcctgcaaccccaacctgcagcttctgcagggccaccgcgtg

SEQ ID NO: 251938 - DNA, 331 bp, Gossypium hirsutum
ttctccttcagtcgaaacctaaatcaccactcaaaccgccgattctcatcccccaaacaacaacccacacattcaagcctaggggacgacttttcagccttgagatctcctcttggctttgatttcaacaaagcaaaaggaaatctatggcgtatttacaaggtgagaccctccttcttttttttccttttctatttttgctttcgaatacaaaaacaacaaatccaaaagaatggagccgaaaaaaataaaatatctagagatttgaaccggaaatcacctttcgattttgggggccctttgggtatttcaatatgcgtgaaaatttaca

SEQ ID NO: 251939 - DNA, 204 bp, Gossypium hirsutum
cccacgcgtccgatttattattattattaagcttcttttctttggctgctgaaatttcttttcttcctggtaataatggttgcaagaaccccaccaaagcaaaggaaacttgtggtggctcctcttgatcctgtcctactcagagaaactgtaaagaaagtggaaaaatgtatggcaagattgcaagagttgcagtatacagta

SEQ ID NO: 251940 - DNA, 301 bp, Gossypium hirsutum
cccacgcgtccggtaaattgttcaattttattaatgatttcaacctcttgtcttattatgtgagaaatagaaaaattcctaaaagaacctaagtctaaaaacttaaaatatcctaaaaaataaaataaaataaagtaaagacaagatataccccttattttatttagttgcagacccctcatgattcgacccatcttttacttcatcgtccttgttttttcttaaatctcctcgtgcattcttcgacattcgagtccacgagaatataaagtctggaaattcagacacaaaagcaaatgga

SEQ ID NO: 251941 - DNA, 389 bp, Gossypium hirsutum
atggaagctattagaagtcaaacgtccagatgcattactgctatcttagtttaaagggggaaagaaaagggaagaagaaaggaaaagagaaatccaactcctttttcatgttttgcttttgaacgatgagggtttgtgtgacaggcattcctctttgctgaggtgatagcaatggcctgagattttagcaagctcctggagtctgacgcttttgcagcactctgatcgcaactaaacatttgtctttgttttattagaagctagcgaaacaaagcaggttgtcccacgtgtataaaatacagggcagctatttcgttttctttacggagaatgatccttttggcttgtaaggccctctggtttggacaaaaaaccccactggagacgag

SEQ ID NO: 251942 - DNA, 370 bp, Gossypium hirsutum
agagattgataattccacatttatcataactttgggtaccacataaatgatttgtactaaagaacgaatagtcatcttttaatgattatattcttgaaaacgttcagctacaaaatggaccactatatatatacacacatataacagttctttagctgaaaacaataagaaattaaaagctaacaaaaaaaaatcaatatatttaagatgatgtaaaggtcccatgtagaaaagaagtggagattcatgtgtaaatctatgagctgatggatgattacacactttaattagttttcagctaattaattaaaatttaatgttgttaatggttaggtttaggtatgtaatgagaaagtaggaccacgcccac

SEQ ID NO: 251943 - DNA, 301 bp, Gossypium hirsutum
gattcgcttcagttggaggatcgtcgggagaccattgaagattttgagtgggaggaagtggatggtagggttgatgagagggatgttttaagcgtgtttgttgatggtgatgattatatcaattcaacttcactttccattgtcgctttgattgcacctgaagatgcggcctagatcgagagcgcagctgggttggctactttggagtgtgaagttctctcccatgctaatcatttggaaacatcccccgaaatgtgtgagaacactgacccattttttgctgatcgtgatgactatcttg

SEQ ID NO: 251944 - DNA, 257 bp, Gossypium hirsutum
tcgatccatagtaaggccggtcttgccccggttttaatgattttcacgggtttgagatccttgtgacatgatctacctattgcgtccatttttttgagttatgatgaaagttcaagggttgaaccatgtgctaaaattgtgtattttgatgtttaatggtggagtatacatgtttatggttagagaaacaacttttgctaagtgatttttaatgacaatgcttaaaaggactaatttgtaaaagttataaaactttt

SEQ ID NO: 251945 - DNA, 344 bp, Gossypium hirsutum
ctatacccattttttttcacattttcactttcaaagttctttgttcaggttctttgttcctcttctgccgattgctaggctgcaatcattgggctctgatggttttgacttgaagtggattgaaggatttaatattggcagtgtcattgaggcaaaaattggagaggcaaaggatattggagtagttgtcagcttcgacaaatataacgatgttttaggctttatcacacactctcaattgatgcatttgctcggctatattatagaaggatgctgccaccattgacctcctgccagaaaagaatgttaccacctacttgtgttaattatttcggcccaatgca

SEQ ID NO: 251946 - DNA, 371 bp, Gossypium hirsutum
ctaatccctagattgaataaccgagacttttctctaattaccactctagggttgcattaactcgatctatggatccccttattaggtttcaccctaatccggcaaaatcttgtcaccctatttctaggcacgcaatcaactccgcttaattatgacaaaagtactcttagacagggtctattcctcctctgaataagagcatgtcttgaatcagtatcctgggatatcaaaacaagaattaagaacacataattaagaacaaattaaatatttatcatacgattcagaaaataataacaggattcgtcttaggttttattccccttaagtatttaagggatttagttcataactaaataagaaaacatctc

SEQ ID NO: 251947 - DNA, 208 bp, Gossypium hirsutum
acgggcacgcgtgggatgagccgatgctctctttcaccacccatttaactactaaaataacgtcggttatgcgggaatctcgtacactgtgtgccaacctgtggtccaaaccactactatctgatatgtgcgataacactctctttcaagccttaaatgggtctggtcacacaagttatcattcaagacgtatctacagaggcggtgc

SEQ ID NO: 251948 - DNA, 250 bp, Gossypium hirsutum
cacgcctcctagaggaggctaaagatgctgctatcctcggccaacctggaatgctggaccaaacaggggcactgaagctacatttggatgaacaaaaagcaatggagttacctacggcacgagcagacggtgcactacgaattaataaggatgctggcccaagagctgaagataaacgtggtattgaccacatggccatgactcagacatagtgcgtgcaaccatgcatgctgaacacagcaaagttgtg

SEQ ID NO: 251949 - DNA, 229 bp, Gossypium hirsutum
cccacgcgtccgataaacaattaaatattcacaaaatcatgcatattgtaacaccccaaacctggcccagacgttatggctgaatctgacgtgccacattaaagttaaaaatccatttttcattttagtgttttataaaccgacttttgttgagctaacagagtgaatggaagctaggcaccaggtaggaatctgtaacagaggaggtgagccatgaacgttgcttaag

SEQ ID NO: 251950 - DNA, 364 bp, Gossypium hirsutum
atgcaatacgcagcattaacttggatgatctacattgatagcatggattgtgataagcacattgtttccacttcttgatatgactgagatcatatgtatctgttttagactaaattgctgatactccatgtgcacgagcttgctgaaaacacttgtaatgcatgactcataaagctgaaagtagacatagtagcacccaaaatagacaaaaatgttgatcgatactgtgaagctgctcacttacaaatacaagctctggcacacttgattacatcagatcacaacagtaattttctgtgtgaccaaatgttgctaagagttgagcatcatggccacatttcacttgatattccactactgggac

SEQ ID NO: 251951 - DNA, 331 bp, Gossypium hirsutum
ctcgataatcatcataacattgttggatttcctccatttaatttcatgaaaaatagtacatgaatatatagatcaatataacatttaattaccaaataaacacgtctatttgcttataaacttacctcggacggtacaaaatgaaatcgggcagctagtcgacaactttcgtttttccccgatccaaatctgatttctttagttcttgatctaaaaatattcaaattaagctcattcaaatatattttcattcaatttagtctaaaagcacataaataggaaaattactattttacccctgacatttacaatttttacaatttaatcccta

SEQ ID NO: 251952 - DNA, 322 bp, Gossypium hirsutum
gtcttgccttaaaaatcgtttttgtgcataccgagctatcttgtgtgacggtgctgttttctaagttagagggggggcacatatattgtatcttatagccaaagctggttcggaacttgctgatgatcgcgccggtccgatctgtaatggtatcaagtacattataaaggcgcgaattcggaggaaaagattctatgatgtgaccgacataagtcttcattcgaatgcgaccacaaagttgcgtcaagatgtgcgtgtgagactgcattatacttatctgatgattgagtcttctgttcactatcaagatgtgctcgagtat

SEQ ID NO: 251953 - DNA, 353 bp, Gossypium hirsutum
atgggcgctgcgtttattctcagaacgatctttattgataagacctgagctggccttcctatcatggatgtggaatgcattggtgaccttacaaagttggtgggaacagatacttcccttaaacaggagtttaggagcagtgggtccccatcttttggactacctcataacgttaccttgtggtgtagcacagccactccccttcagtgggagacttcaatgagttggtcacgctctcttggccttacatgtggcagttgttttcttgtttgcaggtgcggccgggtgtgtggcaacattacttcatgatgcagccatgaaccctgcagaagtggtcaagcagaggatgcaga

SEQ ID NO: 251954 - DNA, 235 bp, Gossypium hirsutum
cacggacaaacctgcagatgtggcttaatgtaacagtgcagacttgaattcaaaggatgcatgccacataggcctcacattcggttcatagccgcgctaaaaccttgttgcacaaccactacttatgcctaggacatttgccataattaactccacccatgttcaagctcgtgcacataggattatgtcaggtggacacttacatattcctccaaaccccctggtttaaggtatc

SEQ ID NO: 251955 - DNA, 370 bp, Gossypium hirsutum
cccacgcgtccgaaaaatcacagaagagtttgtaagagatagcagagcaatagggtaactttgaacaagatgcggctgaagatttactatcacagctgctgatcatcaaaatcccatttcccgggttttttttgtgttttgggttgatgaaactggtgctgaagagcaaactgatactgacaggaatatggcagtgatgtttgaaattttaaggagaaagagacaagtgaaacttgaaagttttatcttgaatagaagttcatttgcacagactgcggagaatttattttctctttcattcttagttaaagatggaagagtcgaaatagtggtgcatggatctggttctcatattgtctcacctaaaaag

SEQ ID NO: 251956 - DNA, 367 bp, Gossypium hirsutum
ctttccttttgctttgctttgccccctctgttaatggagatcaatgccgtaaaccagacaaatacacccactttttacagcaaaacccagcaaaaccctttgatgggaagtgcattgcatgaagcttttcccactttccaaacaacccggggcaccaccaggaaaaggacagtctacttgaagtctcaaaacaaggattctttgagagaggaagaagaagaagaagaagaagacgacgatgatgatgatgatgagaggatagaagtaaaaagaaagattgtggcattgcaaaagatagttccaggaggtgaagcattaggggtggataagctgtttgaagaaactgctgggtatatattaactttgc

SEQ ID NO: 251957 - DNA, 291 bp, Gossypium hirsutum
  unsure (1)..(291): unsure at all n locations
ctttgatatgttgatacaaggaaattatgtaagttgagactattattaaactcaagtgcgatatgtcgagaaaatagatatatcaatgttgaatttatatcagatatgtgcaagtatactaacaatgctgctgtttgatgcttatacaagtgtcaaaactgttgattgaatggcaatatatttatttatatgatgcattgaatcggtaagtatttaaattttttttaatgatctgtgaatggnagtaatgctctgaaaccctggtcttgcaacggataccggttatgggtg

SEQ ID NO: 251958 - DNA, 358 bp, Gossypium hirsutum
cgctaacagatggaagtcacaatttttaggtttatttggcactttaataaggtataaataaggaaataaaagagaaaagaagcagtcgtcaaaggatagcacaaaaatgacttaaagaacatcattgaaaccgatttccaagcaattttccatcaagattcaagggtccaagcttatttccaagggagttaaaatggatttcatttattttagtggtcatattgtattttaggtgtttattcttgcaatgaaataattctcttaacatctagggaagatgaaccttaagatgaattctattgtttgatttctagttttatgcaataaatcttagttctttggtttcaattatgaatgc

SEQ ID NO: 251959 - DNA, 296 bp, Gossypium hirsutum
caagtcccaacttggacctaaggggcagtctggtatctacgcgcgtaatataagaccaaatgaaatgaccgagatctcgttattcgatccttccttccgacgaagcattgtctaaacaaatcacaagaacacttggcgagatatggcagcgagcagtgcaaccggagcctccccggaggcgcctaagatagtgtggaacgagacccaaaggaggttcgagactgaagacaagaaagcctacatagaatacgtgttaagacatgatggcaaagtgatggacatcatccacacttttg

SEQ ID NO: 251960 - DNA, 369 bp, Gossypium hirsutum
atcgtgtattatgttaacaatgtctgcagattttgtaggaatacaaaacatggccttttttataagaaaaaagggccaatgactagaataacacatggggcaatctgtgaatatgcattataagcagcatttcagaaaagtagttggtgaaataactttcaagtcaaaaagggatatggaaaggcacttatgagtaacctctatttttttaagccttgcttttaaattaaacagctacagccatttaaggcttgagggtaataaagcttgagagtaataatgttagcttagcaaaggtttagatgtattacttcatgcatgctaccatgatagtaatgcagctcttcgagtcatttctggtcattcaag

SEQ ID NO: 251961 - DNA, 330 bp, Gossypium hirsutum
atggagcgatggcagccgggggtctgagccgctcggaacgcaaagctgcggagcgggtccgaaggttgcgggaggagcagcagagggagcgcctccgccaggtgtcgcgcatcctgagaaaggcggcggcggagcgcagcgccgaggagggccggctgctggccgagagcgcggacctggtaacggagctgcagggccggagccggcggcgcgagggcctgaagcggcggcaggaggaggtgtgcgacgacccggaggagctgcgagggaaggtccgggagctggccagcgccgtccggaacgccaaatacttggtcgtctacacaggcg

SEQ ID NO: 251962 - DNA, 161 bp, Gossypium hirsutum
ataggagtttgcaggagcaaagctggaggattcggaggtccggtccgttgcctcaaaccagtcagagatggagttctcttcacttcaagacatgcccaaggagctggatccctctgctgggctccccttggactggctgcttgcttttgtgttctttgatg

SEQ ID NO: 251963 - DNA, 261 bp, Gossypium hirsutum
atcttttgatttaggcgctagatccattaataaagtatcagctcctaaaagataaaagaataatcctgtgtttccaccacagattaaatttacttcgtatgtgttcctgaaaagttagatgtcagttataataatataaactcagtctagcatgataaagtgaaaacatttgttctgtatgttctggcttccggcggggggctttgcatgtatcctatattaattttgcatgtatcctatagataatttggctcttcatat

SEQ ID NO: 251964 - DNA, 365 bp, Gossypium hirsutum
cggacgcgtgggcaccaacccacaggttgcttttgaaacaatggctgaaagaagaagaactcattctcaacagaatatcctttaaggagactcaaatcgactccgtccgtaaagaaatcacgcagctttacatcttcttcttcctcttccactccatttctcttctcctcctcttcaactcttcttcccgggactctcctgtgggtgcctgccacaggtcttggatcccatctctatgttctttactatgctccatggggatcatttgggctgttaggtataaaaccgatgtggaagggcacttggagaagctgctggaaagggaaaaagaggatgggaagctgttgggtaagtgtgtggaggag

SEQ ID NO: 251965 - DNA, 366 bp, Gossypium hirsutum
cggacgcgtgggcggacgcgtgggcggacgcgtgggcggacgcgtgggcggacgcgtgggattttttatgatttttataaaaaatttataatttttaataaattttaaatattttttatattttttattaaaatttaataatttttagactatgacatgtgatagctttaactggagaaagttaggggcggttaactttaacggtcaactgctaaagttaatgatcaaatgacattttgacagttcaagtacccaattgagtaaaaaaacagaggcttaatttcttcttcttcttcttcttttttaaaaaagtttgaagacatttttgatgtattttgaaagttcaagtactcaactgagtgcaaa

SEQ ID NO: 251966 - DNA, 374 bp, Gossypium hirsutum
tttgtctcgagacatatgccaaattgtctagagattgacctattgtgtattgagaccacaggctcaagtaattatatttatgttcttcttgtctcgagataagggcattatgtctcaagacgcactgatgtaggttgcattaaatgtgcgaaataaatactctcaacgactagaaaaactctctcaaacgtcaaaaactctctcaaacatctccaaacatccataaattaatgaaaaaaatataaatatcattcaaagacactcaaatggagacatgaaacaaatttacaaagatcaagacctaaaacccaatcaattctcgttgttgtccttatttacaaagacaacatcccactttttgtaaaatgatttaa

SEQ ID NO: 251967 - DNA, 252 bp, Gossypium hirsutum
agctgcaccgccttgctcatttgtgtgctgccgctctcagtcgtcaccacagccagccggccatcgttccgccgctgcacctgctccagaccgccactgccttctcacgctcctgctccaggccgccctgcctagctcgccggccatcgttccgccacttcccagcttgtcaccacatcctgtcgattacagcagcagcttgttgcaccgacagttgtagcctcccgaccctgcttctagggaaaagaaaac

SEQ ID NO: 251968 - DNA, 370 bp, Gossypium hirsutum
atcaaaggtccaaggttcacttcatatactgggcacactgaagggggttcttccaccttcttaaagagcatgtggctttctttccttggttcttcccattctccaggctctggctacagttgtaccaggctgacacccgccggaagatcctcagctatgaacgccagtaccgcacatcagcagaaagaatggctgagctgagactccaggaagacctgcacattcttaaagatgcccaggttgtaggaatgacaaccacaggtgagaaactgtggagaaatttacctgttgcatctaagttcacttctggtgccagattatctaaggacaaggtaagaggaactttcttggtaggtagaggaaaatacat

SEQ ID NO: 251969 - DNA, 386 bp, Gossypium hirsutum
atcctattttgagaaggacttttcatcaaaaccaatttaattatcttttcaagggcatgtaagtgtttagaaaaagtagtatttctgtatttgaaaatttcaaagttacagaatgaaattcaatgttttgttatgaaaatgagaagagtaaatagaagaactaaactttttctgatttcctaatgtttacaatcaaggcctgttaaggacagcacagaaattaattacaaccaatagtaacgtgcagctttgtaatattgattgaattgggactttaacttttgctttttattagcattacactggtgaaatggaaatggaattgagtaaagataaatagccactctcaatcagatgtgaagcacgattcagatatgaaagaatga

SEQ ID NO: 251970 - DNA, 313 bp, Gossypium hirsutum
  unsure (1)..(313): unsure at all n locations
cccacgcgtccgcaatggttaaaattcgggaggttgctactggtgaagttgttaggatcataggtgcgctaactcctgttagtgacgtgaatgcaacagaggtgattatcattagtgagactagtacaacaaaggtattggcaacgtctacgtccatgactaccttcactgcccttactcatgatttcttaaagaacttgggttcttttaggagtcagatgatgaggggaagtggacaaaaaatgcctctattagttctcaagggttaaagtccatcntantaaaaaacaccactggtaaaaaggacataatg

SEQ ID NO: 251971 - DNA, 367 bp, Gossypium hirsutum
atcggtgccgtcctttccatgaagtcaggggtggaccagacttgtgtgttctgttctgtgctgctttttgggtcttatcattgaatatcattgataactacttttaagagttccaaaatcttatatttataagtgggcagaagcaattctttgatatttgagtcacatagagacttttgaccgtttgctttctaaagccacacagtgaatggagagcttgccattgtctagttgctttcattttctttcaggtgttgagccagtgcaggttcaggaaactgtggaaaatcacttgaagagtttgctgatcaaacattttgacccccgcaaagcagattctatttttactgaagaaggagaggtgaga

SEQ ID NO: 251972 - DNA, 244 bp, Gossypium hirsutum
ggcttggaggcattaaaaagcctatttaaacaccctagaggaggactaaagaggagacagagagtagggagtaagaaattactccaagaaagtcgattgatctatctcaaaagccagattcatcatcaagattgaagatctctcctcaatttcccttcagaagttttgggttttctttatgttttgtattcattatttttctgagatgttttcctttttagttatgaactaaatcccctaaata

SEQ ID NO: 251973 - DNA, 361 bp, Gossypium hirsutum
  unsure (1)..(361): unsure at all n locations
atccaaatcccgcgacagcaagaggctcgtagcgacctgcggtgctaaggaacgcagtgctttcaaaattggcgtacgctgttcgcctctcctcccgggagtcttctacctcctcccagaagatgagggaagcacagtatgaagactttggagactcaaccgttagctccggactgctgtccctcagaccaggatccagctccggcccatccttctccccacgcttccccgatggataaaaatgcggaccctgaactgatgccaccgcctctcgaaagggaggatccgccccggttgtccccagatcctgtggctggctcagctgtgccccangagctaggggagggggacccagtttctc

SEQ ID NO: 251974 - DNA, 386 bp, Gossypium hirsutum
agcaatctcacgaccttctagtgcagcaccagttgggcaatcgatggcaccagccccacctgccagtacagttccagccatttcaaatcccgcttcagctggatttattgcttctcgggaagatgtgctaacaagagcggctgctcttggacgtggtgctgcgacaacagggttcaagaggttccttgctttaaccgaagctgccaaggaccgtaaagatggacctttcagaaagctcttcaatgcatgagtattgcaaatattcctgtgttatattctcttctctctttttggcatgtttcttttataaccttttttcttccccctccccccctctttttttctttcatacaattttgcattagaaaacaaaatgtattatgatg

SEQ ID NO: 251975 - DNA, 204 bp, Gossypium hirsutum
caagtattttcaagatgctctgggtttctgaagttgaaaatgcagagtacgtatggagctccagttgcatttgttgatttccaggatactgcttgttcaactggtgcaatcaactctctgcaagggacaattctatactcatcaccagccggagacggcatgcgcttggaatatgcgaaatcccggatgggattgcgaaggaaa

SEQ ID NO: 251976 - DNA, 287 bp, Gossypium hirsutum
gatggaacgctggacgcccgcatgcccgttccggaatcgcggacgagccacgcgacgcgtccgatcattgtactctttacctaccaagatcaagaaaccttaacaatcaacaactgcgaactccatttggattaaatgacccaaaacccattaaccaaccaagcaacctggaagcaaaaaaaatggacgctgattatggtattcccagaaaacgatctgatgttaagaaactactatctcaataccaaccacagctttctccttgcctcgagggaactactgtcaag

SEQ ID NO: 251977 - DNA, 388 bp, Gossypium hirsutum
gtgttttggtaaatctacaaaccaagggtatttcagtaattttgtaaaccaatggtatttctataatttttagaaagtcaagggtatttctgtaattttgtaaatcaggggtattttggtaattttacaaattgagggtatttcggtaatttcacaaaccagtggtattttggtaattttataaactaggggtattttggtaattctaccctataggggtatttcagtaatttcacaatcgagggtaaaatggtaattttgtaaatcgagggtaaaacagtaattctgtaaatcaagggtaaaaagtaattctataaatcgagggtactttggtaattttacaagtcgagggcatttctgtaattggtaaactaaaatattctaaaca

SEQ ID NO: 251978 - DNA, 278 bp, Gossypium hirsutum
gtttaggattagattcacagactttacttcctgtcggcatcacgaatacgcacgaattttggcctcatcaatttgtcctggaaaagggaaccataggcaatagtcaaagatggggtgtggtgtgtggtatggatgcaaacgaacgcacagttaaggtacaggggagaactatagctgtgaatcaaataaatggttttgatgggaagccggtggaggaaactgctagtgcttatgaacttgttgagcacccagactactcttactgttttggggatatc

SEQ ID NO: 251979 - DNA, 398 bp, Gossypium hirsutum
gaaatatctagatttctcttcatttctcttcaattccagcagctaaaaatgccataggagggttctataagctggtactccataatttttgcaccaagtgagttaatccttacctttttcttgtaatttttgtgtttctaagacttttacaactaggtcctactattaaattcattagtttttgatttcatggatgaaattgaaagtcgccatggtttaatgctgtaattttatgatgaaatagaatgaaattaaagctttaatttgtttatgagatgattttattaggtaatttcaatagaaattgatttttaggacctaattgtgaaaatgtttggaattaaagtctattgctgaaattttgattcctaaaagcgtgaagctagtttaaggtgata

SEQ ID NO: 251980 - DNA, 374 bp, Gossypium hirsutum
atcagtgctggacttcttgactgatcagttggtctgtctagatggtgatgcatatatatcatcaccgaactgtgaaactggcctacgcttaaaataacattaactggcgtgttataactggtgcttcctgctaacacagagctttaattacaactatgagccaccacgcctgtgcctacagtaatgattcacataggcaagtatgtactgggattcccattcatgtgaaatgccgggtttgggggacacctcttgctggaagacctggatagaggcctggagattaaccagcttttgccacatcaaacggaaatacggggtcggactgagtggctctctataggtactgaaagcttcagggcaactgatgcatg

SEQ ID NO: 251981 - DNA, 405 bp, Gossypium hirsutum
accccattagagccgcgtgggagggttggtttccaacatcaaatgatgactatggcctgctactcgaggacgatatcgaagaatatccttactactatctatggatcaaatatgctctcttagcctaccattatgaccctcaaatatcacttaccgagctctcatcgatctctctttacactcctcggatagttgaagtcgtgaaagaaaggccgaaatggaatccaaccgactttttcaaacgcattcacccaaacacaccgtatcttcaccagctaccttgtaattggggtgctgttttcttccccaaacattggagagaattctatgtgtatatgaacatgagggtgacaaaagatgccaaatcaaatccagttcaaatcccaaagtctagaacaaatggat

SEQ ID NO: 251982 - DNA, 398 bp, Gossypium hirsutum
tgttgctcagaaaaaaaatagcttgtgctgaatttacgattatgttgtaaaccttgataaaactatttgagttgcttataagctatcgattaaatattggtaatcaagtaccaaatccgtactaaggtgaagatatgagccgggaatgactagtatacctagacaattttgttacgatgaatgtgaaagagaatgtatatgtgataaggccgaatggccaatgtgatgaatgtgaaagtgtgtgtatgtgataaggccgaatggccaatgtgatgaatgtgaaagtgtatgtatgtgataaggccgaatgttcaatgtgatgaatgtgaaagtgtatgtatatgtgataaggccgaatggccaatgtgatgaatgtgaaagtgtatgtatatgtgata

SEQ ID NO: 251983 - DNA, 356 bp, Gossypium hirsutum
atgggagctgggggagttccatgccttcattgtctcggacctgcgggagctgcaggatcaggcgggccagagcatcctgctgctgcggatccagaacccctggggccggcggtgctggcaggggctctggagagaggggggtgaagggtggagccaggtagatgcagcggtaacgtctgagttcctgtcccagctccaggaaggggagttctgggtggaggaggaagagttcctcacggagtttgacgagatcaccattggctacccaatcacggaggccggccacctgcagagcctctacacagagaagctgctctgccacactcgggcgctgcctggggcctgggtcaaggggc

SEQ ID NO: 251984 - DNA, 263 bp, Gossypium hirsutum
gcggaaatattttgataacgatgctgttgtcttgaaggacatcaccagatgaatgcaatctgagtcttgtgtgttgggttgctacctaatcacatgtgcccttgggagctaaacgtagcagggaggatctaactgaatggatgtgagactggtacgactaagttctactgacaaacaaacttcattctggacagttggggaaggtagtcaaggcacgaagcacagcacgtgcaaaggcatggaggcatgacaacacagggtct

SEQ ID NO: 251985 - DNA, 378 bp, Gossypium hirsutum
cggacgcgtgggcaaaattgaaaagaaaataaaagagaaaatctcacttagggttcaacactctgaattggtgaattaggtatgcgttttgcttggttttttattatttctatgtttctgtaatcggaggttcgagtattatcgaacccatgcctcaatttctaatttttttggtgattttgaaatgtgccgtggatgaattcatgagctttgtgatgttatatgatgaaataagaaagtctgatgttgggtttacatgttttgtctttggatttttgatgaaattgagtaatttgggctaaattgtaaaaatgttattttgagggactaaaatgtgaaataaatgaaatttttggacttgtatgaaagctatgaaaa

SEQ ID NO: 251986 - DNA, 409 bp, Gossypium hirsutum
ccaaaacaacgctatgacggtggtcgagtctagattgaaacttaggaattcataggaaacaaatgacatgtcattaggtatttcatgtttcgggtgctggtcttgaatgttctaccagtggctaaggtcctgcatttgttatggatactctacaactcatgtgagtagcatcgtgtagcttacattccaacctacagctcgtgtgagcaatgatataaaggaaaggttacgattatatgtttaagcacattttgtgtgagctttcctgagtatccgatgatattataggtggttcaacgggaaagaaaagatattgaaatggtaagtttcgaaatggaattattcatatgcttataaaaagatgaatgaacaaatgatgtatgttcatacagaaatgacttatcttaag

SEQ ID NO: 251987 - DNA, 328 bp, Gossypium hirsutum
ggcacattttcttcaaacgaagaaagctcgatgaatacaccttttaatctttcgaatccatgcaccatctcaaatctgccagttgttgcaccttctgtagctaacatgtctaatttggaagcttcaattggttttgaatcacctgctggggcacactatggatccttcacccactcaacctcttgcaaggaaatttgtaaggaaggcagatcacagattgaattagagatgaatcatggtgggaatagctcttcatcaggcgtgtcttagccaaagcagaattcccccaagaaacagcatgtacaataataaaaccgagaccgaactc

SEQ ID NO: 251988 - DNA, 379 bp, Gossypium hirsutum
tttagatggttttctaccccctgaacaataaataggatgaggttttactgtaattggataaagtttactcttggacattatttcaatgctaaattaaggattctatggatgtcttcagttacttaaagagaaaataatgagagcatgaagcatatctgagaatatctttcgcctttaaggtgattcattcttgtctagagggaaaatttggttgatttgggaataaagtataattgagtattcaacaccatgaagataaatcttattttggaaatctactgaccgtaataccccaagcttgccctgaatactttgattggaattggaatatatcaaaaaaagttattatttttgttgtagttaggatactaaaagaata

SEQ ID NO: 251989 - DNA, 332 bp, Gossypium hirsutum
tatatgaaagatggtgcgccatgaagtaccggtgcgccgttcccggattgacccactcaaactggatggaagggacaccagaaccttgattaaataacatgacacgggcactgcttttagattaaaatgaatgtgatttaaacagagcttaaacgttgtttgaaaagttgttggtgattaaaataatttgaaggcgatcatttgaaatgagattaaatcgaaagtcattaaaagaccttgaactccatgacgcaaggagagttgcgtcatttaaagcctaattaatcttaacgcgtttgctaaacgcagacgaaaaattggaaagatttatt

SEQ ID NO: 251990 - DNA, 416 bp, Gossypium hirsutum
atctcaaaaaaaaagagtcaagggctgggaaatgatgcacggattgcattgtggtttcaggtctgccagggaaaaggaaggtctcatctttttgtatatacagatgtatatatctttatgtatatacatatatacatctatgtatataaaactgcctcagtttaaaaacactgagtacctacgatacctcaacactggagatctaagtggacactgagaaatttagaaaatgaaccacagttaagaaggaaatgaatcattaccggatcaaaagtcatctatgatgaagagtttcaaaatgagcagtatccgtccaccatgaacaacactgaacaaactcagtgtttttacagagtagctacagtacctcatactgtaggtatatgtatacataagggtatgtatacatagatgta

SEQ ID NO: 251991 - DNA, 427 bp, Gossypium hirsutum
atgggacacaacatggcggccggatgctaacgctctccttcgagggaccaccacggagatcctagtgcgggaccccgcctcagggaagtggaaagcagggggacacccttcctgcgtttttcttttccgtccagtgtcggcaaggggttgtcgccagcttccgcatccaagatgaagaactataaagcaattggcaaaatatgagagggaacgttttctgaagttatgaagatgcaaagcctgagagatggaaactactatgcatgtaaacaaatgaagcagcgctttgaaagtattgagcaagtcaacaacctacgagagatccaagcactgaggcgcctgaatccgcacccaaacattcttacgttgcatgaagtggtttttgacagaaaatctggttctcttgcactaatatgtgaacttatgg

SEQ ID NO: 251992 - DNA, 366 bp, Gossypium hirsutum
atggatattttgaggggtaatgatgagactattggatttgaggatattcttaatgatccatcacaaagtgaagtcatgggagagccacacttcatggtggaatataaactcggtttactgtagtagtgtgctgttcatggaaactgagggctgcatcttgtttatagtcgtctttgtactgtaatttgatgtacacaacattaaaagtactgacacctgagaatttctgctcaagtagcatcagtgatcatttaaaatttgggggcatctttggtttacagccatgtgacaattaaaagcaactttaggggatcatgttaaagctcttaaattattttaaagacaaaggctatggctttaatataa

SEQ ID NO: 251993 - DNA, 364 bp, Gossypium hirsutum
atcaacaagtttgcagtggccctgctagatgactcagtccgtgtgtataatgccagcagcaccatagtcccctccctgaagcaccggctgcagcgaaatgtggcggctctggcctggaaacctcttagtgcctctgtcttggctgtggcctgccagagctgcattctcatctggaccctggaccctacctccttgtatacccgaccctcttctggctgtgcccaagtgctgtctcaccctgggcatacacctgttactagcttggcctgggcccccagtggggggcggctgctctcagcttcacccgtggatgctgctatccgggtatgggatgtctcaacaaaaacctgtgtacccctttcct

SEQ ID NO: 251994 - DNA, 310 bp, Gossypium hirsutum
cggacgcctggtttgtctaaaaaaaaaagctatgtggcggtgaaaatggcgactctatattgctcagcggatgtttctgtctctactgtggaagcgcagtaactttgtaacgcgtctgaagagggggtacgaatccgccactgattatctacattttgggtctcagaaaatgggttcaatgcaatgatgatgccttgaacggattgtgtagctaatgtggaagatctgattaagtttttgtataaggaacttttgagtaaatattagcgaactgatgtagtgattactttgtacagtgcagagcgtgatg

SEQ ID NO: 251995 - DNA, 395 bp, Gossypium hirsutum
atcactgagccagctcagcgggcagggctgggagggagtgggacagattctgggagtgcagtggggaggagtcccggctgggctgagtgcacggagctgcttggtagtgccagagcccaagccccagagccctgctggagcggaggcagaccgaggcagcaggccccaccagcaggcgaagcagggagatgtcagactgctacacggagctggagaaggcggtcattgtcctggtggaaaacttctacaaatatgtgtctaagtacagcctggtgaagaacaagatcagcaagagcagcttccgcgagatgctccagaaagagctgaaccacatgctgtcggacacagggaaccggaaggctgcggataagctcatccagaacctggatgccaat

SEQ ID NO: 251996 - DNA, 294 bp, Gossypium hirsutum
ctctggaagaatccaaaaccggtcaaggatctggccgttccccccgcagtggctccgccgtgccggccaccgtgaacggtagccggaaatcgcctcgaggaagaattttctccccttttttttttgccttctatatatttatatttaatatatatgctcttttaaataaagggaagattgtgggtatgaacagattcaaaagaaaaaaaggagaaattggggtaaccttcgatttttgctcttcgttctgattttgctgcgaaattgaatttttctctttttccttttttaaaa

SEQ ID NO: 251997 - DNA, 435 bp, Gossypium hirsutum
caagaggacaaaaaagcacgctggtgcccggccggaatttccgggatgtgtcccaaaacctggggaccaacttgcctgagcttggacaaccttccctgactggcccccctaactctgaacatcctcagcctgctctggacccgaggtctaacgatttggcaagggctcctctgaagctcagcatgcccccatcagacggcttaccacccacaggaggctctgcagtgcacaggtggcctctgtccgggaggctgcctgccgagtactcctggccccctgaggatccttggctgatgatggctgctgcggctgcggaccgcctgggggaagcgctgcctgaagaactctcttacctctccagtgctgcggccctcgctccatgcagaggccctttgcctggagagtcttctcctgacgccacagacctctcacccg

SEQ ID NO: 251998 - DNA, 392 bp, Gossypium hirsutum
catacaattcagaaaataataacaagattcgtcttaggtttcattccccttaggtatttaggggctttagtccataactaaaaaggaaaacatctcagaagaataatgaatacaaaacataaagaaaacccaaaactcctgaagggaaattgaggggaaatcttcagtcttgatggtgaattcggctttccttgagcagttccctacctctttttctccgtctcccttttcttcctcctctagggtgtatttataggctttggaatgcctaagaaccctcaaaattggccttttccgaattggacacaacttgggctcgggagggacacgcccgtgtgacacgcccgtgtgacacgcccgtgtgcgattattttaagctgtgctcgaaccta

SEQ ID NO: 251999 - DNA, 386 bp, Gossypium hirsutum
  unsure (1)..(386): unsure at all n locations
attggttactggtttcatcgccaccacttaatggatgtttagtttagaaccattttgtctgctccctctggaagccttgggcagagcttactttgtaattgttggagaataactgctgaatttttagctgttttgagttgattcgcaccactgcaccacaacttaatatgaaaaaaactatttaacttatttattatcttgggaaaagtatacaatgaaaattttggtcatactggatttatcaaggatgatgaaaaacaatagatatatattcttttattatgttaaaatatgattgccattattaatcggcaaaatgtggaatgtatgttcttttcacagaaatatatgccttttgtgactttaattggntattttattggaaa

SEQ ID NO: 252000 - DNA, 322 bp, Gossypium hirsutum
atcaatactacaacaaacttcaaggcaagtttggctgaaaacagttgacaacaaagggccccctataaacttatccctcaaattgtaagtgatatgaaacacttgtcatatctttggccaaatcagaagatactcaccctgcttcaagtcagcttcagaaatgttttaaaagggactttcgctctggaactcaaaatcaatttttaaagaatatggctcttaataaaaaaaaaaaaaactggataatattatctgtaatacttcagtcctttacaagccaaatacatgtgtcaatgttcctagtatttcaaggaagcaatta

SEQ ID NO: 252001 - DNA, 255 bp, Gossypium hirsutum
  unsure (1)..(255): unsure at all n locations
attctgtggaagggggccgggagcaaaccctcagcgctctgtcgagcccccctcattgggtttccacgtgctcacgcgcagccgatgactttaccgagccccgcgcgcagaataagaaacgtgttgccgttattacagcnaaacgtgatagatcggatatatatagattgttacctcctaagccggcatggaaccttgctctctcagaaaagacaaaaacatcaccgttgtgtgtctaacaacatgaacaaatcc

SEQ ID NO: 252002 - DNA, 426 bp, Gossypium hirsutum
atgtggccttgcgggcggggaagaagagttttctccgcgctctcagccgctccttcgtctgccgcggctgtcaactcgctccggagcgcggcgccgagcgcagggatacggcgcccagcggcgtatcaagattctgccctccaagaaagtcttgccatgactggataggacccccagacaaatattcaaaccttcgacctgttcacttttacatacctgaaaatgaatcgccatcggaacaaaagcttagaaaattaagacaagaaacacaagaatggaatcaacagttctgggcaaaccagaatttgacttttagtaaggaaaaagaagaatttattcacttgagactaaaaactaaaggcctgggcctgagaactgaatcaagtcagaaggcaacattgaatgcagaagaaatggcagactttt

SEQ ID NO: 252003 - DNA, 324 bp, Gossypium hirsutum
aaaaataataactttttaagttttagatgatggtgtgccataatgtgttatatcatcactttttttttatgaaattcaaatttaacaataaaaaaaatgttaaatttaatatcaaaatggataaaaaaaaagtacaataccaaaataaactatgttttatgctttttctcgaccaccgttttggcttttgattggctttgcgagacgtacctaagctctcttcagagttgagaacaaaacttcaaaaatgtgttgctttttaacaacataaaaaatgataatacttttacattattagcacgatatactctaataacacttatc

SEQ ID NO: 252004 - DNA, 352 bp, Gossypium hirsutum
  unsure (1)..(352): unsure at all n locations
cacatatgaagatcttatgcgttgtatgaggtatgccaaagctgtcaaggtttgcatctacagtgcctattttgaggcaaacatgaagcatgaaggctataaaaggttgaagaaagaaagccaaagctagtattgattntagagaggaacacgaagatgaaaatagaaatatgagccagcttgagtgaaatctgtggtaaaatgttgtgtgtaattaacaaacgttgatgaattgtgtgtctattttgcaatgtttgggtcagtttgaatttccgattatcatatgtaatgagtgctaatgatcaaagtttggttttggtttccttctttgataaaaaaaccttatgttttt

SEQ ID NO: 252005 - DNA, 285 bp, Gossypium hirsutum
ataaaaaaaaaaaaaaaatagggacacctatcgagtgctgaccctgccagtggggtggccacattttgcatacgtaatagtgaaaattactcagtgcttctctgaaatttaacattaactgggaatgctgaatttttgtggtctgaatttgacaatcctgtctacttggcacctgttcaagccgcgtacgtgtattgacttatttaatcctcaaagcagttctgtgagttaggtgctattactgcccacgttgaggccccaagagtaacctgcccaagatcacac

SEQ ID NO: 252006 - DNA, 375 bp, Gossypium hirsutum
atgggaaactttgggtctcactgttgcctggctggagcactttggtttatagctggaatactgagttcagttcagaaggcaggaaagacagtcacaccgacgtgtcctgaaggtgtaggctctccacttaggcgcacaagctgatggccgcagccagcaggccccggtgacgagacacttccagcccccatggtggggacgcctctcagtgccagtcccgctactgctgaggtagcctggtgttcttgccttcttggaaaatactgctcacctggtatctgtatgttaatgtttcttgctgagttacggttttgataaagaggctctcatttcttgcctcttgtattttcagtcctttcaatatgtccacctgga

SEQ ID NO: 252007 - DNA, 372 bp, Gossypium hirsutum
gtttattcaacgcttcagcaccatttcaaattctaattaaaagaccaggagaaagaaaaatcagctacgccacacttatggcaaggcttatcagaaattcgctgatgaaggcattgattcttattttctttgcatcagtagccaccgccacaggcgatgccccattcatcgtcgctcacaagaaggcatcgttgaccagactcaaatcaggttcagaacgcgtttctgtctccatcgacatctacaatcaaggcttttcgacagcatatgatgtgagtctcctcgatgatagctggcctcaagatatgtttgatattgtcagtggcaacacttcacggtcatgggaaagacttgatgctggtggtcttctat

SEQ ID NO: 252008 - DNA, 396 bp, Gossypium hirsutum
atcttttcagtttctgtacactgtgtgactttgaagtttgacaattaaattgactcccaacttaaggagaaatagggaaagtgatttgcaaggagaggtggccaataccagaacaccccgacagcagggatatctgccctgtcaggctcactagcttgtgtgtgtgttttcagaacaagcgcgtgagtatcaataaagatgagctgaagtcaacgtcgaaagctgttgaaactgttcacaatttgtgttgcaacgagaacaaaggggcctctgaactagtggcagaattgagcacactttatcagtgtattaggtaagtaaaacgaaacttagttcttcaatcagtcctttggggaggaggtggtttgagtttcatattgaaagctcaaataacaa

SEQ ID NO: 252009 - DNA, 368 bp, Gossypium hirsutum
aaatctgtcattttatttttataggggattgtcctttgcatggtacctaccaaaagttcaaaaccaaaaaaagaataaaaaagaaaggaaaaaagctttgtaaggtgataatgattaatgaggtagaatgagagccataatgacttgaatgggtaggcagagaggattgtgcctctactttcacaaaggatgggagcaataaataccttgtttttgaaatttggggaaaaagtgtatataaatcataatctagaaacctctttgttatgcatgccataaatgataaaaccatggcacatcaaataacaggcagttaaaaaaactatctgtttgctttatcttttcacacttttgatgttaataatcaa

SEQ ID NO: 252010 - DNA, 258 bp, Gossypium hirsutum
aatagcttgtgtattcttgtgtgcttgagcattagcagctacttttagtttaagggaaaaaggtgccatttcctatatgggacttttggttgtataagtgtttgtggattgatggatccatatactgataagcttaatgaaggaaaaatagaaattggctccttatcttggccttatactaaaaaaaaaaaaaaaaagctaagaaaaataaaaaaaatttaatttgaaacaagaacaaagagacatatcaaattaatg

SEQ ID NO: 252011 - DNA, 369 bp, Gossypium hirsutum
tgtaaatattgtacaagattgcccttttttttgctttgcatgaaacattattcaagacgagcaatggattaagtttgggggtgtgtaagctttaaactatatagatttttttatagttgtttatagaacccttttacttagaatttttgttaatctcgagtgtttgatatcaaaatttttttgttaatctcgggtgattttaattcatattaaaaaattagacataaattaagtgaagttttcaattttatacaaataagtattaatttggcataattttattattttatgttggatgttaatttttactcaaatattccagatggactgttgaattaataaagaatgggagctgaataatatcacaca

SEQ ID NO: 252012 - DNA, 314 bp, Gossypium hirsutum
cccacgcgtccgaaaaaaaagaataatccctaaaaaccatgacaaagcccaaactaaaaatatatcctttacattttccaaaaataaattctgccgaaccctcacggcactttgtataaagacaactttcatgggcggcggctccttctgatgaatcctttcttccgatgggcatcaatggcattcttttttttttttttgtcccaccctaaattcatttgccggccgtttttaccccagagacgcttattacacctccctgctctcaccttattgatttccttggaaatgcctttcttctcatcttccttggc

SEQ ID NO: 252013 - DNA, 161 bp, Gossypium hirsutum
ttgattcacctgtccaactttttgtggacactgatgtctattctagaaatcgctgctttcgcctggctctatcatataaggcaggaaagaattcctttctcttacctactgggcgtttcaaatgtaaggacattggtgagggaggacatgttcatgacatt

SEQ ID NO: 252014 - DNA, 286 bp, Gossypium hirsutum
accggcgacaagagctaacttcagcactcgatttttcgctgaccacctcaacttgggactgcctgtggctactgtctatttcaacgcccaaaaagagcccgtcagccgaaggcgttgaatctcccacgcacacttctcactctacatatatataaaaaatatataaatataaaactggttcgactctttaactttataaattagctttggccaagtgtagtcctagtacgtacgtttgagaagtgtatgtctctttgttgggtttatatttgatgctaagttatcg

SEQ ID NO: 252015 - DNA, 363 bp, Gossypium hirsutum
ggaaagtaccaacactctctatataaagaaccaattaccaaaactcaaatgttttcctttaacatcaccaaatttctttatcttttctcattgttgtaaggtcgttgtttatgattagcatggagaacagaggttttaatgttagatttatggtacttctgggtttatgttgtcttctgatttcttgtgctgctgttcctgctataagtgagggaaatctcaagtcaaataaggagctactcccttcttccgcccgaaatttacttacccaggatgtgaaaaaatcaagtgaagctgaggaaatgtttggggaatatttaggacatgaattcaatgaagaaaggatgctaatggaaacaacag

SEQ ID NO: 252016 - DNA, 373 bp, Gossypium hirsutum
cggacgcgtgggcaaaccttcaaccttcctcccctgaaaacttcctagtctggttcctttctcatctcatatcggccttgctcctcagcgtattccggaacacccatatccaggtatatttcttctcctctccttagcgtttctgttgctagaatatgtgctagactatttgccgatcttggtgcatgttggaatcttatcttatcaagcccgtatatttgctgttggatatcataaatgtatgttcctatcattgatctatcttgaccctttatattgcatttcttgatgactgcgagggaatctccttcaaaaatcagaaactgccatcccttcccggttcctatttggactgctttccggcaggctattg

SEQ ID NO: 252017 - DNA, 392 bp, Gossypium hirsutum
atggacacaatgacagaagtactctccacagtaaagcagaccttccacaacagtcactctgtgtcctaaaattttccaacatagatgtgatttatataactttgttgatacataaattgtcttggggtttacggaaattaactattatgtttgcactaagatttgctgggagtggtaggtggacatatctatatatcaataaggactaaccgccttttttgtacataggagattgataatactgtatttgttttaaccccacagtgttttactccactttcaaaaagatcaatttggcactttttttcatttttttaatggaaataagatttggtctctcattttaggttaaatgataactagaaagattaaactagacagatagtttatgt

SEQ ID NO: 252018 - DNA, 384 bp, Gossypium hirsutum
atcttaaaaaacaagcatacaaatcccatttttcctcctcacttttagtatttgcatacaacaatatattattttcctattttgtgagatgcctttgtacatattgtgactattttgtgcggtacttgttttattttgacttgtatttactactcccacatagggaatcagcagtccccactgtattatcttatcctcattcccttcccatttatttttatcttacacttcgcctcctttggtgtttagcattctacatactatttattcagcatctgtttatttaatgccctctgcatagtaggtactgggaatgtagcaattagcaagatagatacagccctgacctgcacaatttactgtctgtctggagctaatgtctat

SEQ ID NO: 252019 - DNA, 342 bp, Gossypium hirsutum
attgtgcgagatgtcataaaacaagctcaaaatgaaaagagctttttcaaaaggaaaaccgtcctttttattgatgagattcatcggttcaataaatctcagcaggtcaacgctgctcttctgagccgctgtcgagtgattgttcttgagaagcttccagtagaggcaatggtgactattttaatgcgagcgatcaactccctgggaatccacgtcctagactctagccgtcccactgaccctctgagccacagcagcaacagcagctcagagccggccatgttcatagaggataaagcagtagacaccctggcttacctcagtgacggtgacgcccgagct

SEQ ID NO: 252020 - DNA, 367 bp, Gossypium hirsutum
atgaggaaagttaaaaagatgagcaatagagtagaaaatatcttttaaactagttggcctagattgtattaataactacttgagatgtttcaaagataggaagctattacttggacagagaacttgaaataagtggacccatgtataaaacctttgacttaaacattgatatttcagaatgtgttaaatagattaagacatagtaagttaaccctacatgttagaaagatggcgactgttaacaaaggctgtaacagattaagtactattttatatccagaaagtcttctctatgtagagaagtcagagagactagatgctttcactagggaatatcttcccacccagccatcacaagtgtggacaa

SEQ ID NO: 252021 - DNA, 368 bp, Gossypium hirsutum
aaacggtaaaagcatcaaatcggctggaaaacaggattctcggattattagagggcatctcttacacactttatcaacaagtacgtattgacccaaagggtttgacactcgaattacgaactcagtagactcgacaggtagagtcttactggatgctaaggtttcacatacgtatgaatgagtagagccagggtcaatcaatgcaatcacactagtatcaaagagagtgaaagtaccagtgataacatcaggggaggatgcctcctctcgtgcgcgaatggcatatgctctagcaggagtacgggtctcggttcgaatagccgtatcagaggcccctctctgactaccacctctacctcctgaaattc

SEQ ID NO: 252022 - DNA, 331 bp, Gossypium hirsutum
atgcaagattgagtccacatttttcaaggacccctttggcttctgttgaacggattggtcgggagcccctggaaggctgtggcagcaatgaagtcaagaaataataagcactttaattacagtggtgggacttcacttttccttgctcttcccattgaaatacagcaaaataccctgcacataactcatcaggcaacgaggaaaggagcttgagagttgacagcaagacagatggtctagagacctctggactggaaaaatagcaaggtggtgggtcccctggggtttctttttctctcgggtgttcctacactagtccccaaggaaggct

SEQ ID NO: 252023 - DNA, 342 bp, Gossypium hirsutum
cccacgcgtccgaaagaaaaccatctaagttgaaggcttacatctttctccaaagaggctcgttggttcactgaaatattcttgttgccataagcagagcaatcatgaagaggacttcgagtcctacaagcccttgttgataatggagattcctgaaactttttcacatttgaaaaacagtaaaagggtaaataaatagaaaaagaagtatgcataattctcatactcggtcaacactgcaaaacaagggctatttttattacctcaatccctttatataacatgagatggccctaagttggaattggtcaaaaaatggattcctaccatgaccttaatttg

SEQ ID NO: 252024 - DNA, 393 bp, Gossypium hirsutum
ataaaaaaaaaaaaaaaatccagaaagaaagaggaggcaaagacagagcaaggcatgtggtgcttgtggggaggtgggcaacacaggaagagcatgggggaggaactgggcagagaggaggcattcccctccccctgcccttctcattgttcccaacccccggtccgttctcttcagcccccctcaacatcgttcgccagagaggctggataccgggacagggtgtgtggaggagagtgagggaatgatcatgactgcacctcctgctcacttttacactcctgttctcacttcctgcctctggcagaaaacagccctgcccctctggcttatctcagcaaagagcagtgcccatcccaactcaaagggcaatgggacagatcccagaagccc

SEQ ID NO: 252025 - DNA, 354 bp, Gossypium hirsutum
gtctaatttaatttatgtttaattagtgtgtctaaattatattaatgtttgttcagctaaattttatgtgatttaattttggttcatgtgtttttgtaggtgagttgaatttggagagtaatgaaacaaggttcatgcatgataggttcaatgtatgggacggtgcatgtaaggcctctttcaatgaatggtggctgatccatttggctccccaaggcacctatttggccaaaaggtgtccagcaacttaaagcacaagcttggccgatcgtattcccaaggcagcatctaagccattcacacctcaatttgaccaatcagctcctatacatgtatgggtggattcatgaacgt

SEQ ID NO: 252026 - DNA, 369 bp, Gossypium hirsutum
ggtatatttaactcctcttaaatctttaaatctattctttccatgccggttcggttttagttcgactggcatgaacattgttgcttatacaagagaactgaccattcgaatgcattaaagtgcaatatcttcctataaataaattacaatgattagactgttaacaaatccatgttatccataaaaaaaacatctacttctagaatgagaattctagattgacagaatgctaaataatgaggtacatttgtacaagatatatatgctgaacaaaaaaaactattatattcttttgacatacacaaaactacaaggcaattgagtggccaattcaaaaatagatgaacattgctagaggatggctggatg

SEQ ID NO: 252027 - DNA, 380 bp, Gossypium hirsutum
atggaggaagccggcagccaggagcggcagcggcagcagcgtccggagcagccgcagccttctggaagctccaggcggtctttctgccgagcctcggtcccggcccccatcctccccgccccatcggttgttgtctgggcggatttaaacagtcaagtaaaatcaagctgggtaatcatggcagaaggtggattcgatccctgtgaatgtgtttgctctcatgaacatgcaatgggaagactgatcaatctggtgttggaactgaccaaaaaagtgcagagacatggtcaatcctgaccatttaacttcccggtggttctttaacatcggggtcttcttgggtggtcctcctttaacaacctaaaaaggccctttttttc

SEQ ID NO: 252028 - DNA, 317 bp, Gossypium hirsutum
atcaacggaaatcaaagatgtgtgtagtcaaagagctttccatttttgttctctttgttttgatttttggaaatgtaattcaagcccaaaattcaccttttccatctcctaaatccactccaaccacaactcctccctccaaatctacttcatcatcgcctcctgcgagttccccaacaacatcatcgccgtctgcagcatctccgactactcctcctcctccacagatccaaccaccggctgcgactccgccttcttcttctagcccatcgatttctcccccaactgcttctcctccggctttcactccttcaagc

SEQ ID NO: 252029 - DNA, 371 bp, Gossypium hirsutum
taaccattgaaagcagctatgcataattgaattggtacattaaaaatctatcacacaacctgtttaagtggagcctctctagtttaggtcacagctaatacaattttaaggcttatagttaaggcaacagctggtggctaatgtttattgcttattggctttgaatgcatagaggtaagctatctatagtagattacttgtataaaacaagatatttgaagaaattttgaacccaatttaaaaaaaaaaatcactaataatttcactcgataagatcactatcatcaattatttacattagaggtaaatctgaagaggatagataggagtgttggcctcccaaataaacttgtattttaatctctaaaaga

SEQ ID NO: 252030 - DNA, 384 bp, Gossypium hirsutum
tcaccttgacttctttgttacaatgctaacatctttttttttgtgcagttatccatggttattaagcagggtggaagttcagtattttgtcatttaaaaagattagttatataatgtctgcttccagccagtgagaaacatctagccatacctttcttatgcaagccattcagttatcaggactgtgaattaacactgtatgaataaatttctgtacaccttattgtttggccagaaggccaccaagtgtacttatatgtgatccttaaattttaaagtagctgtaatcattaaatatttctaaacttttcttaaaccactaaaattaagctcttactacttagtcaactatcctcagctgtattcgtactcaattgtcagtat

SEQ ID NO: 252031 - DNA, 281 bp, Gossypium hirsutum
atcgcgcctcagaggccggtgaggcgccggcggccacgccgcggagggcgcgggccgagcagagccgggcgttgaggcccgcgcgcgcatggaggcgttgccggcaggcccctgagggcagcggggagacacgacccggcgacctcgcgcattcctcgagccgccacgcgctctcgccaccgggcggcgacgggccgcggagccggagcggccatggcgacgggcggtcagcagaaggagaacacgcttgttcaccttttcgccggcgggtgtggaggcac

SEQ ID NO: 252032 - DNA, 370 bp, Gossypium hirsutum
cccacgcgtccgacaaaatacaatgggaaatgttactactgcaagaagtgaagtaataatggaatgagcagagagttgtcagcatctacgcccctagaagatataatgtagctctcatttctcctgctgtcggattggtgttccataggataggagacaagacaaaattagacccatgtgaatgccagttaaacgacctttgctgcaataaaagactcaatttttcaaagagctggtactgggaatgtcatgactgctacagagggttggttgtttgtttttttggaccactagtgaacatgttcttagacgtatcaaaataatttcattatcaaaagcctatttcttttatggtcattaaaacctggtt

SEQ ID NO: 252033 - DNA, 365 bp, Gossypium hirsutum
atgccagggtcaggcctcagggcgtctgtcggcacggggcgtccactggcgcggggagacctgcccgctgccctgcaaaggccccaggagcagttcttcctggaccccctcttggtttgcaggagcctgggggcagctctgactgagacagggagagagagaacacaggtgaggtcccgccagggaacacctcgcagagccgtgcgtccctgtaccgtctccctccctcggacacaagccaaggccccacggaggacagacagtggcccccgcgtgccctctgacctgatcaggcccagtgtgagcaggaagcaaactccactgacctccactgagcggagagcctggcgccttctttctttccc

SEQ ID NO: 252034 - DNA, 391 bp, Gossypium hirsutum
atgcttgcttcaatattttccttaatttaatatgaggaaattcacagtttgctctggcctcttaattctttttaagtgaaacgaaattctttgtgcagagaaagaataagaatgctgataggcgaatgagacagaggtatgtatacacacaattacatatgttatcataatgtgtatatattacatatcacaatcaaataagcagtgcagtgatatttctaaagacacagaagtatctacagtgagaagtcatcctcccattcactcctgtctgcctagccagagatcctttctccagaaacaaccactttaaacagtttcttgtatagctttccggacataatctacttatatttaaataattatgtaaatattcattaaaacccacaaa

SEQ ID NO: 252035 - DNA, 369 bp, Gossypium hirsutum
atatttttttatctaaaatgaaaatatttctcatactgtttattaatacaaaaccatcggattttattttttaaaaataaataagattgatttactcatttcaagaaatgcattaatttaatggaaatgagtgaaggattcacgaccatacattaaactggaaaattaccttatacacatgaagattgtttaatatcatttcatgaatgcaacaataaaatcaaatcaaatcaaataagcttaaattaacctcaaatacaagaaaattggtcatgaattccaaaatatcataacacatacacaaagttgtttataggtcggatatccgttcaagtttgaaggcttgtttcaaaaatgaaaggatttaaa

SEQ ID NO: 252036 - DNA, 361 bp, Gossypium hirsutum
cccacgcgtccgccaagttaggcccacctattctgaaatctcactaatgctatatcggttacccacaatttgttcgtaacgaaaaacatggtgggtattttttccagattttctgttggcaggtctgcccatcgacgctccaagagtgcctttgtggaaaccaatgttatgccccaaaatgccgatgtagttgatgctgctacagctaccgcccatggaattgaagtagcagttgagttcaagcctgtcgaatgtccaaccgagcctttggacaatgaccgaccaattcagtgccccctacctgaacctttaattctaaacgatggaaggatctggaaggagcgagtttcggctaatgtaa

SEQ ID NO: 252037 - DNA, 386 bp, Gossypium hirsutum
attgcaactccaggacccaaataaatgataatgatttcccaagttctccccctaggaaacctctggagccatttactggatacccatatactagggaaatacaaacactcaaatatttcaaggacccttggaatctggatccaagttgcctatggtacgcagatcatggaaagtcatcataaaatacctgttaaaataggaagttagggcctcaaggttataaatgtagtcttggcccacatgaacttattgcaatacagtatttgtttcaaattaaaagctaaggtttgtttgaagacaaataccttgcttatttttctgtccatccccttgggagtatgttgaggcataagatgtgctaaataagcttcttttataaaaacaat

SEQ ID NO: 252038 - DNA, 279 bp, Gossypium hirsutum
aagtgagccttatatctctataaccgtacataagtctagtttcgtttaaaataggagatgagccttagagttatatattaagagttattaatttttgaatgagaaaaggttagaatgctaaggtagcagactgacacatctcattagttaatattttagctagaatgataagcaagttgaaacgagtatgagactcaaatgtaatgtcatggttgtatctttgtgactatatgtttgatgttttgtttacgctcagacttcgggctataacctaactag

SEQ ID NO: 252039 - DNA, 365 bp, Gossypium hirsutum
atcgcgtgtgtctgtgcgaggcctgcgccgcccaggagcaccgcggccacgagctggtgccgctggagcaggagcgcgcgcttcaggaggctgagcagccgaaagtcttgagcgccgtggaggaccgcatggacgaactgggtgctggcattgcacagtccaggcgcacagtggccctcatcaagagtgcagccgtggcggagcgggagagggtgagccggctgtttgcagaggctgcggctgccctgcagggctttcagacccaagtgctggccttcatcgaggagggggaagctgctatgctgggccgctcccagggtgacctgcggggacaggaggaacagcgcagcccgctgagccgagcc

SEQ ID NO: 252040 - DNA, 346 bp, Gossypium hirsutum
gcttcgctgccgtctttcaactctatatctccggtctccgtgtcggaaatgtcaatatcatcagccccaagcttcaacctctcaactttctccaatggcggagctaactatacaactacgaataaggtgatagggactagagctttcgcttgtcttaaatatattaatagcatcgaatctcggttgaaattaacttgaccagtatcagttcatacgcacgttttaactttcacgaaccgcgacttttcggttcgctgcgttaggccggattctaccgggaacacaaataggggttcactagaaagggaaaaaggtaattttgatgatgaatctaaggttgcagaga

SEQ ID NO: 252041 - DNA, 240 bp, Gossypium hirsutum
atggatgagtgagtatctgcctcccttatgggcgactgcgtaacattgtttggtcgtgaataacctggactatgacacctttagactggccgaggcttcaacgatgtcgggtgagacagaaatagggtctaccccagaacccctctatggggaatgtggcgagagccgtattcaggctactggctcccgaagctgcagacctatgcaggattcaaccggagacctcaatggctacgtgga

SEQ ID NO: 252042 - DNA, 380 bp, Gossypium hirsutum
ataaacaatggaggtaaataccttcagtagggaaatgtatatatataatttcatatgcataggacgaagtaaaaacatagttctatgattgaggtgattggatctcaataatgttgaacaaaatgttggcaaatttttactggatcaaagtcctttcatgtttaaattttccagtgaatgattggagtacttgctaattaaagggatttaaatgcttttcatgtcatactttaaagtgaagactattgatattctgttacaaaaatatagaaatctcttaatcccacccagatgaagaattatcccttttccccatggagaaagtctataaacttgcccacctgcaagtctcaatttattttcaaaaagagcctttgcat

SEQ ID NO: 252043 - DNA, 346 bp, Gossypium hirsutum
tgcacattatgtattctctttacagaacattgattgtttttttttctgtcatgtgtttattttgtaataaacagaaatatttatatttgacatatgattatttatattattataatattttaattaagtggcatcaacttgattaaagtaatcatataaaattaaaatatatacatatttttataatttttttaaataattaatattttaatgatttgtctgtttcctaaaatagtatattttttttgctcataaatgagtgggatgagatttaatgtctaaaattatatagcatcattgaattgagtcatgtgagttcatttacgtaaaattatttaaaaataaa

SEQ ID NO: 252044 - DNA, 220 bp, Gossypium hirsutum
atccttgctgggcgtgccctgacctcccggtaccgtgtgccgcactgtgggccgggacgcctggtgctgccggctgggtgtgagccctgaggagctgagggtggctgtgacttggaggacgagtgggagctcaccaggagggtgtggagccggctgtttcatatcaggagcaacacggggctcagaaggcaggcacacttgctgtcccttcagagccatg

SEQ ID NO: 252045 - DNA, 382 bp, Gossypium hirsutum
atgtgaacgaagattcgaaaagccaattgaagaaaagggtgaaggaggcgaattttcagttgatcgaccgattattgaccgacctattcgaggtcgtggtggtcttggaagaggtcgagggggccgtggacgtggaatgggccgaggagatggatttgattctcgtggcaaacgtgaatttgatacggcatagtggaagtgatagatctggcctgaagcactaggacaaacgtggaggtagcggatctcacaactggggaactgtcaaagatgaattaactgacttggatcaatcaaatgtgactgaggaaacacctgcaggtgaagaacattatccagtggcagacactgaaaataaggagaatgaagttgaagaggtaaa

SEQ ID NO: 252046 - DNA, 317 bp, Gossypium hirsutum
gaattcagagacttaactagtgaaccaacaggatcattcttgacacagatttatactaaattaaatttaactatgtaattcatggattgaggtttgttttaaaataacaaaactactaacgatgtgactcgaactcttgacctcgatcccaaaagcaaagctcagaacctcagatacagagatttaattacttcaaaatgacacaaggtaacattcaaaattttgggacgttacagtgaatcattggtcgagtgaaataaagaaaggaggccggaaagcaatggttcggttgaattatttaaaggacttggctttct

SEQ ID NO: 252047 - DNA, 381 bp, Gossypium hirsutum
ataaggttggtaagggaggtgagtggtgtgactcttactccttaggtgcccagaatttaccatcatctctgaaggagttacagggaagtggtctccccaattgtcccctccctccagtattgcctcctctcactttagcatatattaattagcaggttgggctagagaaatcagctgctatgcgggttgattattattattatttttaatccttttccttatttgccttctactccccttaatctaatctaaaagctctgttccatgcaactttatccctctcttccccttcccttatatattgaggctatggggtaggagaaaagtgcacaacccaccaccccctttactcgtgcattaaaatttctcatttaccctttc

SEQ ID NO: 252048 - DNA, 256 bp, Gossypium hirsutum
gcgattcctcggaaccaatatgaaactgaccctaagcatcaagacaagtcctaagaaatgtaatacgaggatacaagagcaagtatgagtggtaaaaggcatacagtgcgtaagggcatattagagtgctggaaaaaagccttaaaacgagcggagcatgagtgtgagtgcacattcagtatttctttccaagtgaattagtgcagcttgtcttgaggtttgcaaatactatgttactaactgccgaaagaaacat

SEQ ID NO: 252049 - DNA, 364 bp, Gossypium hirsutum
ggcagttttcttgggcaatccaactggaaaaagggaatgtgctggaactggcgttttcttgcctcgccgtattggtgcaccttctgaaccccgcaagaagccagcttgtcctactgttctgcttccagctagagtggttcaggccttgaacttaaatcttgatgaacttggtgctcaaccccagcttaatcctcggttgaacgctaatgtcaccgccgaaattgatgctgctttgaaacttggaagtggttggaaccagaagcaggggaatttcaggcaacatcaaggaataaaccatgaagttgcgttacctcaggaatggacatattgagcagctttgggtggttgggttttcatgatctct
